United States Patent Application Publication US 2006/0134663 A1 - sequence listing, part 68

SEQ ID NO: 179058 - DNA, 980 bp, Homo Sapiens
cgtcccagtccacagaggaggccacagaggccacggaggtgccagaccctgggcccagcgagccatgagacagccacattgcggcccgggcctctcacagagcacgtcttcactgacccagccccgaccccgtcctctggcccccagcctggcagcgagaacgggccagagcctgacagcagcagcacacggtcatgagccagagcccagcggggaccccacgggagcaggcagcagtgctgcacccaccatgtggctgggagcccagaacggctggctctatgtgcactcggctgtggccaactggaagaagtgcctgcactccatcaagctgaaggattctgtgctgagcctggtgcatgtcaaaggccgtgtgctggtggctctggcggacgggaccctggccatcttccaccgtggtgaagatggccagtgggatctgagcaactatcacctaatggacctgggccaccgcaccactccatccgctgcatggctgttgtgtacgaccgcgtgtggtgtggctacaagaacaaggtgcacgtcatccagcccaagaccatgcagatagagaagtcatttgacgcccacccgcggcgggagagccaggtgcggcagctggcgtggatcggcgatggcgtatgggtgtccatccgactggactccaccctgaggctctaccatgcacacacgcaccagcatctacaggaccgtggacatagagccctacgtcagcaagatgctaggcactggcaagctgggtttctccttcgtacgcatcacggccctgcttgtcgcgggcagccggctctgggtgggcaccggcaacggagtggtcatctccatccccctgacagagactgtggtcctgcaccgaggccagctcctggggctccgagccaataagacatcccccacctctggggagggcgcccgtcccgggggcatcatccacgtgtatggcgatgacagcagtgaca

SEQ ID NO: 179059 - DNA, 425 bp, Homo Sapiens
  misc_feature (1)..(1): n is a, c, g, or t
ngagcgaatagagaaaaatcaagatatatcgacgtacagaagtgtagagaaagaggtgtatgaaagagggagacgaaacaagggagtatgatagatagaaatgtgacgtacaagatgggagaaattacagatggtgcggatcgttaaaattagatagtgcaagagcaatacaactttacgtcgatagatatgaacaacaaagctgtaaagaagtaggactcagcacagttatcaagcaagattatgaggcatgtaacataaacgagtcgcaagcaaaaacaaatgggcacatagagatatgctacatgtagagcagatacaacagagttggaaccaactaacatgagtggatcacatatcattgtaaaaataaataaattatatattacaatcagctgagacattatgcgtatatcctagaataa

SEQ ID NO: 179060 - DNA, 868 bp, Homo Sapiens
cttccataagcctgagaaagagcgaggcagtctgacgctgttgctctgtggagagtgtggccttgtctcggccttggaacaggctttccagcatggatttaaatcgccccggctcttcaaaaatgtcttcatttgggatttcctggaaaaagcacaaacctattatgagacattagagaagaatgaagtagtccctgaggaaaactggcatacaagagcccggaacttctgccgatttgtcactgcaatcaacaatactccccggaacatcggcaaggatggcaagtttcagatgctggtgtgcttgggagccagagatcacctcctacaccactggattgccctgctggctgactgccccatcactgcacacatgtatgaggatgtggcactgatcaaagaccatacacttgtcaattccttgattcgtgtgctgcagacattgcaggagttcaacatcacgctggagacgtcccttgtcaagggcatcgacatctgacctcccagcaccagccagcagcaggactgagaaagactcaccctgcagctctgaccttttttcccaaagggacttaagcgattgtgcaggagtaggagacaaaatgtacactcactgtaaaaagaaaactaggaggatttttgggaataaataatctattttagagtttattggctgatttgctttttacacactttcatgtgaaagagtgatagggagagggagcgaggctggtgccgttattttgaagctggtgcctcccctcgccgtggcaacatgctggaaggctgaggcctcctggactgaagcctgtggcactgcgtgcgggacagtatgtttccttgcccgtcgcattaatgaggccttcac

SEQ ID NO: 179061 - DNA, 838 bp, Homo Sapiens
caatgagagactgcttgatacttgtccttcggaaagctatgtttgccaaccagcttgatgcccgaaaatctgcagttgctgggtttttgctgctcctgaagaactttaaagttttaggcagcctgtcatcctctcagtgcagtcagtctctcagtgtcagtcaggttcatgtggatgttcacagccattacaattctgtcgccaatgaaactttttgccttgagatcatggatagtttgaggagatgcttaagccagcaagctgatgttcgactcatgctttatgaggggttttatgatgttcttcgaaggaactctcagctggctaattcagtcatgcaaactctgctctcacagttaaaacagttctatgagccaaaacctgatctgctgcctcctctgaaattagaagcttgtattctgacccaaggagataagatctctctacaagaaccactggattatctgctgtgttgtattcagcattgttgtggcctggtataagaatacagtcatacccttacagcagggagaggaggaagaggaggaggaagaggcattctacgaagacctagatgatatatcggagtccattactaatagaatgattaagagtgagctggaagactttgaactggataaatcagcagatttgtctcagagcaccagtatgggcatcacacaaataatatctgtgcttttcttgtgatgggagtctgagaggttctaactagaatacaatttctccataagtagtttcagtaagaataggtcgagggacattctggagcttacttaatgtgcttccaaacaaactctctgacacatctttactgaca

SEQ ID NO: 179062 - DNA, 521 bp, Homo Sapiens
gtttctggggtcacatggtcagaaggggctgagctggtctttcactgcaggcccactctgaaagagaaatcccatgaagcctgtccttgcagagcccctctgtttttgggggaacagggagcattcacagggtcttgggaacaaaggcctgggcctccccgtttgaatttcagccccagttccagggcaagtcccagccacccaagcatacttaccagtactgcccaccaccacccactgcccacctctaagaagcccggctctcctactctgcttccaggctggggcctcacaggtggggctgttaccttcctcagggcttagggagggagggaggacatggacagggccttccaccctggctccttcacagggatggtagctgaccggtgatgggttcatttgtcaccttgggactgtgagccacttccacttcttcgccccccaggcaggagcaccctcactccaagggcttggcctggaaaggcaggctcacctgggactcaacgttccttcccacg

SEQ ID NO: 179063 - DNA, 864 bp, Homo Sapiens
  misc_feature (742)..(742): n is a, c, g, or t
atgtcctcatgcaagatttctacgtggttgagagtatcttctttcccagtgaagggagcaacctgacccctgctcatcactacaatgactttcgtttcaagacctatgcacctgttgccttccgctacttccgggagctatttggtatccggcccgatgattacttgtattccctctgcagtgagccgctgattgaactctgtagctctggagctagtggttccctattctatgtgtccagcgacgatgagttcattattaagacagtccaacataaagaggcggaatttctgcagaagctgcttccaggatactacatgaacctcaaccagaaccctcggactttgctgcctaaattctatggactgtactgtgtgcaggcaggtggcaagaacattcggattgtggtgatgaacaatcttttaccaagatcggtaaaaatgcatatcaaatatgacctcaaaggctcaaactacaaacggcgggcttcccagaaagagcgagagaagcctcttcccacatttaaagacctagacttcttacaagacatccctgatggtctttttttggatgctgaccatgtacaacgctctctgtaagaccctgcagcgtgactgtttggtgctgcagagcttcaagataatggattatagcctcttgatgtcaatccataatatagatcatgcacaacgagagcccttaagcagtgaaacacagtactcagttgatactcgaagaccgngcccccaaaaggctctgtattccacagccatggaatccatccaggagaggctcgacggggtggtaccatggagactgatgaccatatgggggtggcatcccttgccggaaatagtaaagggg

SEQ ID NO: 179064 - DNA, 402 bp, Homo Sapiens
  misc_feature (13)..(13): n is a, c, g, or t
attgctcacctanagtgacgtccgtgggcgcggatgtgctggacgaggtggtgactgtgcctcagtgaaactgcgtgggaagcagagcttgcagtggtgagagagcagcgcaaccgtctgtgtgaccttctgggcgtaccccaggccccagctggtgccccagcctggtgcctgctgaagccagtcctggagcccatacctcacccctgcctggtgaggatgtcttgttcctgagggaggccggtgtggaaagcctcgcacagtggtgcctccagctgttgaagggtagcgctggcccttggaggctggcactagctgacagcttttcctctctgcacctgcgctctggtgacttggggtggacgcctctgccttcacttgaacacaaatgtgcttcctata

SEQ ID NO: 179065 - DNA, 1031 bp, Homo Sapiens
  misc_feature (841)..(841): n is a, c, g, or t
ggcacacactggtccccttggcctccaggtagatgctagtggagggcgcccgcctggcgacgaggcagaggcaggcagcaagagacagcgcgcagatgacgaacagggagtcgctcaccaggacgcggacaagcagcagggcccagggctgtgccagccgccgatgggagagcacagcacacagcacgttcaccagcagaaagagcagcgaggcccccacaaaggcccctcggacagcgagcaagcctcggctcatctccggccgacgcttcaccttggccttgaacaccacctgggcaaagtagaggttcataagcgtcaaggtgaagaactgcaggcagacggggcagcagtagagaagccagaagggcaagggccccaggcggttggcgcggggagtatctcggaagtagaaggagaagagggtggtacgcaaggcggcccagagcagacagagggccaggaacaccgtctgatagctgagacgcttgtgcccatacagaagcaccagccagagctgggcatagacggagaagaagagcagggcatacagggtggtgtaggcagctgtcagccccagggtcacagcaggtggcagcgcaggcaccagcccggcagcaggcaccaggccagacaggttactctccatgtcagggagggaggcctgaatcccggagacagacaaggagggactgtcggcgggaccagggaaataaatacggaggggtgggaattgcagggtgcagagagggagatggggcgctcagcaggaaagaagttgtggctgacaggcccccctcctcaacagagagacccttgcccttggggaacacaggcagcnctgggccccaggcccctcactcaggggcatggaagggcagtctcttttctccaggacagaccggataggggttgggggtgtctcctccctgggcctaccccagagccaaggatggggggatgcagaggcccaaggagaggactccctggcctcggtcgttcatgtcgtcctgggtggagggggaggctct

SEQ ID NO: 179066 - DNA, 878 bp, Homo Sapiens
atagctaaatccagatgtattaataggtagagactacttcagaaaggatgagactattttcttgcttaattatccacacagtaattcagaaatgtatattgaacactttttatatgccaggcactgctgggcactggaaatataaaagtaagcaaaaatgaaaaactatcctgtcctcctgaggcttagcatctaagggagacaggcattagtcaaccccgtgtggctgtgaatcagccatgatgctgagtgctacaagagaggactgtgcggctgggagggcttataacaggatttgacctagttagggaagatctgaggaagtgatgaaagaatggaaatcaatatgtaagagctcacaagtcagagtgagatgtttcttcctatactgcctgcttctaatgagcatccacttcattgaaccacctcttcattgagccaaacctaccatacagggatacattctctggaggaaagttgagcaactattgcatttgggacattagagtatgggtgggctgacaggtatgtgtatgtttattatccaagacagccaaggtgtttatcctgttacaacatcccagaggacagaggctcttatttgtgactcttttttcttacctgtaacaccagaggcataacgtacatcataatgctgcatcttgttgacgcttcaatgctcacaattcaaaggtgattcctgaagcactttgttacactggggacagctcctaaaatcctcccactcttttttttgcctcaccttggagtctgggctctgttgatcactgactctgcaaggtctttcagcagggcaaggaaagtcagttacattgagttggactccactggttaatgcatgctgagacagaccccta

SEQ ID NO: 179067 - DNA, 1289 bp, Homo Sapiens
aattttccatgctggaagtggaaggaattgcttgctcatttatattctctatcctgtggaaagccttccctcccaccccttgagccagtgagtcacttcctctctgcaaacctctaaagcctcctttctttctcagcccagacctggccctctggagagggtttggagtcctgggtaggcagggtacctcaggcagcaggcagcacaccttggatgtgagctgaatggattttcaaatttcacagaaggagcctccatgctggagaaagtatgtatgaaaatgagtgcgaatgtcaactcctgctaaaagaaatgcttgaacggcttaacaaggaagctgatgaagccttgctgcataacctacgccttcagctggaagcccaatttctgcaagatgatatcagtgcggcaaaggacaggcacaagaagaatcttctggaagttcagacctatatcagcatcctgcagcagatcatccacaccactcctccagcatccattgtgacgagtgggatgagggaggagaagctcctgacggagcgggaggtggccgccctgcggagtcagctggaggagggccgggaggtgctctcccacctgcaggcgcagagagtggagctgcaggcacagacaacaactctggaacaagctattaaaagtgcccatgagtgttatgacgatgagattcagctttataatgagcagattgagacactgcgcaaggagattgaggagacagagcgggtcctggagaagtcttcttacgactgccggcagctggcggtcgcccagcaaaccctgaagaatgagctggaccggtatcatcgtatcatcgagattgaaggcaacaggctgacctctgccttcattgaaactcccattcccctgttcacccagagccatggagtctctctcagcactggatccggtgggaaagatcttaccagagctctgcaggatataacagcagcaaaaccaagacaaaaagccctccccaagaatgttccaaggagaaaagagattataacaaaagacaaaaccaacggagctctggaagatgcaccattaaaaggttggaagacacaaagctggtacaggtggtacttaaagaggaaagtgaatctaagtttgaatcagaaagtaaagaagtaagtcccctgacacaagaaggggctccagaggatgtgccagatggagggcagataagcaaaggcttgggaaactatacaggaaggtcaaggaggaaagtgagaagcccaaagagtctgagaccccactgagctctaacc

SEQ ID NO: 179068 - DNA, 925 bp, Homo Sapiens
  misc_feature (515)..(515): n is a, c, g, or t
acttcatgcgcctgctgaaggacaaggggctactcctgcgctgctacacgcagaacatagataccctggagcgaatagccgggctggaacaggaggacttggtggaggcgcacggcaccttctacacatcacactgcgtcagcgccagctgccggcacgaatacccgctaagctggatgaaagagaagatcttctctgaggtgacgcccaagtgtgaagactgtcagagcctggtgaagcctgatatcgtcttttttggtgagagcctcccagcgcgtttcttctcctgtatgcagtcagacttcctgaaggtggacctcctcctggtcatgggtacctccttgcaggtgcagccctttgcctccctcatcagcaaggcacccctctccacccctcgcctgctcatcaacaaggagaaagctggccagtcggaccctttcctggaaatgattatgggcctcggaggaggcatggactttgactccaagaaggcctacagggacgtggcctggctngggtgaatgcgaccagggctgcctggccctttgcttgagctccttggatggaacgaaggagctggaggaccttgttccggagggagtcacgccagcatagatgcccagtcgggggcgggggtccccaaccccagcacttcagcttcccccaagaagtccccgccaacctgccaaggacgaggccaggacaacagagagggagaaaccccagtgacagctgcatctcccaggcggggatgccgaagctcctcagggacagctagaaccccaaccgggcctggccccctcttaaccaggcagttcttgtctgggggagctcaggaacatcccccaatctctttacagttcccttcccaaaaactggggttccaagcaaccttggccccaacccagaaatctctacaactctc

SEQ ID NO: 179069 - DNA, 367 bp, Homo Sapiens
  misc_feature (71)..(71): n is a, c, g, or t
  misc_feature (76)..(76): n is a, c, g, or t
  misc_feature (112)..(112): n is a, c, g, or t
ccgcttgggaaccctgggtgccttaaacgcaacaggaacccaaggcacaaatttaacccaaacacccaagnttccntgaggcccccatttcatgagccgggctccaaggacntgtccttaggcggctctggaaggcccagcgccagcccccgtcctctgttaaagggagccagccccgcggctccgcccaggcatggtagcctgagcgcgcccccagggtagtagggggcacctgaggagcagggtctgccctggcatgagcagagcccaggatggggtcagggtcaggccctgccagaggctggagggtgcccaaggcgaggccggtgaggcccagctctacaaataaagtgttttatttacagga

SEQ ID NO: 179070 - DNA, 886 bp, Homo Sapiens
  misc_feature (868)..(868): n is a, c, g, or t
gatcttgtcttgagcaataaggcatacatcatatataactgcagtgatactgatggagctgatttttttcaaacaactgggcagtgttagtatgtgtaaaggaagtgcagaagcactgactacagatgtgccacattctatagagtagatgtgttgtatactaagttcaatctctgagcatccatccatgcaaacttgacactgaatataaccaggtagtatatgacaaaaaaaatttttttgcagggaattatggtgggcactgttggttatacatacatctctgtcccttttcactccctcctcatcattgttcaccacacaactgccagtgtggtcttggagtggccttgtgtttgctcttggcctcctcctttgttcaataatcactacagagtcacggtgagttaggtcaatcactacaggtgctagagattcacaggtgaggtcaactacttcatcactttccccaagttctatcagttctgcatccaaggctatgttaggtgttgggcctccttctctggctatagggaatgctcaggcttgtctggaattcaccatgctgtctcagcttattatagtattccattgtgctttttggtattcagtcttagagaagtaaatgatctgtgtccaaggtttacagtcagtatattaaaactcttcgatgtctcactgtctgttgttcagtcactctctgacttataagaatttagaggtcagatttccccacatatttgaacccttattctgggttccagtcctgtcttcacttccacaactgctgtgttcccacagggagtggatcttctgggagccatttgtaagatagttcaatctgaatttttaacgagatgtacttctnttggccccacagacacct

SEQ ID NO: 179071 - DNA, 799 bp, Homo Sapiens
gaggaagttgccagaagagaagcacattcctgaggaacgtgaaggtgggcacagccaggccgtggtccttgtcctcttgaacacggcacccttgtcgcggggagctggccttcccctgtggctggttccgcttgtcatcacgtctgcgttagagccttttcctgtgttacttctccatgttagttcaccttgttaatttccatttgggagaggcacaggtcacgtctatttttgtgcccctcacagagctctgtgcatcagggctgctctgtcactgttggttgtgcagcattcctgaccagctgaacatgagccttgcctggggagccgagagtattgggcagggtcaggaggaaaccagaagtgggagaagacatctcacccagtcatggggttttagagtgaaagggggccctggacagcagaacaactaattcagcctccaaattgtatggatgagagaactgagcctagaaaaaaggtggatcctccacagtcccatggagttcctggcggagcccaaggctgctgacttccacccagcccttgctggcttgacattctggctccatggctctctgcaggcttcttgtgcacctaaattcctgatcattccctagctgcgatgaggggtgcactctggaaggcctctcacttcgtaaaccccattctggatctagagggttgaagttgcaatttgttccagaaggaactgaacatgggtacagcgagccctaaaaatatttttagcccagaatcaagccgtagaggttgggacagtcctatccatgggtcacag

SEQ ID NO: 179072 - DNA, 1105 bp, Homo Sapiens
  misc_feature (391)..(422): n is a, c, g, or t
  misc_feature (1076)..(1076): n is a, c, g, or t
  misc_feature (1082)..(1082): n is a, c, g, or t
cgtgtgggtcgggggggcggtcgtggtgtggggcggccgccgggtgtggtgggccgtcttcgtgctcgcgcctctggtggtgcgtggtcgttgtgtcggcgggtgcgggtcgcgcgcttgcggggtgtctctcatgcgtgttcatggcctcctctgggggttcgggggtgggtcccctgggtttgtgcggagaagcaggctgtttctggagagagatggggtcttgggggcgcctcagttaccctccaggcattccctgccttctttggccccccatggggcgctgcgtccccctctctccgtaggtaaggactctcaggcagtgagcctctctgtacatctcgaaggttaacacgcatgagagggtatagatgtgtgcgttgtgcgtgcnnnnnnnnnnnnnnnnnnnnnnnnnnnnnnnncccaggctggaagggctagggagggagggccaggcggtcccacagggtgaggacagatgtggtcccgacagcactctgggggagacgcccaaggaagggctgggtggtgactgcccacttgggcacacagcatcacagcgttcacaaacgacaagaaaaacagcaacacccatcgtgaccaatctggacatagtcattcggcactagatttgcaggcccccgatgctgggggacagggacggggaggggcagcgggtggatgatgaggtatctgtgcaggcccgggggccactggccctcaggatgccagggaaaggtgggcaggctgaagggaggggcgagctcccacgaggctgctctaaactgccccgtgggtcaggcctgccatcgctgtcacaatgggaatagcaaagctggctctcccagagccacggggtctggcggaggtggctgtgctggggtggggtacagggctcagcctctgaggatggtgacctggtttgtaactgtccctttacccacaccaggagagagaaataaggaacagtcccctgggaggtgtccaggaccaggagggaacaggaagggaatttttaggcatctaaggattctttatttccagagaaaatctattcaagacctttgctgacctcnctcctngcctgcagggcactccaggaaat

SEQ ID NO: 179073 - DNA, 820 bp, Homo Sapiens
cttccgcaggctcagttatgggttcctgtgtgcttagtcatcgggtccgacacaggctggactgatctggggagccgcgaagggcctgccttcacaaagggacgtaacgcaagtactgcgggcagtgtttgaatatggccctgaacaatgtgtccctgtcctccggtgatcagaggagcagggtggcctaccgctcttcccatggcgacctcagaccgcgggcgtcagcgttggcgatggtctccggagacggcttcctcgtttccaggcctgaagcgattcatctaggacctcggcaggcggtgcgaccaagcgttcgggccgagagccgtcgagtggatggtggcggccggagcccaagggaaccagatggccggggccggagccgccaagccagattctcaccttacccaatccctgccgttgaacccgatctcctaagaagtgtgctgcaacagcgtttgattgcattaggaggtgttatcgcagctcgaatttcagtttaaacgaacacctttcctctggccctcacttagcttgtgaacaggcctttttaaaatcctttcttggtgtagcagcaatcttgtggttttatttttacgatggatgtattttcactttaatacgtgggagtcatactgaactatgtcctagcactaagggaagtgtacaccagttgattgattttaggtggtctatgcagccagaacgatttggatcacgaaacaggtgtggcaagggaatattcttaggtcgtcacaaagctgaagctgatggggagcacctcgccagaggtcaacaaatccattcgttaactcag

SEQ ID NO: 179074 - DNA, 841 bp, Homo Sapiens
tggatgaacaggaagttggaaggatcatcacacactgttagccttgattgggcttgagtggcactgactcaccgagaaaggccaggtctgttggatggagtgggcacttgcagagggtggtctccttgcaatggtatggggccttgagacccaaagatccactgatgttgcctccttctctgatgccctccttgaatccctccctgatctgcagtgcccagagatgagggcattgctgccagtagccattgttaaaccatacgtatagggttggtgaggaacaggggagcaggaagcaaggaaggtgattcctttagcattgtaaaatttagctattacttagaaagtacagaaaggctgtctctttagagaagagatggtacttggcaggttgatgccaacctttcaggactcttctgcttaagggaggatatgttttaatgtccattcccaccctgcttcctgaatgagatatactatggtcttgagatagtgaggttgaagacaaagtctttctagttagctcctgatgggggccattaccttcctgcgaccttaatgtgacttgaatttattctgttgcacatctctgatgtctatacaaatctcagtggctgccagaagctgatcaactctgtaaatctttatttattttcaatattgttatcactagtgtttggcctaagaagagatgatgcatggcatggaatttaaaaagccaaaatccagacggggaaatacctactcatttctgggaataataaaatttggtacaccctaacatattttaaaaatagttttctgtactctagttcacatttcggcttttaaaatttcaatt

SEQ ID NO: 179075 - DNA, 884 bp, Homo Sapiens
  misc_feature (213)..(223): n is a, c, g, or t
  misc_feature (359)..(408): n is a, c, g, or t
  misc_feature (589)..(589): n is a, c, g, or t
agcaacagttgctaggatggggacgcactctctggtccctattctctttaaccctattcgtagaaccttagagcgtcagattggaagtgaccttagggattctttaactctccaactcctgcaatattgatagggagaccgaggtccagagaggggcagagatttgcccaaggcctagaatccagcattccttttatttttgtttacttatcnnnnnnnnnnngagagaatccaggacttttaatcccgtttaccgaaaaccgagcttcacccaagaatgtaccagtctctgccttaagcacggggaaagggcggtgggggtggggagagggataaggcacagggtcttgctctgtcannnnnnnnnnnnnnnnnnnnnnnnnnnnnnnnnnnnnnnnnnnnnnnnnntgggctcgagccatcctcttgggagcctcagcctcctgagtagctgggactacagcgggcaggctctggatctcggcgggatcaggccaggcagctgatcatagatctggagactcgagggagtcaggctcttcctttgtccatctcctgcttagaggacacaggccaggacatgctggcnttcgtttctgcgaactaacaggcaagcagcaaagttgtcgaagccaaccctagaaaaccttaccccagtggtgctcagaccagagattcgcaaaccagaggttctcagaccggaaacacccagaccagtggacattggttctggaggattcggtgatgtcggtgctcttgagagtttgaggggaaatgcagatttggcttacatcctgagcatggagccctgtggccactgcctcattatcaacaatgtgaacttctgccgtgagtccgggctccgcacccgcactggcttccaa

SEQ ID NO: 179076 - DNA, 423 bp, Homo Sapiens
cgcttggtcgtcgggtggtgtccgcgtttgttgttgtttagaccaggtttgcagtttattgagtaattggctggcttcacagatgttatcagctgggggcggttgatagggggaacaggaaaatgctctcagaggttcccactgaagccctttcatctgccctgccccacccaccactgaagccagaggtcatgggagttgggatctaactacactctgtgaacttaccaccacccattccatccccaagcccatattttatttggactagccactgatgcccgggcccttcctcttccagggggtgggagggtggaggtggggacaggaccaaccctcaagaaagaaaagaggttaaggtgggggttttgctgaatgtctaagaaatgtcagtggaacaggctgggcacagtggctcatgct

SEQ ID NO: 179077 - DNA, 702 bp, Homo Sapiens
gctacccgctgtggccggtgccagctgcccttgcagggtgggtgagctctcaggccgagagccttatttacctagtgcaaaaactgtaaaagtgtacagactcttcacagatttttatcttaattgcaagtctgccgattttgtaaatgttcttggtgtttgactgtaatgtaactatctcacctaatggttgtacatatcctttggtcctggtgctgccgagggctggccgggactgctgctctcccaagggttttattttatttctgaatctagagaacagtattgggcaggaggaaaaggcttggtgtctgcggggggtgtcttccctgcctgtggatattgtgtgttggctttgcagctgctgtctgagtagtggccactggggtgccttcactgggccagtcaacggggggctcctgccagggccacagagaacctgagttcccgggagctgggccctgcctgcagccaggggctgggggttgccagaggccctgggagggaaggacagtccctgctgggggaagaacagccccggggccccctggtcaccgagattcagcctttgcttggagaaagccacgccctccctgctagcacagaggcctgactgactttttgcttaacttccatgttctgggtgatggaaacttgcaaacctcctgtcagtgaggactctttccgactgcccagaaagtg

SEQ ID NO: 179078 - DNA, 817 bp, Homo Sapiens
  misc_feature (596)..(596): n is a, c, g, or t
gtctgcggggctggcggtcatcgactgggaggactggcgacctgtgtgggtgcgcaactggcaggacaaagatgtgtatcgccggttatcacgccagctagtggccagtcgtcaccctgactggcctccagaccgcatagtcaaacaggcacaatatgagtttgagttcgcagcacagcagttcatgctggagacactgcgttatgtcaaggcagtgcggccccggcacctctggggcttctacctctttcctgactgctacaatcatgattatgtgcagaactgggagagctacacaggccgctgccctgatgttgaggtggcccgcaatgaccagctggcctggctgtgggctgagagcacggcctcttcccgtctgtctacctggacgagacacttgcttcctcccgccatggccgcaactttgtgagcttccgtgttcaggaggcccttcgtgtggctcgcacccaccatgccaaccatgcactcccagtctacgtcttcacacgacccacctacagccgcaggctcacggggcttagtgagatggacctcatctctaccattggcgagagtgcggcccgggcgcagctggntgtcatcctctggggtgacgcggggtacaccacaagcacggagacctgccagtacctcaaagattacctgacacggctgctggtcccctacgtggtcaatgtgtcctgggccacccaatattgcagccgggccagtgccatggcatgggcgctgtgtgcgccgcaacccccagtgccagtaccttcctgcaatctcagcaccacagttccgcctagtgcct

SEQ ID NO: 179079 - DNA, 1008 bp, Homo Sapiens
gagctggctgctgtgaacctgaaggtgattctcctaggtcactggctgctgacaacctggggctgcattgtattctcaggctcctatgcctgggccaacttcaccatcctggccttgggcgtgtgggctgtggctcagcgggactccatcgacgccataagcatgtttctgggtggcttgctggccaccatcttcctggacatcgtgcacatcagcatcttctacccgcgggtcagcctcacggacacgggccgctttggcgtgggcatggccatcctcagcttgctgctcaagccgctctcctgctgcttcgtctaccacatgtaccgggagcgcgggggtgagctcctggtccacactggtttccttgggtcttctcaggaccgtagtgcctaccagacgattgactcagcagaggcgcccgcagatccctttgcagtcccagaggcaggagtcaagatgcccgagggtactgaagccagccacgctgcgcccggccctgccccgggccttcctcgtgcctgggaggtcgttctagggatgctcctgacctccgtctcttggacctaagatggaatgtgtccccagctcagggattgcctgaaccaagaggccaggagcccccatgggccgccagtaccatgcacactcctgtcccgaactccctgaggctcccctcccttcaggtcacccactggttccaggctggaacagggtctctctttacctcctaccccatgtttggcaccacagagggcctcagccgagtcctgcctgaggttgttgcaagctcaggccttaaggacttgctgatgcccctcagggctcccccagtttgctggctttggtggaagccctgagaagctcagggtcctgttcagccgaggagcagtctgtcttgggagtgggcccgtcctctccatgtctgtgccctggtgcctagggttgcgggcgtgggccgaggttgtcgccccctgtgccccaacctccagcctccttttagagagc

SEQ ID NO: 179080 - DNA, 1038 bp, Homo Sapiens
  misc_feature (15)..(15): n is a, c, g, or t
  misc_feature (22)..(22): n is a, c, g, or t
  misc_feature (112)..(112): n is a, c, g, or t
  misc_feature (168)..(168): n is a, c, g, or t
  misc_feature (438)..(438): n is a, c, g, or t
  misc_feature (500)..(646): n is a, c, g, or t
ccccctcactttgcnaaggagnaaactttccttgggaaattttcgggcccttgtgataaaccccccttaaacctgttcaaccccaaccaatgcgagccttccctctccctgnccccatgttggaaagttgcctctgaaaggggtggtaaaatgctggaagcccagacnacaacccctgcgtacgctgcctcagttggtggagactggggctgggactggagtcagcccagctgggaggaggggctggggaggatctgcagctgaagcccgaggcagggttggtgtgatgccaaggcaaagtggtgaggagaaaacaggaaacgggctttctctgaattggtaaatgggaaagaagtgagcaacttaagattgtcacaattaatcacaagtgtacaggattagactgggtttatatttaactcttgcttcataggtgtnccatttaaagagtgttatttaatgctaagtttaactgctttaataaagtttatttttaaatnnnnnnnnnnnnnnnnnnnnnnnnnnnnnnnnnnnnnnnnnnnnnnnnnnnnnnnnnnnnnnnnnnnnnnnnnnnnnnnnnnnnnnnnnnnnnnnnnnnnnnnnnnnnnnnnnnnnnnnnnnnnnnnnnnnnnnnnnnnnnnnnnnntcacaatatcgtgcggaggagggcacaacaccgcagcacgcgccgcatgctggacagacggcacccatagggcggacggctgaacaaagacacgcgccgaccggcggagtcacaaaagggggccaggggaagagagcgaacgagcgagcgagcgcgtcggcataccagggcacgcacaggcacaccctactagtcgggagtgcgcacagactaacgagaccgaccaaccccacgaccaagaaatacacagagcccgccagggacaagaagaaaagaattcgatcacgcgcctgacagcgctgggtccaaaccacggtgcacacctaccaggagggggagcagcaatagcggcccgcaacgcacgccacagccaccaccgcagaaacaacaca

SEQ ID NO: 179081 - DNA, 1067 bp, Homo Sapiens
agcatcctcagaaaatgtattggaatgtgtgtagctgcgttgctgtatctgctgttgcttctcagtgggaacggactggaaaacctttcaacccactgctgggagagacttatgaattagtgcgagatgaccttggatttagactcatctccgaacaggtcagccatcacccaccaatcagtgcatttcatgctgaaggattaaacaatgacttcatctttcatggctctatctatcccaaactgaaattctgggggaagagtgtagaagcagaacccaaaggaaccatcaccttggagctccttgaacacaatgaggcatatacatggacaaatcccacctgctgtgtgcataatatcattgtgggtaaactgtggatcgaacagtatggcaatgtggaaattataaaccacaagactggggacaaatgtgtgttgaattttaagccatgtggcctttttggtaaggaattacacaaagttgaaggctacattcaagataaaagcaaaaagaagctctgtgccctctatgggaagtggactgaatgtttatacagtgttgaccctgccacgtttgacgcttacaaaaaaaatgataagaaaaatacagaagagaagaagaacagcaaacagatgagcacctctgaggagttggatgaaatgccagtgccggattctgaaaggtgtaattcattatcccctggaaagcgttcttctaatggccgaatagccccacgagctccaaattctggcccaggatgtatacattttactagttttggccatggttttgaaatgaagttagacaaagacatggacaagtgtgattccccaaggacagacctgcaggggtaacagggccgggacatttaggaaagcccactggggacaaatgggaggaagaacttgcaaccccaggccaaggaggaaccaacacaagaaccgagcactcgtgagggaaaaaacacacaagagagcacgcccgcgaaaaaaacaggggcccaagtccagaaagaaggaactggcaaaacgacagtggggtccccacaaggagccctaatcccgaag

SEQ ID NO: 179082 - DNA, 1169 bp, Homo Sapiens
cggacgcgtgggtcgacccacgcgtccgcacgtcatcaccgaggtgaaatctggaaatttctagctgagcaattccaccttaaacaccagtttcccagcaaacagcagccaaaggatgtgccatacaaagaactcttaaagcagctgacttcccagcagcatgcgattcttattgaccttgggcgaacctttcctacacacccatacttctctgcccagcttggagcaggacagctatcgctttacaacattttgaaggcctactcacttctagaccaggaagtgggatattgccaaggtctcagctttgtagcaggcattttgcttcttcatatgagtgaggaagaggcgtttaaaatgctcaagtttctgatgtttgacatggggctgcggaaacagtatcggccagacatgattattttacagatccagatgtaccagctctcgaggttgcttcatgattaccacagagacctctacaatcacctggaggagcacgagatcggccccagcctctacgctgccccctggttcctcaccatgtttgcctcacagttcccgctgggattcgtagccagagtctttgatatgatttttcttcagggaacagaggtcatatttaacagtggctttaagtctgtcgggaagccataagcccttgattctgcagcatgaaaacctagaaaccatagttgactttataaaaaagcacgctaaccaaccttggctttggtacagatgggaaaagaccatcaatcaggtatcggaaatggacatcgctaaaacagttacaaagcttatgaagttgagtaccaacgtccttcaagaagaacttatcgattcctctcctctcagtgacaaccaaagaatggataaccttagagaaaaccaacagcagttacgcaaacagaaccttggactccttgaacagttgcagggtggcaaatggtaggatccaaagccttgaggcccccattgagaaagctcccggagcagtgagagcaaggctggaagcaggccatgcttacctttagaactgggagcggtcggcctgctgcagacggtggaggaactgcgggcggggaaccgcaaagcccagcgacgggagccggagtgcagcagccggacccagggggaactgaaggtctgcgggaaaatggaacgtccag

SEQ ID NO: 179083 - DNA, 771 bp, Homo Sapiens
caccttcatccccaagctatgaaaactcactccactccctgcagtctcgaatggaggatcgtttagacagactggatgatgcaatccatgtgctgcggaaccatgctgtgggaccttccaccagtttgcctgctggtcacagtgatatacatagtttattgggaccatcccataatgcaccaattggaagcctcaattcaaactatggaggatcaagccttgtagcaagcagtcgatcagcttcaatggttggaactcatcgggaagactctgtcagtctcaatggcaatcattcagtcctgtctagtacagtcactacttcaagcacagacctgaaccataaaacacaagaaaattatagaggtggcttgcaaagtcagtctggaactgttgttacaacagaaatcaagactgaaaacaaagaaaaggatgaaaaccttcatgaacctccttcatcagatgacatgaagtcagatgatgaatcctcccaaaaagatatcaaggtttcatctagaggcagaacaagtactaatgaagatgaggatttgaaccctgaacagaagatagaaagggagaaggagaggcggatggctaacaatgccagagaacgcttacgcgtgcgggatattaatgaagcattcaaagagcttggccgaatgtgtcaacttcacttgaagagtgaaaaagccaaacgaaactccttattcttcatcaagccgtggcaagtatccttagtctagaacagcaagtcagagagaggaccttaaacca

SEQ ID NO: 179084 - DNA, 850 bp, Homo Sapiens
  misc_feature (775)..(775): n is a, c, g, or t
ggacgcgtgggtcggaacgattccctgatgaggcagatgcgggaagtggaggaccgatttgccagtgaggccagtggctaccaggacaacattgcgcgcctggaggaggaaatccggcacctcaaggatgagatggcccgccatctgcgcgagtaccaggacctgctcaacgtgaagatggccctggatgtggagattgccacctaccggaagctactggagggagaggagagccggatcaatctccccatccagacctactctgccctcaacttccgagaaaccagccctgagcaaaggggttctgaggtccataccaagaagacggtgatgatcaagaccatcgagacacgggatggggaggtcgtcagtgaggccacacagcagcagcatgaagtgctctaaagacagagaccctctgccaccagagaccgtcctcacccctgtcctcactgctccctgaagccagccttcttccatcccaggacaccacacccagcctcagtcctcccctcacagcctctgacccctcctcactggccatccctcgtggtccccaacagcgacatagcccatccctgcctggtcacagggcatgccccggtcacctctgcggacccagctgtgagccttggctgttggcagtgagtgagcctggctcttgtgctggatggagccaggcgggaaccggtggccctgtccctcccacctctgtgacctcaggcactagcctttggctctggagacagcccagagcagggtgtgggatactgcnggccaggactgagcccgaggaactccccagccctagccaggagagagaaagcaggcagtagcaggggaattagcc

SEQ ID NO: 179085 - DNA, 380 bp, Homo Sapiens
  misc_feature (309)..(309): n is a, c, g, or t
  misc_feature (321)..(321): n is a, c, g, or t
ggcccgggctggcattgctgatgttgatgagatccaaaatggtgaccactacccctgcctggatgacttggagggcctagtagctgtgggccgggacctacctgtggggctggaggagctgagacagctagagctacaggtactgacagcgcactcctgggagggagaaaggcctccaagaccttcctcaagaaaaattcttgctacacgctgctgggaggttctctgcccatgtgcagatgccggctcagacagcaccaagcgcagccggtgggatgggagaaggagcttggggttgtacaaatctgnacacagagcttncttggggcttttctttcgcaggaccttcaagggacccagggttcttttgatccttggcc

SEQ ID NO: 179086 - DNA, 836 bp, Homo Sapiens
  misc_feature (537)..(545): n is a, c, g, or t
  misc_feature (558)..(697): n is a, c, g, or t
gggacctcaagccatgggggtgctggcagaaacacaggtagaaatgcccccgtgcattgagacaccaggttcagtcacccacagattagagcacatagagagcttaggaatgaatacctgtggtacgctgagcccaggcctacagcccagagaagacattgtgtttcttcatgtgtacattagcttatgaaaaataaagggaaaacgaccctcttccatacaaacgtaaacaaaccaagccattcccattaccataaaaatgaaagccataaccatttggagatcaaagctgcctagctcttggcaataatgagctatctggatttcacatcttccgctagcatggttctgcccggctttggtaacaccacatgtgggtaaaacggtataaagaattgaagaactgtgggcacagaatcacccttactgcagattctcattcttaatatttccctttaacagcattttgctgttctcaagtctcagaaactttatgtggtgggatgggagggaaccaccataaccgcctgcctgccnnnnnnnnncttaactgttatnnnnnnnnnnnnnnnnnnnnnnnnnnnnnnnnnnnnnnnnnnnnnnnnnnnnnnnnnnnnnnnnnnnnnnnnnnnnnnnnnnnnnnnnnnnnnnnnnnnnnnnnnnnnnnnnnnnnnnnnnnnnnnnnnnnnnnnnnnnngccaacctaagatgagttgcctcaagcagcaatagggtctaaaatctacagacaagcccagcaatgaaaatcacggcttactgaagacagtaacagcttaaacctggaaaaccgtaaacaaaacatggtcactttcatc

SEQ ID NO: 179087 - DNA, 530 bp, Homo Sapiens
gtaattaatagaatgcagttcatcagtaccgtaatacaggaagcacaggacagcgtgagagccagggaagatctatgtatgtaataatatatgtgtatatggtagaataggtgactggaaaggcatcctaggagaggtgacaggattaatcttaaagggtgagtgagtaagtgtggaagggcattccagtataaaaggagcagtgtgtacaaaggcctgtggagcatgactggaccagtgaggaatagtgagagatgaagctagaggacccagatccccaagggcctccagttctgtgcttaagagttttgactttatcttgaaagtactggggaggcattgaatggctcctgcaggggaaagtgacatggtcagatttgagtattagaaagatccactctcaaggcctacatcgagggtgaattggagggggcaaggctggaggccgctgaacggtgatgagcgcaatctctaggagtctgaaagacacttgggtttagacgagggcttcaccatttcaaaaagcctat

SEQ ID NO: 179088 - DNA, 571 bp, Homo Sapiens
cccactgctcagctagtgaaataactcttggtcgataaagttttagtcaacacccgccaatttggaagtcaggtaaaaaagaagataaagattctgcagtggttatacagagttaaatggctttgactctttcagtgtgcaaggctgtgtacattattttacaaaagtgtttataaaaatttgtaaaataatatttccctctggaatattttatttttacctgtgctcagcgatttctacccttggaaggtatgagatctgcccctatgttctattgatacagtgctgctctagacatttagtctgcagggagattttggtattagaactgaggctgcaatgctagggaatattcctgcagtttttggtacctggcatatgtcctacactgtaaagaagggttagtggaaaacagggttaatacatggaactttgctttattttcaacttcactggaaagtacgtgactacataagttagctatagcataattgttgaccactagctcaattttgtttatcacatatgctcctttgcttcaccggacgcattgggtcgacccacgcgtccg

SEQ ID NO: 179089 - DNA, 610 bp, Homo Sapiens
  misc_feature (465)..(476): n is a, c, g, or t
  misc_feature (556)..(556): n is a, c, g, or t
taaggcaacagactctttatttaatgtggtttaaaatacatcaaaatcaagtccctggctgttgtgaatacccaaaggagacaaaaaagctgccagtgcagcttcaaacaagtctgagtggccgggctgggcataaggaaagcagttacagggacagaaggcagctcccttcccccaggaagggccaagaggagcaggtgcctggctgtccctggggtgaccacctctgtgctgtgcaaggcggaaaggctggggcagcagctggagaatcagctcagcaggccttggccctcccccgtggacaccaggcagctccactggcctccgggtacagccctcagggcaaccgtgatggggtggaggagggttaaataaccatctttacagaaattaacagttttcctacagaaagtgcctgagctcagcccatggtccgataacctcatggaaaacaaacaacaaatnnnnnnnnnnnngtgctgctgacacctctcagaatctggtggacatgaagctctcagctggacaaggccctgaaaacaatttactattagcngagccatgcgctcttgagcttcacctgctgtggtcccctggaggaaaagctagc

SEQ ID NO: 179090 - DNA, 401 bp, Homo Sapiens
  misc_feature (296)..(296): n is a, c, g, or t
  misc_feature (313)..(313): n is a, c, g, or t
  misc_feature (370)..(370): n is a, c, g, or t
  misc_feature (381)..(381): n is a, c, g, or t
tttaatgtggtttaaaatacatcaaaatcaagtccctggctgttgtgaatacccaaaggagacaaaaaagctgccagtgcagttcaaacaagtctgagtggccgggctgggcataaggaaagcagttacagggacagaaggcagctcccttcccccagggaagggccaagaggagcaggtgcctgggctgtccctggggtgaccacctctgtgctgtgcaaggcggaaaggctggggcagcagctgggagaatcagctcagcaggccttggcccttcccccgtgggacaccagggnagcttccactgggcctnccgggtcagccctcagggccaaccgttgattggggttggaaggaggggttaattaanccatttttttncagaatttaccatttttcct

SEQ ID NO: 179091 - DNA, 715 bp, Homo Sapiens
  misc_feature (328)..(328): n is a, c, g, or t
tctggagcccctaggagatactcagggaagcaaatccttgtttgggctggcaagcaaatccgacacgacgaggtccacaaactgtttctgcatcccagggctctgacgaaggcgttaagaaacagatgctgttcccgcgtaggctcccaggggccccagggaggtccaggtggactgcctctctcattcccaggagctgtcctgggactttgggatttcttctcagctttctccacctttcagtttctcagttgtttcagaaacatagcaatgacataaaaactgctatggagagaaagctaacatggtcccatgccttccaggcagnccctgctgaaaggatctaagttgggccctgttcctggcaaatcatcaacgtgcctggactcgccagctaaaagcctgggccttccccagccttttttctggggcacctattcctctgccagtcctgctcccctcaccttccttgggcccgtcagagtcttttgtggtgctgtgcttctcagaggcaggatccaagcagatcagcccagcctagcccagctcaggcaggccatggccgctcaagggaaagactgccccagaagagcaagctggagaggctgggcaggggctgatggggctgggtacactggggaatgttagcaagactgggaaggaggccacattcctgtctgcagcagcccccagcgatggtcttcagcaataaaag

SEQ ID NO: 179092 - DNA, 674 bp, Homo Sapiens
  misc_feature (274)..(274): n is a, c, g, or t
  misc_feature (417)..(417): n is a, c, g, or t
  misc_feature (422)..(480): n is a, c, g, or t
agcaagccttcgacgtgctggtgctgcgctacggcgtgcagaagcgcatctactgcaacgcactggccctgcggtcccaccacttccagaaggtgggcaagaagccggaactcacgctggtctgggagcctgaggacatggagcaggagccagcacagcaggtcatcaccatcttcagcctggtggaggtggtcctgcaggcagagtccacagccctcaagtacagcgccatcctgaagcggccaggcacccagggccacctgggccctgaagnaaggaggaggaggagtctgacggtgagcccgaggactcaagcacccagctgagctccacccagccgcctgccccgcctgccccgcctgcctgtcccgccacactggctttaggaccctgttgacacggaggggggtttttaanttggnnnnnnnnnnnnnnnnnnnnnnnnnnnnnnnnnnnnnnnnnnnnnnnnnnnnnnnnnnnaacaaactgcaggggagagggtggggctggaaggagggctgaggcctggtcagcagtgaccccagcagagcaggccccagtcctcctgggaggctggccccccttttttctgggccctactgccctcctctgcccaggaaatgggggggtttcagcaactcagtgtcacagaataaaatcaagtgtggagtgcc

SEQ ID NO: 179093 - DNA, 879 bp, Homo Sapiens
  misc_feature (57)..(58): n is a, c, g, or t
  misc_feature (87)..(87): n is a, c, g, or t
  misc_feature (125)..(125): n is a, c, g, or t
  misc_feature (138)..(138): n is a, c, g, or t
  misc_feature (182)..(182): n is a, c, g, or t
  misc_feature (540)..(540): n is a, c, g, or t
gcccctctcgtcaccaccctcggtgcccagctaccccctcaagccccagatcccctnntcctcagaacccaggccacccagcttccnattatcccaactgcccagccctctctgaccaccacctncaggtcccctgtntctcctgcccatcaaatctctgtgcctgctgccacccagcccgnagccctccccaccctcctgccctctcagagccccactaaccagacctcacccatcagccctacacatccccattccaaagccccccaaatcccaagggaagatggccccagtcccaagttggccctgtggctgccctcaccagctcccacagcagccccaacagccctgggggaggctggtcttgccgagcacagccagagggatgaccggtggctgctggtggcactcctgggtgcaaacgtgtgtctttttggtggtcctgcttgcactgggcatcgtgtacttgcacccgctgtgggcccccatggcacccaacaagcgcatcactgactgctatcgctggggtcatccatgctngggagcaaggagcccaacaggaacccatgccccccaggggcagcctcacaggggtgcagacctgcagaaccagcgtgtgatggggtgcagacccccctcatggagtatggggcgctggacacatggccggggctgcaccagggacccatgggggctgcccagctggacagatggcttcctgctccccaggcccagccagggtcctctctcaaccactagacttggctctcaggaactctgcttcctggcccagcgctcgtgaccaaggatacaccaaagcccttaagacctcagggggcgggtgctggggtcttctccaataaatggggtgtcaacctt

SEQ ID NO: 179094 - DNA, 611 bp, Homo Sapiens
  misc_feature (430)..(430): n is a, c, g, or t
  misc_feature (468)..(468): n is a, c, g, or t
  misc_feature (493)..(493): n is a, c, g, or t
  misc_feature (502)..(502): n is a, c, g, or t
  misc_feature (536)..(536): n is a, c, g, or t
  misc_feature (553)..(553): n is a, c, g, or t
  misc_feature (566)..(566): n is a, c, g, or t
  misc_feature (576)..(576): n is a, c, g, or t
  misc_feature (589)..(589): n is a, c, g, or t
  misc_feature (598)..(598): n is a, c, g, or t
tgccacgcatcccacactgccttctgcccaccagcctcctgtgatccctgccacacacccagctttgtcccgtgaccaccagatccccgtgatcgcagccaactatccagatctgccttctgcctaccaacccggtattctctctgtctctcattcagcacagcctcctgcccaccagccccctatgatctcaaccaaatatccggagctcttccctgcccaccagtcccccatgtttccagacacccgggtcgctgggcacccagaccaccactcatttgcctgggaatcccacctaaccatggcccctctgggtcaccaccctcggtgcccagctaccccctcaagccccagatgcccttgtcctcagaacccaggccacccagcttcccattatcccaactgcctagccctctctgaccaccacctncaggtcccttgtgtctcctgcccatcaaatctctgtgnctttttgccacccagcccgaagccntcccaaccntcctggccttttaagaggcccattaaaccagacnttaaccaataagcctanaaatcccaatttnaaaaggcccnaaattccaagggnaggatgggnccaagtccaaagt

SEQ ID NO: 179095 - DNA, 502 bp, Homo Sapiens
ttccccaaggattattcccaaactatgtacaattaatgggttgccttgcagagttggatcaataatacctgacacacttgtatagcaagcatacactttacatagttcctcgcatctattctttgaaacccagacacattctagtattgggcactagaaactggtgataaataataacaattacatatatttcctgaagaattatgtggcattccttgttttaagcacctttgatgccttagctcaatctccattacaatactatgatataagtaccatttaatatttctttttgacagatgggaataatcgaggcctagggagattaaattacttggccaggttcatgtaagtggcagatctaggattcaaattcagccggtctgaatctagagcctattcttttagctatgatgctatactttaatacagtaatacactgttcaaatgaaactgtaacatgtcattaaatttgaacttgtcaataaacataccaagcaat

SEQ ID NO: 179096 - DNA, 906 bp, Homo Sapiens
  misc_feature (510)..(522): n is a, c, g, or t
gcagtcatcacaacgaattgtgattgcctatttactcatctgcatctcccactgaattctgatccatggtggctggcccatgcctgtcttgtgtacatttgcatgtaaaccacttaacccaagtgccaggaagcaaacagtacacgcaggtgtgtggagtgattgaaagctaatttgctacctaagaatgtacagtgattcctcagtgtttattagatcaggcccagactcttcatttcagttttcaactcctctgatttttcttttatacaagctttcagatctcctcttggttctcatctagctcttgcatctttatgccgtgggttgattcctctgcctgcctatctgtagtagcttgtctcctaggatggctgccatcaatttcttctcttctgtatacacatgccactcccgcattgagagatggagtcttctttccccctggaatctggtctggcctgtgactaatttcaataatagaatcttgcatttctattgaaactaccnnnnnnnnnnnnnttgtgtcagctactacagctactaagttttgggatggtttgttatatggcaatagatatcctcaataccattcttcaaagtcccaaacctacattttctgtgaagccttaccttgctagtctagttaacactgatctcctccttctctgaagttctgtgggaatagaactttgttgatgccacacattttgttatccaactgtatgtattattacttttcctttcctgaatgccagtatgaactccatgaccaaattatatggtctttgaagataccaaatagtggaaataggtcttttgtaatcccttcaacaagtcctagtactgaataaaaatgtaatggctgctgaattggattaaaagtaaaaatatactaggccattt

SEQ ID NO: 179097 - DNA, 523 bp, Homo Sapiens
tgaaactctgaaaaaggtcaaaagaagcagagaggccctcggtggatatgccagcttttctgccggtgctttctcccactactctgggtggtctgctctcctcttcaaacctcagctcgcagggagggcctgaatctgccagcccctcaggatctccttccctctgggccctccccagccttaaggagcctcccagacagaagggtggacagagccacctggggcagcccgagagacacacgggggtcctccctgtggacagccctgccagcttccgcccagccctgagcttcatttgcatcttgaggagtaaggggtggtgaaatgggaatgctggtctggctcagctggtcgtgggcataagtgcccgctgaatggatggcatctctccctcctgtcttatgttctggggtccaggtgcttccccaggccatgcccctgctgctaatgcttgccctaacccttaccctaaccagcgtccagcgtcgtctcaccgagccgtaaataaatcaacagattcgca

SEQ ID NO: 179098 - DNA, 937 bp, Homo Sapiens
ggatattcagggtcaaatcatgtacattacagatattatctaaattcttctagaatttatttttcatgaaatattgatgtattttaatctatgttaaaatatcttcaatgaggaaaatgtcacagaataaatttatattacacattttactctgtcttctacttgcttttgatttagaaggcagacccctagtggatgagaaatgagcccatacggtagtttttatagtagagaatgtttcaactgagcctaaactggatttctaagtctgggtcgttatgatgaagggggaaacagtctgaaggtatctgtttgcaggaaatagtttgcattggggtgggattatgtggaaaagggggcctcaggatagagaatttccttgtcttcacctgtggatgactggagaaaatgctactggcagaagccattttcatagggaggcaaaagaagtacagtttgtggttcagatgacaaagcaagaaacagaattgggggagagggcatttccacagagatacagcgtgttcctggtgcactgaaatcttaacagaagtttatgtcatttggttgctccatgagattaccatttgggaatctcgggttcccagagaagaaaaagaggcaaaggcaaggcactgtccctcaaaagaggctgaggcaaggcactgtccccaagttgaccttcctgagcagcagatatcaacaagacgactggaggaaaacgacaagagaagcagcacaagacatacccccagtggtgcccagaaattgctgcattatataaatgtggaaatacgagttatttaatatttgtattcccaaactagtgaagtctagtgatgcttaggttatatttctaagaagggcatttttcttgaaatacattatattaaataaatattttcttagagaattaaagaggaaagggaataaaaaa

SEQ ID NO: 179099 - DNA, 483 bp, Homo Sapiens
gaaattgtcctttggttgccttagttaccagagttgaatgaatgtacacatttcggtagtgggggggcagagcggataaccccttccttgtctgtttcctttgagaaaggacactccaccttttcaaaggtacttaaagccatctttacagattgcttgtaatgtaaggaaagagtcatgtcctttggattgattgaggttaaatcatcaaccactagccccctttcaaaatcagcgagatatttgatgattaagtgaatcaatgggtatgttctggcctactgatgttacctgaaatctgcaaacgtgtatgttttttaaattgttgcttttgtatttgtaattttatgacatttcgaagtttctgtgtcttaactctttttaattaattttctgcacgttgcttttttctctttgtttttaattccatacagagtattcaattcttgaaacacattaaaataatttgcttgctagggaatt

SEQ ID NO: 179100 - DNA, 668 bp, Homo Sapiens
  misc_feature (69)..(69): n is a, c, g, or t
  misc_feature (75)..(75): n is a, c, g, or t
  misc_feature (78)..(78): n is a, c, g, or t
  misc_feature (83)..(83): n is a, c, g, or t
  misc_feature (101)..(101): n is a, c, g, or t
  misc_feature (113)..(113): n is a, c, g, or t
  misc_feature (127)..(127): n is a, c, g, or t
  misc_feature (137)..(137): n is a, c, g, or t
  misc_feature (147)..(147): n is a, c, g, or t
  misc_feature (163)..(163): n is a, c, g, or t
  misc_feature (171)..(171): n is a, c, g, or t
  misc_feature (205)..(205): n is a, c, g, or t
  misc_feature (540)..(540): n is a, c, g, or t
tgtgactctgggattggcaggtgcaacttggagcccttaatttcctggggacgtaagttcttcccaagncttagnagncaagnctgcccggccaaaggagnaccaaaccatgnccaaccacgctggncaactgctgnctgttccagntccctgtgttttctgnaccaccgntcactgtgcaactcatcgcctctgccacttaggnaccagggaaagaggctggttttgctcccactcttagttgctgataaagtgggggaaggaaaatgggacactctacagagtttggggaagggagagtagggagcccatcttgtccagaaagattcatctgtggtctgtctgttaaacatagctgatttcagtgggctttcccctggccctgggggagcagacactgactgggttgtgggcagaggagccatcctggcggagccctgctgcaggggagctccttcaggagccccatccggacctcttgcactgggctgcctttgcctccatttgccttcctgtatctgcaacaaaccttttaaaagngttcactcttgctttttccagtatttcggtaatcagccatcttgctgtagtacaggatgacattgtcgaatgctctttgtatgtgtgcacacccccttactcccttactgcttcatacactccacaag

SEQ ID NO: 179101 - DNA, 373 bp, Homo Sapiens
  misc_feature (276)..(276): n is a, c, g, or t
tgtgactctgggattggcaggtgcaacttggagccacttaatttcctggggacgtaagttcttcccaagcttagagcaagctgccctgccaaaggagaccaaaccatgccaaccacgctggcaactgctgctgtccagtccctgtgttttctgaccaccgtcactgtgcaactcatcgcctctgccacttaggaccagggaaagaggctggttttgctcccactcttagttgctgataaagtgggggaaggaaaatgggacactctacagagtttngggaaggggagagtaggggagcccatctttgtccagaaagatttcatctgtgggtctgtctgtttaaacataggttgattttcagttgggcttttcc

SEQ ID NO: 179102 - DNA, 465 bp, Homo Sapiens
  misc_feature (37)..(37): n is a, c, g, or t
  misc_feature (80)..(80): n is a, c, g, or t
  misc_feature (449)..(449): n is a, c, g, or t
ggaccccgctgcgggggaacccctcgggagcccccancgggacccctgcaacggggctgcccttgcccccccattgcccnccctgtatccggcaacaaaccctttaaaaagtgttccaccccttgccttttccccagtatttcggtaatcagcccatcttgcctgtagtacaggatgaccattgtcgaatgcctctttgtatgtgtgcaaacccccttactcccttactgcttcatacactccacaagtggtacagtattttgtgtcattgtaaaaatcaaaattggctttggatctttgtaatacacctgtacctgaaaaagtaaacaacattcttcaattactagccttcagcttgaaaagacatgctggagaagaaggaagggggaacccataggtgtggcgtggagccaagatgtactattcaactatgtgtttctgtttataantatacacataccatgg

SEQ ID NO: 179103 - DNA, 518 bp, Homo Sapiens
caggttgacaggttttattccacccccttccatccccatggccaccccaggcaggaggagacaggtgtgctggagtctggtcactttggggcccggcgtgggcagagcccactgggtttacattctctgtgggcaggtgtggacaccagagggctggggcaggaggagcgtgggagcgagcggccgacccccgtctctggcccggcccctgggtaaacgccgactcagatgcctgaaacagacctgggccgagcaaggaaggctgatggtatttccaaccaagacagaaatacaaagtgaccaaggccagtgacgaggccgatagggctggcgggacgggacgcagtaaaaaagtctcactcacacacacgccacatggacacccccgcacacagggacgtgtcagtaaaaactcaaggccagctgtgaggcctcacacgacactctgccggcccccagagccctccaagtcggacatgccagagcccccgccccggccaaagtcaatgaaaatcccc

SEQ ID NO: 179104 - DNA, 769 bp, Homo Sapiens
  misc_feature (702)..(702): n is a, c, g, or t
tttctgcagggtgtggcgtggaccagtgctgccgaccatagctcagagagccctgcccctgcctcactgcactgcagcctcctcggaggccgcacctccactccactccccacgcgccccctgcctcccacccaggtccacctgccacctggtgaccaccttgagtacagaagtgaaagtggggagagtattttattcaagtcacagcagaactgggaaaaaaactcttctgttttaccaacttcttgtgtttcagaaacatattctgttcaaaacttttgaaggccctttcggtgtctagtctggcagatgtttttgtatgtgtggcacctctggaccatgtgtgttacatatgtgtcttgctggaaaggacatattcgctgtccccgtgctgctgggagggccgcctcacagcctcatggttcccagccccagcacagtggaggcaggcgtggctgcattcccctcacgctaccctcccagcggcttgtagccgtcactggccagacctccagggtgcggaatcaaataggaagcatgcagagactcggcagcttttcctctgatgtgtaagttatttggaacgcgtgctgtgtcccgcgatgtccctgatgtactgtgcaggcgcggtgcctccgtctcgtcgcacagctgcgcgcccttgtgtgaccctccccataaaggcactttacagcttcatgnttcatccactgtcacttttttttaactgctgatgtaaatggaattttaaaagcagagttctttattg

SEQ ID NO: 179105 - DNA, 662 bp, Homo Sapiens
  misc_feature (21)..(21): n is a, c, g, or t
  misc_feature (71)..(71): n is a, c, g, or t
  misc_feature (74)..(74): n is a, c, g, or t
ggcccgcggctgccatggcancactacgccgccgccgccttttcacgcgcgtcgcgagctaacggactcgncgncggcggcggcggcggcctgcgccccacccgcaccccatctggaccgcatcgctgaatgtgcccggacctgcgccttctgggtctctgaaagaagatgaatttggctgagatttgtgataatgcaaagaaaggaagagaatatgcccttcttggaaattacgactcatcaatggtatattaccagggggtgatgcagcagattcagagacattgccagtcagtcagagatccagctatcaaaggcaaatggcaacaggttcggcaggaattattggaggaatatgaacaagttaaaagtattgtcagcactttagaaagttttaaaattgacaagcctccagatttccctgtgtcctgtcaagatgaaccatttagagatcctgctgtttggccaccccctgttcctgcagaacacagagctccacctcagatcaggcgtcccaatcgagaagtaagacctctgaggaaagaaatggcaggagtaggagcccggggacctgtaggccgagcacatcctatatcaaagagtgaaaagccttctacaagtagggacaaggactatagagcaagagggagagatgacaaggg

SEQ ID NO: 179106 - DNA, 385 bp, Homo Sapiens
  misc_feature (271)..(271): n is a, c, g, or t
  misc_feature (282)..(282): n is a, c, g, or t
cgcgcgtcgagactaacggactcggcggcgccacgcggcggcctcgcgccccacccgcaccccatctggaccgcatcgctgaatgtgcccggacctgcgccttctgggtctctgaaagaagatgaatttggctgagatttgtgataatgcaaagaaaggaagagaatatgcccttcttggaaattacgactcatcaatgggtatattaccaggggggtgatgcagcagattcagagacatttgccagtcagtcagagattccagctattanaagggcaaatngggcaacaggtttcgggcagggaattattttggaggagattattggaacaagtttaaaagtattttgtccaagcactttttgggaaagttttttaaaatttgg

SEQ ID NO: 179107 - DNA, 461 bp, Homo Sapiens
  misc_feature (41)..(41): n is a, c, g, or t
  misc_feature (47)..(47): n is a, c, g, or t
ccccctcctggaaaattacgacctccatccaaggtaaaatncccccnggggtgatgccagcaagattccagagacattgcccagtcagtccagagatcccagctatccaaaggcaaatggcaacaggttcggccaggaattattggaggaatatgaacaagttaaaagtattgtcaagcactttagaaagttttaaaattgacaagcctccagatttccctgtgtcctgtcaagatgaaccatttagagatcctgctgtttggccaccccctgttcctgcagaacacagagctccacctcagatcaggcgtcccaatcgagaagtaagacctctgaggaaagaaatggcaggagtaggagcccggggacctgtaggccgagcacatcctatatcaaagagtgaaaagccttctacaagtagggacaaggactatagagcaagagggagagatgacaagggc

SEQ ID NO: 179108 - DNA, 733 bp, Homo Sapiens
  misc_feature (24)..(24): n is a, c, g, or t
  misc_feature (528)..(540): n is a, c, g, or t
cctgcacagagcccagtacaaagnaagggccaacaaagcaagccactattttcgttgttcttttctggtattgatttaaaagtgcatgtttcaagcttggttctgtgctgacaaggaagtcggcgcgcactgatctgagtcttctccacaaacaagtggcctcccacacctgtctcatctgactcgctgctgttaccaccaaacacacagacaccagagaaaaacactgccgtgcacaagcacgctggtcttgcgtaaaaaataactagactcgagtgccacctaaacacaaagttccatcatgacactcacgtgcatgtcgccctcggagtggggtgcatccttcctgcaaatgatgctctggaacctttgcagcaagggcaaaagcggggcgctggtgccctgggcggaacgctcattgtcagtctcctgtgccccgctgtcccacagctgaagcaacaacaggatggcagacaacatttggctaaagaagaaaacatatttattcctagtaaaaacagattaacnnnnnnnnnnnnncatggttgatcaaaaataaaagcaaacagctagatagaagtgaagaaatacttgggatatgaaaggaaacgaaagtaaagccgtggtagttaaatcactgaattgacactgagattttagcacaagacatcgccttctgctgataggaaagaccagttaagaagctcaaagagcacatttacatgaagatcta

SEQ ID NO: 179109 - DNA, 356 bp, Homo Sapiens
atatttatatacacacaatacatagagatccttcaacccaagaagaggcaaaaggatcccagggtcctctgtggtgccccttggcctggcacaggaaaacccaggaggcaccagctgtcttgggaatcatctcgggaaatgcagtgctgagctagtgtgccatggatggggggtctccaacaggcccactccttccgaggaagggtggagctatgatgaaccagggaagccctcacccgagctttccacacatcctgaaatgcaagctgtacctgatggagctttgaaactaaaacccaaagtgcagatacaaaaggatcccctgataggcctgggggactgactccttggggaag

SEQ ID NO: 179110 - DNA, 727 bp, Homo Sapiens
  misc_feature (50)..(253): n is a, c, g, or t
  misc_feature (499)..(543): n is a, c, g, or t
agccttcccggcttcttcccgacttcttgggatggggatgcgcatccatnnnnnnnnnnnnnnnnnnnnnnnnnnnnnnnnnnnnnnnnnnnnnnnnnnnnnnnnnnnnnnnnnnnnnnnnnnnnnnnnnnnnnnnnnnnnnnnnnnnnnnnnnnnnnnnnnnnnnnnnnnnnnnnnnnnnnnnnnnnnnnnnnnnnnnnnnnnnnnnnnnnnnnnnnnnnnnnnnnnnnnnnnnnnnnnnnnnnnnnnnnnnctgtctttttgggggatacaattcatctcacaaaaccggcccatcacctcaaaaggacctgccaccccagtgctatgtgtccctctctgcccagagccactccttcccctggctctcggggagtgggggcacctttccctgctcccacagtgaccgagcaccttccccttggtatgcattctgaagggggcatttttttctcctccatctcagccctgtacaaagcaagttctttctagattgagnnnnnnnnnnnnnnnnnnnnnnnnnnnnnnnnnnnnnnnnnnnnnttaagggagatgtgtgcaggatgggtgcaagggaggagtggaaggcggaagggcaggaggaggatagagccacaagagtgagcacagaagtgacaagggcagaatcagtgtgtgcttgtgacaagtatggaaatgtcatgcctttaggttcagtcctataaggtaggtgtatcagtaagggcat

SEQ ID NO: 179111 - DNA, 526 bp, Homo Sapiens
tttaatgagttttatcttgacaggcgccgcctcgcccccgggccctttcgtccacagcaaaaatgcatcaagtctccacgtgtttcgggccagggcgtggcttggcattgaccttcatgaccttacatagctttagagaagccataacgttagactgcaatactaacgaccgacgcccctccgggcaggagaccaccgcgcccctctgcgccccagcgacgcggcccgcggggacgtcgctgtccgtcctgctcgccctgtgccctctcactgacttctcccgggtcgtgtcttttaaaaactcctgttttcacaccttacaaagccagctctgagcagacagggcgtcctctcgtagaacctgcgcaccccgttcccacagcatggcgccccgggccgcgagcttagcttagaccgtggtgtcctctgtccgtctgtccctgcgcctgcgcctcctcctgcatgtcggggcccctgcgtgtgttctctccggatggaatcacagccaataaacaccagtgatttc

SEQ ID NO: 179112 - DNA, 467 bp, Homo Sapiens
  misc_feature (1)..(1): n is a, c, g, or t
ngtccattaaaaacatttgtaaagctatggtgttgataaagtattatgaaagactgcaaaaaaagatggctaatttttagttattattgcacatgtttagaggagctaatgacattttctatgattaataaaagacattatttatgtttttatttatgtattccacaacatttattttattttctccatttcaggaaaaccactatgttgttacaataaagattttcatgtaatttgtgttcaattgatagtaataatgtaacaagttaaaaatgaaggtaattgtgtttaaaatttgagcatattttcatcaaaatgtaagttaaagtgattgtaaattttaagatcataattactttgtatatcttcaagaaaattattgttttaaaatatttatgcctattaaaattagaaggcaaaataaaaatatatgaataccaacattttaaataaaaatcaattaaata

SEQ ID NO: 179113 - DNA, 581 bp, Homo Sapiens
ggaaccggctgcgcgggagcgcgcctgagggaggccgcggggggcagggccgggactgcgttgagacagtcgccgtgcctcagtttcctcctctgcgaagggcgggaggagtcggacgcgccctagagccccgcgcgttcctggtgtagcctgctgggcccgtgttctttaagttcctcttcctcggagccgcgcgttcgaccctcgctcccgtttgtccactgatgtcccgtttcgagcccgggagatcctgcatctcggaagccccctgagtcccgaggcaaatcgggaccgtgagcccccctaccctgcagggctccatggggccaaaaaccacgtggtccttctggaagggaactggctaagccaggactgcttttctggagtgataatgtgcttgccttcccgtgtctaaggtcgaccagatggctgtgtgcaccaacctaatagaacatcataagtatcttgagttcaagataaatccataccttacctacactgtctcccaattattatcaattgtcttctgccatctcttaagtcattattatgtcaaataattaaagtcggtgtttcctttt

SEQ ID NO: 179114 - DNA, 907 bp, Homo Sapiens
  misc_feature (47)..(47): n is a, c, g, or t
tccaatgtaagctttatgcagcaggtgcagtggaatgctacagcagntcacatacacagcactaagggacccagtggctgaaagggggtcaaaaaagacttcatctgagaggtgacttggactaggaggggcaagttagaagttttaagggaagatgtgccaggaaggctaacctctcaccataatacataccccccatctaagtcaaaagttgttgctgggaagccactatgtgagactgcacatcctggcctcctctgcatccaggtggggccacatgactaccagtggccaagaggacgtgagcaggagtgatgtgtgtcagttaagagcaaggcaggtaagaagcagccgtgccttctccatcgtccctttcccttgccgccagccagaagcaaactctgaggctcccggggagggcagagcacaggatgaaaggagctgagtccctgcatcactgtgtgaaccaacgtgccaagcagaagcacccccaatggaatgttaacatgggaatctgtctctgtgtgttgaaatttgttgcaacaaaaaatactaccaatgaatgcccgtcgacgtgaaatgggcatccccgaacaaaagggaacaacatgaactaaggcacagcagtgtgacgggggcagggctggggctgtggccacgtgaaggggtcccgggattcagaagaactcacgctggtggctgcgggaaggaggatcacgcacaggggctgttgccaggggccctggtgttgctggcactgctctcaaaggaagagtgaaagttgtgaatggtttcctgtaaaatttgtctctcgcgtcccttgcctgcgttcagttcagaaatcgctgccagaatctgctgcctggacccatctgtcttaattcccagctccttcaagtcaccgtct

SEQ ID NO: 179115 - DNA, 447 bp, Homo Sapiens
ctccttttccttaaggaatccattcatgttggaagccccagatcccctaaacataatgcactagtggttggctctgggaagtaacagtcaccagagtctggaagttcttcgcttgaacttgagtagccactgtactattggaagccagatggccaggtattggcaatggccagggaaatcccaagctgctcaagagccagtggttagggaagaagaaggtcaagtggactggtaaaaattctacttcaactgcccttattcatagatacaactttcctaacagtctcactctccaccagtcccatatccacaacccactcacaggcttcaagcagcaggaccttgccatattaccctaaatctccatattgcagcagctctaccctgtcccctcagcttcttcaataatgaccttttttaaaattctcttccctgactgctatattt

SEQ ID NO: 179116 - DNA, 521 bp, Homo Sapiens
  misc_feature (223)..(223): n is a, c, g, or t
  misc_feature (238)..(238): n is a, c, g, or t
ggcgctgggtctggtggggacgcgggggtgcccccaatggtgcagctgcagcagtcaccactagggggtgatggagaggaagggggccaccccagggccattaacaaccagtactccttcgtgtgagccaaccccacccgctccaccccttttaaaccccccagccctgctcgtgagattgggctgggtagggacagaggaggccgaaatccctcccccatgncttcctgacccttgnttggccaagggcatctttgatggtacaagcagaggctcgggagaggctcccgtcacacactacaggtcccctccccagggcaggggatttgggctccatgagctccttgaggggctcttctggtccagccccaccctgggggccatttccccattaactacccccagcccgaggcagggtgagggggaagggctgtcagttacattaaggtggttgttgttgttgttttaaacaaaatggagaagcataaataaataaaaaggtttatctcggttctatcgtg

SEQ ID NO: 179117 - DNA, 551 bp, Homo Sapiens
  misc_feature (39)..(39): n is a, c, g, or t
  misc_feature (69)..(69): n is a, c, g, or t
  misc_feature (75)..(75): n is a, c, g, or t
  misc_feature (84)..(84): n is a, c, g, or t
  misc_feature (96)..(96): n is a, c, g, or t
  misc_feature (114)..(114): n is a, c, g, or t
  misc_feature (129)..(129): n is a, c, g, or t
  misc_feature (298)..(306): n is a, c, g, or t
ctgtgtcggagcatgctgggtgcaggggcagggttgttntcagggcgctatttcagaggcagcatgggnacacanaaacaaggncagggtgggccncaaggactgtcttgcccnctgctccagggggcncaatatctgccaggaacagtgcgcctcacaacacaatgctggggcgcccaagaacagtgtgaaccagccccctggaatcaagacagaaaggcacccggcctctccacaaattggcccagcccctgcagcctggaccctgacaccctaaagcaagtcacagtaggggatnnnnnnnnntggagcaaggccccccactcccactcaggcctccccattctctcagatccgacccttctctgagcttcacccgtaaggcttattccacttgtaacattgtcgacttccagaccaggccctgctaagccctggccctggcgcttgtgtcgggagccatcatcatattttgttgagtagggaccagggaaaggggaattaacttggccactgaaagcaccaataagttaatataaataggatatcat

SEQ ID NO: 179118 - DNA, 754 bp, Homo Sapiens
  misc_feature (129)..(189): n is a, c, g, or t
ctacttttcctattagttccgagcccggggtggttggtaaaactgttgggttggccgagtggatcgtcttggctggccatcacctcccctacggaactccagagtttgatcgtaggtgccttcttcctnnnnnnnnnnnnnnnnnnnnnnnnnnnnnnnnnnnnnnnnnnnnnnnnnnnnnnnnnnnnntcctgtgcatttccagctcccctggagctgaagcaggggcaaaaagggaggtggaagtaatttgcccaagaccagccttgcccactccccttctctcaaaggccaagcagagcagatattcacctcagagatcccttttcaccaaatcctttcaggataaagcacagtgtctgaaaatgttttccagccttgggtccaagaatggcaaaagtggtgaacaatgtcatgagattttttttggttatactttgccatttatgtgaaattcattgcaacctcaaagtatagtaattctcatttcagaatataaaacattttttataatgaaaattatttaaagcagtttgcttaaaaattttgcttagcagtttctgtcaaaactttgaaattattttttttcaatctagacattttattaagttctattaaaaatattaagacatctgaaaaactcagaaagtttataaaacacactcatactcaataattttcttattctttgatagccagtgcgacatgttgaagacgttacaccaaagaccaacccaccatactgcaaaaagcc

SEQ ID NO: 179119 - DNA, 653 bp, Homo Sapiens
  misc_feature (209)..(237): n is a, c, g, or t
gaaattatgcacacataactggccaaatatcagataagtgaactgttaatatatgagagaattttctggacttttaagttattaatctcaattatttgtgtggtgagtactaaattattttctgtttgtgttgatctgtccatttctgtatatagttgtccctcagtatattgagggattgattccaggtcaaccccgtcctcttcagnnnnnnnnnnnnnnnnnnnnnnnnnnnnnttatataaaatggtgtagtgtttgcatatatcctacacacattctcttgatactttaaatcatctctaaattacctgatacgtaatacaatgtaaatgctatgtaaatagttgttatactgtattgtttagggaataataatgataagacaaaaagtctatacctgttcggtacagatgcaaccattctgcctcctccctaccccctcccaaatatttttcatcctggttgaattcacaaatcctacatggttacggagggttgactgtatttgcatatgttgttaaagtggtgtttaaaatgtgcaatctgtactacaattctaaattttggattgatttgaactaggatctttgcaaataaatctcatagacattaatgtttgtaagaaatttttaattaaatgatggaaggaa

SEQ ID NO: 179120 - DNA, 509 bp, Homo Sapiens
  misc_feature (327)..(327): n is a, c, g, or t
aggacctctgcctcccgccgccgccgcacgtgcctctggccttcgggccgacaccgccccaggccccggccccaaggcgccgcgcaggtccctttgatgacgcggagcctgagccagaccagggggatccaggggcctgctgctccctgtgcgcccagaccatccaggatgaagaggggcccttgtgttgcccccaccctggctgcctgctaagggcccatgtgatctgcctggcagaggagtttcttcaggaagaaccagggcagcttctgcccttagagggccaatgcccttgctgtgagaagtcactgctttggggagacctgnatatggctgtgcccaggtggacactgagaaagaagtagaagactcagaattagaagaggcacactggacagacctgctggagacctgatcctcagtgtccttaccccctcctacctcttttctgtgtccacctgctgtgggtccagcaggtttttacttgagtacaataaaaagtctgagtc

SEQ ID NO: 179121 - DNA, 608 bp, Homo Sapiens
  misc_feature (69)..(69): n is a, c, g, or t
  misc_feature (500)..(500): n is a, c, g, or t
ggttcagggagggtggcggtccagactgtccaagctcatgccaggctgggagctgggagtgggttagtncaaggtagatggtcaaggaaggcaagcaggacaaggtggaagtcttgcggcttgtggaggtaacaggcatggcctgcattgcgtagcttcaccacagagtggttgggcaggtggcggagctgccgcagtgactctcgagccaggatgtggtcccagctctcccatacaggataagggttggagtcttcacagcccagaattgctccctgggtgtagttctgggtggaggtgggtgcgatgggcacaaatccatgtagctggtggtggcctcgcatcaggaagggcagggcatagtggccactcagcgaggggctcaccaacacggcattctgtacctccaggtccccgagcgcccgctccagcagcgctgcccgccctgcctctgtgcttgcctcctttgaaggtgccgagttcccaaaacctggaaggtncaaaggccacggcccggtagcccctctgtgacagtagctgcagtgtgcccagctgctcccacgtgtgagagttaaaggcctttccatgaagcagcaccacctccaccc

SEQ ID NO: 179122 - DNA, 514 bp, Homo Sapiens
ggccgcggggccaggggcagctcgggcgtgtgccgcagctcctcgcgcgggatctcatggatggagcggcccgcctccttcaccgtggccaccaggccctcatggcgcccgcttcagcttcagggggcccagggcctgcgtcttgtaggcctcggtcaggtcccgtgagcgcggtgggggcggaggcgtgccctcccgctttaggagcttggcctcccgacgcaggtagtcctcctgtgcctccacgtaggaccgagggatcccttgtgtgatggacccgcggatgtggtgctgctctttgaggtggtgggggctgtgtcgctccggcgggatgcacggcccatgagaccttcgatgctggctgaggagaatgctctgcccacgcggccctccatcatgtcataggtgcgcttgggggcggccgtctcatgggggggtcctgagctgcttctgccgtcctccttggagcactgggtcacagacatgccaccctcataggacaagacgtggccct

SEQ ID NO: 179123 - DNA, 208 bp, Homo Sapiens
gttcacaccatacaggccaaattatagaatcccccaaccccaagacactgcaccctatgggctataccctcaggcagggcctgcttttctaggaattgactccaatgcagaatagtgagaaatcaacaaaaagcaaaataagacaattccagacactcctgaatttacttggatttaaagaggttaataaaaacaaactataaactca

SEQ ID NO: 179124 - DNA, 836 bp, Homo Sapiens
gagatctttcctcttcacatgtgctcctcctctgatgtgccccaccccagtgcaagggcagcaccttccacccatcacccaagccagagacacagttggcacaatggacttctccctgcctttactccccatctccaagctgtcttcccacacagctcagattcattccaaatggcctatcttttatggaccagtcactcctcacctggtcggtgtagcacgcacggaatttcttggactttggctccgtcttagagcaacccacctctcccctctgcactgctgctggagtcagcttcctagaaccctgatgctatcctctcactttccctagccaggactccctttcccaagccagcctctgccttcctctgccttccttcacgtaggaaatctctatgtgatttccagagattcctggagacaggagaaggtgtgccctgattctgtgggaagcacggaaggaactggtgcaggctgtgtgtgtcacagtgttgggtgacaacgggagcagctcaccagtcttgttctgagcaagaggctgaagattgagggatacattccccatctgtttacctgccagctgtgccttggttcaaggcaaattttatgtagaatataaaatgctattacagaaaaagtgtcataagactttattcaagattttcaatgtcatagtttttggtttcataatgataaatatattttaaatgttttttaatcaagtgagtcacataataacatatcattaatgtgttatatattttgttatcacatataattacataaacaaattggtcaattgaacaaaataaagaatcctgtatttgatttaa

SEQ ID NO: 179125 - DNA, 549 bp, Homo Sapiens
  misc_feature (102)..(170): n is a, c, g, or t
tgagccaccgtgcccagcctgcattctactttaatagctaggagacctccacagctattggttgaagtcagtcagagctgaaattgaacgtttaccttgggnnnnnnnnnnnnnnnnnnnnnnnnnnnnnnnnnnnnnnnnnnnnnnnnnnnnnnnnnnnnnnnnnnnnncacattcaatcctgaacaacctgaaaacgaggcaaggtgaaaacacctggtccaatccataagtgatcaatacttgttaaatccccctacttttttcttgtgtaatcagaaataccctttgccgtcgaggatcattcagcctaaccccagttaatgaatgacatgttggtctctaggcaaccttcccattggccttgacatgtactttccccagcaggaggagccccttctgaatgtccagccttcctcattctgttagacccacctatagcttccttgtaagctaataaatcagcaacatggtttatcagtgtcctgaggttttgcttagcacaacctttggaatatggttatagtttggttgagtgaataaaactat

SEQ ID NO: 179126 - DNA, 449 bp, Homo Sapiens
  misc_feature (72)..(194): n is a, c, g, or t
  misc_feature (201)..(201): n is a, c, g, or t
  misc_feature (414)..(414): n is a, c, g, or t
  misc_feature (424)..(424): n is a, c, g, or t
gttcaagtgattttccagcgtcagctcccgagtagctgggattacaggcacccgctaccacacctggctaannnnnnnnnnnnnnnnnnnnnnnnnnnnnnnnnnnnnnnnnnnnnnnnnnnnnnnnnnnnnnnnnnnnnnnnnnnnnnnnnnnnnnnnnnnnnnnnnnnnnnnnnnnnnnnnnnnnnnnnnnntgacaancgtgcccagcctgcattctactttaatagctaggagacctccacagctattggttgaagtcagtcagagctgaaattgaacgtttaccttgggtatctggggcaactttggggcaagtgacaatccctctggggtttagtttcctctttaaaaaaggttgataacacatttcaatcctgaacaacctgaaaacgagggcaaggtgaaaacacntggtcccatncctaagtgatcattatttgttacat

SEQ ID NO: 179127 - DNA, 737 bp, Homo Sapiens
  misc_feature (707)..(707): n is a, c, g, or t
  misc_feature (725)..(725): n is a, c, g, or t
tctctgagggcatccttcccctaacttctcattttaccagcttcggcccaagcctcctccaccagatacaaagctaggggaaagaaagatgaagagatgagaaccagcattattgaatacctatgattcactaatagtaataactgcactcaacacctggcttaactatattcacttatttaacccctatgatatatttttctccattttcaaacaacaaaattgacatcaaaggtttaatcagattcctcaaagtcacccaggaccagaggttttgtatctagcttttcttaattccaaagtccatatttttgtttggcctaaagataagacctcaagtccccacactcatactgggacatcctgctcagaaatcccctagaaatctatagctctgtgttgagtccactctggatagaccagcctgctcagagggtagctgctccctttttttcatgaagctgttttactcagcaacctcatcctgtctttggaaaacaaatcagtgaatatattggttgtaacctagagacccctgacatattagaagcatgttgattatgaagggatcacccgcatttactgtgttctttaatgttatatgaaaatatggggaaactggcaaggtaaattcactggaggagcccttgaataatgagtcagatatcagaagagtgagtaaatgcaaaataattagttaccatttnctggcttcttcctgcccnacgtgccgaatt

SEQ ID NO: 179128 - DNA, 741 bp, Homo Sapiens
ctgaagcccgccttcctgcgagaccccaacggcacctttaacccccgcgccctggctcaggggccctggtgggcacggaagcggctcaacatcagggtcatttcggggcagcagctgccaaaagtcaacaagaataagaattcaattgtggaccccaaagtgacagtggagatccatggcgtgagccgggacgtggccagccgccagactgctgtcatcaccaacaatggtttcaacccatggtgggacacggagtttggcgtttgaggtagttgtgcctgaccttgccctcatccgcttcttggtggaagattatgatgcctcctccaagaatgacttcattggcccagagtaccatccccttgaacagcctcaagcaaggataccgcccatgtccacctcatgtctaagaacggggaccagcatccatcagccaccctctttgtgaagatctccctcccaggactaggctggaggaagccagtggggtcccccctgagtgggctgggccctctgtccacatgtggggacagggctggtgtggctgctcccagcctcttgctcagagctaggcccccaaattgccttcagccctaacatagtgtctgctgctgcctccctggggaccaggagctagcccagtccctggagctgtccttcattccgttaggaataacactgcagccctctccaccctccggccagcgagtggtcaaggatttttataaaaatcacgataag

SEQ ID NO: 179129 - DNA, 765 bp, Homo Sapiens
  misc_feature (538)..(568): n is a, c, g, or t
  misc_feature (734)..(734): n is a, c, g, or t
aggagccctaacccactgcctctgcctgtccccaagggcccgcctccgtgtctccacagcacaactcgggcccaggcctgacaccactggagagaccccaggcccacttctagccaggcctgtgccttcctagtcactctaactcccagagagaataagaatgcatgtaatagctataccaaccgcgcatccggctttcacatgcactgtctcccctccctccacaccccacttcttcacttcaattggcagcgccacatccaggcgtcagcccccattcactccaggaacactttcttatccccacccctttgctcctcttctgcaaagccaatgcaggtggcaggaaggtgaggggtagtggaccaatggcaaccctctgtgggaacaaggggccgaggccacgctgcctgcatctcgtgctggggacctgcatgcgccagcaccagggcttggactggatcttactcagtccatggtgcccagcctctgccccaacatgccctctgcatgtgaccgtcatgccctggatggagcnnnnnnnnnnnnnnnnnnnnnnnnnnnnnnngtccccagagagccacccctccacccactcagagacagctgtggagagggccaggagaatgggattaccctatgaccaaggagacatgggaagaagccctccttccttccacgatcgaggttccgccatcaactcggttctcggatatgcaagtacctcactttgntaacttattaacttattgggttcattaaagg

SEQ ID NO: 179130 - DNA, 596 bp, Homo Sapiens
  misc_feature (79)..(91): n is a, c, g, or t
  misc_feature (100)..(346): n is a, c, g, or t
ctatttactattatagtttgcacaaaggtaccctatagtctagtggtggctctgtcaaactaatattgtttcttttttnnnnnnnnnnnnnatggagtcnnnnnnnnnnnnnnnnnnnnnnnnnnnnnnnnnnnnnnnnnnnnnnnnnnnnnnnnnnnnnnnnnnnnnnnnnnnnnnnnnnnnnnnnnnnnnnnnnnnnnnnnnnnnnnnnnnnnnnnnnnnnnnnnnnnnnnnnnnnnnnnnnnnnnnnnnnnnnnnnnnnnnnnnnnnnnnnnnnnnnnnnnnnnnnnnnnnnnnnnnnnnnnnnnnnnnnnnnnnnnnnnnnnnnnnnnnnnnnnnnnnnnnngtgtgagccaccgcgcccagcctgggaaggttattttctggcttcgagccatagtgtcttcgtctctgcctaagagatcaatgggattctcagacctcttccagccctgaaacatcatgacagctttttctgttttccccaaagtgaattcaaggctctagactgtgggccacacagctgggtactcaggactcacactaagggggaacaaggcacagagtctttgtcccatctcaatttttctcaaaga

SEQ ID NO: 179131 - DNA, 621 bp, Homo Sapiens
gatctctttgatgacattctcattcatagaaagcgtttgatttatgagcgtaggacgaatcgcatccaggagctgcgcagccctggccgcggccgggacgccctgctccgcgctgagcttggggccagaaaccagccatagtccccacactccgccgccgcagctaagatttagcggaggaaggggcgagggaaggtagggagccaaacctatgaagaaacatcgcgttgtcattggaacttcccaagcctttgctgttaagagcccaggttcttaaatcaacccgcccccacacacatgttgccttacatgcctgcgttttctcacggtaagtaagtaggcatcagaagagagctcagaaagggaaaaataaacatggggagacctaacaagggaggggggaaaagcaacaacccagtgacacaccctagatcacattttattgatatttcatttaaagtgcttttctctctctctagaacctgcgttaatttataacctagggtgtagaaacacaccattttaaatctcaacttgctaacctgacttcgaagcattaacgatctattattagcaatgtaaacaggtttaagaatgaaatattgatttttctgaccctga

SEQ ID NO: 179132 - DNA, 812 bp, Homo Sapiens
  misc_feature (488)..(614): n is a, c, g, or t
  misc_feature (763)..(763): n is a, c, g, or t
gtggctatccctgcccccaaacagacccttgactctcaagtgtacggggtcccatttacacagggggagagcttacagcctacgttgagtctatacttaccacttagtgagcatggtatccgctcaggggcctctgtgggcatccatctcctctgcagcatctttcctccccaccgctgggcctgcacatgaccccctccttgggttagacctctgatcagtgatgaccttggtatgctggtgatggtcagtcttggcaccaaatgagacagtttatgtcatcagctattcaataaaacactaatctagttgtcaccgtgaaagtattttgtgacattgttatgtacgtgttgttacaaatgtgcatgatgcatttactacagcatagaattttgcctgggtgccagcctgaagtctgtccgacagatcatagccatgttagtcccacagtcacagaggccaatggattaaattattttatctccctnnnnnnnnnnnnnnnnnnnnnnnnnnnnnnnnnnnnnnnnnnnnnnnnnnnnnnnnnnnnnnnnnnnnnnnnnnnnnnnnnnnnnnnnnnnnnnnnnnnnnnnnnnnnnnnnnnnnnnnnnnnnnnnccctgtacctccctccctcttatggtttagacccaacaactgagcagcattaatgttaaaatagagatcatgagactgacagaacagactctttgtggcaataagacctcaaattataaacagggcctagggccatgccaggcgagggntaagtcttgtaccctactcttaaagaattaactagattctaactaccac

SEQ ID NO: 179133 - DNA, 917 bp, Homo Sapiens
  misc_feature (131)..(131): n is a, c, g, or t
  misc_feature (169)..(169): n is a, c, g, or t
  misc_feature (215)..(215): n is a, c, g, or t
attcataattctacatggctcaggaggcctcaggacttacaatcatggcagaaggcaaaggagaagcaagcaccttcttcacaggtgtcaggagacggcacgtgcacaggggaaactgccacttttaagancatcagatcttgtgagaactccctcactatcatgagancaggatgggagaactgcccccatgatccaatcacctcccaccaggnccctccctcaacacgtgggaagtataattcaagatgagatttgggtgggacacagagccaaaccttatcacataccaaacatgctccggccttgggatctctgaactggctgtccgttttcccaaatcacattctctttaataaatatctacgtatctagttcccacattctccttcagatctttaattcaaatagtactttttcctgtgaaattttccctgaccagcaacttacttggcaattcctaattcttctgcaacactgtttctatccatagtatttttaattaatatatttttatctgttttcttcctatctcccttcacccgaatataagctctatgatacaaatttttacctgttttcttcacatctaaattcccattacttaaaaatgcctgataaatagaagaccccccccaaaatatatacatttctactgtaatactatatacatgctttggaaaaccttgtgttctgcaaaattatgcattaaaattaacttacagaaaaaaacaggattggaacagatcactgacatttatgcaactctgtaagccgagcattaacaaacacattaattggtagtcagggagatggcttgaatctcctaaatagaaagcttggtacagccgaaggctgcctctggggataccaaaagaaaaatcgccaaaaccagaaaagtggaaacgcttgcttgt

SEQ ID NO: 179134 - DNA, 730 bp, Homo Sapiens
  misc_feature (462)..(462): n is a, c, g, or t
aggctggctggggaacaggatggcctgtctgtcacctgggctcctggtgtgtttcaacagcgccctctggtgcacagcttggcaggcaagctcatgagtctgggctgctgaggtcccaggagggaaccggggctgtttggccacatgggctaggccacatggctctttcctgggtgtggcactttgcatggcatagccaaaagctgccacctgccttctcggaattattgcttcaggacatttttatgacacaacttcagggatggattctgaatcatcgtctctataactcagagcccctgagctgggaaggggtctgatctgtcaccgtaaccccagtgaggacgtcagtgccaggcatctgtcacagtgtgccttgggctgggaaagttgggtcgggtgaagcccccaggagcaccgcacgactgactcaaagacatctgcagctgctgttgcagggcncagcagccatctgctgagaacgggccctcacgtcagctccacaagcaactgccagccccgtgcagcacctgcccaggttcagaagtcccttgggggcttgccctctcctccctccccatgactgagtctccccagctcatggggggggacttgcccaaagtgaagctgcctgcagccagcagtgcaacgctttgcagggcgcctcaatagtccatgattcacccttgtgcctccctcctggcaggtactgggaaagccagcagtccac

SEQ ID NO: 179135 - DNA, 666 bp, Homo Sapiens
  misc_feature (241)..(241): n is a, c, g, or t
  misc_feature (431)..(431): n is a, c, g, or t
gaggtttcatcatactgtttattttaggggttgggtggaggaggcaaaaggaaggcaagggacatcctagtaatcgtactaaggggatggctgcagtttgagctgctttcccctaggcctttctggttcagtcaccctttctctggcagcaccagcccgagccccgagacctctcctgaaggtgggcttcacagattcctccaccccatcaggagggaatggattttaggaggaacagccnacagcacctttaggcccattagtttccagggtggccggagggcaggaggaagggagcgatgtgggggcctataggggactctggcaacctaagactttacagagcagaaagagcagacccagaggcttctcaaaacccactaggacttggcactttcaactctttaccccttgcccaagaatttgagatnccttaagggttgactgtgaggggcagctagggtgtagggagtgggaatgtttcctagagcaggtccttaggcagtggggtcctcaagcaccttttctccaagctcagcctttctccacctccacaccccccgcctccccagtgcatgtcatcctttggggaacagtgtaaatttgccatttagcaaataacagcccatctgggtggctagtatacagtgtacaaaaacatgtcac

SEQ ID NO: 179136 - DNA, 315 bp, Homo Sapiens
atgagccaccgcacccggccccggaatctgcatttcaacaagctcttctgatggttcctctgcatctgggagtcgagaagttcttgctctatggcctctgaagttgcttcgaacccaattcagaatctcaacccactcctctgcctcttctagtcatagttacttttccttaagtgccacactggcataaaggcgttcgatgttccactatctttcctgcaggtgttcagcacatgatcggtggtttctagggtctgccatgggtcttactaattatttggaaccaaatataacagaaaacaagtttggaattct

SEQ ID NO: 179137 - DNA, 505 bp, Homo Sapiens
  misc_feature (30)..(30): n is a, c, g, or t
  misc_feature (170)..(170): n is a, c, g, or t
  misc_feature (209)..(209): n is a, c, g, or t
  misc_feature (211)..(211): n is a, c, g, or t
acaaatgcttacaggcatccttatgtgggnaaagaaaccttacaaagcatcctgtacaatataaccccattttaatagatgcacagaataatccaaaagaataaataccataggttgaaaagtggttaagttagagggccctgggattgaggattcaaggctaatgcttntcccctgggggctgggggtgtaactgaagtctacactcncncagccccatgggccccaagcaccctcacctggccctctgctaaggggtaggaagggggctgggaggaaaatgcaagacaggaggaggcaattaaacatgatggtgctcaggccagattccctctgaggatatcttctgaacacagttccagcacgatctgaaatgtaatttctgtaaaatactttcattgtttttaaaaagttaatccagatactgctgtcagcttttcatagtattggtttctgtaatgtcctaatagagcaaaggaaggacactcctgaagttaaaaagttt

SEQ ID NO: 179138 - DNA, 651 bp, Homo Sapiens
  misc_feature (395)..(403): n is a, c, g, or t
tgctagacagaatacagtaaagatatcaattctcctcaaattaacatacaggttaaatgcagttcctatcaaaatcctagaagatgttttgtagatgtagacaaggttattctaaaattcatatacaaatttatagcaaaaatattttgaaaaagaatagagtgagaggaggaatcagtccagctgatttcaagatctactatatagctatgtgaaccaagagtgcaatgctggcagaggcacagacacacagatcgacagagccgagatcatcacgggaacaggaccacacaaatatgcccagctgactttaaggtgcaaaagtaattcaatggaggaagggacagccttccaacaaacggtgctggagccagcgggacccagctataggattnnnnnnnnngaactttagccctaagtcttacacattacacaaaaattaacatggcctcacatgcatacttaaatttaaaactataaaacttcttttaggaaaaaacagataacctttgggatctaagactaggtagagttgttcttaaatgcaacactaaaagcaacagtccataaaggaaatatcagtaaagtggactttatcaaaactgaaaacttttgctctgtataaaaccctgttaagagggtgaaaagatg

SEQ ID NO: 179139 - DNA, 840 bp, Homo Sapiens
  misc_feature (348)..(348): n is a, c, g, or t
cttcccagccttcagaaattgccggtctgggagttgggggcaaggagaagatcctgcaacccagtgattccatggaaagcagaaagaaggacataaagaaacggatacttggtgacatctttgactcactggatcaaaccttgcctgaagctcacatttctgaaatttccagatacaagaacaaatacttcctctttattgttttactagatttgagacaagctttaagtttctcagactcttcctcttcctaacagatttatcagaagctgaaagcttctgatcttgttgggatgcggatcgtgtcaggagaaggcttactttgcacgcttttgcttagtctggttngcctaactcaagaacctcggcatggctctgttacttccctactcagaaaagcacccctgcgagacactcactaggcctaaccctgcctttaatttttagaaattagacctttacgagaagcacagttttgtcttcagttccctctccccccacccggaatggcctgagccgaagccagctcccctccgagaagtcattaccgccctgacttgcgtttgatatttagacaccttggtcacaacatcttgcattctctcgggatgctgatttctaactgctctttggcctttcctgcattggtcctcctcaggcaggggatccctgctcttctatattagtgagaaaaccaaggctcagagaaactgtggattttctaaggatgctggctccccgtcccctgtccaccatgagtcaaagcaatgtgagtccctcaccagatgcaactgcccagtcttggactttccagcgaccagaatcatgagccaaataaaa

SEQ ID NO: 179140 - DNA, 534 bp, Homo Sapiens
agccttatcttcaacagctgccaaaattgaagaacaaaaagaatctttgaaacttcccttcaactggtcatcctcttccctttttctctcctttaaacactgttccaattcattatgatggccccaaagcaaagacagacatggaagtgaacattggagtggaaggaatgacggggagcaaatgtctgctttctttctatcattcttgtatcaactctaaattgaaaccccaaatcactgaaatctaaaaaatcacatgaaagcaagtcaatgactaaaagaaaatgaaatgagagaccctatcagagaaatatgaaagggaaaataccactgattaaataagttatgggaaaaataaatcattacaccattaaatgtatacgtcgacatactgtatgttgttatgtgcttattgtctttcaccagtagaatgtaagtcccataagggtaaggactctatatattcttttcacagcagtgtctctagtgcatggaacagttcctagcacaaaataaacagttgttgaataagtg

SEQ ID NO: 179141 - DNA, 801 bp, Homo Sapiens
  misc_feature (25)..(25): n is a, c, g, or t
  misc_feature (722)..(722): n is a, c, g, or t
  misc_feature (733)..(733): n is a, c, g, or t
  misc_feature (759)..(759): n is a, c, g, or t
attaaggctctaagttcaaacaccnttcttgggaaaagctctacaggataaccacacatgctcaactacggggccagctgctgcagctgtgggaccccatcctgtggaagaggagagaggcactaaaaagatgaggtagccaggcctgtgcccacactacgagacctgcatcaccatggtgtgaggagcagcaacgtgggtcaactcggggctgggacgagatggaagagtaaaaggcctttcttcataggcctgcctattttatgaccaccagggtagacttttgtaattaaattaaggtccacatgactttagaaagacaaactaaaaaaccccaaccaaacgagtcctagctgtagctaactctgatttctgtaaattggatctgactttttctgcttacattcacttaaaatctcaaagactcaatgggtgtgaagtgctaacaccttgcggcaaaatctcaaattcatctgtgccaggccctctgcacagcagggctcagcagggcaggccagggctctggtccctggtcccttgctgggggaggtgttccatccggccagcgcccggccatgcagccacgtgactcaagcacgggaagtgcaggggcccagacacatccaggctaaagggcagtgactaggggagggctgaccccaagctgaacagggttctaaccaaacgctcagaagctcccaggtgacagcaaccacgcaacnatgaacacacnactgggtctgtactggaatttggggncctcaaggcttcaaggtggcagcataaacagggaggtggggc

SEQ ID NO: 179142 - DNA, 837 bp, Homo Sapiens
  misc_feature (18)..(18): n is a, c, g, or t
  misc_feature (785)..(785): n is a, c, g, or t
  misc_feature (819)..(819): n is a, c, g, or t
attggccctcgggccagnaattcggaacgaggctgattctgagcagcagttctgcccggcactgactcactggccctgccatgcccacgccactgctcccgctgctgcttcgattgctgctgtcccgcctgctgcagcctgctgcccgcctggcccgccaatacctcctgcccctgctgcgccgattggcccgccgcctgggctcccaggacatgcgagaggctttgctgggctgtctgctgttcattctcagccagcgacactcgccagacgctggggaggcctcaagagtggaccgcctggagaggagggagaggttaggcccccaaaagtgaggccacaagtcctggcagcagctgtatccacaaaatgctttcttttggagtaggataatcctggcaccagcactgaccgaagcctgcccagtggacagaagatatagtgagggttgtgcatgagagggatctgccacagacatgcctctccactccccaacagaaatgtctttctggaagaatgccttgcatctagcacaaaactgattattgcccctctgtcctccagcagttcctcccaaagaccactcctaatcacctctggcctcaggcgggaggggaactaacacccacccacccctgccctccctgcaaatgggaacatcaaggttcccagtgcttaactgagggacaagtgacaatttagcagagaggcaagatttgaatccagactgtcttccagactcaggacctaccttaaaataatatctgagttgcttatggaggcanacctgcctgcaaagcccagcactcagcaagtgcncaataaatatttgatttg

SEQ ID NO: 179143 - DNA, 482 bp, Homo Sapiens
gtgagtccagggagcatgagaaattcatccaggccacacaggctcaggcacctatactcctgcccaccccctgcaggatggatattaccatttgaaatactttggcgcttgcagtgagatcttgcttaaaagaagaaacccaccaaattctagaatcgcagaggtgggggcacctatgtgacaaatgagggaacagaggcacagagattggcagggacatgctcaaagacatggagagcctgggcagaggatggccccaagagggggtggtgcctggccctgcttcagcctgacattgtccaagcctcccccagcccactcctaaaatggccaggccccacttcttcccaggtgggctacattttctgctgtcccggtcccacttccttaccttttctccttaaatctgatttcactgtgagggtgggaggtgggcaaaggggtgaaaaccctcttccccttacttggtaagcacatacaat

SEQ ID NO: 179144 - DNA, 505 bp, Homo Sapiens
ttgaaatatttgattctggagcttaattaagccagcagtgctcaagtatcattctgatctgaatctatgacaggcttcctcatcagggttggtgatggacttcaggagcctatatcagcttaaggttttcccagagtcctgagccagggctcagggtgtgtgtgtggggctgtgccagcccagggataaggtgggtagggaggggcctctgatccccactgagcaggtgctgggggacacaccctcataccccccacaccatgggcctgcagaaccctctactttcgtctcctctactttcccatcagggaatgtgacctcaggcagcactggcgaggggtgaacagaaagctcacaataaaatcatctcatcagaggtcacagagccaagacgctcctattgaactttcctgccaagcagaagcaagattccatgtcctctcatggcctagacccctctaagccacctgccacagctccggaaatgaacacagagaaagaagcc

SEQ ID NO: 179145 - DNA, 891 bp, Homo Sapiens
  misc_feature (355)..(414): n is a, c, g, or t
aaagcctagccctgggaggggcagtctctccctactcagcgagaaatgccagggtatcaaaagtacagaaaataagaaaatatagttaatataatctgccctgtgatgagcagatgtcaaatacagaatctaagaaaacatggagcaaaagacatggcttcttcgtggctgcctagtaatccatcacaaattacacaaaaatgtataaaaatgtattccacaaatgacacagtagttctgcttttattggatagttatctctttgtagatgtttgatattctaaataattcctcaatgaatggacagagaggaaaaaagataaaaaagagaattcatgaatttactttaactgtnnnnnnnnnnnnnnnnnnnnnnnnnnnnnnnnnnnnnnnnnnnnnnnnnnnnnnnnnnnnaaatataacataatcatatgattatgatacaactgaatacagaaatgattataccattatgatgatatataatatttgtttgcttttgtctacctcaggaagttagtaaagcaagcttagatctgtatttactgacttctagaaatgcccacaatatattgacatgtgaaagaagcatactacagaataatgcatgtatttaaagttcatttcagcactaacaatcaaccaaccaaacccctttagataatatgctatatatattcatttcaacaaggagataggtatgaaggtacataccagaccactaaaattggtttccactgaggaatgcgaagcataggtagaaggaaggcagggagagataattaactttgtttttatactttttcatattgtatcatttaatgtattacaacagaaatgtattagtataatttgaagacattcaataaatacatttttttaaaaaagata

SEQ ID NO: 179146 - DNA, 401 bp, Homo Sapiens
  misc_feature (26)..(26): n is a, c, g, or t
  misc_feature (318)..(318): n is a, c, g, or t
  misc_feature (330)..(330): n is a, c, g, or t
  misc_feature (381)..(381): n is a, c, g, or t
ggaaaagcctagccctgggagggcangtctctccctactcagcgagaaatgccagggtatcaaaagtacagaaaataagaaaatatagttaatataatctgccctgtgatgagcagatgtcaaatacagaatctaagaaaacatggagcaaaagacatggcttcttcgtggctgcctagtaatccatcacaaattacacaaaaatgtataaaaatgtattccacaaatgacacagtagttctgcttttattggatagttatctctttgtagatgtttgatattctaaataattcctcaatgaatggacagagaggganaaaaggtaaaanagaggattcatggaatttactttaactgttattttttaaatatgtgttatntggtattaattatgtatggt

SEQ ID NO: 179147 - DNA, 754 bp, Homo Sapiens
agagtgaatgggagcaagatggactaaacttcagagaatattattttagctcacagtgcagatctatatcacctatactttagatatcttttaattaaatttttatagattaaaaatcaaatattactgaaatattgatatatgtatgcatatcaggttttttagggtaataaatttgctcaacttggacttaagtttttgtgaagaattcttataagtgttgatttctctctaattagctatgtggaacaaacgtaatttcctaaaaagaagtaagctagtaataactttgattttatatttctccttaaatgacaaaccaattttactaccagaactcatttcaaaagtatttctgggctatttgtatgactagctcattttgtgaaataataaaatacataaaaatagtaaggctcagtaacttgtccaaataaggtatttttgaggatagtacacatgcaaattattacttcatatcacattttaaaagggcttataggtttgaaagttttcatatagtaggggtgttctgtctgtaggaaatgtagtaagttgattatagcaagaattttaattcctttctcaaaaagggaactgtcagtgtcttctattcttttaaaaaatcttaactgccaggataaaaaagcgaagcaagtttttacggacggtagtaggaaacatttgcctcactatccaaataattatgtgtactcattctaagtttggtcatttttttaaaaatataagtcag

SEQ ID NO: 179148 - DNA, 498 bp, Homo Sapiens
  misc_feature (62)..(62): n is a, c, g, or t
  misc_feature (65)..(65): n is a, c, g, or t
  misc_feature (107)..(107): n is a, c, g, or t
  misc_feature (120)..(120): n is a, c, g, or t
agatgcggcccatccccacggtggcccgcgcctacccactggtgggccacgcgctgctgatnaanccggacgggcgagcacaggatgcggtatttccaaacccctgncctcggtcttttnccacctcaccgctgctcagctctcaaagccctgccgtttcctcctgccttggcttgggaagccttaggaacagaagctccctgggagcacagagcggttttaaactggccaacaccttaacgcccagagccgccctcctctcgctgccactttggaaaataagagactagagattcactggacgcttcctcccggcatcacaagacttgactgctgcttcagttcccgcttgaccttcatactttagccctttaaaggatgttacataataacaattaagagacggcagggccttcaggcagacttctttggagggtgtcaaacgccttgtttattaaagagtgaattttttaattaaaatcatgttttaaaacagaa

SEQ ID NO: 179149 - DNA, 329 bp, Homo Sapiens
  misc_feature (304)..(304): n is a, c, g, or t
atagggccttgccctggagcagctcagccatgatgcagcccacggaccagatatccactgtttggttgtaatgcatccagttgagcatgatctcaggtgcccggtaccagcgcgtggccacatagccggtcatctcctcgtccgcctggcgcgccagcccgaaaatccaggatcctgagctcacagtcctcgttcacagccacgttgctgggcttcaggtcccggtggatgatcccggccgagtggatgtacttcagcccgcgcagaagctggtaaaccaggaattgaacgtgctcgtcaagtnccaggtgggcaccctgaatgggtcg

SEQ ID NO: 179150 - DNA, 581 bp, Homo Sapiens
  misc_feature (70)..(70): n is a, c, g, or t
  misc_feature (72)..(72): n is a, c, g, or t
agggtgtttctgtgcatgcaaagggctgcgtgtgcgcccctgtgtgtgtgcgcacccttttgtgtgcatncnccctgctgtgtgtgccggtgcgcacatccccagggccgaagcgtgagagtggccccggtgtgtcccggcggcgctgcttggctctctcgcctcactttgaatgcttaccgtctgaatctcccactgcagacgtcaggccacgtggccctgagtgttcgtgacggccgggccggctcagggatcccaggctgtggctcagggatcccaggctgtggctctgggatcccaggctgtggcgctggggcggtgcgctggccgtgggtcgagaggtcgctgcgccctgcattcctggccgcgcgcgcacaggctggaatccgtacattccattcataacattcccgcaagcgaggggaggagacgcaaagccggggagtgagtgattaaagaaaagaaagaagggcttcttgcagctccgggctgtgttttttcctgcgcgccctggcgcagtccccggctcggaaaggcaggagcacgtgagcggtttgcagagcagcccggcccagccgcgc

SEQ ID NO: 179151 - DNA, 461 bp, Homo Sapiens
  misc_feature (312)..(312): n is a, c, g, or t
  misc_feature (317)..(317): n is a, c, g, or t
  misc_feature (333)..(333): n is a, c, g, or t
  misc_feature (357)..(357): n is a, c, g, or t
  misc_feature (415)..(415): n is a, c, g, or t
  misc_feature (424)..(424): n is a, c, g, or t
ggagtgaacaactctcagttctaaccatgccctttgcttccttcctttgaagcccagccctacgaaccatctctcttcaattcataacaagcacgtttgaatccaagagcctaagccccagttttctacacgtatctgtgctgactgcattactgaggtcaaccttaatcaccctgggactgtcaaactattgatgtccataaggattctctgtgctggcattccacacacacgcagcaaggttcaatgagccacagtacttactctctgacctctattatttcaaccatttaaaaattgtgggccacgggngggtngaggtggggaggttcngtttgagccctgggaggtcgtggntggcagtggagctattaatgcccagcaacttgcaattccaaccgggggcgaaagagcngagaccctnttttcaaaaatttaaattacttaattaattaattaaa

SEQ ID NO: 179152 - DNA, 569 bp, Homo Sapiens
gccaaaaatgattacccattaaaaggcaggctggaaggcttcctggttttaagatggatcccccaaaatgaagggttgtgagtttagtttctctcctaaaatgaatgtatgcccaccagagcagacatcttccacgtggagaagctgcagctctggaaagagggtttaagatgctaggatgaggcaggcccagtcctcctccagaaaataagacaggccacaggagggcagagtggagtggaaatacccctaagttggaaccaagaattgcaggcatatgggatgtaagatgttctttcctatatatggtttccaaagggtgcccctatgatccattgtccccactgcccacaaatggctgacaaatatttattgggcacctactatgtgccaggcactgtgtaggtgctgaaaagtggccaagggccacccccgctgatgactccttgcattccctcccctcacaacaaagaactccactgtggggatgaagcgcttcttctagccactgctatcgctatttaagaaccctaaatctgtcacccataataaagctgatttgaagtgtt

SEQ ID NO: 179153 - DNA, 780 bp, Homo Sapiens
  misc_feature (397)..(405): n is a, c, g, or t
  misc_feature (533)..(620): n is a, c, g, or t
aatccttaattgttttatttaaaataaattaatcattcttaacagaggctcacaggctttgagaagattccagattcattcttgataaatactagaaacaaacaaaagacaaaagctctcagtaactcaggaattgagggatttagtaagataaatagtttatatttttaaaagttactatgatgataatggttaagcactaagaaaattctcagtaaaatcagaaacaatgtaaggacgccttcttgcaacagtgttagtgttagtggatgatttttagagattcaagccaatgtcataaagcaagaatatataatgcagtatatattttcaaaataaaaatataattatttcataacatggttgtttcaccggaaaatgcaagataagaatctgnnnnnnnnnttggaaataagaaaattcagtaaggtaaactgatataagataattgtacaagaattttatatttttgtatagaaacctagctagaacgtgcaatgggaacaaaattttatggcaaataaataaatacnnnnnnnnnnnnnnnnnnnnnnnnnnnnnnnnnnnnnnnnnnnnnnnnnnnnnnnnnnnnnnnnnnnnnnnnnnnnnnnnnnnnnnnngcagataaacctttaaacataaatattttcaactcacaaatactgctctagcaaaataaacattaacaataatgtccataaaagtccacataccagtttctggcacttgactgcattctaattttcatcaataaaattgagtaggaaaatagaaaagttt

SEQ ID NO: 179154 - DNA, 511 bp, Homo Sapiens
  misc_feature (120)..(128): n is a, c, g, or t
  misc_feature (256)..(343): n is a, c, g, or t
tagagattcaagccaatgtcataaagcaagaatatataatgcagtatatattttcaaaataaaaatataattatttcataacatggttgtttcaccggaaaatgcaagataagaatctgnnnnnnnnnttggaaataagaaaattcagtaaggtaaactgatataagataattgtacaagaattttatatttttgtatagaaacctagctagaacgtgcaatgggaacaaaattttatggcaaataaataaatacnnnnnnnnnnnnnnnnnnnnnnnnnnnnnnnnnnnnnnnnnnnnnnnnnnnnnnnnnnnnnnnnnnnnnnnnnnnnnnnnnnnnnnnngcagataaacctttaaacataaatattttcaactcacaaatactgctctagcaaaataaacattaacaataatgtccataaaagtccacataccagtttctggcacttgactgcattctaattttcatcaataaaattgagtaggaaaatagaaaagttttgaaaaat

SEQ ID NO: 179155 - DNA, 554 bp, Homo Sapiens
  misc_feature (175)..(175): n is a, c, g, or t
  misc_feature (177)..(177): n is a, c, g, or t
ggcttcactcagctcaaccctgcagaccccccatatgagaacccccctcctcccaccagctgggggagatgacatcactgctctctccatggggagggggctcacagggcaccaagttcgggatcctaggactggcaggacctgctggagcctgagatgggccccaggggcctgnanggttgcctcctcctgtccagacccagccttggcacctcccaagactgccaagggccctaccatggccccacagcccccagggctggccagttccatctaggagggtgcctcttaggccccactcttcaggctaggatggagaggcagatctgggcctggcgaggtgacctgcttctggaggggcagggccgcacccgagagcagggacaggtgcccgaacacagggtctccaggacgtagcgcccccccgcatacttgaatgtatgtgcgtatttattgctcacgtctgtgccatgttgtcaatgggtcctttccaacccaagaggtacatttgtttttctgtttttcctgaaaaataaagtcggccaagtgagaaa

SEQ ID NO: 179156 - DNA, 745 bp, Homo Sapiens
agcaccttggcacagctgaagcagaggaacacgctgaaggatggtatcatcatgatccagacgctgctgatcatcctcttcatcatcgtgcctatcttcctgctgctggacaaggatgacagcaaggctggcatggaggaagatcacacctacgagggcctggacattgaccagacagccacctatgaggacatagtgacgctgcggacaggggaagtgaagtggtctgtaggtgagcacccaggccaggagtgagagccaggtcgccccatgacctgggtgcaggctccctggcctcagtgactgcttcggagctgcctggctcatggcccaacccctttcccggaccccccagctggcctctgaagctggcccaccagagctgccatttgtctccagccccctggtgtcccagctcttgccaaagggccctggagtagaaggacaacagggcagcaacttggagggagttctctggggatggacgggacccagccttctgggggtgctatgagttgatccgtccccacacatgggatgggggaggcagagactggtccagagcccgcaaatggactcggagccgagggcctcccagcagagcttgggaagggccatggacccaactgggccccagaagagccacaggaacatcattcctctcccgcaaccactcccaccccagggaggccctggcctccagtgccttcccccgtggaataaacggtgtgtcctgagaaaccac

SEQ ID NO: 179157 - DNA, 721 bp, Homo Sapiens
caagtttcatatcctgggaaggtcttcacatgctccagccacctgtaagctatgtctaatgtgccagaaactcgtccagcccagtgagctgcatccaatggcgtgtacccatgtattgcacaaggagtgtatcaaattctgggcccagaccaacacaaatgacacttgtcccttttgtccaactcttaaatgacggacctgactggggaggaagaagaagagaaactgatgtgaacagggaagcgcgggttcaagatttctaaaactctatatttattacagtgacatatactcatgccatgtacatttttattatatagggaatgtgtgtatagaaagtctgtattccaatgttcgtaaatgaaactatgtatattatgcagaaacagtctgttccccctcatccttgcaattcctttgggggatgcagattgtagggaagatgatgtttagtttggccttgaaattatgatatccctgcccagggctgttttcaaatacaatataaaaaccacctaggaacctgctgttgctctaaggccattctgctttggtttggctcagcctctagtccatttccttaaggctcatgtatgcagatttaaagcctggtgctcacccactgtccaaccagatgccttgcttaccgaaagcctccagaagcctcagtattgttttagccactctactccaaatggataaaatgagactctgattgagg

SEQ ID NO: 179158 - DNA, 456 bp, Homo Sapiens
ggatatcagacagctctggatataaagaagaagataggacaaaaactggaagattggttgaaagtatcttcatgttatatgccaagtccatgcagctaaacaactgtcctctcctgctggaggctacaggtttattctctggagtgtaaaatagaggatctctgggctggtagacagcaggcacagatcgaggtaaggaatcacatcagttcctgccacttccctccaaaaaaagataaaaatattgacaccaggacttcccccaatgaaatggcccagacagaatatcaagcggtaaagccaccaaccaactactcctctccatttttagtgtcctattcttaactatgagaaaacaaccaagggtcacaaagcatcaaagaaagagacaaaaacaaacaaatagataaaagcagcttttatgcaacagaggctatgcaagtagaagaaaacttt

SEQ ID NO: 179159 - DNA, 460 bp, Homo Sapiens
  misc_feature (441)..(441): n is a, c, g, or t
aggatatcagacagctctggatataaagaagaagataggacaaaaactggaagattggttgaaagtatcttcatgttatatgccaagtccatgcagctaaacaactgtcctctcctgctggaggctacaggtttattctctggagtgtaaaatagaggatctctgggctggtagacagcaggcacagatcgaggtaaggaatcacatcagttcctgccacttccctccaaaaaaagataaaaatattgacaccaggacttcccccaatggaatgggcccagacaggattttcaaggcggtaaaagccaccaaccaactactcctcttccatttttagtgtcctattctttaactttggggaaaacaaccaagggttcacaaaggcttcaaaggaaaggggacaaaaacaaacaattggttaaaggcggttttttggcaacnggggttttgcagtaggagg

SEQ ID NO: 179160 - DNA, 748 bp, Homo Sapiens
  misc_feature (42)..(42): n is a, c, g, or t
  misc_feature (76)..(76): n is a, c, g, or t
  misc_feature (153)..(153): n is a, c, g, or t
  misc_feature (692)..(692): n is a, c, g, or t
ttggagcctggggctgggaagggctcacacatttggtcctgntctctctctctgtggttcttccacatggtctttncagtgttgtggcttcagggtaggtggttttcttccatggcagctcagggctccaaaggcacatgttctgagaaaganctaggtggcagctgtatcaccccttattaccctgtctcagagttcacacagcatccttctgctgcatttaatcacaaaggtccactcatgttccaaaggaagagacacagattccacctcttgttgagagtagtattaaagaattggtggacacattttcaaaccaccataatctgctctcaggccacatattatttacatccttcccacatgcaaaatatactcaccccctcccaagaccttctgaaattctcatttattaagacattgggctcaggctcaaggtccaggactttatcagtgaaatcaggtcacgtgtggataaagatacttgtgtgtggtcctgtgagtacagctcacgtggcattccttgaggtctgaaaaatctgtcagctagtgagacaaattatctctccctcatacccaatatacatagtggagtaggtatggggtaaccattataaataatcccattcacaaagggagaaaaaagaggcatgtggcgacctccatagcaagtctattgtctttcacggttnctggggctagaaaaagctaatctcctcgtgccgaattacttgggccgcgtagggcc

SEQ ID NO: 179161 - DNA, 655 bp, Homo Sapiens
  misc_feature (20)..(20): n is a, c, g, or t
  misc_feature (37)..(37): n is a, c, g, or t
  misc_feature (66)..(66): n is a, c, g, or t
  misc_feature (79)..(79): n is a, c, g, or t
  misc_feature (93)..(93): n is a, c, g, or t
  misc_feature (100)..(100): n is a, c, g, or t
  misc_feature (143)..(143): n is a, c, g, or t
  misc_feature (153)..(153): n is a, c, g, or t
  misc_feature (236)..(236): n is a, c, g, or t
  misc_feature (365)..(447): n is a, c, g, or t
cccaacaatggcaaaattanacttaacccccttcccnaagacccttctgaaaattcctcatttaantaaggacattggnctcaggctcaaggncccaggnacttttatcagtgaaaatcaggtcacgtgtggataaagatacntgtgtgtggncctgtgagtacagctcacgtggcattccttgaggtctgaaaaatctgtcagctagtgagacaaattatctctccctcataccnaatatacatagtgcagtaggtatggggtaaccattaataaataatcccattcacaaagggagaaaaaagaggcatgtggcgacctccatagcaagtctattgtctttcacggttctggggcttgactannnnnnnnnnnnnnnnnnnnnnnnnnnnnnnnnnnnnnnnnnnnnnnnnnnnnnnnnnnnnnnnnnnnnnnnnnnnnnnnnnnctcactcatatatatggcacctggtctgggaggacttaaatagctgggattgggagcagctgggcttcttcagacacctctttctaactctatgtgatttccctgtggtctcttcagcatggtagcttcagggtagctattcttacatggcaacccagagctctaaaatgcaggggcatggggaagctgtatcacctcttatgacccg

SEQ ID NO: 179162 - DNA, 815 bp, Homo Sapiens
cacgccacgcccgttgccttccgatggacagttccttacctgccgggtcggcctccgcagagagtggtggtcttgaaaacccagttttgggagaatacctgccgcgcctcccgcccaaatacccagaggtttcatagccgccatcgctgcggtggaggaggccgcctgttgcgtcccaccccaccagaaagcctaacactggcctgaagcgtaatcttaaagtggtaggggaaaataccgatctagcgcagagagcaaaacacctccgttctgggtttaatgggcaggtctggaggtgaggtatgccgtccgcactcaataattacttgcaggatcggattgtttctccagtgggtggggactgcaggatgtagcattgagtgaaccctggcagatggaaagataaaacaagggtgatgaataaaaaacaattacaacactaaccccatttccctccccccgtgaaatgagggaatggccccagacattttcccagacctcttctgtccctaagagtggagctgggtgacagagcaggtgcaagccggcctttcccctgccctccccggggaacgcactctgttcggtgagagcaactcagctcgcattgactcctttcagctgcaggagtgtggccgttcagttctcatttgaactgttgacaacagttgtcttctgagaatcatgagttagagcctccctttaggcttctgactccctcaaaagtaccagacaacacaaacttttcccctcttgttaccttggctctctaagctgtatctacttctatacaaggcgaacaattttgtcttttt

SEQ ID NO: 179163 - DNA, 818 bp, Homo Sapiens
  misc_feature (108)..(108): n is a, c, g, or t
gcccctgagatttgggtttattcagctccacccaaaactaaaccaaggctatgacatgtcccatgggaccaaaccatacattgtggaccatgcacctttcccttcccncaaggatgctgctacctctggagtggtgggcagctgcccatatcaccttgggaggtagagagggatttgctgggtgctgggtctgtggcaatcagggctcaactatggctgcctcctcctcttcctctggatcaggaggcgcagggagcagggagatgtagacctcattgacctctgtgtccaaatgtcggccaccccgaggtgcttccaggtttaagatgccatcatgggagagagcagctcggactcgccaggggtcgacatcagcaggcaggacataggtgcggcagaactctcgggacacgaagccgtggcggtccaagcgctgggggtgccgggcaaaacacctcccagcaggttatcccacaatcctcacagtcacctcgtctggggtaaagtggctcacatccagaaatgccctggaacttgccctcactgagcctaagctcggaggcccctgccctgctgccctccccagctggggcggcccgaggccggacatagtagccatggtagagtgtgggggtcaggatctcttctggcaggaggccttctccgaagcgctgctcacccaggcggctcgggttggcaaattcgtaactcggcggtggccgggtgggcatgtggcactgagcggcccgacatggctgcagatgcagcagaagccctggtccgaggtgcagccccaacaggcgcagcgcgacccctcc

SEQ ID NO: 179164 - DNA, 691 bp, Homo Sapiens
  misc_feature (12)..(12): n is a, c, g, or t
  misc_feature (554)..(554): n is a, c, g, or t
tgtgtttcaagnaggattaagcgtaaacacatctatgatacagaatccttaattttgcactttttttgaatatttgtacagaagttgtaaattttttggaagagaaattatatttgtagcaaaaaaagacagcaataaatggaatcagtgccatgctcttgaaataatgtactaagtcttagaagttgatgataatatatattttttaaaatcccaactgaagtttttgtgaagttcgttgtcctggtcctcaaattgtttgtgggtacactctgtaaacctacaacagggcctgccaaaaaatcggagggttcctcctcatctccatctcacaaatctcaatttgatggaaatgttcattttagtgtaatttcagattcgttgccagagattcaggtgatagtaataagtgtcattctgcttctgctgaaaaatgaaaagggtcctgaagtgtggacactgattgggagtgtgacattgtatcagaaatgaccgaaatctattcccaataccagtttttccttccagacatttctttagattgtcttttaccntagtgcttctctatgatcctgaatattatttgatttttatcttcttgctctttttattaaaatctgggcactctaaaaatgaaaacaaatttctatttgcaatgttcacttttaaaaataaaattaatggtgctacg

SEQ ID NO: 179165 - DNA, 374 bp, Homo Sapiens
  misc_feature (88)..(88): n is a, c, g, or t
agaccaccaggctgcccggtcaagcacaccctgatgaccgagctggacttctgacccatgggccagtggaggcggggaggaaaggccncctgcacaccccgatccctgctgccccctggtggccacacgtaagctcgaggccttggccttgacccttctttggaatcaggcccaactccggatctctgaccacctttttggtattggactctcccattttttccttgaacacatggacaaagaggcccgggggagcagggcctcgaaccctattcaggccaacttgagccacaagctgggttcttcacctatgtcctgctccctggctccatgaagcgaatccaaatctttccaagaggctgggcaccagctgt

SEQ ID NO: 179166 - DNA, 963 bp, Homo Sapiens
  misc_feature (810)..(810): n is a, c, g, or t
  misc_feature (826)..(826): n is a, c, g, or t
  misc_feature (844)..(844): n is a, c, g, or t
  misc_feature (863)..(863): n is a, c, g, or t
  misc_feature (911)..(911): n is a, c, g, or t
  misc_feature (930)..(930): n is a, c, g, or t
cggctctctccggcctcacgggctgcaccacccgctgttttgagggctgtgagtgcgacgaccgtttcctgctttcccagggtgtctgcatccctgtccaagattgtggctgcacccataatggccgatacttgccggtaaactcctccctgctgacctcagactgcagcgagcgctgttcctgttcctcaagctctggcctgacatgccaggcagctggctgcccaccaggccgtgtatgtgaggtcaaggctgaagcccggaactgctgggccacccgtggtctctgtgtcctgtctgtgggtgccaacctcaccacctttgatggggcccgtggtgccaccacctctcctggtgtctatgagctctcttcccgctgcccaggactacagaataccatcccctggtaccgtgtagttgccgaagtccagatctgccatggcaaaacggaggctgtgggccaggtccacatcttcttccaggatgggatggtgacgttgactccaaacaagggtgtgtgggtgaatggtctccgagtggatctcccagctgagaagttagcatctgtgtccgtgagtcgtacacctgagggctccctgctagtccgccagaaggcaggggtccaggtgtggcttggagccaatgggaaggtggctgtgattgtcagcaatgaccatgctgggaaactgtgtggggcctgtggaaactttgacggggaccagaccaatgattggcatgactcccaggagaagccagcgatggagaaatggagagcgcaggacttctccccatggtgagggatgtagtatngaaaccaggcttcttnggggcaaaggcacctggntcctcattgggattaaagncaatcaaggttggtgtttaatcttgcaaaccgaagttctaaatgtctnttgtcttttccaatttatngcttattcaattcattccacccaaggacccaaa

SEQ ID NO: 179167 - DNA, 433 bp, Homo Sapiens
  misc_feature (14)..(14): n is a, c, g, or t
  misc_feature (51)..(51): n is a, c, g, or t
  misc_feature (297)..(297): n is a, c, g, or t
tgtcaacaaatgcnccagctgggaaaactttgtggggcccctgtggaaaancttttgaacggggaacccagacccaatgaattggccatgaaccccccaggagaagcccaacgatggaagaaatggaagaacgcaggacttctccccatggtgagggatgtagtatggaaacccaggcttcttggggcaaaggcaccctggatcctcatgggatgagggcagtcagggtgggtgtttagtctgcaagcggaggtgctaaatgtctgtgtcttgcagttatggctgatcagtcatccnccaggaacgaagatttcctgaagaagacctggtccctctggaggttgcagtggctgaaggatgcatcatgtgctcctaccctgctctaccgcttttctgggtcacagaggccaaatgtgagagcattgaataaata

SEQ ID NO: 179168 - DNA, 351 bp, Homo Sapiens
tgagccaccgcgcatagccactttagattaactttacttatctactgtcattcagtatctactgaactcctacagcgtgtagtcactgtgctaggcagggctagcaatacagaattgatagactgctgtccttgagttgaatgcttagtttatttatttctattctgtccttgctagataaaagcatttaagctataaagtttcaactaagtagagctgaaagtatctcatttattgattcagcaaatattaattgggcatctcttctgaggccaagcattattctaggtggggatttggcagtgaacaaaataaaacaacaaaagcccttccttcatggagcttgtttac

SEQ ID NO: 179169 - DNA, 440 bp, Homo Sapiens
  misc_feature (358)..(358): n is a, c, g, or t
ccagccctgatttgaaggcagcaggtatctcttgcagctgcagcactccaacttcctctaatggcacggtcaggtcgcaggaaaccacagcggcagcgcggtgcagcttcccacgcccgcccttcgagcttgttccccagcggcgcagctcagcctcctccaagtctcagcctcataccggcggggagacaaagctggcgctgggagtgggaaaagggcccgcgaaatggcctcaagatcgtgcctttgttagaagaaacatgggtacgctccgatgcgacgcaggcttccaaccccagcggttcggtggtggtgcagtcgttgaattgcgctggccctaattaatttcagcctggcnagggtttcgcgtttatttgcggagagagactcttaagcattctgtcaacacatatggcaaatagaaagcctcaaccataaca

SEQ ID NO: 179170 - DNA, 672 bp, Homo Sapiens
  misc_feature (235)..(252): n is a, c, g, or t
  misc_feature (494)..(494): n is a, c, g, or t
tcagctacaatttattttcctattgctttttggaatgtaatttaaactttacacttcagttatcccacttgtcaaatgcatacatgatttcgtggccaataacctgtacgtggacacagtaaagttaaaacaataaagatgcacggaattttgatgctgataggtatcataaaataatgtgatccaaactaaggagatatctgagctcagagacagtaaaaagaccaccctaagnnnnnnnnnnnnnnnnnnaatctatcaaagagctcatccagcatgcaagtgtcctgctttctgatccagcagcctttctagcaccccggccttgattgtcagaatagcatctgcttataaggtttttaaattattaatacagtatactaaatcccaggagtagaataagccttgttattacggctagtaagtcagcccagagcaatctgatattcctgtaaaactgaatggattttgaagtaaagcatccttgggctcanctggcctcagaggaggccatcatctcatttacctatttaagaaaaaccccataaaagagtgttctatatggacattcattatgtcttaagctttattgattctgttatgttgccgttaattataggaaccacgaaagccttcaattagattaaagccataataaataagattagtaac

SEQ ID NO: 179171 - DNA, 631 bp, Homo Sapiens
  misc_feature (133)..(184): n is a, c, g, or t
  misc_feature (448)..(506): n is a, c, g, or t
tgtgggagggggatgagagaaagtccttgagccgacaaggactcccaagtttctctgtggatgatggtatattgattttttttgtcatcattggtaaagaaaacacaagagggggaaatattctgaaccatannnnnnnnnnnnnnnnnnnnnnnnnnnnnnnnnnnnnnnnnnnnnnnnnnnnatggaatttaaaaggtagaagatacttgctacttttgaagcacttttcaactgtggctcaagacagtggtatggggtgtacgcagctggtaggggaggcctaggcaagaatgtcaaccgaaaagtaccctgagtaaaaagagggccaagaaaggaatcctggaaaactcaacttttaggaggtgccaaggaaagaaaagactaagaggaaaaccattagttgacgctgagtaagcgcaaacagcaaggactatactggatgctnnnnnnnnnnnnnnnnnnnnnnnnnnnnnnnnnnnnnnnnnnnnnnnnnnnnnnnnnnntgtgtgttcccatgaggaaagtgtttaaagagcaagtggtcagaaggatatttctatgtgtcactggaggctagaacccaggactccgtggaaactggagaaattgtacgattccaggttccaac

SEQ ID NO: 179172 - DNA, 631 bp, Homo Sapiens; identical to SEQ ID NO: 179171
  misc_feature (133)..(184): n is a, c, g, or t
  misc_feature (448)..(506): n is a, c, g, or t

SEQ ID NO: 179173 - DNA, 573 bp, Homo Sapiens
  misc_feature (171)..(185): n is a, c, g, or t
  misc_feature (208)..(291): n is a, c, g, or t
  misc_feature (332)..(495): n is a, c, g, or t
atagagttcctgcgtccaggatataaggccaagagacaaaaaagccatagcctgaaagatttagcaatggtggagtaatgtctccctgtgctgatacaagcatgaactttctgggaatattctgctagtctggaaattacaggcaggttgtctggggtaggggggaggcgnnnnnnnnnnnnnnngagacaaggtctcactctgtcannnnnnnnnnnnnnnnnnnnnnnnnnnnnnnnnnnnnnnnnnnnnnnnnnnnnnnnnnnnnnnnnnnnnnnnnnnnnnnnnnnngtagttgtgcctcctaggcacacaacactatgcccggcaannnnnnnnnnnnnnnnnnnnnnnnnnnnnnnnnnnnnnnnnnnnnnnnnnnnnnnnnnnnnnnnnnnnnnnnnnnnnnnnnnnnnnnnnnnnnnnnnnnnnnnnnnnnnnnnnnnnnnnnnnnnnnnnnnnnnnnnnnnnnnnnnnnnnnnnnnnnnnnnnnnntaaactttggatagattgtataatatatagtttaatgtaatcatgctcatattttttaaataaataaaacactatact

SEQ ID NO: 179174 - DNA, 473 bp, Homo Sapiens
  misc_feature (35)..(35): n is a, c, g, or t
taaggtttaaagctgctccccgttgctcacaattnccacctgaagctctgccccctgtcggattagccagcccttgttagattcctccatatgggagcatgaaccccaattgtgaattgccccgtgtgtgggatcctaggttgcaaaccccttgtaagaatcctaatgcctgatgatctgaggtggaacagtttcatcctgaaaccatacccccatcccaatctgcggaaaaattgtcttccatgaaaccaaccggtccctggtgccaaaaaggttggggaccactggcttacaagatactctattcccatctttagttctcttgccccaaacatagaattaactactctactagctgtgtttgttcttttggtgtaaaaaaatgatttgaattcaaaacatggggttctgtcaaaatagcacagtgaatttgtgaattgatcatgtctctgctccaaataaagaaacaaact

SEQ ID NO: 179175 - DNA, 792 bp, Homo Sapiens
  misc_feature (14)..(14): n is a, c, g, or t
tcttgccctcttcnagtgtaccacattcttctcaaagtggcctctcaggtcttttgtccagaaaattttgagactttgatgagaagcccatatctgcacactggggattaggccagataaccctgtgtgtccttccaggcctggtattgtgaggctgaagcctagtgccccacactcccttcctcaccccttagagaaagatagagactccagggccagcctggtgggtgctgaacctgccctgctgagccaagcccaggaggcagccaaggtcctaccagtgaccttaccctgggggcccctccaggtaggagcctggttggaaaagacagaccgacttcttctgggttggctggaaaaagatgacatactcaaagccttgtccttccacttggatgcacctggtgaagatgcgacagtcacctttgtctggggagagataggcagtgttgcagcccggagaagggagggtatggtcaggatgcagcacccatttggttgagtcttgcctctggtacaagattaaggagagaaaaccagaggacacccaggtccacccccagggagccttccctctgggagcagaggcacagttgctgtcctcacagagcctttctgtctagggcagaaacatgcaggaagtgccctggctgagaatggagataggatcagggccagggcaagactttaagagaccataagcattgaaaattgaaaatgtaattactcatgtaactcacatataattcaaaagaataatactaaacagtaaaataatagcagaaaagtcca

SEQ ID NO: 179176 - DNA, 980 bp, Homo Sapiens
tgctgtcggacaagccttgctttattggggaatggatgggatcacaaataatctctgcttagaagtgctctagggccatggattcatgtaagggtggggcagggtggactgaagatctgttggcagggctcacagagacgggggtgaggggagagatcgtgggttcatgagatcccatcttgggcaatacggttatcccgtggtcttcatacgccacagaatcctccaatttcaggggctcccgtgggatggtggagccaatgaagaccaggtagatgatgccacctagataggcacccagaagtggtgccaccactggcacccaccaccagttctccccattgctgcaggcaagaggcagaggcctgctgagggggctgatgcccaggacagcaccctcatccacctcgggccaagacaggttgagcagaggagtcatccccaggctaccccaggaaacacccccaacccagggccctggtcagcctcagcccgattcagggacagcgttgacactcagtgcaggtgcaggatctgtatctgtactggcctggggaaatgttgggactcactcctgctccccaggctacctgggggctcagcaggaccctcctgtgctgcccctcacatcaccccccacccctcaacacacaggggacccacagaaaaactcaaaggaatgggcctgggcaggggcagtacctgaagacctgtttgccccaaccagcaatgaaggtgaagatgcggggggggcaggtcccgggacgggttgatggcatatcctgtgttcatgccaagggacaccccgatgatgaccacgaggatgcctatcaccagcgcctctgttcctggcagtgctgggttgttctcctggtccgtgatggcgaagagacacagctggagcatcccggtcagccacgcctcattcaggaagccccgccacaatgtcatgtgatcaggaaggtaggtggcaaaaatgc

SEQ ID NO: 179177 - DNA, 635 bp, Homo Sapiens
cccgtcgctacagctggcatttttgccacctaccttcctgatcacatgacattgtggcggggcttcctgaatgaggcgtggctgaccgggatgctccagctgtgtctcttcgccatcacggaccaggagaacaacccagcactgccaggaacagaggcgctggtgataggcatcctcgtggtcatcatcggggtgtcccttggcatgaacacaggatatgccatcaacccgtcccgggacctgcccccccgcatcttcaccttcattgctggttggggcaaacaaggtcttcagcaatggggagaactggtggtgggtgccagtggtggcaccacttctgggtgcctatctaggtggcatcatctacctggtcttcattggctccaccatcccacgggagcccctgaaattggaggattctgtggcgtatgaagaccacgggataaccgtattgcccaagatgggatctcatgaacccacgatctctcccctcacccccgtctctgtgagccctgccaacagatcttcagtccaccctgccccacccttacatgaatccatggccctagagcacttctaagcagagattatttgtgatcccatcccttccccaataaagcaattttttgtccgac

SEQ ID NO: 179178 - DNA, 143 bp, Homo Sapiens
gtgaggagctagaactgagctctgagccctcctctgaggttggggcttctgggcaggcagcccccttagaggccctcccttgtaggtattcggccttggttccgtggcccatatgcttctaaataaaacatttgggagctaaa

SEQ ID NO: 179179 - DNA, 524 bp, Homo Sapiens
  misc_feature (36)..(36): n is a, c, g, or t
  misc_feature (352)..(352): n is a, c, g, or t
agaaagcaaatgtgacctgtgtcactacgtgactgntggcacacgccttgttcttggccaaagaccaaattccttggcatgccttccagcaccctgcaaaatgagaccctcgtggccttccccagcctcttctagagccgtgatgcctccctgttgaagctctggtgacaccagcctttctcccagggccaggctccttcctgtcttcctgcattcacccagacagctccctctgcctgaaccttccatctcgccacccctccttccttgaccagcagatcccagctcacgttcacacttggttggggtcctcacatcttttcacacttccaccagcctggcactaatcccntcaaaggcacacgtcatgtttctttcatccggcagcctggatgttttttccctgtttaatgattgacgtacttagcagctatctctcagtgaactgtgagggtaaaggctatacttgtcttgttcaccttgggatgatgcctcatgatatgtcagggcgtgggacatctagt

SEQ ID NO: 179180 - DNA, 556 bp, Homo Sapiens
  misc_feature (543)..(543): n is a, c, g, or t
gatctcaggcttcccaggaacccccgggcccctcccagtcccctggcctcttacttgagccatctgagtccaggactgttccccagaagtgcctcttgccttctcagggtgaagaggtcagctgtcctcctgtcatcttccccaccctgtccccagcccctaaacaagatacttcttggttaaggccctccggaagggaaaggctacggggcatgtgcctcatcacaccatccatcctggaggcacaaggcctggctggctgcgagctcaggaggccgcctgaggactgcaaaccgggcccaaacctctcctgcccctccctcctgagtcctgggggtgggaggatttgagggagctcactgcctacctggcctggggctgtctgcccacacagcatgtgcgctctccctgagtgcctgtgtagctggggatggggattcctaggggcagatgaaggacaaagcccactggagtggggttctttgagtgggggaggcagggacgagggaaggaaagtaactcctgactctccaataaaaaaanattccaacctgta

SEQ ID NO: 179181 - DNA, 769 bp, Homo Sapiens
catgccctgggcaggagtgtgtgaactcgcccggctccttccagtgcagggcctgtccttctggccaccacctgcaccgtggcagatgcactgatgtggacgaatgcagttcgggtgcccctccctgtggtccccacggccactgcactaacaccgaaggctccttccgctgcagctgcgcgccaggctaccgggcgccgttcgggtcggcccgggccctgcgcagacgtgaacgagtgcctggagggcgatttctgcttccctcacggcgagtgcctcaacactgacggctcctttgcctgtacttgtgcccctggctaccgacccggaccccgcggagcctctttgcctcgacgttgacgagtgcagcgaggaggacctttgccagagcggcatctgtaccaacaccgacggctccttcgagtgcatctgtcctccgggacaccgcgctggcccggacctcgcctcctgcctcgacgtggacgaatgtcgcgagcgaggcccagccctgtgcgggtcgcagcgctgtgagaactctcccggctcctaccgctgtgtccgggactgcgatcctgggtaccacgcgggccccgagggcacctgtgacgatgtggatgagtgccaagaatatggtcccgagatttgtggagcccagcgttgtgagaacacccctggctcctaccgctgcacaccagcctgtgaccctggctatcagcccacgccagggggcggatgccaggatgtggacgaatgccggaaccggtccttt

SEQ ID NO: 179182 - DNA, 711 bp, Homo Sapiens
gcatattctacactcctggacccagggagtgtgggccattatggtggcaaaggtgcaggggagtcctagacctgcttctccctgtgaaaacggtggaggaagcagtgccaggctcctggagaaatggaagggtgcagggagggcatccgggcactcagaggtattgctgacggcccgaggcttagctggccggggcgtgcacatgagacgtggactcacagctcagggcgtccatgtccgtcaggttcacatgtgacacatgaggatcgggcacagggaaaaggctgaaggaggctcacaaaggattccaggagatgtggagagagcagcccgggagggagtggtcaggaggtcattccagtcccccagaggggctctgttgcagcacagggccttgatggacagcagatgctactggttctcacccttgggccaattctgcctgcttctagagcttctctgaggtctgttcacccagaggacggcacccagcatgctcaggagcaggggcagctccaagaggaccaggagcaggaagcggacattgctgaacagggagccagggtgtgggctgggttcggggctgtcctttctggtcacgctgggccaggtgtgcacgggcagcttcgtgggaggacctgaggtgcccatggagctctgggggctggaggctgtggtcgtcccggccgggaacacggacacctcaacctc

SEQ ID NO: 179183 - DNA, 741 bp, Homo Sapiens
cgggttttattaccattcaaattataagaaaagtcatttcctcaaaagtttcggggttgggggaagagttaaagaaggtcgtggctaggtggttgttgaggaataagggagaaaatcccagtttacaaaatctgagagctgaatccgtgctgtttctcgattgagaagcagtggacatcagcagtaggaatggctcaggtccaagaaggctatgccctaccagacccggttgatgtgcttccccggatttactctgtcccaccgtccacctccaccccggcctgcacctctcgcttagggtagaggcctggcctccagtgccatctcccgacagcctcccccaggtgaaggtccatgccttcagcactgccctccctgaacagaggctctgatgatgggatgctctgactcagactcaggtgagaaatttgaaggaacagaatgctcttgcctagcagttgccgggaggggtcaggtgctgcccccagagaagtgggagagttagaggtccgtgaggcatacttatcccaaagggggcagaaagcatgaagtggtcagcatagaaactcgtctccctgccatccacacagtcccaaggcatgctggttctacatggcttgtctggaagctgtccttgaatgtaaagttgttttcagctcaataatgtatttgcctgccttcgcctttcctttcacccttaccaccttggaattgtaccgcctaataaaatcttcgcactta

SEQ ID NO: 179184 - DNA, 408 bp, Homo Sapiens
  misc_feature (28)..(28): n is a, c, g, or t
  misc_feature (49)..(49): n is a, c, g, or t
  misc_feature (71)..(71): n is a, c, g, or t
  misc_feature (79)..(79): n is a, c, g, or t
  misc_feature (95)..(95): n is a, c, g, or t
atccccaaaagatgcccttcaaaaacangcctgtgccctagattaacanggtgaaataacctctccctatnggaccccnacaaggccctgcaagngaagttgggccccccgggtggaggtgggaagactgaacataaattaaaactaaatgatctgcctcccctgtcaggaacctatagagatggttagggccactgagaacagtgggagaattacaaggaacaggacttgggagactagcagtattctagtttgtatgattatttttagaaatatgaaggagtcagaagaaacctcagaccttcatcttttattttatcctagtcacttcatctgaaagctctatggatcatccataaagctaattatttttttccttgggtagccggttttatgaaaaatatgaac

SEQ ID NO: 179185 - DNA, 755 bp, Homo Sapiens
cagctgaggtcgtgccagggagacagagtctggagaagggcagaggaattttggaaggatccctggctcatagtagggaagctgggatgggggaggggtcaaaattatggcatgactgaacctgcatctgtgttgggtggacatgaatacttagctacctcagcaggaattccttccaggtcccctttaaagctgaggtcctgagagtaatatgtccttaataaaaaggacaaatggatacagccttgaccctcccagtgaggagaccccaattcagcaataagtctcacccttctcccctacaggtcaggccaagaagggtgaaggcctcttgcactccagacctcatacgccccaacagcttctaattgggatagaacttgctttaccttacagctcacaacctcagctggggttttagggtacccaaaaagggcctgtctagattttttcagaaaaacgtggagtgctaggggcaacccggaaaagatggggaacctgctagtgaactaggagggagacttccatagcctcagacttggatagggtaggctgagggggccctaagggagggactaaggctccaaggcaggtcacttttccttaggctgttctacttctggcttgttgcaagaggagtagatgccccctcacccacaaaaaccccactcagtctccacccaactcctggcactgctcccaggggatcgggtctccactccagctttctcaattaaagacgatttatacaactg

SEQ ID NO: 179186 - DNA, 727 bp, Homo Sapiens
  misc_feature (691)..(691): n is a, c, g, or t
aacccctctccctgcactgcactagggacctcaaaacccctctccctgcactgcactagggacctcaaaacccctctccctgcctgcaccagggacctcaaaacccctctccctccctacacttttgttcacactgcctcctcccggcttttgtcccctccaagtcagagccagattgagattcctctctggcagtcagtttcctgagctaccgtctcttccaaacagcaggtgtaagactcccacattctgctccaaccatgctgtctggggcatggaacaccagattcttagcctgcatgacccttctctctccagtcctctgtcccctgtgtgcctggaagtgccaggttcaaaagacccatagaggcctgtcccgttgtgatggcaagaccatgaccatggacaggctgacagtggctcttttcggagctggactggcagagcctgcgcttgtggtgcctggctcggggctgatgcctgctggggatgccttcctgtcccaggaggttctggctgcccagaacgtttcccacagtcccggccagcctggccaccttatatagccctgagtccgggctgggcctgtgctctctgccccaagggagcagccctgctgtgaggaagggcccagtcctacttgctggactccatggggagactcttcccccagacactgaaaggagcgtgntcccctgtgtaatcccaatcgtatccagagccaaaa

SEQ ID NO: 179187 - DNA, 800 bp, Homo Sapiens
  misc_feature (46)..(98): n is a, c, g, or t
cagtagagatggggtttcaccggtgttagccaagatggtctcgatnnnnnnnnnnnnnnnnnnnnnnnnnnnnnnnnnnnnnnnnnnnnnnnnnnnnntgacacttgcgcccagccaaggtgggggaatttattttttaaaaaaagcaaaacaggtttatttggctcaaaattctggtggaaatttcaagattgggcagctgcacctgggtgagggcctcatgctacttcaactcaaggcagcaagtagaaggggagaggcatgcacaaagagattacgtggccatatggcgagagaggaagcaagagacaaccgcaggaagggctgactctctaaccagctctcatggggaactcaccccttccacaaaggacactaacctattccatgagggatccacccctattacccaaactcctcctactaggcaccacctcctaacactgcctcattgaggctcaaatttcaataccattttgggcaggggcagaccacatgcaaatcacagcatggggtaatagtgggggcaggttgacacagggctgctgcctacccagcaccagctgtctcttggccccttccagatcctggcaatctggctacaggcatgggcccagccttggacacagatgtggccacaggaagctgttagctctccagatctgatcagcctgggagagcggcacaacaaaggctcccaaaggagagtcgggatcctcagctagcctcagctctgctacccacccatatgtgcccagaacaggaaagatacgtgtttcttactcctccgggactcctag

SEQ ID NO: 179188 - DNA, 423 bp, Homo Sapiens
  misc_feature (49)..(49): n is a, c, g, or t
atgaagggatccaccccctattacccaaactcctcctaactaaggcacnacctcctaacacttgcctcattgaaggctcaaatttcaatacccattttgggcaggggcaagaccacatgcaaatcacagcatggggtaatagtgggggccaggttgacactagggctgctgcctacccagcaccagctgtctcttggccccttccagatcctggcaatctggctacaggcatgggcccagccttggacacagatgtggccacaggaagctgttagctctccagatctgatcagcctgggagagcggcacaacaaaggctcccaaaggagagtcgggatcctcagctagcctcagctctgctacccacccatatgtgcccagaacaggaaagatacgtgtttcttactctccgggactcctagc

SEQ ID NO: 179189 - DNA, 591 bp, Homo Sapiens
ggcagtctgtccaggctcgtcattggaggtgaacaagcaaacccagaggcttccactaggacttcaaattgggggttggatttgaagacttttaagtttccttccagcccagaaagtctctcattctaggcctcctggccaggtgagtcctagagctacaggggttctggaaacattcaggagcttcctgtcctcccagctcctcactcaccttcagtaacccccactggactgacctggtccacagggcacctgccaccctgggcctggcagctcagcttcccccaacacgcaggagcacacccagcccccacatcctgtgccttccatcagctaaacaccacgtcacttcatgcaggtgaaacccagtcactgtgagctcccaggtgcagccagaggcacctcaagaagaagaggggcataaactttcctcttcctgcctagaggccccacctttggtgctttccagaatcccgtaacacctgattaactgaggcatccacttctttcagcagactgatcaggacctccaagccactgagcaatgtataaccccaaagaaataatttttagaatctctttcgaagtttt

SEQ ID NO: 179190 - DNA, 862 bp, Homo Sapiens
  misc_feature (83)..(101): n is a, c, g, or t
  misc_feature (103)..(103): n is a, c, g, or t
cactgggtacaagttgaccaagcatcttcacatacatacactctttccagcatgataaaatctgggtgaggcgttctccctcnnnnnnnnnnnnnnnnnnntnggtatgtatctgggcaagctgaggcccaggaggaggccccgagggctcatagtagctgcatggcagaagtgggacctgacgcttctcaggctctgctcttgcctctgtaccacatgcttcagcagggagggggaaagaatcttgccttccctcctttcctctctcccactacctgggaaaatcaaaaacagcagcaggagagaggcctggccgtgagatctgagacagtttcttctcttatgcttggttttggtcttatctggggcccctcaatgtctaggacaagggaacccttccagtctccagcatgggcctcttcattaatagccactgtgttctctatccattgttgctaacgggttgaaataagggacagcggtcccacagctggaagagggaacacatcctgaagcttgggaatccaaaaggaaggcagctggggcttggagggcaggcgaggaggtatcggcacaccaccacaccctctttcccatgggccaagtgccatggtgcagttccccttttgtccagcagatggagcccaccgcacagtcacagctggacacggcacaggccttagagcgccgagtcttccagctgcagggcaggcctgtgaggtggtcggatcgttcctcaataagaaaagagaacctggggcttttcttccttcttggcaccctggaagttagtcctcccacctatctgaccctcatctctcttcccacagcaagtaaagtcagggctaagggaagaactctc

SEQ ID NO: 179191 - DNA, 556 bp, Homo Sapiens
accaccaaattttttcttttattaaacaaactgatggttgccaaacaagaagtcagtaatctgacttttcagaggcagggagtttttatttttggcttctgtaatggaatttcaccaagtttttaaaggtattaactttattaacctgtaacattcatcattttaaaggagtatataaaaactgtcaaaatgggtcagaaacaaagtttgcgatgctcataatcatcttcagcagtggcaacatttaactttttgagtcagtcgcaacagactggcaatataactaacacaatacataacgataagtgttgttcttgataaaaaaccaaattatttttctatttacaatttttagaaaaggtttaatgtaaaaatatttttcttctttatatatttccctgccatgataatgttaaaacatatcaagatcctcctcaaactttaagggtgaaaagcataccattccattttagttgaaatattccttcacatagccaacacattttttcaaggcactctagctactacaggaaaaatgttcctcttgcctactgtt

SEQ ID NO: 179192 - DNA, 581 bp, Homo Sapiens
ctgacactccctactcagaaactcctgcctgccacagcctctctctggctgcatgtttgcattttgggcctttcctctctgatgatagaacgtatggctttgtctcccattcccagcaaaggaattccaggctgtgggaagcatgctgggatcctttgatgcgggcggggacaatggcaataaagaacctgtgtgaaggagtgcggcgggcagggccagccaggtccacggagtacttgaggccaatgcctttcctgtgcacgcccacccgaggcctctgccacatctccgatgtgagagtccagagcccaccccaaggcctctgccacatccccgacgtgagtgtccagagccgttcccactaccgggctgtccccacgccacggcccgcgtgtggtgtggatccgcctcctcaagctccccatctccttggagtttgccagaaggctgggggatctgggatgggtctgagtccctgctgggtcccttcctatgctgtgtgaaaaacggtctttgagcctgtgttttgtccatgcagcacaaggagagcttaataaatgggtgcttctattgttattatc

SEQ ID NO: 179193 - DNA, 1004 bp, Homo Sapiens
tcagggtttcagatatctttaatgtcatcttgaatttatatgaattacaataaaccttgaaattaacaggataacaaaattagattcctagatcatagatagtctagttcagtttgtaacggctgggatgggatctgggagtacgtatgttcacaaaagccccaagtgattttgaagcagctggtctttggacaagtgttgcgagtgacttctccaccaagagtttttcagggttttacctaaggcagtacctatttaaagaccagcggtctactgtgttgccatattttccaccttcttgatacttctaagtactgggaagaaaggttagagtcaatttttttaattcacctttttatgttaaagtagaaaattccctcttgatttccgaaaaactatttttagggagaaagcatgtccagtgtgctacaaatttgtctacacaggtctatattttgggacatctatccaaaccaagaagctcagagataaattttaattctgcattttagttaatagccataattacagtggatctgtttaataaaccattatgtatgacactgagacaagcacaaatgaatgtgctttattgaaataaatagtcaaatcttcagcctcaaatcgttccctataaatagatgaaaaaggggaagaattattggttgagaccattagccacttgcactttttgctagaggcgccaacagttaattatggccttactggtgtaactaagagtgtgattaatcattcaagcaatcgttccttctaaaaattacagcttcagagagagagagacctggcaaagctaaaagtcttaagttttgtagagtttcttatgggaaactgggattgtagcaatactcaggaaccactttatcatcttaaaaaaagagctacctatgattagtataatacaatacagtagcttagcaaggtggcttcaaatcaagccagaaaaagtaagatttagaaaaatagtggccgggcgcggtggctca

SEQ ID NO: 179194 - DNA, 724 bp, Homo Sapiens
caagcctgctctgtttaatctatttagtgagtgcaaggcttctaaatcttccccctcagctacctatataaaagacaagactgaaaaggacagccactcctggatggctggagaagcatttggatttagaccgggtttaattggcatatgaaaaagcaaaacgtcagctcttcagtcaggctctgagaagctctctttatgtgggggggacataggctaaaggccctgaggcaaagcctggggtcacttacattccagctactctcaatccaagtagcaatttccctccctcagaaaccgggtcttcaggagcttggggaggggagcttggggaggggctctgaagttgtgttttaaagcagtacatcttaatatgaagacaggaatttctatgatgcttacgaacattagactcaacatttttgcagccccctttccctggtctacattcacacaaacatgagacacagtcccaagggagaaacagatgctggaggagcatttagggccagagtggaggcacagaggaagctgggatttttcaactaccccctccttggttactcctgggattcccttaggatttcacggcacaaccagcgaagagtttgctcagattcacttcggagtagccacttcgggacaagaattgctctgctgtgttcttgagttttctgtagtcctgcagaactttgggggtaaaaaattgcttcttcaatttatc

SEQ ID NO: 179195 - DNA, 757 bp, Homo Sapiens
  misc_feature (15)..(15): n is a, c, g, or t
ttagctgtttagtcncaccttgttcacagtaagatattcaattcaattcagcaaacatttgttgtgtgcttgctgctctgtgcctgaccagaagaaatgaagccaagatacaaataatagaaccctgtcatgagcacagaaagacctgctgagtttctattgattgtggtaaaccagcctgcatccagttccaagtaacagctgcccacttagtgaatactctctcatgtttcaacactcagttctagtgtagcctctcctataaagcccttcctttcccagataaaatgggttaatgtgccctgtgttaggctgattgttttggatgatcccctattccatggtctccccctgtatcccatctcctttttgccctataacattgtagtccccatcctcactcctgatgcctgggacccagacatgtgacttgttttagcccaatgagatgtcgataaacatgaagcaaacagaagctttaaaggaggcctgccctcttgctctttgccagtgccatgagaacatggctgatcagctggagggttatgagatgtgtaggtgagagacatgcgaaagagccagagataccagctgaagccatcctagactagcccacagtcagcctacccccagtcaagatcaggagagtcacccaacccacagatgactgccgacacatgagtaagcccagccaaagcagaagaaccctccagctgactctaagacttagaagcaataaaaaaatgtttattatctt

SEQ ID NO: 179196 - DNA, 334 bp, Homo Sapiens
ggattggaggtgatttacagtgaaagacacaaataaaatacaactgttcaatggaaatagaaaataaacaccataaaagagagaagagaggtaatttgttagcatcaagagtcaagttgctatatggtcaaaggttaaatttatctctaaaaaatggcaggattcaaagttgtacatacatgtgattacttctgtcttttacacccacatacagtacaaaagattattaaaaatattccccaaaaggcaggtgcaatgatggcacaccttataacccccagcccactcaggagggctgatgccaagagggtccgctttgagcccggggggtttg

SEQ ID NO: 179197 - DNA, 777 bp, Homo Sapiens
  misc_feature (21)..(21): n is a, c, g, or t
  misc_feature (368)..(368): n is a, c, g, or t
agcaggggaagaggcgggctnccgtgctgggactctgccaccacttgaagagtggtttgccccagccaagaaggttcaggcctggcctcagaggtcctcctgggccttcctgttcttctgcttctggtgccactgttgtatcttgctggggagcgtctctgaccagaactgcatccaggcctccctgaacttctgtccggcccgtggcactgggttgatctccagatattgttccgcctggttgaattggggccaaggaggcagagccttgctattggggtcccctgtccgggcaaagtgggtccactgggccatcatggtgaggcttagctgcttctcctccctctgtggcctctggaaaagccacngcgggagctcctcgtcccatgaggaaagggacctcccgaaacacaaaagcaccctcggcccccatgaatcagccttcaccccaggcaggtttgatcttcgcaaaagaactgggtcgatgctggaactcatagaaaaagacagggcttccagaatctcgaaggtatcttgaaaaactgacggtgggaacattgatgaatacgtcacccatgaattccctggaacgcctggcatttggcttgtgcgtccgagttgcttcctaggtattcatctatgacggtgggcatcatctcagggggcacatccagactggtcaagacgggtgttgagatggccagcatgtcctcccggctcatctgctccattgtatccaggagcaccccagcccctggggatgagccagctgaactc

SEQ ID NO: 179198 - DNA, 436 bp, Homo Sapiens
  misc_feature (342)..(342): n is a, c, g, or t
  misc_feature (385)..(385): n is a, c, g, or t
  misc_feature (395)..(395): n is a, c, g, or t
  misc_feature (413)..(413): n is a, c, g, or t
cacagagcggccaacactttaagggctggtggagattaaagtctcagcagggggagaggcggactgccgtgctgggactctgccaccacttgaagagtggtttgccccagccaagaaggttcaggcctggcctcagaggtcctcctggggccttcctgttcttctgcttctgggtgccactgttgtatcttgctggggagcgtctctgaccagaactgcatccagggcctccctgaacttctgtccggcccgtggaactggggttgatctccagatattgttccgccggggttgaattgggggccaaggaggcagagctttgctattgggggtcccctgttnccgggaaaagtggggtccactggggccataatgggtaaggttnagctgttttntcctcctttgtgggcctntggaaaaggacagggggggactt

SEQ ID NO: 179199 - DNA, 699 bp, Homo Sapiens
ttttttgtgctggcttcttctttaaactcgggctatagtttaattacgacaatcatgaaattattgcaaataaacaaagaatgtaaaactcccttcctatttgtctagcactactaaacttgagaagtgtaatataattatatagactgatctcagccaggaactctaagcacttgtgtggctgtgatatagaaggattactaataaattgagcccggtgtgggtgtcacattagtgccttcatcacattaaatgatataggcaaccaggcatagtggtaggatgaccagctttgaagtcacatagatttaggagataaatcaacttctgcttctttctagttgtgtgatcttgggggcataaatgtttctaggccaaagtttcttcaaatgccaaggctattgtgagattatcaagagaaattgttgcctagcacagtctactttgaaggcacccaaaataaatgataactattcttactaattacagtgaatttaagtgaacagaactttgacaatcattttggggccaacatttatcaatgttcttggcactatgccaaactgagaaataggcttgtacttaagagaatgaaaagtggaccctggagaatgtaaagattgaactgaaattattaggttttataccagcatctactagttttgaagtttggagatttataaaactcaaaaagatgat

SEQ ID NO: 179200 - DNA, 476 bp, Homo Sapiens
  misc_feature (22)..(22): n is a, c, g, or t
  misc_feature (142)..(142): n is a, c, g, or t
  misc_feature (259)..(313): n is a, c, g, or t
  misc_feature (335)..(335): n is a, c, g, or t
tgggccggcagggacccccagnaagaggagcggggcacccccgaagggcgcctgctccgtgggccaaaagggcaatgtggatgcaccaacaccctccaagggaaccctcgggccaacatccgcggctgctgaaaacctggtncctgctccgcctctgaccgtcaatggtgggaaccctgggcggctctggaggcccagggcaggggtgggcgtgttgtttgctcaggaaaaagggcagccaggcccccaaaactgtgtnnnnnnnnnnnnnnnnnnnnnnnnnnnnnnnnnnnnnnnnnnnnnnnnnnnnnnnggggaggaaaggctaaagctgnctgcccggggcccacaggaggggcttcgaggctggccctgccaggcagttttcccggcgttttaggatctgtacatagagaaatatttaaatttttagaagcaaaacttatacaacattaaaatgataccaagtccctttc

SEQ ID NO: 179201 - DNA, 440 bp, Homo Sapiens
aaaaaaggctaaacccacttgcccaagcaggagagctaggagccaaactcaggtttgttaaatgccaaggctctttctgttgttttctgctatgaagagctgtgcagttggcctcactccctccctccttgctttattctttcaacagatattaatcagcaatttgttatatgtcacgcactgagcttctatgggggatagtgagggaaatgaagtcagactccttctagggctgcagcctggagccgggacagacatgaaatcagttatagcataatgggaacggctatgattttgaggcatgttcacaaggaagtgtgaagaaaggggatggggcctggaggaatcaggggaggcttctcagagaaggcagcgtttgctctgagacatgatggaaaattgatattttctagggagtcaagtttaaagaagcaattcca

SEQ ID NO: 179202 - DNA, 486 bp, Homo Sapiens
cttgtgaacatgcctcaaaatcatagccgttcccattatgctataactgatttcatgtctgtcccggctccaggctgcagccctagaaggagtctgaccttcatttcccctcactatccccccatagaagcctcagtgcgtgacatataacaaattgctgattaatatctgttgaaagaataaagcaaggagggagggagtgaggccaactgcacagctcttcatagcagaaaacaacagaaagagccttggcatttaacaaacctgagtttggctcctagctctcctgcttggcaagtggtttagccttctgtgcctcactgtccctttctgtaaaatggggacatccatctatctcacagggaagactgaatgaagtgtgtaagcctgaggcacagtgcctgccccatcaacagagtgtgggttattttcatcccttctcctccttgctcctcccctcagataataaaaccctctggtctgaaa

SEQ ID NO: 179203 - DNA, 909 bp, Homo Sapiens
  misc_feature (588)..(588): n is a, c, g, or t
  misc_feature (760)..(760): n is a, c, g, or t
  misc_feature (812)..(812): n is a, c, g, or t
  misc_feature (852)..(852): n is a, c, g, or t
  misc_feature (890)..(890): n is a, c, g, or t
gggaagtcacccctcatcatctttgctgactgtgacctcaacaaggctgtgcagatggggatgagttctgttttcttcaacaaaggagagaattgcattgcagcaggccgactctttgtggaggactccattcatgatgagttcgtgcggagagtggtagaagaggtgcggaagatgaaggtgggcaacccgctggacagggacaccgaccacgggccgcagaatcaccatgcccaccttgtgaagctgatggagtactgccagcatggcgtgaaggaaggggccacactggtcttgcggcgggaatcaggtccctcggccagggttcttcttttgagccaactgtttttcacagacgtggaagaccacatgttcatagccaaggaggagtccttcgggcctgtcatgatcatctctcggtttgctgatggggacttggatgccgtgctgtctcgggccaatgccacggaatttggcctggcttctggtgtcttcaccagggacatcaacaaggccctgtatgtcagtgacaagctcccaggcaggcactgtgtttgtcaacacgtacaacaagaccgacgtggccgnctcccttcggaggattcaaacagtctggatttggcaaagatctaggagaggcggctctgaacgagtacctgcgggtcaagacagtgaccttcgaatactgaagaaaggtctttgtgagaagaaagtccctgcccctccctcggtggctggggccccctccctcttgagcccntgggcacagcacctcccacctggggggctagtggaagccctcctgcctgcanaccatgtctgcatcttggacgccctctgtccagtcagaangcacccttggctgggtgaggtgtgcccctcccaggganaataaagcttctgaagaga

SEQ ID NO: 179204 - DNA, 437 bp, Homo Sapiens
  misc_feature (141)..(141): n is a, c, g, or t
  misc_feature (419)..(419): n is a, c, g, or t
accttcctatccttgataaggaagctgtcctggtgcactgcttctcctgcctcctgagtgttggtacagtgggtggcctatccagatcctcagtcacccagcgctggcttcttagggaatgtgtcattgctgctgttgcanagggcatacatctgatggtaaccgttctccgtttggagaagggttttggttctgtaagtggagggaagcgaaacctgtaaacacttgtgatgaagcggtccagggaagaacactctcaaggctgccagtgggattgttagtttcagcatgaaacttaacttttgacttttgacatagccaaagttggggaacccagtttttaaatttttgagggcagttaaagtggtttagggctgatgtttttcacactgttccgggggccacattttgggtaaccngagtgactttggggccaa

SEQ ID NO: 179205 - DNA, 515 bp, Homo Sapiens
  misc_feature (48)..(48): n is a, c, g, or t
gtggtaactgagtgacttaggacaagtcactttgtatctcttctgtcncaatttcatcctcggtaaaaatggcgatgctaattgtctgccccaagggtgggtgtgaggattacatgaggtaatgcattgtaaagcatctagcaccaagtgttaactgctattaaataataggtattaggatgtatgcagcttgacagctgtgtagtaattaacccacactggctgttttgtgagggcatcatcctatgctacagaaaggaataatcattagactaaatattcctagaaatcccaaacgacaggctcttcaaactcaagtggaaatgagacctcatcagagtattctcctgatccagtagagtgtggtgtgtggagtcaaagcctaggtttttgtccatccactcctagttggatgttacctaacttatttgagtatggttttttcgctggtgatatgaaatcagtatgtattttgctgcgttattgtggagcttgaataaaatagtaatgcatat

SEQ ID NO: 179206 - DNA, 732 bp, Homo Sapiens
  misc_feature (473)..(538): n is a, c, g, or t
accttcctatccttgataaggaagctgtcctggtgcactgcttctcctgcctcctgagtgttggtacagtgggtggcctatccagatcctcagtcacccagtgctggcttcttagggaatgtgtcattgctgctgttgcagcaggcatacatctgatggtaaccgttctccgtttggagaagggttttggttctgtaagtggagggaagcgaaacctgtaaacacttgtgatgaagcggtccaggaagaacactctcaaggctgccagtgggattgttagtttcagcatgaaactaactttgactttgacatagcaaagttgggaacccagttttaaattttgaggcagtaaagtggttaggctgatgttgtcacactgtccggggccacatttgtggtaactgagtgacttaggacaagtcactttgtatctcttctgtcccaatttcatcctcggtaaaaatggcgatgcnnnnnnnnnnnnnnnnnnnnnnnnnnnnnnnnnnnnnnnnnnnnnnnnnnnnnnnnnnnnnnnnnncaagtgttaactgctattaaataataggtattaggatgtatgcagcttgacagctgtgtagtaattaaccacactggctgttttgtgagggcatcatctatgctacagaaaggaataatcattagactaaatattcctagaaatcccaaacgacaggctcttcaaactcaagtggaaatgagacctcatcagag

SEQ ID NO: 179207 - DNA, 768 bp, Homo Sapiens
  misc_feature (15)..(15): n is a, c, g, or t
  misc_feature (51)..(51): n is a, c, g, or t
  misc_feature (69)..(252): n is a, c, g, or t
agagaaagtcttacntaaatcataatcggaaagtagaaattatcctactgnaaatgaagaggtagaggnnnnnnnnnnnnnnnnnnnnnnnnnnnnnnnnnnnnnnnnnnnnnnnnnnnnnnnnnnnnnnnnnnnnnnnnnnnnnnnnnnnnnnnnnnnnnnnnnnnnnnnnnnnnnnnnnnnnnnnnnnnnnnnnnnnnnnnnnnnnnnnnnnnnnnnnnnnnnnnnnnnnnnnnnnnnnnnnnnnnnnnntcactggggtagagttttataggtagaggaaaaaattgtaaccaaaggcaccaggtatggaacagcatgatatttctgaaaactacacatagttctatattactcaagtacaaagtgcaatgccgggcataatgggagatagcaatgacaaatatggaagcctgataatggaacatctggtcgggattgcagatgttatggaatggcatccctatggtgatggtaagtctcagaaagggaatgacacagtcagatttgaatttcagacagatggtaagaggatatgggaagagtaagacttttggcagctggaccactcaggagctatgtcagaaatcaagatagagatgagaaaatgcacctgaactggaggagtggaaggagggacagggaggggctgaattgtatgtaggaagcctgggtggatggtcccacagctgaagaaaagagaagacagaaggatgggctttcaccttccttgctgggaagaaaaaagtttggaagggttgagttgtg

SEQ ID NO: 179208 - DNA, 148 bp, Homo Sapiens
cgacacagcgaagactccgtcatttcccgacttcaggagtgtcccagagtcttagatacgaatcatccaataccggcaggtcacagagccacagaggctgaggctgtggcagaatcaccgaggcttccctaaggagcgggagcagagc

SEQ ID NO: 179209 - DNA, 608 bp, Homo Sapiens
tttaatgtgactttcctgagttaacactgaatagtatttctaaaattttttgtactttattttttaatgtaacttgttctatctatctatatatatatttgatagtttgtggaataatatcccccagtattttccatattaaatgctaattatcttttgatttctttttcataagcagatctggcatttattacagggctgccgcttaagagaactcattataatgaacgtttattatattttgcagttccatgcctgttgtccattgattgacatgagcacccctgttttctctggagaaatacctcccctctctggggtgcttcctgtggtagtgtctttcaggtatccgttccactagctacaggtgagcattttacccattgttggataatggtaatctctttttcagaattttgagtctgtaattcatttgtacatgaaccagaaaatgtgggaactcattcattcttgtcccagaattctgttgagaacatccattcattctggctaattgattacaagaataactgtggatacgatccctttagaacctgcttctctgatctgtgtgtttcctcacttctcaataaaaaatgtcttttgct

SEQ ID NO: 179210 - DNA, 724 bp, Homo Sapiens
  misc_feature (126)..(523): n is a, c, g, or t
tagctaaataacctgatcccgactacctggctgatgactggtggaaccaggactcaaacacaggcattctgactctagaatcaatcaatctatctatctatttttttgaaatggagtttcatcctnnnnnnnnnnnnnnnnnnnnnnnnnnnnnnnnnnnnnnnnnnnnnnnnnnnnnnnnnnnnnnnnnnnnnnnnnnnnnnnnnnnnnnnnnnnnnnnnnnnnnnnnnnnnnnnnnnnnnnnnnnnnnnnnnnnnnnnnnnnnnnnnnnnnnnnnnnnnnnnnnnnnnnnnnnnnnnnnnnnnnnnnnnnnnnnnnnnnnnnnnnnnnnnnnnnnnnnnnnnnnnnnnnnnnnnnnnnnnnnnnnnnnnnnnnnnnnnnnnnnnnnnnnnnnnnnnnnnnnnnnnnnnnnnnnnnnnnnnnnnnnnnnnnnnnnnnnnnnnnnnnnnnnnnnnnnnnnnnnnnnnnnnnnnnnnnnnnnnnnnnnnnnnnnnnnnnnnnnnnnnnnnnnnnnnnnnnnnnnctagaatctatattcttaaccatttgtagccatgatggcacacttctattttatattctagctctagacacatagaaggtttgtcatagttgacattataatttatgtaactattgctgccagcgcctaaatcttccatataagaatttgcaatgatttgattactatttggttaagtaaataaagcatttaaaaagaaaa

SEQ ID NO: 179211 - DNA, 399 bp, Homo Sapiens
  misc_feature (358)..(358): n is a, c, g, or t
gaatccaagcattctgactccagagcccaaagccataatgtcactctgcctttcagcactacacatccaaaatgactatcttctctcttctgaattccccttgcattttacctgtttaatagagtaaaaaggatgtaatatgtaggtatgtataggaatgtatacatatgtatgtaacatgtatgtgtctttctagactctaagcctcttgagatcaaggtccacccacatgagattcatctctgtatctgctaggtatccagcatagtagatactggatcaaatgtttactgaatagatgaagctacaatatcagtcttaagaatttattttggaaataaaagaagtttctattggntcccaatagaataaaaaaataaagttgcccaaatgattttt

SEQ ID NO: 179212 - DNA, 730 bp, Homo Sapiens
  misc_feature (85)..(85): n is a, c, g, or t
  misc_feature (389)..(389): n is a, c, g, or t
gagttaggcgtcagggaatttggcctttccatggtgaaaaatacacttctacaactagttgatgcctaacattctgcaagtagancttcattccattggcttaaggcttttcccttgttaaaatgcaactgaccctcaaaagaggtagcattaagccttataatctcaaagtaaatgaatttatccctttcctgagagcaggtttttcttaggaggagaaggaagtaggaggcactgaagagagttggtgctgggaagcaaggtttaggagaatggagcagaaagaggagagggaggatcctggtgacagaccgtcaactcagtcactcttttgttgaagggctggcccttgggagcatcccctgcctgaaatgggtgttaacttgccnaccctggagcatattacttagaaatcaactatgttttccgatattaacactattaaagattctttaatgtataggcacacaaagacttatagcaatggaaaaataggtagcaataaaatatttggtgcaacaagagatagggagttaacccccgaccccaaatcagaaggactatacttgttcataggaagaagataaactgatattactttaaagagtgcaaatcacagggctgggacgagggtaaggcacttgcatggccctgagagcgggcacctctttgaattttgcgccctaggtgcctcgctcacctcaccctagtcctggccctagcaaatcac

SEQ ID NO: 179213 - DNA, 585 bp, Homo Sapiens
ctgagcttcacaccttgggtcagatgtgtgttgtcagctgagaaactgagctgcattcttgagcatgagccagacgccttgacagatggttattcttttctgcttgacctcgagttacagagatgcagatgaagtcaaagaggataccagatgcagccagtctgctggggaggcacgtacgtctgagcgggcccagcacagctgttctccagggcaaggcttggccatggcagctgccccagcgcccgcattcagcccaacccaccaggtcaccccagtccagtccgtggtgctcagatccccaagcaatcacaggtcagaggcggaaagaactacgtgaatgtgtacagtgatattgggcacatgctctgaaggaagggaaaccgaagaacgtcaaggggcagcgttcagaggaggggaaagaatgcagagtctgggtgtgatccctacctggactctcttagaagctccactatcctcttctctaatgatctgtcttcccattccagaatttcttaccttaacctacttagcctgagttaaataagcatctgcatgcagaaataaataagtgagggaatttgt

SEQ ID NO: 179214 - DNA, 327 bp, Homo Sapiens
tgactaatatagctgccattcagacaattaatgttcaaagagttttctaaagtgataaaaccaaagaaaagcatgtggaaaagcagaagcttagaaagttgtggtcactgaatgcactccctggtttttatttgtcagtgaaatctttatgcattcattgttaatattttaattccatggctttgtaggctgtgctgtgtctgaaggggtaacacctagggaaacatgaggccccttatgggaccccccaaatggaacaacttcactttctcttttatgtattgagccctgtgttaacatttcacttaagaagagcaccagtgcttt

SEQ ID NO: 179215 - DNA, 485 bp, Homo Sapiens
  misc_feature (67)..(67): n is a, c, g, or t
  misc_feature (70)..(70): n is a, c, g, or t
gtgagtccaacactgctctccattctgtatggtgtatttaagttacagtctggtagtgacagatctncancttctgtatatagaactcagtggtaaaaatgtgcctggaaaggggaggcctgggggttggttaatgaaaggtgtattggccataagtacttacgtaagattgtatgtaacacccaaatcaactggggctgatgggaattttgagcaccccaaaccacctctgcaagcctgagcttgtcaaagacacctcaaatcagatttactggatacaaaacccagccccatcactaatggctgtaggcaagttatatagcctctttactttcctggtttgtaaaatggaggtaaaagaatctaccctgtagataatattaagggtttaatactgtaataggccggtcacggtgggtcatgcctgtaatcccagcacttgggaggctgaggcggggggatcctcgtgccgaaaaaagggggtt

SEQ ID NO: 179216 - DNA, 446 bp, Homo Sapiens
  misc_feature (11)..(11): n is a, c, g, or t
  misc_feature (46)..(46): n is a, c, g, or t
  misc_feature (83)..(83): n is a, c, g, or t
  misc_feature (185)..(185): n is a, c, g, or t
  misc_feature (200)..(200): n is a, c, g, or t
gaaaccccagnaaaaccggatttggaggtgcccttggaacaagccncaggcttgccagaggtggtttggggtgcctcaaaaantccccatcagccccccagttgaattggtgttacatacaatccttaccgtaagtacctatgcccaatacacccttcataacccaacccccagccctcgccccnccaagcacatttgtncccactgagttcctatatacagaagttgtagatctgtcactacccagactgtaacttaaataccccatacagaatggagagcagtgttggactcacagttagtgttagttattattagtattgatactagtgttggtactattgctggttgacatgtgacagtacttagtaaactgcataaattgtgaggatcactattatcactcttattactagtaattgcaataaagttcagtggaagcaaca

SEQ ID NO: 179217 - DNA, 641 bp, Homo Sapiens
  misc_feature (109)..(109): n is a, c, g, or t
ccacccaatacattgttatccaacagaatatgacaatcgccacactcaaaggccctacgaacacattcatgctggtgatggctgctaggagtcaacagaaatagcatcncaacctctgcccctgctcaagccactgtgtttattttaaacacaaaccccccctctctactgtcacctctcccaaaacccaacaaactcaagagtgtattttgctcttcaagttcttccctggacttctcgaacagactcaagtggcaagaggagaggagccagttccatgagcagcagttcctctgcagtccacccttggctgtgcctgcaattccttactccctaaaacactgatttccaaatggtgcctagatacaaagatggaaaaatcctaagcccacccatgtgaaaccagcttcccagaagaagaggatctcaatgaagaaagaagggagattcaatcggaagacccagcctctgccctgaggagaaatatcttcttgtagttctacttgtgatatgacacagtgctccatgggaaaggcacagaggaggttacacagggctgcacaaggcaacatgaaaggcacagctgatgcttcaaatagatgagagcaatacaaaactcattaattctaggttaattctat

SEQ ID NO: 179218 - DNA, 332 bp, Homo Sapiens
  misc_feature (29)..(29): n is a, c, g, or t
  misc_feature (45)..(45): n is a, c, g, or t
  misc_feature (69)..(69): n is a, c, g, or t
  misc_feature (105)..(105): n is a, c, g, or t
  misc_feature (128)..(128): n is a, c, g, or t
ttgctgtagattcaaaatgaggaagtggnaaatgcattatttacncaaagcataaagtcagccttaggnaggagatgtaacaactcctcaactttacactatccngttaaagccaatttttaaaaccntttttttccctatgatgacccttgagtcatagaaaacttttcattttagaaaatgttaagcatgaacacaaaaagactagataacagtgttataaacactcatgtacccaaggcccagctttaacattcatcacttagcatgtttaaggtagtgcttaggttgaaatttatattgtgtgtatcagaataaagagcagttcttgc

SEQ ID NO: 179219 - DNA, 864 bp, Homo Sapiens
  misc_feature (423)..(423): n is a, c, g, or t
  misc_feature (426)..(426): n is a, c, g, or t
  misc_feature (453)..(453): n is a, c, g, or t
  misc_feature (465)..(465): n is a, c, g, or t
  misc_feature (568)..(568): n is a, c, g, or t
taataaaaatttattgacttacaagtgattatttatcaaaagaccattaatagcaggtactgaaatgatgtgttactgggtggtgctgggagactaataggaaatcaatgcagctggccggccagaatgcatatgagaagcccaccccccggcagccagcgcaatcacccccgcaacacacgccaggtgccacccctggcgcaatgaaaagttccccctttttatttatcgtttacaaatgaaataatcaatacttttaatctagagcaaaatttattaactttcccatcggagagagacatattgactgggggagagagtggggtgtgcgtgctgtagaagatggatggctgcgtggccatatcctaacctgtccgcgaggcagttgcacctgcaggctgcccttccagcctacggaccggnccncctgggacaagtgcacctggagaagcngagtctggccanccgggatgcacagcaggcaggtgggacctatgacatggggggatccttcatgccatcagggaacactagcaagcaatagcccagaaaatcaagttcctggccnaattcccaggaaggaaatggcaggattccagagaccccagatttcccacaggacaacagggttagtgcccactgtttgctgtgccgtgaaggtcacacgatggcacccaaaaatgcctgtcactggtctgggaagggcatttcagggatctggagcactccccctgacccctcacacatcaagcctcttctctgaaaggcagcaccagggacggattctgacacggtgaagcatcaagtcccaaggctggttctgctgtcaagggaatcccactagactttattaaaaagttccct

SEQ ID NO: 179220 - DNA, 453 bp, Homo Sapiens
  misc_feature (264)..(264): n is a, c, g, or t
acggaaaccggagcattcagcccttcatggatgcctcccgaaaacctcaccatgccagtgacacgactgcaaacggcgggtggcacatgccgggggttgggatgggagggtttggaaacctcgctccaaggacgccctcagccaaggagcttcggctccttcctagaatttctagaagcacttttggagggaccgagggcttccggccgggcccagaggaatttgagcgcttgcccgggcaggcagaagcgcagctggggagtnggagaggctgctgggccacattccggcccagctttcccccgctaaggccccagccctgccgcggcgccccagggaagcacctccgaaaacaaagcgttgtggtttcagcccaaggtttaaagtccaccgcgagcctgttttttcccccctccagaatctaagagcgatagcgtttctccaaataaaccg

SEQ ID NO: 179221 - DNA, 679 bp, Homo Sapiens
  misc_feature (240)..(256): n is a, c, g, or t
ttctcgtgtaccgaaaggcggcgtggagcagcacaaggagcttgagcgttgcaatgagaagtcatggctgtgaatcccaccccatcacgttttgaatgttgggcaaattaattaatcgttttatccacttactaggcgatgtatagtttgtatacttcatgccagtcattgttttagactcttaggatgcaaagataaataagaaagttgctttgggcaaagagtgagacctttttcttnnnnnnnnnnnnnnnnngaattaccatgtgatgagcacttctccttctgggtgcatacccagtgctctgagctacagcgtctaacgttcaagccagcttctcaatcggaccccaggatcctttctagagagaaatcctgtccacgtcgccctcctagctggcacggctgcaggcaccagtgtcgtggcagcgggaaggggaggacgggcttggtgaaaggggactggggcctcctcactcctggggctgccagctccctcaccctgaaatcagacccacgcccgccctgcacttcctgagtgtttcctgagaccaagggatcagagcttcggctgtgaggggcggtgctgtgccctgggacacacggagccacagcctccgcttccagggtgccctggggcctctctccacgtctccctaggggcaaccgccacaactac

SEQ ID NO: 179222 - DNA, 735 bp, Homo Sapiens
  misc_feature (410)..(410): n is a, c, g, or t
  misc_feature (725)..(725): n is a, c, g, or t
cggcagggcgctggctttccagctgggtcagcggtcgtgaggctcaacacgagaggaggtggggtggctgctttggttgtaacattagcagggggaagacagctgcttagaagcatggtgggaagcagatgtggtgaagtgccgtactgttctgcttacaaagatggggatgtctaagatcgtgtttactacctgatagcctaaaacagtatcacttgagtcatggactaaaaggaaccttaaacattgtccagcccagcccaggtgtccatctctgttgcactgagacttgtaaggcgtccttgctgcttcgtggcagtgtgccttagctttccaagcaggggtctgaatagctttttccatgaaaattcaggggtctttctttgatacccttgtgaacttgtcattcnaggggatggcttccactgtttaaagctgaagcctaggtgatctcatagaacagggttcaccaaataaagcccatgggccaatttggccaccacctgttattgtaaataagtttttattggaacatagccgcagccattcaatgacatgcctgtggctgtgtctgcgctactgtagccacagggacctctggtctgcaaagctgaaaacgtttaccgtctgacccttgatagagaaaggctgccagtcgcgccgttgtctaaaaaagtctgaactccaccttagtgttaactagtccataggatggctcgtcgacnctgacgagcg

SEQ ID NO: 179223 - DNA, 459 bp, Homo Sapiens
  misc_feature (228)..(228): n is a, c, g, or t
  misc_feature (258)..(258): n is a, c, g, or t
  misc_feature (266)..(266): n is a, c, g, or t
  misc_feature (281)..(281): n is a, c, g, or t
  misc_feature (288)..(288): n is a, c, g, or t
  misc_feature (353)..(353): n is a, c, g, or t
  misc_feature (366)..(366): n is a, c, g, or t
  misc_feature (399)..(399): n is a, c, g, or t
  misc_feature (421)..(421): n is a, c, g, or t
  misc_feature (430)..(430): n is a, c, g, or t
aagataaaaagcctaaaatatactctaactcttcaaaaaacatttttatgaaagaggaaaggaaggaggccctctttgtggctggaatgctggctctgagcagagtcagggtgacgcggcagggcgctggctttccagctgggtcagcggttcgtgaggctcaacacgagaggaggtggggtggctgctttggttgtaacattagcagggggaagacagctgcttagnagcatggtgggaagcagatgtggtgaagtnccgtactnttctgcttacaaagntggggangtctaagatcgtgtttactacctgatagcctaaaacagtatcacttgagtcatggactaaaaggnaccttaaacattntccagcccagcccagggtgtcccttctctgttngcacttgagtctttttaaggcntccctgctngtttcgtggccgtgtgccttaggttttcc

SEQ ID NO: 179224 - DNA, 390 bp, Homo Sapiens
  misc_feature (15)..(15): n is a, c, g, or t
aaacctgccttaccnaccaatgcagccggggctggcgaaaccagcccaggtgctggtcttgggccagttctcccacgacggctcaccctcccctccatctgcgttgatgctcagaatcgcctacctgtgcctgcgtgtaaaccacagcctcagaccagctatggggagaggacaacacggaggatatccagcttccccggtctggggtgaggagtgtggggagcttgggcatcctcctccagcctcctccagcccccaggcagtgccttacctgtggtgcccagaaaagtgcccctaggttggtgggtctacaggagcctcagccaggcagcccaccccaccctggggccctgcctcaccaaggaaataaagactcaaagaagccataaa

SEQ ID NO: 179225 - DNA, 540 bp, Homo Sapiens
  misc_feature (50)..(50): n is a, c, g, or t
ccgccttctcctcgtacgtgggctctccctacgaccacacacccggcatngcgggctccttggggtaccatccttacgcggcgcccctgggatcgtacccttacggggacccagcgtaccggaagaacgccacaagggacgccacggctaccctcaaggcctggctcaacgagcaccgcaagaacccctaccccaccaagggcgaagaagatcatgctggccatcatcaccaagatgaccctcacccaggtgtccacctggttcgccaaaccgcgccggcgcctcaagaaagagaataaaatgacgtggaacgccgcggaaccgcagcgaggacgaggaagaggaggagaacattgacctggagaagaacgacgaggacgagccccagaagcccgaggacaagggcgaccccgagggccccgaagcaggaggagctgagcagaaggcggcttcgggctgcgaacggcttcagggaccacccacccctgcaggcaaggagacggagggcagcctcagcgactcggattttaaggagccgcc

SEQ ID NO: 179226 - DNA, 292 bp, Homo Sapiens
  misc_feature (88)..(88): n is a, c, g, or t
  misc_feature (100)..(100): n is a, c, g, or t
  misc_feature (116)..(116): n is a, c, g, or t
  misc_feature (136)..(136): n is a, c, g, or t
  misc_feature (142)..(142): n is a, c, g, or t
  misc_feature (148)..(148): n is a, c, g, or t
  misc_feature (170)..(170): n is a, c, g, or t
  misc_feature (180)..(180): n is a, c, g, or t
  misc_feature (193)..(193): n is a, c, g, or t
  misc_feature (197)..(197): n is a, c, g, or t
  misc_feature (206)..(206): n is a, c, g, or t
  misc_feature (230)..(230): n is a, c, g, or t
  misc_feature (235)..(235): n is a, c, g, or t
tggcaaccgaaccccctccaaaccccggcccgttccgtccccggggatcctcgagcaaaacccaggaaacgtgggcgttgctggtctntccgaggaggtnagggcgccgaaccctnagcccaggcaggcccaggancaatantccganccctggggtggctccgggccgncgctggcatnaggggccgtccancaanccctcattnacctttctggccaacaagacaccngggancggcggatccccccgggcatggcctgggctggttttgaatgaaacgacctgaactgt

SEQ ID NO: 179227 - DNA, 413 bp, Homo Sapiens
  misc_feature (25)..(25): n is a, c, g, or t
  misc_feature (37)..(37): n is a, c, g, or t
  misc_feature (50)..(50): n is a, c, g, or t
  misc_feature (76)..(76): n is a, c, g, or t
  misc_feature (101)..(101): n is a, c, g, or t
  misc_feature (114)..(114): n is a, c, g, or t
  misc_feature (356)..(356): n is a, c, g, or t
cctgaaaactgggtctcaaataatngccaaaggccanactggtaaggggnaaacaaagagggcgctgtatgcaaanatctcttgaactctggagtctgctnaccttcctgcctnaagcccctctcccacgtggtccagtcaccattctccacagagactaccctaaaacccagcgactctcgtgtgcctgcagaatgcacagcccggtctcatagcagcactcctgtttaatcagagggatgttaacgaccaagtcatatttgctcgatttgtgttcaatatatttcatttgtaccgataaaacttaaaaatatccccacacatgcattgcctattaaagagtatcttccaggtanacctcccttacacatcagttaacttgataatttcttcccattcttgtgcaataaatt

SEQ ID NO: 179228 - DNA, 388 bp, Homo Sapiens
  misc_feature (34)..(34): n is a, c, g, or t
  misc_feature (55)..(55): n is a, c, g, or t
aaaaggcctaggtaattgggagcaggcaactttnaaagcctgccggggcaaaagnccttctgggcccctgaaaagtgcagggatgcccagggtctggaactgcagctgggaggctgcagctacaccccaggagcaatggctcctgccctgccaacttagtagaggccagggctctcacctgttcccagttcccataggctctgcatagttctatgggaaaacagaggtcccggccacacttcctctgctccagtcggcatccttgcagcggccactccagatgggccattgctgccatcaataggtgacagggaagatggagagaatggactggcctcagtaggacttagttggctgtgggtacaggggtagagtcagaggttaccct

SEQ ID NO: 179229 - DNA, 493 bp, Homo Sapiens
  misc_feature (17)..(17): n is a, c, g, or t
  misc_feature (33)..(33): n is a, c, g, or t
  misc_feature (40)..(40): n is a, c, g, or t
tagaataaacaaccgcnaaccaaaggaaaaagnccacaanaccccaggaacacgcatggtgctggctgaatgcccgcccctccctgaaaggctcaaaaccctacacttgcctgggtgcctcccatggcccatgtgaaagccccaggggaacctgaagtgaatggcaccgcaggcccccaggagtgctcctctggcttcacatgcacccaagctgtgatttttcagataaatatgactcagaagacctcggtgtttctgtgtgatttgcctacctaatgtcggagatgggtattacaaaatatttttggttcatcaaatggtttaaggtaatttctcagtaagatggcttggctcacacgccattttcaagaatgctgagaaaggagagtgtgccatcaagctgtggaatcgcttggtacgctgtggaattccgtggtaagacgtttttcaaggactgaagtgcatggaagaggaaaggaaacctttgttgccc

SEQ ID NO: 179230 - DNA, 442 bp, Homo Sapiens
  misc_feature (93)..(93): n is a, c, g, or t
  misc_feature (286)..(286): n is a, c, g, or t
  misc_feature (322)..(322): n is a, c, g, or t
  misc_feature (365)..(365): n is a, c, g, or t
gcacgaacataaacacggtgtagaagaggagggccatggcgctgaaggactggatggaggccatcatgttccgctgcaggctgagcgggacancgatgcacagcgacacggcgaacagcaggaacatgcggaaggtgccgcccacctgaaacccgaacagccgggcaaagaagttggaccccaagtcgccgatcacgacgtaggaaggcgatgcaggtgcccagcatcagcccgattcatgctggtctccaccagcattctttgccttgcctttcccgtaggcgtnggaatgccagggccggcgttaggttcctccgttttnttcagggttgggccgattttcaccaaggaacatggcacgattnggtgcgttcattccttggaggcaggaaggaccaaggaggcaggcgcccccaggggacgattgcccgcattgtttttt

SEQ ID NO: 179231 - DNA, 367 bp, Homo Sapiens
  misc_feature (314)..(314): n is a, c, g, or t
  misc_feature (321)..(321): n is a, c, g, or t
ccaactgggggctgatcacgaacatcgtgaacagcatcgtaggggtcagtgtcctcaccatgcccttctgcttcaaacagtgcggcatcgtcctgggggcgctgctcttggtcttctgctcatggatgacgcaccagtcgtgcatgttcttggtgaagtcggccagcctgagcaagcggaggacctacgccggcctggcattccacgcctacgggaaggcaggcaagatgctgggtggagaccagatggatccgggctgatgctgggcacctgcatcgccttctacgtcgtgattcggcgacttggggtccaanttttttncccggtttttcgggtttaaggtggggggaactttcccaaatttccc

SEQ ID NO: 179232 - DNA, 482 bp, Homo Sapiens
  misc_feature (24)..(24): n is a, c, g, or t
  misc_feature (328)..(328): n is a, c, g, or t
  misc_feature (344)..(344): n is a, c, g, or t
  misc_feature (363)..(363): n is a, c, g, or t
  misc_feature (410)..(410): n is a, c, g, or t
  misc_feature (438)..(438): n is a, c, g, or t
  misc_feature (449)..(449): n is a, c, g, or t
ggcccctcctccagccgcaacagncgttaggtcaagcgcttcagggacaggcctcggatcccgtcaccccactccttctcagccccttggtactcgatgtatttgtagatcatgccggcgatgagcatggccaccagggcatagtaccaggaggagacaaacataagggccaggcagagactcatgcccaggaaggacagcgcccagtgatagtacttgaaccggggccgccagttgggggtcctcaggagtgtctgcaccgcacaggcgaggttcacgaacaggtaggcacatcagaaagaacatggataagatgggggccaccatnttcgagggaggcgatnaggatgcccagcttcggcnatgagtttcccttcagagggagtttccccttttggtttcaacctttnaacttttccctttggccaaaacaacccngaggaaggggnttattttttttcctttggaatttgctttcaatt

SEQ ID NO: 179233 - DNA, 377 bp, Homo Sapiens
aggcccctcctccagccgtttcagccggtagggacagcgctcagggacaggcctcggatcccgtcaccccactccttctcagccccttggtactcgatgtatttgtagatcatgccggcgatgagcatggccaccagggcatagtaccaggaggagacaaacataagggccaggcagagactcatgcccagggaaggacagcgcccagtgatagtacttgaaccggggccgccagttgggggtcctcaggagtgtctgcaccgcacaggcgaggttcacgaacaggtaggcacattcagaaagaacatgggataagatggggggccaccatgttcgaggggagggcgattgaggatgcccagctcgggcgattgagt

SEQ ID NO: 179234 - DNA, 787 bp, Homo Sapiens
  misc_feature (755)..(755): n is a, c, g, or t
tgcctctgtacgtggtcgctgacatcgccacatccttcaccgtgctggtcggcatcttcttcccttctgtaacaggcatcatggctggctcaaaccgctctggggaccttcgtgacgcccagaagtctatccctgtggggaccattctggccatcattacaacttccctcgtgtacttcagcagtgtggttctctttggtgcctgcattgagggtgtggttctccgggacaagtatggcgatggtgtcagcaggaacttggtggtgggcacactggcctggccttcaccctgggtcatcgtcatcggctccttcttttcaacgtgtggcgctggcctccagagcctcacaggggcaccacgcctattgcaggccattgccaaggacaacatcatccccttcctccgggtgtttggccacgggaaggtgaatggtgaacccacatgggcactcctcctgacggcactcatcgccgagctgggcatcctcatcgcctccctcgacatggtggcccccatcttatccatgttctttctgatgtgctacctgttcgtgaacctcgcctgtgcggtgcagacactcctgaggacccccaactggcggccccggttcaagtactatcactgggcgctgtccttcctgggcatgagtctctgcctggcccttatgtttgtctcctcctggtactatgccctggtggccatgctcatcgccggcatgatctacaaatacatcgagtaccaaggggctgagaangagtggggtgacgggatccgaggcctgtccct

SEQ ID NO: 179235 - DNA, 444 bp, Homo Sapiens
  misc_feature (18)..(18): n is a, c, g, or t
  misc_feature (32)..(32): n is a, c, g, or t
  misc_feature (66)..(66): n is a, c, g, or t
  misc_feature (86)..(86): n is a, c, g, or t
caaaggttcgctgaacancctaacagaagtgntaaactaccacatgatcctgtttgacccaggccnagaggtccgtgcggcagcanctccagagctttgtcaaagaggatgtgcggaagttcaaggagacaaagaagcagtttgacaaggtgcgggaggacctggagctgtccctggtgaggaacgcccaggccccgaggcaccggccccacgaggtggaggaagccaccggggccctcaccctcaccaggaagtcttccgccacctggcactggactatgtgctccagatcaatgttctgcaggccaagaagaagtttgagatcctggactctatgctgtccttcatgcacgcccagtccagcttcttccagcaggctacagcctcctgcaccagctggacccctacatgaagaagctggcagccgagcctgaccagctggtt

SEQ ID NO: 179236 - DNA, 413 bp, Homo Sapiens
  misc_feature (20)..(21): n is a, c, g, or t
  misc_feature (390)..(390): n is a, c, g, or t
ggagttcgaggatacgattnntggactccccgcgcttcagggcgaccattgacgaggtggagacggacgtggtggagattgaggccaaactggacaagctggtgaagctgtgcagtggcatggtggaagccggtaagccttacgtcagcaccagcaggcttttcgtgagcggcgtcccaacctgtcccagcagtgccagggcgacaccgtcatctcggaatgtctgcagaggttcgctgacagcctacaggaggtggtgaactaccacatgatcctgtttgaccagggcccagaggtccgtgcggcacaggcttccagagcttttgtcaaagaggatgttgcggaagtttcaaggagacaaagaagcagttttgacaaggtttcggggangaccttggagcttttccctgggt

SEQ ID NO: 179237 - DNA, 424 bp, Homo Sapiens
  misc_feature (36)..(36): n is a, c, g, or t
  misc_feature (350)..(350): n is a, c, g, or t
  misc_feature (371)..(371): n is a, c, g, or t
  misc_feature (377)..(377): n is a, c, g, or t
  misc_feature (390)..(390): n is a, c, g, or t
  misc_feature (402)..(402): n is a, c, g, or t
  misc_feature (408)..(408): n is a, c, g, or t
tccatcctctgggccctgcctgccctcctggcagangcgcggcgtggggctctcggccgacattagggacgtcccctcatcacacacttcttcctcgctgtcagaggccatgaatgtgagcatagccctgcctctggaagcaccacgaacacttggggccgcagagaggtctgaatcccggacacttggtttcttcttctcagcaggctaaatgaatgatgctccctggctttcaaagagggcagcgctggtttttaacacgtcactttctatgggtcacacagctccctcacatcactcttctgacgtctgaggaagttcccacgttcttggttgggggacctttgggnaaaagtcaattttaggttttnttgggnttaagtttctttnattaagtaaaanttagangggggattagcttttt

SEQ ID NO: 179238 - DNA, 430 bp, Homo Sapiens
  misc_feature (304)..(304): n is a, c, g, or t
  misc_feature (386)..(386): n is a, c, g, or t
  misc_feature (401)..(401): n is a, c, g, or t
ccagcagtgaggagacagccagaagcaagcttttggagctgaaggaacctgagacagaagctagtcccccctctgaattttactgatgaagaaactgaggccacagagctaaagtgacttttcccaaggtcgcccagcaggacgtgggacttctcagacgtcaggagagtgatgtgagggagctgtgtgaccatagaaagtgacgtgttaaaaaccagcgctgccctctttgaaagccagggagcatcattcatttagcctgctgagaagaagaaaccaagtgtccgggattcagacctctctncggccccaagtgttcgtgggtgctttccagagggcagggctattgcttcacatttcatgggcctctgaccagccgagggaangaagtgttttgattnaggcgggacgttccttaattttcgggccg

SEQ ID NO: 179239 - DNA, 362 bp, Homo Sapiens
aaccagcgtctcggaggcgccgcagaattcacagatggattcagtggaaaagacaacaaatagaagtgaacaaaaatccagaaagtttttaaaaagcctcatccggaaacagccccaggaactgctcctggttatcgggactggcgtcaggcagcagttggcccccggaatccctgccctttgctcgtggagaagctgcatcgaggccgtcatcgaggctgcagagattgggaaggtgctgcaccccggagacgtcgccgagttccggagaaaagttgacaaaggaccgggacctgttggttgttcgcccatgatctgatcccgaagatgtcacctcgcacaggcgatggcaagcccagctt

SEQ ID NO: 179240 - DNA, 474 bp, Homo Sapiens
  misc_feature (383)..(383): n is a, c, g, or t
  misc_feature (395)..(395): n is a, c, g, or t
  misc_feature (403)..(403): n is a, c, g, or t
  misc_feature (408)..(408): n is a, c, g, or t
  misc_feature (431)..(431): n is a, c, g, or t
  misc_feature (452)..(452): n is a, c, g, or t
  misc_feature (462)..(462): n is a, c, g, or t
aattcggaacgagagccagctcccatcccctttaagagccactaagtcctgcccctaactcaaggacagcccatccccaaacccattccagagctctctccagccagatcagccccagggtcccgagcttccattcagtgttccctctagcccataagcccgactcctgccattcatgcagtcagccccgccccttcactcaggctccgcccagatccattaaggcccacctcttccctcagggcctccctgaacccctcaggaccagctccctcaaatcccgccccagatctatttaacccacgaaccaggaccctcagggttcaacctaaatcgatttaaggttcaggcttcaggaacccattaaaacccttcccaggatncatttaggggtnctggcttncattnacaacaggacccgggcccttganttttacaaaagggcccgggcnattttcccanaggggcggattt

SEQ ID NO: 179241 - DNA, 530 bp, Homo Sapiens
ggccgcgaccgagtcatggctgagacctacggtgagggtggtggacgaagctggggtcctgggtctgggcccagggaggatgcggcctgtgggaatgggcggggctttgtagatcagggggcggggtctggtgtgatggaggcaggacctaagtggatgctgggaggggtttagtgggtctgaggctgagcttaatcgatttaggtggagcctgagggtctggtgcgtgggttaaatagatctggggcgggatttgagggagctggtcctgaggggttcagggaggccctgagggaagaggtgggccttaatggatctgggcggagcctgaggtgaaggggcggggctgactgcatgaatggcaggagtcgggcttatgggctagagggaacactgaatggaagctcgggaccctggggctgatctggctggagagagctctggaatgggtttggggatgggctgtccttgagttaggggcaggacttagtggctcttaaaggggatgggagctggcctcgttccgaatt

SEQ ID NO: 179242 - DNA, 491 bp, Homo Sapiens
  misc_feature (30)..(30): n is a, c, g, or t
  misc_feature (40)..(40): n is a, c, g, or t
  misc_feature (49)..(49): n is a, c, g, or t
  misc_feature (95)..(95): n is a, c, g, or t
caaaaattggccccactggggttgaaaggnccagaacaanaaggaaggnctttgacccagcaaggctcccctatcccagatgaataacatgaagnatggaagccctccctccagcccacactcccagggagggtggggtggcaagggggattccagggataatggcattaataatacaagtggtaaacaaataaccaagaggatctggctggttacgatacacaaaagttagcagtaagagtccgtgctttcacattcctatcagacagatctgagttcaaatcctgtatgtgtagcagggtgaggtatctgctttctgtcagagcccatgggtgcacatctctgagcctagttacaacagttggcacataggtgggtggacaaggagggcagctcttgattcctgttgcttccacagcacagagagataagtatggctggtgtgacagatcccacttgacagatgaagccactgagacttggagagcagc

SEQ ID NO: 179243 - DNA, 542 bp, Homo Sapiens
ctgctctccaagtctcagtggcttcatctgtcaagtgggatctgtcacaccagccatacttatctctctgtgctgtggaagcaacaggaatcaagagctgccctccttgtccacccacctaggtgccaactgttgtaactaggctcagagatgtgcacccatgggctctgacagaaagcagatacctcaccctgctacacatacaggatttgaactcagatctgtctgataggaatgtgaaagcacggactcttactgctaacttttgtgtatcgtaaccagccagatcctcttggttatttgtttaccacttgtattattaatgccattatccctgaatcccccttgccaccccaccctccctggagtgtggctgaggaggcctccatctcatgtatcatctggataggagcctgctggtcacagcctcctctgtctgcccttcaccccagtggccactcagcttcctacccacacctctgccagaagatcccctcaggactgcaacaggcttgtgcaacaataaatgttggcatatctta

SEQ ID NO: 179244 - DNA, 337 bp, Homo Sapiens
ggcgcccagaagcctcggtttggcccacctgtgagtggggcagggaggggctccggttgtgcagagaacagagtcttctggcaaagaggaaatcccacagcagcgcagaggacctgggcctggaggggcagggctggggcaacccggcttggcggcaaagccagccccttctcagaccagctccccacattcctgaattccacttccaggcagaaaggagtgggctccccctactccctcagaggaactgactcaccggctgtcctagaatgggcaggggcagagcgaagttctgggtgggatgaccgcactgggggaggggcttcattccagaaac

SEQ ID NO: 179245 - DNA, 464 bp, Homo Sapiens
  misc_feature (403)..(403): n is a, c, g, or t
aaaggggttgggcccggttccaggaaggcccgttccgctgcaagaaaacacaggcccatccccaggtatcccctgcttgcacatctcctcgcagcacccaggggctccggcgggaagagggccttggagaggcggtagaggttgcgcaggttgaactggatgctggtgttggtgacccgcagctcgtggatgttggtggaacgctctgcggacagatgtcactctcgcccgagaagggggacactgtgatggtgttcttaagctcatagagtggcaggttgtctgaaatgccaccatccacgtagcgcaccccctggagggagggagggatgagcccacagtacacggggatgaaaccgctgcagacattggcctggatgagctcgtccttggagttgaagtngggatataatgacattctcgccgttttgacacggcgggtcaggggagatgcccagggcgcc

SEQ ID NO: 179246 - DNA, 618 bp, Homo Sapiens
  misc_feature (82)..(82): n is a, c, g, or t
  misc_feature (114)..(114): n is a, c, g, or t
  misc_feature (491)..(491): n is a, c, g, or t
  misc_feature (551)..(551): n is a, c, g, or t
  misc_feature (560)..(560): n is a, c, g, or t
  misc_feature (576)..(576): n is a, c, g, or t
  misc_feature (608)..(608): n is a, c, g, or t
cgcgggctgcgcttcctcggcgtctactacgtcggcgtggcctcctgcctccgcgagcacggcccttcctggtggccaacgncacgcacatctacggcgcctcggccgggggcnttcacggccacggcgctggtcaccggggtctgcctgggtgaggctggtgccaagttcattgaggtatctaaagaggcccggaagcggttcctgggccccctgcacccctccttcaacctggtaaagatcatccgcagtttcctgctgaaggtcctgcctgctgatagccatgagcatgccagtgggcgcctgggcatctccctgacccgcgtgtcagacggcgagaatgtcattatatcccacttcaactccaaggacgagctcatccaggccaatgtctgcagcggtttcatccccgtgtactgtggggctcatccctccctccctccagggggtgcgctacgtggatggtgggcatttcagacaacctgccactntatgagcttaagaacaacatcacagtgttccccttcttggggcgagagtgacattttttncgcagaaantttccaccaaacattncaacgagtttgcgggttaaccaaacaaccagnattccatttt

SEQ ID NO: 179247 - DNA, 589 bp, Homo Sapiens
agagaacataagacacgttgcgttcattcgctagaaatccctgtttccttctctcagaaggcagtcacagtccctacctgagtcgtgtgaaacacagggcctgagagtgctttacaggcattcacgggctgtccgagtggcattcgggggctggcctagctggccctagtcctggtgtgcagggttcaggcagtcttgacctgcaacaaccgaggttttttagtcttttaacccagccattttcaattttttaaaaattaggtaagttaaaaaagctggggtaaaagctgacctcagccctgtgtggcttgtgttccttagagctctccttccaaagagcgccgggcagggctgactgttttcacgtgtgcccgtcagttctcgccacatcccttgcctgtgggtgaaagctcaggtgtggggagggtgtcctgtgtcccacacggtgctgtgctgctgccagaatacgagtcccattgagcctctccaaagacggcctccaaggatctgaactcttggccactggtatagtggcctcctgttctcaccccattgttattttggcttttttaatataaaatgtacattg

SEQ ID NO: 179248 - DNA, 349 bp, Homo Sapiens
  misc_feature (106)..(106): n is a, c, g, or t
  misc_feature (147)..(147): n is a, c, g, or t
  misc_feature (161)..(161): n is a, c, g, or t
  misc_feature (196)..(196): n is a, c, g, or t
  misc_feature (208)..(208): n is a, c, g, or t
agaattcgcgaacagctcggaccagcggccacttctttcagctcagcgtcaagacccagtctgggaccaagaacctgcgcatccaatgtgaggggggcagcttctntctgcagagcgatccccggaagacgcagcccgtgccccgcntcgactgcgtgctnaagctggtgcaccactacatgccgccccctggagncccctccttccncttgccacctactgaaccctcctccgaggtgcccgagcagccgtctgcccagccactccctgggagtccccccagaagagcctattacatctactccgggggcgagaagatccccctggtgttgagcggcccctcgtgccg

SEQ ID NO: 179249 - DNA, 386 bp, Homo Sapiens
  misc_feature (295)..(295): n is a, c, g, or t
  misc_feature (342)..(342): n is a, c, g, or t
gacttgcagccgccgccgcgcagaatccacgctggctccgtgcgccatggtcacccacagcaagtttcccgccgccgggatgagccgccccctggacaccagcctgcgcctcaagaccttcagctccaagagcgagtaccagctggtggtgaacgcagtgcgcaagtgcaggagagcggcttctactggagcgcagtgaccggcggcgaggcgaacctgctgctcagtgccgagcccgccgcacctttctgatccgcgacagttcggaaccagcgccacttcttcacgcttcagnttcaaagacccagtctggggaccaagaaccttgcgcattccagtgtnagggggggcagcttctttttgcagagcgattccccgggaggcaa

SEQ ID NO: 179250 - DNA, 501 bp, Homo Sapiens
  misc_feature (37)..(37): n is a, c, g, or t
  misc_feature (45)..(45): n is a, c, g, or t
  misc_feature (67)..(67): n is a, c, g, or t
  misc_feature (134)..(134): n is a, c, g, or t
  misc_feature (454)..(454): n is a, c, g, or t
  misc_feature (456)..(456): n is a, c, g, or t
  misc_feature (489)..(489): n is a, c, g, or t
tgggaaaaatttcaagttcccaaggaaatcctggccngaattccnatcgctcccagtgtttcctacngcctgcggttggaacaaaacggcggaatggagctgcggaaaattccctcctcttcatcgggttcccnagtcctctgctgctggttgaaacttgcaaccggcatcttctgctcagcaacgaatgaggatgccccaggatgaaagaggatcccggcgatgacgaggcctccgatctgcagggactggtagtcgtaagtgaacgggtcgtgttcctttggactttctgccttggccatggtgaggagacccacacagaaaaccaagatgtggccaagagacgccattgtccctggaggaattctgctcgctcaggccaccatgcaacagcctgcctttccccactcagggggtcacgcacaagctgccggggtgaggcccagctgccacnantgcacaggctgccctgtgggaaaggtcaccccnactgttccgaat

SEQ ID NO: 179251 - DNA, 432 bp, Homo Sapiens
  misc_feature (18)..(18): n is a, c, g, or t
  misc_feature (35)..(35): n is a, c, g, or t
  misc_feature (56)..(57): n is a, c, g, or t
  misc_feature (68)..(68): n is a, c, g, or t
  misc_feature (87)..(87): n is a, c, g, or t
  misc_feature (267)..(267): n is a, c, g, or t
  misc_feature (353)..(353): n is a, c, g, or t
  misc_feature (373)..(373): n is a, c, g, or t
  misc_feature (413)..(413): n is a, c, g, or t
gtgcttcagcccccgggnagcaagcaggacgtttnggggccttctttcagcagggnncagcccgattngggacaatggcgtctcttngccacatcttggttttctgtgtgggtctcctcaccatggccaaggcagaaagtccaaaggaacacgacccgttcacttacgactaccagtccctgcagatcggaggcctcgtcatcgccgggatcctcttcatccctgggcatcctcatcgtgctgagcagaagatgccggtgcaagttnaaccagcagcagaggactggggaacccgatgaagaggagggaactttccgcagctccatccgccgtctgtccaaccgcaggcggtnagaaacacctgggattcctnttcatcctgggcatccttcatcgtgctgagcagtaagatnccggtgcaagtttcaacca

SEQ ID NO: 179252 - DNA, 337 bp, Homo Sapiens
  misc_feature (30)..(30): n is a, c, g, or t
  misc_feature (78)..(78): n is a, c, g, or t
  misc_feature (80)..(80): n is a, c, g, or t
  misc_feature (109)..(109): n is a, c, g, or t
  misc_feature (167)..(167): n is a, c, g, or t
  misc_feature (222)..(222): n is a, c, g, or t
  misc_feature (251)..(251): n is a, c, g, or t
cccccagccctgccctcggcccggtcccancatgaaggcgtttcccatctgcaaggatgccacggtaccctccccganancaggcctgtcccctaccccaactgggaanaaactggaaactgggtctctttgttgcctatgtttttttgtttgaagttcccaggaanatttgaggggttccggtgatgtgtttagggatcttctctgtgggggaaaaggaanaggagggtcttgttctcccatctgtttantctttgggctctgggaacaggggactactttggggctttctccagacttttgtatgttgttattaaaagcgagctattgcatttca

SEQ ID NO: 179253 - DNA, 458 bp, Homo Sapiens
ggcccccgcactttaagaggctgtgcaggcagacagacctccaggcccgctaggaatccgcgccatggaggccgcccgggactatgcaggagccctcatcaggcccctgacatttatgggatcacagactaagcgagtcctgttcaccccgctcatgcatccagctcgccctttccgggtctccaaccatgacaggagcagccggcgtggggtgatggcaagcagcctgcaggagcttcatcagcaagactctgggatgccctcgtcatcgctaccggactggtcactctggtgctggaggaagatggcaccgtggttggacacagaaagagttcttttcagaccttggggagacaacacgcattttcattgatctttgggaaaaaggacagaagtgggatgccggggcagccagcacgttccccattttttcgtccgccgaagaggtttggggattt

SEQ ID NO: 179254 - DNA, 469 bp, Homo Sapiens
  misc_feature (334)..(334): n is a, c, g, or t
  misc_feature (379)..(379): n is a, c, g, or t
  misc_feature (393)..(393): n is a, c, g, or t
  misc_feature (402)..(402): n is a, c, g, or t
  misc_feature (425)..(425): n is a, c, g, or t
  misc_feature (432)..(432): n is a, c, g, or t
  misc_feature (443)..(443): n is a, c, g, or t
tgaagccagggctcagggctgttgtgggaggggccgccgccgtgtccactcaagccatgcacaacggctcgcctaagtccagtgcctcccaagcaggggctgcagcggggcagggagccccgcccctgcccctgcctcccaagagccccttcccatagctggaccagcgacagacctgctccacggccacttggctccattcagagaccaaacagcttcctcttccgttcctcctctcagagtggctcaggcccttcctcaccagactctgtcctgagacctcggcggtacccccaggttccagatgagaaggacttaatgactcagcttgcgncagggtccttgagtcccggctttcagcggcccctgcctgaggacntgggcgaggttttnggccatgtnggggtcattcttgttgccagttngtgaaancagttaacggncgtgtttcgtggtctttaattcatgt

SEQ ID NO: 179255 - DNA, 460 bp, Homo Sapiens
gtggatgtcgaacctttgtgaaccaaagccccctccggaaacggcgctcgctgcctaataacctggagggtgactattactgcgcctgccctgatgactttggtggcaagaactgctccgtgccccgcgaagccgatgcctggcggggcctgcagagtgatcgatggctgcgggtcagacgcggggcctgggatgcctggcacagacactccggcgtgtgtggcccccatggacgctgcgtcagccagccagggggcaacttttcctgcatctgtgacagtggctttactggcacctactgccatgagaacattgacgactgcctgggccagccctgccgcaatgggggcacatgcatcgatgaggtggacgccttccgctgcttctgccccagcggctgggagggcgagctctgcgacaccaatcccaacgactgccttcccgatcccctgccacagcc

SEQ ID NO: 179256 - DNA, 414 bp, Homo Sapiens
  misc_feature (26)..(26): n is a, c, g, or t
  misc_feature (283)..(283): n is a, c, g, or t
  misc_feature (380)..(380): n is a, c, g, or t
attgcccatggggtcctttcaaccanggtactgtctcccaaagccctaagtcccccacccccaggagaggcgcctgcccacctcctcctcatctccggtggttccaaatcgtccgcctgtccccaacccagtcccatttttatggccaaactgattctgaaacaaaatgaaactgcaaacctcgtgtgtcttaaatccccccagggatgccactccatttcctccgccccgtggtctggtgcgtgacaatccaaagcgccgagacgagggtgctgtgtccctnaaacccagagtggtgggcgcctctgaaaccatacagccactcctggccccaaaaactggtttgcatcccaggttcctcgcccacctacccccgccanaccccgtctttttagagatctctctaataaatca

SEQ ID NO: 179257 - DNA, 523 bp, Homo Sapiens
  misc_feature (48)..(48): n is a, c, g, or t
  misc_feature (72)..(72): n is a, c, g, or t
aaattacttccaagtaaaaaatccaagtaaccctcctccctgcgaaantgaactgcaagggctgtttgaacnaaaaccaaaaaagtcaaaactcctggagcttaatgtccgtggctgtccaacctcccaagcccaaaacttgaactgtccccaaaaaatctccctgcagccacatgtttccccatgacctgtgggctctgcaaatggacctctctccgctagagatgcccttctcccaaatggcttccctccctggaaggcccagcctgagtcctcgtctcctttccagtgcttctgccagaagcatccccatgatgttgtgacccgcacagcactttgtgtctcgctttgagcacttgccactctggctggtgctgctgccactgattgtgtactgtcttgctgccctttctagactgtgagctcctcgtgggcagggaccgcctgtgttctctgtatttcccacggcgcctagcaacaggccttgcacttgataggtgcttaataaatgtctgctcaactg

SEQ ID NO: 179258 - DNA, 169 bp, Homo Sapiens
aaagactttttcaaattgtcaaatgatttaatgcagatgaacatatttctattttaagtaacgggaatctgtaagaatgtttgcttgagatatggttaacttttttcttttgttggttttgacttagatggacaccatgagatgttaatattcatacatgtaataaata

SEQ ID NO: 179259 - DNA, 503 bp, Homo Sapiens
  misc_feature (13)..(13): n is a, c, g, or t
  misc_feature (436)..(436): n is a, c, g, or t
  misc_feature (477)..(477): n is a, c, g, or t
  misc_feature (485)..(485): n is a, c, g, or t
gtaaaacagggtntgggagccatttggttgggggtcatcaagtggcctgatggatccagggcatgggaaggtggaatgagggaggaagaggcagtggcaagaggagagcaggttgggcaggtggtcggggtttgatcctgaatgcagaggcgacatggaagggctttgtgcaggggctgctgtgctctgattcacacattagaaagaccattctggaggcagcatggaggctggtcagttgaagaggaggcagagtcctgtgaccaggttcttgtgacgccttctgagggtccacccctcaatggctggtcctcagtgcccccatagccgggagccctggggcagggggactggcagtccctgcagtccttgccatgcaagaatgggaacaggcaggcctgggcagtactactcgtcctcctggaagtagaatttngtaccatacgcttcgtaggcatattggtagctacggcttgnacttcatncttcagaggaccacccgg

SEQ ID NO: 179260 - DNA, 403 bp, Homo Sapiens
  misc_feature (127)..(127): n is a, c, g, or t
  misc_feature (145)..(145): n is a, c, g, or t
  misc_feature (217)..(217): n is a, c, g, or t
  misc_feature (241)..(241): n is a, c, g, or t
  misc_feature (344)..(344): n is a, c, g, or t
  misc_feature (361)..(361): n is a, c, g, or t
  misc_feature (380)..(380): n is a, c, g, or t
  misc_feature (388)..(388): n is a, c, g, or t
gtgattgcatcccgggctggaagggcatcaactgccatatcaacgtcaacgactgtcgcgggcagtgtcagcatgggggcacctgcaaggacctggtgaacgggtaccagtgtgtgtgcccacgggntttcggaggccggcattncgagctggaacgagacgagtgtgccagcagcccctgccacagcggcggcctctgcgaggacctggccgacgntttccactgccactgcccccaggntttctccgggcctctctgtgaggtggatgtcgacctttgtgagccaagcccctgccggaacggcttcgctgctattaacctgggagggtgactattactgcgnctgccctgatgactttngttggcaagaactgttccntgccccgngagccgtgccctggg

SEQ ID NO: 179261 - DNA, 484 bp, Homo Sapiens
  misc_feature (28)..(28): n is a, c, g, or t
  misc_feature (73)..(73): n is a, c, g, or t
  misc_feature (88)..(88): n is a, c, g, or t
  misc_feature (344)..(345): n is a, c, g, or t
  misc_feature (348)..(348): n is a, c, g, or t
caccaagctgcctctccccagtggacanaaacatccccgggtaatggggtatataaaccaaagactccatcangaaatgtacaaacanaaaaaagctacaaacatttaataaattacagcatcacaaaaacacggaaacacttcacaaggtgctagtaaaataactgtatcccccaatcccctcatcatacaaggaaaacaaagagctggtattaaagttgaagattcatcttcaaaatgtgtctgaaatagatcttttgtgtactatttgcttctgtaaagacagagtgtaaggctgcacagacatcacttgtttttcaggcaataccttagttcttaaaagnnaanaataataataataaaaggaaaggagaaggaaaaagcatcagaacccaactgtccatctgactcagcaaaaaactcgtataaatgttaatgaagaactctatagaaagaaattcctaaagatacttttactcttata

SEQ ID NO: 179262 - DNA, 445 bp, Homo Sapiens
  misc_feature (58)..(58): n is a, c, g, or t
ccctcttccaccacccacaaaccccaaaggtggggaaaattctgcaacccacctgcanaggaagaatagggtgttaaggaactggctttaggcaaaaaagaagagacaaaaagaatgagggaggtctgggagtgagggaagtggtgggaagcagggaaagtcccggtcaagccatgtgcaccaagacagagccccagcgcggccttgcagccaggcaccgggccgtccccaagggctgctctcagtccgctttcacttggtgggcgaaagccacatttgcaaactgggaagtggagagtgggaggtgaggggaagcactagcaatgaatgaagaggattcttccgggaatcaggctgtttcaatctaaaacatccaagataagtggaaacactggggaggaaggtgatgaacagacggaggtgagccagagacacctcctgggcc

SEQ ID NO: 179263 - DNA, 277 bp, Homo Sapiens
gttcctgtgtcaagtctggtgatgagaccagactccagctggaggcagttaacatcactgacctgagcgagaacagaaagcaggacaagcgcttcgccttcatccgctcagacagcggccccaccaccagttttgagtctgccgcctgccccggttggttcctctgcacagcgatggaagctgaccagcccgtcagcctcaccaatatgcctgacgaaggcgttcatgggtcaccaaattcttacttccagggagggacgagtagtactgcccaggg

SEQ ID NO: 179264 - DNA, 336 bp, Homo Sapiens
  misc_feature (113)..(113): n is a, c, g, or t
atcccaagttggcagggttgtccctgtgccgtctgccttcctctcgggcaggaggattcccagcttcccgggtgaggggagagcactgtcccaggcagggctgggccaggagncctgggctgctgaggcgggaaagcggtggctgtggagggcacgtgctgcccccacctccgtctcggggcctggcttccactggatggcagaggccgctccaggtgcttcgacttggtggcgcccatgagtctgctactggagaagctgtggtctcagggaggagacagacaccacaggcaagactgggtggaggaatcttcccctcacccctgtgccgaaaat

SEQ ID NO: 179265 - DNA, 360 bp, Homo Sapiens
  misc_feature (32)..(32): n is a, c, g, or t
  misc_feature (70)..(70): n is a, c, g, or t
  misc_feature (78)..(78): n is a, c, g, or t
  misc_feature (122)..(122): n is a, c, g, or t
aggttaaaggaatgtccccatctcccttgggnaaggcccctgggcgaagggatgggccactgtttctccnactgcctnaaaactcctggctcccccaggagagccctggagaagaccccaanaggaggacttagtgcctgccagaagccgaggggcctttggaggacatcgctttgatggcttccagactccgacgcagggcacctggggaaacggcccctgcaagggcactggccacgtgaggtggggtatgcacaccatttgtctgttcaggagggtgtctcatacttcccccaactgtcctattgtccatgccatccatgggattactactggaagcgggtttcagatcccaattca

SEQ ID NO: 179266 - DNA, 281 bp, Homo Sapiens
  misc_feature (60)..(60): n is a, c, g, or t
aaatatcccacttcccctctctgtctcaaccatatcccacactgtcctaggtcaatatcnttaggtagaaagacatcatcaattgaattgttgactctgtctcctttcttcttcttatttttcttgttcttgccctttggctgaggggactctgccagcaccagcttgctgttctgctgatgctcaccgggagaggtgggctccataggggttgggtttgacttttcgtccttgatgtggttcagctgctttttgttattgttattactgttgacttttct

SEQ ID NO: 179267 - DNA, 441 bp, Homo Sapiens
  misc_feature (262)..(262): n is a, c, g, or t
  misc_feature (390)..(390): n is a, c, g, or t
  misc_feature (414)..(414): n is a, c, g, or t
  misc_feature (428)..(428): n is a, c, g, or t
aaaaacttcctttacagaggttcggactaacatttcacatgcacatttcaaaacaagatgtgtcatgaaaacagcccctttacctgccaagacaagcagggctatatttcagtgacagctgatatttgttttgaaagtgaatctcataatatatatatgtattacacattattatgactaggaagtatgtaaggaaatgatcaggaacaaaaggaaaatttctattttcatggcaaatatttttgcatcagtcatcactctncaaatattaaatttaaaatattaacactcctggaatgcctgaggcacggatctgggatttttaaatgtgtggggtatttcattggaaaaggaaggctcttccaccccacttggggatttttcaagganaattttaaacggttcccccggggnagggtggttttgtntggtttaaggtgg

SEQ ID NO: 179268 - DNA, 299 bp, Homo Sapiens
  misc_feature (18)..(18): n is a, c, g, or t
  misc_feature (244)..(244): n is a, c, g, or t
  misc_feature (270)..(270): n is a, c, g, or t
ttcggcacaggcgtttangagaacggcgatcgcagccagcacctcctgcacctgcagcagcagcagacggggggcggcgcctcccagatcaactccacgcgctacaagaccgagctgtgccggcccttcgaggagagcggcacgtgcaagtacggcgaaaagtgccagttcgcgcatggcttccacgagctgcgcacctgtactcgccatccgaagtacaagaccgagctgtgccgcacctttnataccattggtttctgtccctatggngcgtgttgccacttcatccacaacgtgga

SEQ ID NO: 179269 - DNA, 414 bp, Homo Sapiens
  misc_feature (12)..(12): n is a, c, g, or t
  misc_feature (348)..(348): n is a, c, g, or t
  misc_feature (383)..(383): n is a, c, g, or t
aattcggcacgngggggaacacatggggcaggtcctggaacttggtggcctgaggaccgaggccattgccctggtggaaaggcctggcctggttcctgtggcttgggacctgaataggcaggtgctgctggctccgtagaaacccttttcccatcttttgctctttgccaaacctaccttgctttgggagctgcctgcaccaccccagagaaggccccaccttcttcatccctcagacccgaggaggcctcccagtaaggagtttcccaagaggggactcacaggaaacaagtcttagtgcttggggagggaggccccgttgcgttgttcagattcacaagccaactnggaaggttaggacgagattaggcgccacccacggncctttcaaaaccccagatttccgagttaaag

SEQ ID NO: 179270 - DNA, 297 bp, Homo Sapiens
ctgtggcctctctccctggtctctgctcaggtggcccagctggaaggacagctgcagtcaggcccagcaggagagggactgtgactgtgcaaggtgagaagggtggtcagtcttcaccctcaagaccaactcagaaggcagccatttcaaagcgtctcaggcagcccaagcttgctggccagtccacaagcttggccagtcatcttcactgtcatggttccctgggcaatgcccgtagcagtcaagagacaaacccaaacagggaactaggtactccacaaaataaggcttttctgc

SEQ ID NO: 179271 - DNA, 229 bp, Homo Sapiens
  misc_feature (11)..(11): n is a, c, g, or t
  misc_feature (33)..(33): n is a, c, g, or t
  misc_feature (64)..(64): n is a, c, g, or t
attcggcacgngggggagccccagaatggttgncatttggtgctgaggctttgaagccaccgtntttttcgttacctgtgactatggagccaatgggatgtgacttcgctcatcacggtcagtcattccttctcctttccagggtgctgggggctggggttccctggcccaagggtccagcctcctctcaccccattccagggtgggcatacttgcagtctggctcttt

SEQ ID NO: 179272 - DNA, 459 bp, Homo Sapiens
  misc_feature (384)..(384): n is a, c, g, or t
  misc_feature (417)..(417): n is a, c, g, or t
  misc_feature (424)..(424): n is a, c, g, or t
gatccccaattgactcagagtttgaggagttagtatcacagaattagatttttttaaagcatttgtacgtttccattcccaaatatgtagctgtggttcttgaaaacacatcctacattgcatatgggcatagcagtttttgacccagggcagaataagttaatatttaattaaatattgctttgaagatgggcgctctgggcatgagcatggggggctccatggacttcccttctatccccatggaggcccctcctccatccaggcggacaagccaggggcatggcatacaatgcaggcaagaccaacacaagaggcaatattgaattgttcattctatctaaaattacatgtatattaaaatatataatttatcttcctgcnttttggaggtataagtccttaattgtacattcngttaggntggtatattgttttcacggttggttatatttaggg

SEQ ID NO: 179273 - DNA, 472 bp, Homo Sapiens
  misc_feature (13)..(13): n is a, c, g, or t
  misc_feature (29)..(29): n is a, c, g, or t
  misc_feature (78)..(78): n is a, c, g, or t
  misc_feature (107)..(107): n is a, c, g, or t
  misc_feature (335)..(360): n is a, c, g, or t
gactggtgggttntaccaaatgaaccttnaaacactgaatggaaattctgcttgtatctgcactcctcaacctggctnctcccagggaaatcccatggggcccgggnaacccctggcaatcccagggggtcccatggggccatttttcccaggatggccgggtaagccgggttctcccttctgccctttgggtcctcggatcccgggaatggctgggattcctggctcccccttgggccccggcagtccgtcgtacccatccttccctggtgccccaggcaggccgggcatccctgggatcccgtagcagcctgtgttggctctgccctgagggnnnnnnnnnnnnnnnnnnnnnnnnnnttcagcccaaggtggggcagggagctgggccccacgtccatcccggagaaggaactgcaggtgggcggtttctggcctggcacagagatgtcctcagatctgcttcccctct

SEQ ID NO: 179274 - DNA, 438 bp, Homo Sapiens
  misc_feature (130)..(130): n is a, c, g, or t
  misc_feature (136)..(136): n is a, c, g, or t
  misc_feature (145)..(145): n is a, c, g, or t
  misc_feature (147)..(147): n is a, c, g, or t
  misc_feature (179)..(179): n is a, c, g, or t
  misc_feature (223)..(223): n is a, c, g, or t
cttgaacctcaggctaaaacataggactttgctcagccatgtcccctgggataaaggggcaaacccaggaccaaatggcaaacctgtgggcttcaacctcggggccggggcatgcctgccaccccctganaaaaanaggttccanantgctacccttgcttcctgccccttgaggtggnccaggctggctcctggctatgcagggatctctggtccccagganaccttgggggccaggcaggtaaggatcaggggtgataggggagagcaattactttgttcactgtatgcacccgcgggggcctgggagtccccatttgcaggtgggtagcctccagcccacaccacccagacctaggcttccctcttctcaggatccaccacagggttaggggacaggaagcctgttctattctcaataaatcttacaaaattcca

SEQ ID NO: 179275 - DNA, 245 bp, Homo Sapiens
tgtaagtaagagcaatgtttactgagcgatacaggactgagtactatgaagggtttacaaggatggaaatgcaccccgcccccgccctggccacccccgacacccagagactacagtacttaggagttacacacaacggccgtaactggtggctatctgttcataacaaacaaaccatagcatatttatactgtatcacatcgagtgattatagaaatccatatatatattgcttgtataaaatc

SEQ ID NO: 179276 - DNA, 484 bp, Homo Sapiens
  misc_feature (424)..(424): n is a, c, g, or t
  misc_feature (448)..(448): n is a, c, g, or t
gattcacccaggcttccttctcagtagctctagctgggggaggtgtcagctgggcccctcctgtgctatctccccagaggacatccctgactccacccctttcttcctcccaaactctgcacctcttcctcagctgctccagaccggccagggtaaccagctaaccatgcctggcatctggaagccagcaggccagagggtggcccaaaggctgatgaacggtagggaagggtgagcagattcctatgttggtgggcaccaatattccaagggcagctctctttgctgaatgagggccttctcgtgaggtactgacaacaccagcaactcgagagctggggaaattcaaggaggaggaaaggaaaatcaaaaccaccctaattccctgggggttgagggaaaggaacaggagggggagggaggnagggattttgttttgcattttgcnttgttccagggttggggttggcagcagagggatttt

SEQ ID NO: 179277 - DNA, 682 bp, Homo Sapiens
  misc_feature (571)..(589): n is a, c, g, or t
  misc_feature (651)..(651): n is a, c, g, or t
aataacctcacgaaaaaggcccctcattcaaccaaaagagagctgccccttggaaatattggtgccccacccaacataggaatctgcctcacccttcccctaccgttcatcaagcctttgggccaccctctggcctgctggcttcccagatgcccaggcatggttagctggttaacctggccggtctggagcagctgaggaaaaagtgcagagtttgggaggaagaaaggggtggagtcagggatgtcctctggggagatagcacaggaggggccccagctgacacctccccccagctagagctactgagaaggaaaccctgggtgaatacaaaggtcacagggagctgagtgatctgagcctgttatgaaaggtgtagctctgtcagcagattaagttcctgctccccaaagagggtgctggcggggagggtgagggaaggcttggaaaggtcgcacagagtggggaggagctggcaaagaactaggaaccgggaagtccctggggagaatgtcaagccaccgagctacagatgccagcatggcagcaatttgggtgccagggcagcctnnnnnnnnnnnnnnnnnnngaaccagaggtttctgaggacacagatgttgctaggagaagctaacaggggtttgtttgagntctttgtattttgttaacaaacactgagatc

SEQ ID NO: 179278 - DNA, 435 bp, Homo Sapiens
ccagcttaataaataatccggagggccccgaaagaagtcccgccccgtccaagcagggctgtcaagcttccctgtgtggcaagcaccctggcaacactggctctggcccagcattatgctaaaaccctgttactctccaatgaacccagggaggcgggctcctctctgcgcctatcccttgagaattctgtcttaccagtgaagggtggggctgcccagatcaggcagcaggagtgaggggcacagtcaccccaggccttgctgagcccaggtctgggtactgagtgtccagagctgcctccccaggaggttaaggtgggggcaaaggggaagcttcaagcactttgcctacttttgttcactccccagtgcactgtgactcaggccttcccatcaggcctatttgtctacccaataaaaacgtgttttttccag

SEQ ID NO: 179279 - DNA, 536 bp, Homo Sapiens
  misc_feature (13)..(13): n is a, c, g, or t
  misc_feature (31)..(31): n is a, c, g, or t
  misc_feature (48)..(48): n is a, c, g, or t
gaaggaaaaacangcttccccaaaaggcaancgtgcaatctccctccnaaccagccctgcgaagcttgcggtagtaactccctccctgctggccgggctcccagccgcccagtcaatagggggcggcgcgcacagtctcgtcccgcacgtagccattgttgaccaggttctgcaccagtgtgtgcaggtaccctgccagcttgctgctgtcccaggtactccacagagtaggtcttgccaaagccagggacgcggatctggacaccaggggcgttggacacgagcccagagctccggttgtagacaaccctggtgttatcgatccagcagttctacccaaggggtaggaacatgttgagatccagccagatggtgaagaagtcctctgtcttgcggtagcacatccagttcaccacatctggtttgtccagcttggcttctagctgattccccaggcagccgggcactgtgagcagcagccctcactctggactctggattccccccgtgacccttacccccgcctcatgccgaat

SEQ ID NO: 179280 - DNA, 374 bp, Homo Sapiens
taaccccgaccactcggtggaacaggagagaaggttaaaggtcaatgatgggagaacgagaaggacagcattacccagaacgccatggaggaccagagcgccacggccgggactcccgcgatggctgggggggctatggctctgacaagaggatgagcgagggccgggggctgcctcctccccccaggggcagacgtgactggggggaccatggccgaagagaggatgaccggtcatggcagggcacggccgaacgggggcatgatggacagggatcacaagaggttggcaaggttggcgagagaagcatgttccggtcacttccgggcctgggccacattgattgaaccgaggaggaattttcaggggcgcgg

SEQ ID NO: 179281 - DNA, 332 bp, Homo Sapiens
  misc_feature (29)..(29): n is a, c, g, or t
  misc_feature (52)..(52): n is a, c, g, or t
  misc_feature (73)..(73): n is a, c, g, or t
  misc_feature (94)..(94): n is a, c, g, or t
  misc_feature (101)..(101): n is a, c, g, or t
ttgcccccccagggctgggtgccccaccnatgcccccttcctctttctcccnccctaccctctgccctgtgancccatcccataaggctctcanatggganattgtgggaaaggctttggccatggtctgggggcagagaacaaggggggagacacaagtagacctcaggtagaacgacactgggcggagccaccccagggcctgctcccagggagtgctcgaggcgcatcaggcccgttttttaccagtttatatcacggtcttcatttttaaaagtaacgctaactttgtagggacgatgtctcatggaataaataatattctttatggc

SEQ ID NO: 179282 - DNA, 427 bp, Homo Sapiens
  misc_feature (23)..(23): n is a, c, g, or t
  misc_feature (73)..(73): n is a, c, g, or t
  misc_feature (83)..(83): n is a, c, g, or t
  misc_feature (93)..(93): n is a, c, g, or t
  misc_feature (247)..(247): n is a, c, g, or t
  misc_feature (270)..(270): n is a, c, g, or t
  misc_feature (355)..(369): n is a, c, g, or t
aaaccttcctgggccccaggaanaaccccggaaaccccaaaaaatctgtgtgtaccccaggaaaccccgcctnaggtagccanccgccggggnactggctgctctgtcttggtccctgttaaccctcccacctcctctcttggactccctccccaccccaacccactctttctttctcctttaacccaatggagactttctgatgcatcattttctttgctgtgccaaagcaggtcagaagaggganaggaggggctgggggtgaggggnccaggccatggccaaggggaccagctgcccctcatttatcactctgaccttcacagggacagatctgatttatttattttggttnnnnnnnnnnnnnnnggaacagaaacaactttgcattgcattggcttgacccataaactaagttatatccgtg

SEQ ID NO: 179283 - DNA, 397 bp, Homo Sapiens
  misc_feature (12)..(12): n is a, c, g, or t
  misc_feature (26)..(26): n is a, c, g, or t
  misc_feature (39)..(39): n is a, c, g, or t
  misc_feature (83)..(83): n is a, c, g, or t
  misc_feature (340)..(340): n is a, c, g, or t
ccgtgggggaanaaaacccatcgtgnaatgttcctcctnaaccttaaggtcctggaacaggaaaacttggcgggggaatgccnccccaggatgtgggtgaattcctgtaccctggggaggcctatcctctgaccctccccaacaggggacactccccaggcccagccccaggggtcaggggcagaggtgcacaccctcagcatgagcccaagactggggtcagggagcaggtgtggtttgagcccaggaccctggggcgggggtggggccggggcctttctgcctcatttgctttcaatgaaagcctcaaagcagccaaaaccaggctttcccccttccncgagtttgaatatccagaatcttttgtacttcttgttggttaaattgtttatttttg

SEQ ID NO: 179284 - DNA, 453 bp, Homo Sapiens
  misc_feature (228)..(228): n is a, c, g, or t
  misc_feature (334)..(334): n is a, c, g, or t
  misc_feature (375)..(375): n is a, c, g, or t
catcccccggttccgtgggcagccccatcactgtgttcaatagtgtgagaatgtagctaaagcccctgctgctgctgctgcacatgccacagcaggcggtgggggctgcgtggggacaatccatcgtggagtgttctctcagcttaggtctggacaggagacttggcgggggatgctccaggatgtgggtaattctgtacctggggaggctatctctgacctcccganaggagcactcccaggccagcccaggggtcaggggcagaggtgcacacctcagcatgagccaagactgggggtcagggagcaggtgtggttttgagccagggacctnggggcgggggttggggcccgggcttttcttgcctcattttncttttcaattgaaagccttcaaagcagccaaaaccaggttttcccctttcctcgagtttttaattttccagatttttt

SEQ ID NO: 179285 - DNA, 556 bp, Homo Sapiens
gaaaaaaataattaaaagtgatgtctttgcacaggtgagactttgcactgagggaagggaaagggtgaggattttggggggccacccaagtcatagtccaatctcttcaaggacccaagatagaatttaggaattttgtgaagctgcattaaggatagagttggaatgaggatgtggctggcatttttccccctttccatagataacatttcttgaaaggctgggaggggaaggagggccctggcagatggcagccctcccgaggtagggctgtgttcctaatcagctttgttcggcccacacgctgtggttatccacagtggggagtgggtgtccaaagatggctttatccttcccccactcctttttcccactcccacctaggcacataaagttttgtccgaaaccatccagaaggccaggcaccatgcagaggacattcaagaatgtgcatgttcttagccaccgcctccctcctttgctgtgacatcaccactctttcctgatgctcaggaaagcatattgctccaattcaaaattaaagaaagccattctc

SEQ ID NO: 179286 - DNA, 472 bp, Homo Sapiens
  misc_feature (13)..(13): n is a, c, g, or t
  misc_feature (33)..(33): n is a, c, g, or t
  misc_feature (61)..(61): n is a, c, g, or t
  misc_feature (99)..(99): n is a, c, g, or t
  misc_feature (104)..(104): n is a, c, g, or t
  misc_feature (154)..(188): n is a, c, g, or t
ctgccttcccccnggggcattgcaaagtgcccnaccgtgcggggcccctgggctcctgcanaccccccgggaaaaagtctgccagacccccccagcccntcccncaataattcacccagacccagaagcccactggtgtacagagaacaccttnnnnnnnnnnnnnnnnnnnnnnnnnnnnnnnnnnntctgtatactgtatcagcagctttgtgtaaaaatggcaatcaagagagtctaatatatttaaaacttttttaaaaaaaatcttcgcagatctttgatatcgtactgaggtaacttccacgtagccccttgccacgcggcaccggtgggccttgggtccaaaaactgggctcagccacatcccaaagggggcacatgtccctggagttgcttccagctgccaaggcctgtgacagaattcgctgttaagagtttttaattaaaattaataaattccttttaataa

SEQ ID NO: 179287 - DNA, 439 bp, Homo Sapiens
  misc_feature (13)..(13): n is a, c, g, or t
  misc_feature (290)..(290): n is a, c, g, or t
  misc_feature (341)..(341): n is a, c, g, or t
  misc_feature (372)..(372): n is a, c, g, or t
  misc_feature (386)..(386): n is a, c, g, or t
  misc_feature (399)..(399): n is a, c, g, or t
  misc_feature (424)..(424): n is a, c, g, or t
tgcctccgcgganccaaaatcatgaaagtcaccgtgaagaccccgaagaaaaaggaggaattcgccgtgcccgagaatagctccgtccagcagtttaaggaagaaatctctaaacgttttaaatcacatactgaccaacttgtgttgatatttgctggaaaaattttgaaagatcaagataccttgagtcagcatgggaattcatgatggacttactgttcaccttgtcattaaaacacaaaacaggcctcaggatcattcagcttcaggcaaacaaatacagctgggangcaatggttacttacatccattcaactcctaataggtaactcttacatctngggttctggctactaggcaacccttttgggnttagggtgggcctnggggggctttgcnggtctgaggtaggcttgggggtttngattacttacccact

SEQ ID NO: 179288 - DNA, 422 bp, Homo Sapiens
  misc_feature (14)..(14): n is a, c, g, or t
  misc_feature (21)..(21): n is a, c, g, or t
  misc_feature (35)..(35): n is a, c, g, or t
  misc_feature (44)..(44): n is a, c, g, or t
  misc_feature (410)..(410): n is a, c, g, or t
gccctaaagtctgnattaagngggcatttaacaancctaaaacnctctgaaagcgtgccaacccggagtcttccctttgccatgaataaaaactttggtctcccacaacccccttatccataaccctagacactcctttcctagtgataataactctttcaaccaattgcccaataaaaaaattttgaatctacctataaccctggaacctccccgctccaccttcgagttgtcctacctttctggacagaagcaatgtggatcttgcatgtatttgattgatgtctcatgtctccctaaaatgtatacaattaggctgtgcccagatcaccctgggcacatgttctcaggccctcctgaggtctctgtctcgggccattggtcactcagattcggctcagaataaatcncttcaaatatta

SEQ ID NO: 179289 - DNA, 373 bp, Homo Sapiens
cccttaacaaaccatctcaacgccggaatcaaccctccccctggcaagggggcacccccaggtcccagagcccgggccctgtcttgggtctctggctctctggcacacagagagcgctctgcagagggcagccctcgcaggcagaccctgttcccagcagggctgaggggcagccgtgtggcccagcggtcagtgcagcacctggtccagctcatacttctcgcagaagcggctggtgaaggggaagcaggtgaggtgctcgatccagggccagttaatggggtagatgtacagccacagcacgagggcggcgaagaggccggcaaaggccagcagtgacaccaggatgagtgccgcttgcggtacttgtcgc

SEQ ID NO: 179290 - DNA, 470 bp, Homo Sapiens
  misc_feature (31)..(31): n is a, c, g, or t
  misc_feature (41)..(41): n is a, c, g, or t
  misc_feature (53)..(53): n is a, c, g, or t
cccccaaaacccccgagccgtaatttaaaantggctggccnaaatgaaccggntggaaagcgggtgggaaaaacgtgctcccaactgaagcccccctttcccggaaaaaatgatggccgtcctgtgaaaatcctggccctcctgtccctcctccttccttggtgtaagatgccaggtcagggcccaagtactccccaaagcatctcccagcagatagtcccaggttccagcttccatgccgcagctgatgacccacactgttgggttttcgggcccaggcggtccacctcttccatggagatctggtcgattttgttataaacatacaggcagggcatgtacacccggttgcccacgatcacatcgatgaactcgtccggggagcagtcttctcggaaaagcacttctgcattgaagatcttgtattcgtgcaggatgagctgcaccagcttttccgagcactgggtcag

SEQ ID NO: 179291 - DNA, 201 bp, Homo Sapiens
gaatgcatgaaattgtctagcagagcaggggcagggtgataaattgttgataaattccactggacttgagcttggcagctgaactatttggagggtgggagagcccagccattaccatggagacaagaagggttttccaccctggaatcaagatgttcagactggctggctgcagtgacgtgcacctgtactcaggaggct

SEQ ID NO: 179292 - DNA, 484 bp, Homo Sapiens
  misc_feature (43)..(43): n is a, c, g, or t
  misc_feature (62)..(62): n is a, c, g, or t
  misc_feature (76)..(76): n is a, c, g, or t
  misc_feature (95)..(95): n is a, c, g, or t
  misc_feature (108)..(108): n is a, c, g, or t
tcatctccctggaatctgaataattgaaaactgggcttttacntcgccacacctcagcacanactcccatgggaancccggtcaccagcaaagcnagccctgggcctnccattctccctttaaagcaagccatgaacaaccctcacttcaactgagtttttaattaaaaactagcaatgaccttagaaagcaaggcatgacctcagctcccacttttgaggctgcagtccattcagagaggtttcgcagactcggtaacggccagaacagacagcctgggccctgcgcaggctgactcagaatctttgggagtagtgaccaacttctgcttttggaaaaacctctacaggcggttctgagaagtccaagggttgctgggagaggttggtgagtggcgtggtgattacatgtgtcttggaagcatcctgggctgggatttgataagaaaccattaggtggaagaaccttccttttaaaaaagatc

SEQ ID NO: 179293 - DNA, 263 bp, Homo Sapiens
  misc_feature (19)..(19): n is a, c, g, or t
  misc_feature (34)..(34): n is a, c, g, or t
  misc_feature (40)..(40): n is a, c, g, or t
  misc_feature (45)..(45): n is a, c, g, or t
  misc_feature (68)..(68): n is a, c, g, or t
  misc_feature (73)..(73): n is a, c, g, or t
  misc_feature (88)..(88): n is a, c, g, or t
  misc_feature (93)..(93): n is a, c, g, or t
  misc_feature (243)..(243): n is a, c, g, or t
ggaaaggaccacgtcggtncggtaggctgggtgntaaggnaaagnaccacgtcggtcggtaggctggntggtnagggaaaggaccacntcggncggtaggctgggtggtgagggaaaggaccacgtcgggcggtaggctgggtggtgagggaaaggaccacgtcgggcggtaggctgggtggtgagagaaatgaccacgtcgggctcaggatggatgggattaatggcaggttgggcacagcnagacaaatgaccagcccagg

SEQ ID NO: 179294 - DNA, 461 bp, Homo Sapiens
  misc_feature (288)..(288): n is a, c, g, or t
  misc_feature (292)..(292): n is a, c, g, or t
cgccgctccgggctctgctcgccctcctacgttgcggtcacacccttctcccttcggggagacaacgacggcggtggcgggacttctccacggccgaccagctggagatggtgaccgagctgctgggaggagacatggtgaaccagagtttcatctgcgacccggacgacgagaccttcatcaaaaacatcatcatccaggactgtatgtggagcggcttctcggccgcgccaagctcgtctcagagaagctggcctcctaccaggctgcgcgcaaagacagcggcanccgnaaccccgcccgcggccacagcgtcttgcttccacctccagcttgttaccttgcaggatctgagcgccgccgccttcagagttgcatcgacccctcggtggtcttccccttaccctctcaacgacagcagcttcgcccaagtcctgcgccttcgcaagatttccagcgcc

SEQ ID NO: 179295 - DNA, 366 bp, Homo Sapiens
  misc_feature (49)..(49): n is a, c, g, or t
  misc_feature (56)..(56): n is a, c, g, or t
  misc_feature (101)..(101): n is a, c, g, or t
  misc_feature (114)..(114): n is a, c, g, or t
  misc_feature (232)..(232): n is a, c, g, or t
ggccgccgccgtttcctccttccccgctgccagcccgggtcaggtcaanagggcancgaaacaagttacagccggctccgggctctcactgcgggttgggnagttgctgcccgnaggtgccagcagcttggtcagctatgcctcatgagggctcaccgcgggccgcggtagccccggccgctaagcagatggctcacgggcaccaaggatcccaggccccagggcgggtagnccccggcactggccgaaacgaaatgcagggaaaggtccgagtcgcctcccgcctcacttggctaagctcagaacccaaggcgcggggagggacgggagaacgaagcggtgaggccctgcgatgactcgaccgcc

SEQ ID NO: 179296 - DNA, 447 bp, Homo Sapiens
tgcagggctacagtgtggagtaccagctgctgaacggcggtgagctgcatcggctcaacatccccaaccctgcccagacctcggtggtggtggaagacctcctgcccaaccactcctacgtgttccgcgtgcggccccagagccaggaaggctggggcgaagagcgtgagggtgtcatcaccattgaatcccaggtgcacccgcagagcccactgtgtcccctgccaggctccgctttcactttgagcactcccagtgccccaggcccgctggtgttcactgccctgagcccagacttgctgcagctgagcttgggagcggccacggaggcccaatggggatattcgttgggctacctgggtgaacttgtgagattggcccaagggaggaaggggccaagccaccgattttccgggttggattggaagacagccccgagaagccggt

SEQ ID NO: 179297 - DNA, 421 bp, Homo Sapiens
gattccattacctagtcatgaagaagttaccacccaccaggccttacctagtgtttcccatccctctgatcacatagcacttgtatgtgatttaaaatggaaatagatgtgtgtttaatggaattgaagtctgaaaaggaagtagttattttagcagaaaatttaatatgaatcaaagcttatatgtaaacttcaaggaggaatggtaaaatgttcagccctcctagttatgttcctgatgtcttcgttatgaaactgttgatgtttgcatcatacatcttctctttccttgttttcctctacaattgggaggagaaacaaatatatttcttactaggcaaaataggaaaattggaattatttttctccaacttggaggactctcaggaaaagggaaggattggaattaggcgtgtttttt

SEQ ID NO: 179298 - DNA, 443 bp, Homo Sapiens
  misc_feature (15)..(15): n is a, c, g, or t
  misc_feature (41)..(41): n is a, c, g, or t
  misc_feature (65)..(65): n is a, c, g, or t
  misc_feature (139)..(139): n is a, c, g, or t
atgaagaggaagaangttagagactgcagagggagaaagcnggaatacggaagaaccaaatccanggatctactcccaagtgacccaacagccaaaacaaattaacgaagttccatagacgagatttgttcaacactgncaattgtttgttagatgtaaaccctgtgactatagtacgttgccttcttgttcttcacaattcatgacttaagtaccaaaatgcataccagttattatatattgcccaagaattaaatgataaacttagagactgattagactgaaaatgcctaatcgatatatatattcttgtgcctagtactataccacaaatacagtgtaatatcatcagtccaaaactgcattacttttgtaaaaacactggttaatttgtataagatattatagagctttttatgctttagaagttaaacaatatcttt

SEQ ID NO: 179299 - DNA, 415 bp, Homo Sapiens
  misc_feature (81)..(81): n is a, c, g, or t
  misc_feature (211)..(211): n is a, c, g, or t
  misc_feature (281)..(281): n is a, c, g, or t
  misc_feature (362)..(362): n is a, c, g, or t
  misc_feature (367)..(367): n is a, c, g, or t
  misc_feature (382)..(382): n is a, c, g, or t
  misc_feature (391)..(391): n is a, c, g, or t
  misc_feature (397)..(397): n is a, c, g, or t
gatttgaaacactatatttatcttgtcagtttttatatttaaagaaagaatacattgtaaaaatgtcaggaaaagtatgancatctaatgaaagccagttacacctcagaaaatatgattccaaaaaaattaaaactactagttttttttcagtgtggaggatttctcattactctacaacattgtttatatttttcctattcaataaaangccctaaaacaactaaaatgatttgtataccccactgaattcaaggctgatttaaatttaaaatttgggnatatgctgaagtctgccaggggtacattatgggccctttttaatttaccggctaaaatattttttaaaatgccttgctggnggaancggtggctttcctcnaaccagggnttaaantttttttccgggaggttt

SEQ ID NO: 179300 - DNA, 377 bp, Homo Sapiens
gacctcttgtacagaagttgcccccaggtggtggggcccctccttgccctaggctggttggtaaaagagaggaggtcaacacccagcctagccacctctgcctcttgggtcagccctccttgactgtgtcccagcccagcaccaggccagcagcctcatccctgccattcagggctgttccagagattcgatcctcttaaggcattatcagtgagcaaatgtgaaggaaatggtgtctggaagaaagttctggttcacatgccttgtagctaagtctttctgcaaacaacctcccttccccccgtcgagtcatttggtgactttgatgggggggattctggttatgttcaaggctctgggagacaggaaggggcctt

SEQ ID NO: 179301 - DNA, 496 bp, Homo Sapiens
  misc_feature (19)..(19): n is a, c, g, or t
  misc_feature (43)..(43): n is a, c, g, or t
  misc_feature (57)..(57): n is a, c, g, or t
  misc_feature (66)..(66): n is a, c, g, or t
  misc_feature (75)..(75): n is a, c, g, or t
  misc_feature (85)..(93): n is a, c, g, or t
  misc_feature (105)..(105): n is a, c, g, or t
  misc_feature (123)..(123): n is a, c, g, or t
  misc_feature (223)..(223): n is a, c, g, or t
tgccaatcaggctgtcccnaaaaaaatcgaacccccttaaagncattatcaattgancaaaatgtnaaaggaaanggtgtctggnnnnnnnnnttctggttcaanatcccttgtaagcctaantctttctgcaaaaaaacctcccttccccccgtcgaaatcatttggtgactttgaatggggggatttctggttatgtcaaggctctggagacaggaaaggnctttggccgccttgggtagttgacctgccttttctgactccgggacgagccagtcctaggctgcctccgggagcacttgaggtatcccgcaggccatgaggacccactgggcagctcctggacagcctcttggctccagcccccacccgaaagtggaacaactgtccgccctggccacctggggactggcactgtggtgcacagtggcccaatgtggccaacggaagttttataaaagacaaaatgtatatcaataaacattttataacttgc

SEQ ID NO: 179302 - DNA, 427 bp, Homo Sapiens
  misc_feature (373)..(373): n is a, c, g, or t
gagtaaacccagctcccactctcagtgggctgcagttgcccaaccacaggaagaaagggaaggaggtagagggaagaaacagaagcagtgttccattttcttcctcaccaatgacattcttttcttttctcctttcgtactcctccctgagagtcccctcccttctcccacactcgtttccctttgctcatgactcctgtagggaagtttcttcaaacaaaacccagctcctgagtctccagatgttgttctgtcagttgccaaagggactttgctggaccactggcaggggggatcccaaccaatttcaatttaatgtcttcatattggaaggaggaggtgttacctttcaattggaaaacctcgtttttcntttgttttggcatttttctggcaaaaggggaaaaggaaaccacaattggggggg

SEQ ID NO: 179303 - DNA, 412 bp, Homo Sapiens
  misc_feature (189)..(189): n is a, c, g, or t
  misc_feature (313)..(313): n is a, c, g, or t
  misc_feature (397)..(397): n is a, c, g, or t
aaattccagacgggaaaacgggtgaagtggtttgaaattggatgccagtgtgggcccacccccggaatgatactgactgattaattaacccctgataacatcctcaagaaaaggagaaggaaagtgtttcctggagaatgttctttcacatcactggaatctgcaattcaagaagtgacaagggagaantcttgctttaccctatggaactggcttaagccgtgtggcatccgaggaatgtttcaaatgtgtctgtgtttctctttacattccttgttgtacctcattgttcaattcacttttgtaaattccncctaacatttaattattttaaatttctccttttaccttaatctccttgctaattttatctgtctaattaaaaagagcagaagcntgtctggaattacgt

SEQ ID NO: 179304 - DNA, 562 bp, Homo Sapiens
  misc_feature (124)..(150): n is a, c, g, or t
aagaaagaagaactgggaagtctttgtccctaggaaatccaaaggggctggaatatggtgttggtttggctttctggttggcccaatcggcctattggctcaatgggaagagaggagagggagnnnnnnnnnnnnnnnnnnnnnnnnnnngtttgcaaattcagacaggaaacaggtgagtggtttgaattggatgcagtgtgggccatcctggaatgatactgactgattaattattcctgataacatctcaagaaaaggagaaggaaagtgtttctggagaatgttctttcacatcactggaatctgcaattcaagaagtgacaagggagaattcttgctttacctatggactggcttaagccgtgtggcatccgaggaatgtttcaaatgtgtctgtgtttctctttacattccttgttgtacctcattgttcaattcacttttgtaaattccacctaacatttaattattttaaatttctccttttaccttaatctccttgctaattttatctgtctaattaaaaagagcagaagcatgtctgggtttacgtaaaaaa

SEQ ID NO: 179305 - DNA, 460 bp, Homo Sapiens
  misc_feature (62)..(62): n is a, c, g, or t
  misc_feature (393)..(393): n is a, c, g, or t
  misc_feature (433)..(433): n is a, c, g, or t
  misc_feature (443)..(443): n is a, c, g, or t
gaaagttgttgagcttcctccagctgtgagaataagtcctaatctccagagaaatggggccnggaggaggaggcttattgcttcccagcatttggggggaacatgatccaacccctggcctcctgccacccatctgccctgctcccacatgctcaggccccagggcacagaaaaagggcagcctccctaatcacactaacatcaaaataaagaggctgggccgctgtgtagccaggacatgcccatgccaccgcctattgaacagttcataggagtggcagtaatctactgtgtgaggagagagggcaattaaaaagctgaaagaggaaggaggccctctgtgtattccgtttccctcctccttaaatgcctccaagggtccttgcatccctngtcttcttaaacttccagctctgattcgccattaaccctnggagcaattncaaggtcccagttaccc

SEQ ID NO: 179306 - DNA, 601 bp, Homo Sapiens
  misc_feature (313)..(313): n is a, c, g, or t
  misc_feature (474)..(474): n is a, c, g, or t
  misc_feature (496)..(496): n is a, c, g, or t
  misc_feature (504)..(504): n is a, c, g, or t
  misc_feature (515)..(515): n is a, c, g, or t
  misc_feature (530)..(530): n is a, c, g, or t
  misc_feature (537)..(537): n is a, c, g, or t
  misc_feature (561)..(561): n is a, c, g, or t
  misc_feature (575)..(575): n is a, c, g, or t
ggaagcactcacctagagctgtctgtgcctctctgggagaaaggagagaggataagaagggaaagtccacaacctgtgaacagggacttgagcacgagacacttttcatctggagcaggggggtgagctcctcagcagcctccgtaacagctgccctgcctacacctgcagagctggaggttctgtcctccctgctgctctcaggagtgttcaagggtggagggcagggaatggggcctgaggtattaaggctaagaagtgggggacagggcccatctaccagcctttcattcaggaaggggaaagggctttnggggtcaggtggccagctatttccccaccaagagatttcagggttcacaggttttttccccacacctcttgaactcagggccttagccacccccaaacttccaaatcccactttttgttgatatgtgaagcttattcattttctttaccctttggaggctnttttgggggaattttccagccnttttatgnctgtgttgatnccaacccaacccccntaagttnttttaaagggtcatagtgaagagnttgggggaagattnttttagccagattctgggggttgggg

SEQ ID NO: 179307 - DNA, 425 bp, Homo Sapiens
aatctcaaacccaaggctggtgcaaaaaccccaactgtggctgctgtggctccctggcagctttgtcccccaccgtgaaggcccaccccgggggtcaagcaaaggcaagtagcagcctgcccttgggatgatgatggcagtgtcgctttttctagtactttctactatgagggaatgtggttcttaagaccctcaaggtgtgtgtgctaaggccggagacccactttcagcatgagaacggagctgcccggagcctgggatgccacagcactgcctgcacccgctgatagctgggggcccgtgctgcaggactggaagagccctgctagatataaaagggttgctagcggggcaaacagatgccctcccaggctgggcacgctgctttttctctttcctaattgcagtgcttgcttggggacttc

SEQ ID NO: 179308 - DNA, 397 bp, Homo Sapiens
  misc_feature (31)..(31): n is a, c, g, or t
  misc_feature (42)..(42): n is a, c, g, or t
  misc_feature (53)..(53): n is a, c, g, or t
  misc_feature (79)..(79): n is a, c, g, or t
  misc_feature (84)..(84): n is a, c, g, or t
  misc_feature (91)..(91): n is a, c, g, or t
  misc_feature (178)..(178): n is a, c, g, or t
  misc_feature (224)..(224): n is a, c, g, or t
acccccaaaaagccttccaactccctgctgnaaaactgccgnaaccctctcangaatcctccataagggtccccgcctnaaatnaagccgncaacgtgcggccgaacgaccctcaagctgcatccaccttggtgggcctgcagcaggggctgccccaccccccaggagactgaagtgnccccatgctggctctccgggctggaggagagcaggtctgcagctgncggcctcggcgcaggcaagggggtggttctgctgctggggggcgagggggtaccggaccaggccctggagatggggcaggtgaaggcaccaggtggggactaggggtggactggccagcagacgagggccctcgaatggtaagaggggcttcctgggggcccatgggtctggt

SEQ ID NO: 179309 - DNA, 267 bp, Homo Sapiens
atgcaacacacaggggttaaccacccctcacctagggctccagactccagttgtccctctcctcctacctgtgtctccttgttttggggtcctgactgaagaaggtgtccagggggcagagtcagggccaagcactggggtgcctcctctcacctgggccagactctgacccacctacctcagctgggggtgaggggggcacccttcaaactcagtcatgtgggttccaaactaaccccatttccccacttcagattttggacccag

SEQ ID NO: 179310 - DNA, 441 bp, Homo Sapiens
  misc_feature (20)..(20): n is a, c, g, or t
  misc_feature (30)..(30): n is a, c, g, or t
  misc_feature (36)..(36): n is a, c, g, or t
  misc_feature (46)..(46): n is a, c, g, or t
  misc_feature (53)..(53): n is a, c, g, or t
  misc_feature (90)..(90): n is a, c, g, or t
  misc_feature (104)..(104): n is a, c, g, or t
  misc_feature (124)..(124): n is a, c, g, or t
gctgaccctactctgaaaancccaaagtanccgtangtgtgtgtgnaaaaaancttgtctttgtgtgggtatgtgtgtggtgaaattgtncaatgttatgcaanacaacacaggggttaaaccnaccccctcaccctagggctcccaagactccccagttgtcccctctccctccctacctgtgtctcccttgttttgggggtccctgactgaaagaaggtgtcccagggggcagagtcagggcccaaagcactggggtgccctccctctcaccctggcccagactctgaccccaccctacctcagctggggtgaggggcacccctcaaactcagtcatgtggttcccaaactaccccattccccactcccagactctgacccagcctcagtcctaactcctggggctgggctgaggggaacaagcatttgctgaaacttg

SEQ ID NO: 179311 - DNA, 455 bp, Homo Sapiens
  misc_feature (223)..(260): n is a, c, g, or t
  misc_feature (277)..(277): n is a, c, g, or t
  misc_feature (424)..(424): n is a, c, g, or t
tgacaggcgcatccggcctcatgttctttttcattaaagagagaaatcaactattcaggaccggcccccacctttcctcaggagtcatttctgttccgcacaggcctgctgaactgggtgctttatataggatttcagtggagtgaagttcaggaggcatggagctgacaaccatgaggcctcggcagccaccgccaccaccgtccggcgccaccaccgtagnnnnnnnnnnnnnnnnnnnnnnnnnnnnnnnnnnnnnnagagtaactctgacttnggaatagagacagccagagagaaatgtgatcaatgaaggagacatctggagtgtgcgtgcttcttcagagggacgggtgatgggcagattgggaaaagcaccgcagatgggaaccttaatctttcttttctaaaattgatgctatgnaaatttgcgttttctgtaacttgtaaaaact

SEQ ID NO: 179312 - DNA, 439 bp, Homo Sapiens
  misc_feature (31)..(31): n is a, c, g, or t
  misc_feature (42)..(42): n is a, c, g, or t
  misc_feature (61)..(61): n is a, c, g, or t
  misc_feature (156)..(156): n is a, c, g, or t
  misc_feature (232)..(232): n is a, c, g, or t
  misc_feature (254)..(254): n is a, c, g, or t
  misc_feature (369)..(369): n is a, c, g, or t
acccccccagccctgaaaaggcctgaaaaanggaaagggtanccttttcccccacagttcngggaacaaaataaagggcttccctttggtaccccccacataatagtgcctaggtaccctttgaccccatcatcttgggaggtggggaggaatganagggtccccaggcagggtgtaggggaatgtattagtccagtgagatttccctcttcatccgcagcagtgtatctantctatacctggctatgggaganaccccttgcatgggagggaccccttgctatggcccctttagccaggcagtgggatctacctgtggcccggcctccctaatgtcattcacattgaatggggatgaggtcggacagntgctcatagagccgagtatgagccctagctgtgggctagaaatgtccttaataaaaatccttatttttca

SEQ ID NO: 179313 - DNA, 514 bp, Homo Sapiens
cagtttggagatctctcaaagaacttagaacagagttaccatttgacccagcaattccataactgggtatatcccaaaatgaaaataaattattataccaataagacacatgcactcatatactcatcactgcagtactcacagtagcagagaagtggaatcaatctaggtgcccgacaatgctggattgtattaagaaaacgtacatttacaccatggaataatatgaagctataaaaaaataaaatcatgttctcagcagcaacatagatgaagctggaagccataatctaaagcagattaactctggaacagaaaaccaaataccacgtgttctcacttagaagtggaagataaacaaataggcactgtggattcctaggagagtaggaagagagacgggcatgtgttgaaagactacctgtgggtgccatgcttactatacccaaaatacccatgtaacagtcctacacatgtatcccccgatttaataaaagctaaaaaattaaaaatc

SEQ ID NO: 179314 - DNA, 417 bp, Homo Sapiens
  misc_feature (393)..(393): n is a, c, g, or t
ccctcaaaaaccctccctgctgctgaagggcgctgtcattgtcctatcagctgtactcccctaatgtcctctgaaaaagtggcacccagaccatctcgctggcccctcatcctcttcagcaactactatcccttcttcaaactgctccgggaccgcttggtattgggcaaggcctactcatactctgctaacccccaaaaagaccctggacccaccgtttctcctgagccctggggtcacctcagggacaacgtcccaggcttccagccaagggctccctggcaaggggctgttgggtaaaagtggtggtgggggggacaaaagacaaaaaaatccaccagagctttgtatttttgttacgtactgtttctttgataattgatgtgataaggnaaaaagtcctattaaaatactccc

SEQ ID NO: 179315 - DNA, 451 bp, Homo Sapiens
  misc_feature (43)..(43): n is a, c, g, or t
  misc_feature (57)..(57): n is a, c, g, or t
tggactttggaatccaaaagaaaagcccccaaatcctgccctntgaccttgaaaganaaatcccatctctgcccccctgacctaagagagcagccttccgacctcctgacctctgacccctggccagaactctagctccctgaccctttgacccgagggccacctcaaccccagcttctgacgtgtcccaggacagagcatccctggattctgttcagggtgggaagtagtactgctagtcatggtctcaccccgagctgacccctctgcctgggctttgtgccaccctctcccttgccaaagaagaaactctccccccaaatcctccaacctctgggccacagccctgcccctccagttccttggcagttctcccccaaaccaggtctgtacaggtgttctttattttacatgagggctactttccaaccaaataaaaaaatatttttct

SEQ ID NO: 179316 - DNA, 433 bp, Homo Sapiens
  misc_feature (382)..(382): n is a, c, g, or t
  misc_feature (403)..(403): n is a, c, g, or t
  misc_feature (416)..(416): n is a, c, g, or t
ggctgaaggcagctcccacatcttgacctctgactccacagaacagtccccccactccctgccctctgaccctgaagagcactcccatctctgccccctgacctcagagagcagcctccgacctcctgacctctgaccctggccagcactctagctcctgacctttgacccgagggccacctcaaccccagcttctgacgtgtccaggacagagcatccctgggattctgttcagggtgggaagtagtactgctagtcatggtctcaccccgagctgacccctcttgcctggggctttgtggccaccctctccccttgccaaagaaggaaatttttccccccaaattcttccaacctttgggggccaaagccttggcccttncagttcctttgggagtttttnccccaaaacaggntttttaaaagttttttt

SEQ ID NO: 179317 - DNA, 475 bp, Homo Sapiens
  misc_feature (84)..(84): n is a, c, g, or t
  misc_feature (100)..(100): n is a, c, g, or t
  misc_feature (413)..(413): n is a, c, g, or t
  misc_feature (458)..(458): n is a, c, g, or t
ccccccgccctgcccctcggttctgctcggctggcccctggctctttcttgaaggaatcccgtcaatggggggaaaggtccttnaaaatgaatgctcaanctgtggggcgggccttctaaaaatgccccaatactttgggggtctcaaaaaatggaacccccgttgtacaggggttgggtgggggttgcaggactccactcaaaagcctcctgatgtcaaggacaggcggaccagggctggcctcccccagtccccaagccccactgtgccttgttgtctgctggggggccatagctggcactgcccaccgtaaaggccctcgcacattttcccccttcctgtacacctcggggccagcatcctcaccttcttcaactgaccagtcgtggttactccctgctgccaggtcctntcccttcccgggggtattctgtgaccatgaataaagttatcaaantctttctctttcaaaaa

SEQ ID NO: 179318 - DNA, 452 bp, Homo Sapiens
  misc_feature (67)..(67): n is a, c, g, or t
atcatgcatgcatttatttttaagaattcccaataaggggggaaaaattcaacatctttaaaaatgngtttattttttaaaaaatcagttgtgtaacaaaagtgtttccgtagtttttaaattcctccaagacaaatacccccaaccttcccaccccacagccccaccctgcttcaatggtatttctggtaacccacccattttccccttacaggaagttaacggctcagaatagaccctcctacagaatttatcatcactaacagattgtttagaatagagatctagagaagctaacaagcaaggttccctataatggcagtagacttccagcagacaccacaacaaagcaccatcaattgctgaaagctaaaaaatagatattattttcaataatatttcattttctattggaaaagttttttaaattacattaaataagtctctttccc

SEQ ID NO: 179319 - DNA, 477 bp, Homo Sapiens
  misc_feature (57)..(57): n is a, c, g, or t
  misc_feature (102)..(102): n is a, c, g, or t
  misc_feature (361)..(361): n is a, c, g, or t
cccgttaaactaaactccccttggttcaaggtaaaaatgttgtcggggtcccgcaangcaaaaacggcccaacccctcccctggtgaatgtaaggcaagccnaaaatcttcaacggaatgcaagttgaaaacccctggctaagcaactgtaaggacccccaggctgttccccgcccacaagcctgcaggaatccgccgggcacgtttcttagcatcttctgggaagctggggctgtccagcaggtttgggtaggtgcatagtgccatcactgccggaggaaggtgattggctgctgccccatagcctgggcgtccccgatgttggctcggatgacctctgtgaatggctttttgatacccncgctgcagctcgagctcgatctcgccggccttgagcacgatgggtccccgcacggcgtactccaccgccttcactgcgggttcatggactccagcgtgaggattgcgcttgcagcg

SEQ ID NO: 179320 - DNA, 525 bp, Homo Sapiens
  misc_feature (417)..(417): n is a, c, g, or t
  misc_feature (463)..(463): n is a, c, g, or t
  misc_feature (467)..(467): n is a, c, g, or t
cggggatattgtgggatggggatcatcacacctgtccgtgacttgccgcccccggagacgaggatcttcaggatcgtagaaatgccgtcactagctcccgtggtcaggtagatgttgtcggggtccgcaggcacaccgccatccctcctggtgatgtaggcagccacatcttcacggatgcagttgacacccctggctagcactgtaggacccccaggctgttcccgcccacaagcctgcaggatccgccgggcacgtttctttagcatcttctgggaagctggggctgtccagcaggtttgggtaggtgcatagtgccatcaccttgccggaggaaggttgattggctgctgccccatagcctgggcgtccccgatgttggctcggatgacctctgtgaatggctttttgataccncgctgcagctcgagctcgatctcgccggccttgagcacgatgggtncccncacggcgtactccaccgccttcactgcgggttcatggactccagcgtgaggtatgcgc

SEQ ID NO: 179321 - DNA, 353 bp, Homo Sapiens
  misc_feature (99)..(160): n is a, c, g, or t
  misc_feature (178)..(190): n is a, c, g, or t
  misc_feature (304)..(304): n is a, c, g, or t
gtgatcccccaacactttggggaggcccgaggcaggtggattgcttaagcctcaggagttcaagacccagtctgggcaacatggtgaaaccccgccctnnnnnnnnnnnnnnnnnnnnnnnnnnnnnnnnnnnnnnnnnnnnnnnnnnnnnnnnnnnnnnaagtgagaccctgtcagnnnnnnnnnnnnngtaagcagaggaaagtggaattgaaggagagggagtaaaggtagctggaaaagagagagtttggagtatggttgagaattgagctgaatttttagaatagagattagtaacatncaataaaagagaaactggtttttccaagtcaagggtgagcaagagggac

SEQ ID NO: 179322 - DNA, 418 bp, Homo Sapiens
ggctccaggctccagctacctggctagaaccaactttcactgttgtccccaaacctgctacatccctcgaaccccagggcccagttccttacctcaggggctttcagaccaaagacatggatatcatcctctacaccctcatgccagccataacatcctacccagcactgtgtctaggattttgcctcccaagcatttttagacccatttcagggcagctgaaggaatctctcattcctttgcttcaactcttccaggggccctcaggatgggagtcccgggtcctcctcctaacatttaaagtctccctgaccttcagggcccttcaggatgggagttccggggtcctctggccttaggcgtttttaaaggcctttctggacctggggggccttcagggaggggagttcctggggtt

SEQ ID NO: 179323 - DNA, 356 bp, Homo Sapiens
  misc_feature (122)..(122): n is a, c, g, or t
agtgacaggagtaaaaggacactgattatcagctcccttctgaccatatcacctccctctcaacgtacctaagcagttttcacctactcttttctacatcctcagactgcccaggatatggntctcaaacctttccctggctcaacctcacaaggatgaagacccaaggcagctttggctggcattactgcagcagacagggggtcccagcaattgattccattctctttattccctgaaaccacccttcaccctggtcctaacttgttgattgctggacaggttaaagaaagggtgagacttgaaaggaagagcctagggggccctgctagattcagaaagcagtgccacagagc

SEQ ID NO: 179324 - DNA, 502 bp, Homo Sapiens
  misc_feature (19)..(19): n is a, c, g, or t
  misc_feature (81)..(81): n is a, c, g, or t
cccctcccaacttttccanaactaggaggcttgtaggttaacttggtacttcaacaccccaaccaccttaactcgggaaanaggaactgttggaagtggggtggggaggagggaggcatgggatggatgggcctgattgatttggaagatggaggagttcagctgtaactaaacggggtgtggcaaatggttcttggtgtctacagtaaccccactacccccatgggtacagcagttgattggatgggggttcccagcggaactgcttttgcatattcaaaaccctgggggggaaggggtaggtgctgactgggcacttgtttctgtttcccaaggggagcatgccttggcccctaccagtattctgggggttagccctgaaactctgaggcctgggtgcaggtaaggagaagctgggctggttggggagaggccgccctgtggctcttggcctggcctccatgttacttcttctccttcttgcccgacttcttcttgttgc

SEQ ID NO: 179325 - DNA, 430 bp, Homo Sapiens
  misc_feature (140)..(151): n is a, c, g, or t
  misc_feature (239)..(239): n is a, c, g, or t
cccttgcttcatccagcacagctctcaggtgggcactgcagggacactggtgtcttccatgtagcgtcccagctttgggctcctgtaacagacctctttttggttatggatggctcacaaaatagggcccccaatgctannnnnnnnnnnnaagtttgtttaattatttgttaagattgtctaaggccaaaggaattgcgaaatcaagtctgtcaagtacaataacatttttaaaaganaatggttcccactgttcctctttgccacagagaaagcacccagacgccacaggctctgtcgcatttcataacaaaccatggatgggagtgggcgggccagtccagcccttttaaaggaacgtcaggtgggagcagcccgggtgaaaggccgggcggtggagggaaagtgaaacgcctgatttcaaaagcag

SEQ ID NO: 179326 - DNA, 497 bp, Homo Sapiens
  misc_feature (23)..(23): n is a, c, g, or t
  misc_feature (31)..(31): n is a, c, g, or t
  misc_feature (46)..(46): n is a, c, g, or t
  misc_feature (86)..(86): n is a, c, g, or t
aacccaacaccctaagccttccnggcacccnacaaatcaggaaccngggaaactacccaagtggcccccaaaacgaatggcctaanataatgtccactggggttaaaatcccagtagggttcccttcctcaactggcctgtggttatgcaccccttaacagcatgcctataaagggacccacataaaaataagttgccccactggaccttgtttaggacctgtgcaagacttatgggggaacataagtgacccctgctcaaatgctacccaggtggcccccactttccagcttcagagggtacatattaggtctgtggataatttgcttactctgtcctgacttcagatcttgctgtttcacctgattcatgctcaccttgcaaacagctttccctgaaagtccccataatcagaggtcaaagactaaaatgaataccaaccttgaaacagatgattagttagtttcccctgagcaaatattccagtggagttcctc

SEQ ID NO: 179327 - DNA, 404 bp, Homo Sapiens
  misc_feature (89)..(89): n is a, c, g, or t
tgaagcctcacagttgggaagtccttgggaaagtcccaattcccaaaatggccctctggaactcaaaaataaaaactacatttccccantctccccttgtaagccttgcagtagcccatgtgacaatactcccagcccaatgggaagtgagtggaaaagtcctgtgcagcttctgagttgcgtcccacccatgggcatgggtgtgcttctacctccactcttccttcttctggctggagggcatgtggacaaagcggggccatggtgagcctcacaatcaaaggcatcattttagggatagagaaaaggaagatagaaggatcctgagccccaacatcataaaccatcgtaacagccagactagcgtgggagagaaaaataaaattctatcatgttgaagtcac

SEQ ID NO: 179328 - DNA, 436 bp, Homo Sapiens
  misc_feature (300)..(300): n is a, c, g, or t
  misc_feature (422)..(422): n is a, c, g, or t
gccactgtgtgcagaggcatgggagttgtcatgttgggaacatgctagacctcagtatccttgagggatgctgccttgggtctggaaactgttagaggaaaccccaagaggtgcagccactgagcctctcaggacaatgacctggggtcccagctcccctggagggtcctcctcatgattgtttgggggttgatcacagaccaagagtgacgagtgatgtcaccctgtgactcatggccggaccttcttgcccctattgtctcagcacaacattattcgacttttccctcagcgtgggtnggcagaggaaaagccctgtggcttctggggacttggggatccagagtttgaaggaccctttcagcttggctttgccctggccagttgccacagagtgccatggcccaggaagacaggttttnttccatcttaggtc

SEQ ID NO: 179329 - DNA, 350 bp, Homo Sapiens
  misc_feature (17)..(17): n is a, c, g, or t
  misc_feature (25)..(25): n is a, c, g, or t
  misc_feature (50)..(50): n is a, c, g, or t
  misc_feature (56)..(56): n is a, c, g, or t
  misc_feature (64)..(64): n is a, c, g, or t
  misc_feature (69)..(69): n is a, c, g, or t
  misc_feature (106)..(106): n is a, c, g, or t
  misc_feature (131)..(131): n is a, c, g, or t
  misc_feature (135)..(135): n is a, c, g, or t
  misc_feature (143)..(143): n is a, c, g, or t
  misc_feature (171)..(171): n is a, c, g, or t
  misc_feature (178)..(178): n is a, c, g, or t
  misc_feature (180)..(180): n is a, c, g, or t
  misc_feature (290)..(290): n is a, c, g, or t
  misc_feature (321)..(321): n is a, c, g, or t
tgaatgtcacccctgtnaactcaanggccgggacccttcttgccccctantgtctnagcacaanattantcgacttttccctcaacgtgggtgggcaaaggaaaanccctgtggctctggggacttggganccanagttgaanaccctttcagactgctctgccctgccantgcccananagtgccatggcccaggaagacaggttttcttccatctaggccaggccatccagtggccatcctccgtgtcctcccgcctccccctggtgtgacttctgaaaaccaagaanttgttcctgttgactttttctgtgctatggnccattgtcctctcacccactcaataaatc

SEQ ID NO: 179330 - DNA, 563 bp, Homo Sapiens
gggggtcccgggcctctgctgtccttgacccactggtgttctgtgcaaggcttcttcccattcaccaagtgcacaccttgcatctgccgctcggatgcaccagttccacacaccatcccattttacagacaaggacgctgaggcctgcagcagcagtgtgacttgctcaaggtccagtgagtgacctcattccccagaaaaggctcctcccacaccagagtacagcctgggtagggggaaaatcagttctttcagctaccacccatccaacctttgggcctatgtgaaaagaaaggaactaagctgggtgtgttctgtctggacctggggaggcccctgaaggcaaagagggaaactgtcccagctgttctgtcctaggggagggggacatagccctagcaggagctcccagcccctcttggcactctgacacacaagtacacccatctggggcccgctttgccacgaagagctgggcaggcctgcagggtgttggggaaggaggacacaaccttcaagaaagggaagcgttgaaccccaggggaacagcgggttcctttcct

SEQ ID NO: 179331 - DNA, 409 bp, Homo Sapiens
  misc_feature (397)..(397): n is a, c, g, or t
cccttccctccctcagacacaagccacctcagcttgtggctcttggcccccagccccacccaacccacctgttcatttattcaacagacaatgacagctgatatttattggacatttgcacccatgccaagcattcggcttggattatcccatttgtttctcacagccggtatttattgtctgctcctctgtgcccaggtgctgtgctctgggcaggggcactgcatgggctgcctgccctggtggagcttgtggtctgatgggtgaggctgacccaagcccaccccattgccaacagggccagggcaagagtacacacaggggcctcataccatatgtctaaatatttaaaagttatcaatcaagctaacaactgttaaataaaatatgttctaantacctactttga

SEQ ID NO: 179332 - DNA, 447 bp, Homo Sapiens
  misc_feature (26)..(26): n is a, c, g, or t
  misc_feature (172)..(172): n is a, c, g, or t
  misc_feature (340)..(340): n is a, c, g, or t
gggcgcctcccctgtaatccatcctnacacctgtaacagtaaccccccaaaaactgcctgacaagctggaaaacgggttcctggtttcaacctacggtatattgaatatcggaagtattctagacagatcctcggttgggttttctagcctacatgtttgtattgcacaganccccacctgccatcctatagtgttgtcttcctgtgtgttcccggggcttcctgggcagctgggcctgccccggggaagtcccttgcaggtgggaggcccatacagagacccactgtgtgccactgagcgtcccactgctgctgggcaactggaggactgcagggggcnccaggtgactctctccttttatatcacagcagctcctgtgctgaccttcaagttacgttttggaactgtaatactaaaggaagaaataaactactaatttgtataaa

SEQ ID NO: 179333 - DNA, 345 bp, Homo Sapiens
  misc_feature (45)..(45): n is a, c, g, or t
  misc_feature (258)..(258): n is a, c, g, or t
  misc_feature (312)..(312): n is a, c, g, or t
  misc_feature (327)..(327): n is a, c, g, or t
gaataaacaagagcgggacaaggagaaccggcatcggaagcgcancacagccgctctcggagccgggaccgcaaacgccggagccggagccgcgaccgggcaaaccgggaccagcggagccctcccgggacaggcgacgacgcagcaaacctttgaccagaggcgctaaagaggagcacggtggactgattcgttccccccgccacgagaagaagaagaaggtccgtaaatactgggacgtaccacccccaggctttnagcacatcaccccaatgcagtacaaggccattgcaagcttgcgggtcagatttncagccattgttcttntttcccaccattgacccc

SEQ ID NO: 179334 - DNA, 215 bp, Homo Sapiens
  misc_feature (28)..(28): n is a, c, g, or t
ccgggtgagttcagggttggatggtcancggctttcagagggagaccacgggaatgttcagggaaacaatgtcagcttctctgaggaccagaattcatgttcacgggcagtgatgagttggcttatggagtgagtccagtctggaattccaccgtgcattctagcctgtatcatctcatttggacaaatgctggcacgttgaaattaaaatgtta

SEQ ID NO: 179335 - DNA, 435 bp, Homo Sapiens
  misc_feature (28)..(28): n is a, c, g, or t
  misc_feature (32)..(32): n is a, c, g, or t
  misc_feature (38)..(38): n is a, c, g, or t
  misc_feature (53)..(53): n is a, c, g, or t
gccaaaacaaacccaggggttgcaacangaanggggcnaatgaacaaaaaggnacccggtcaatccttggaccaaaccccagaaccgaaaatcaaggctgcctgactgcgcactgtctgacccacgtcaacctgcagcgagggagagggctgactgagcaggaggcgcactcaaagccgaggtctgaaatgagattctcctaagatgcacggatgcatcggttctcacctcctcctgtagtactgtgagaaatgaggacacttctattttttggtcttctatctttagagtgaagagctccaggggaaatggattgttagtgggtgctaatggttgtgaagagttggcagggagcgctgcaggctgtaaaggattcgcaggatggcaggtccaccccactcctgctcattgacaagaacaatggggtggggatct

SEQ ID NO: 179336 - DNA, 382 bp, Homo Sapiens
  misc_feature (41)..(85): n is a, c, g, or t
  misc_feature (279)..(312): n is a, c, g, or t
  misc_feature (347)..(347): n is a, c, g, or t
  misc_feature (363)..(363): n is a, c, g, or t
tgccatgttgcctaggctggtttcaaactcctgagctcatnnnnnnnnnnnnnnnnnnnnnnnnnnnnnnnnnnnnnnnnnnnnnatgagccactgtgcccggcctctttgctcctattttcctctggggagttttatatttccctgatagattttagtattcctcatatacactgacgaatttcccttcatatctattgtaaagtttatcctgctgctcaaagtttaattttgctttccacatgcaggatactaacctttgtattcaaacttcatatnnnnnnnnnnnnnnnnnnnnnnnnnnnnnnnnnnattccttctcttcattttaagtttgggaatatccngtcctgcccagtgggncaggatactaaggggcatc

SEQ ID NO: 179337 - DNA, 350 bp, Homo Sapiens
  misc_feature (173)..(182): n is a, c, g, or t
ccttaagcccccacatttagaccccacaaaaaaaccttgtccccccaaattgagaaattttataaaaaccatttaccatatggttgttgacctactggaaaccctatatacccttttcaaaacaataactcagtcaaaagataccacttttattaaaaatgaaattttgtgcnnnnnnnnnnttgtttaagctagaaacaagactatcccccctagtaagaggccaaaagagccactgaaataatttaactctgttagatttaatgcatgtaaccaaaaggcacatacatgtgattaatatattaatatcttttcatgcagaaacttgtgcatgttcacctgtgccgaat

SEQ ID NO: 179338 - DNA, 399 bp, Homo Sapiens
  misc_feature (16)..(16): n is a, c, g, or t
  misc_feature (26)..(26): n is a, c, g, or t
  misc_feature (35)..(35): n is a, c, g, or t
  misc_feature (102)..(102): n is a, c, g, or t
  misc_feature (109)..(109): n is a, c, g, or t
  misc_feature (124)..(124): n is a, c, g, or t
  misc_feature (365)..(365): n is a, c, g, or t
gaaggaaaatccccangggtcctaanaactggcancctggaaaaaatatcctaccccatttggtgaagtggaaaacaggaaaataagaccctgtggagaaantcgttgntcccactgaaatggnctgactgtaacgattgacccccaaaatgaaccttgctatccaagaaatgctcgtcataccagtaaactctggatgaatcttccagataatgtccttgctttacaaaccaaccatttctagagagtctccttactcattaattcaatgaaatggattggtaagatgtcttgaaaacatgttagtcaaggactggtaaaatacatataaagattaacactcatttccaatcatacaaatactntccaaataaaaataacatcattgtattaacgcaa

SEQ ID NO: 179339 - DNA, 324 bp, Homo Sapiens
ccacatctcttcttacaggtcaactggctttccttgacaccccagttacttcgttcttcaggtgttgcaaaactcatcagcaagcacctaggcaattactgttcaaaatatctatgcagtctactagacttaagattcagaaaggcagaaaccacatataccttgttcacagctggacttctcagtgtctagtactaggattctcaatacatatctgttgaagttatgatgacattattaccatatagctatttgagttcctccgtaatcccaattctcaagttctttgagagaaaaaaataagtaaatcaaaattatagaatt

SEQ ID NO: 179340 - DNA, 299 bp, Homo Sapiens
  misc_feature (38)..(38): n is a, c, g, or t
  misc_feature (201)..(201): n is a, c, g, or t
aaattaaacttcctttaatgaaataaaaaacaaatggngcattgcataatatttgtggtcacagtataaaacaatacaattagttcatataacattggatatggacaaaaatacacaagatcctttctttgtctacggaaaattctgcagatccttatgtgccacacttaaaaacaaagtcaacgttttctcttctagggntctgcacacatatttatcactgagaatttggtcaaacagtggaggagaacttacccaaatcccagttcccttcttcctctgttgtcatcggtgaagct

SEQ ID NO: 179341 - DNA, 321 bp, Homo Sapiens
  misc_feature (32)..(32): n is a, c, g, or t
  misc_feature (38)..(38): n is a, c, g, or t
cccttttatgtgaacatggtgaccccttaaanctgggnagggaccgtagagatgagagtttcacacacccagccccataggtgggatgtcaagaccccatcggaagtgtcgctggcctaagagaagagcacttatttctcacccatggctgatctagaattgttccctgattctgaaagaagtttacactacactggtaagcagtactattagactactgactgtggccttctgtgcatatggaataatgatttctcagatttgtaggcttgaatgtgaatgttattttatcagtaatcagaataaattgcttatattcag

SEQ ID NO: 179342 - DNA, 507 bp, Homo Sapiens
  misc_feature (422)..(422): n is a, c, g, or t
  misc_feature (435)..(435): n is a, c, g, or t
  misc_feature (492)..(492): n is a, c, g, or t
ggttaatctaataaatataattacagccccttaatgtgttgtcaatgagtctaagttgacaaattcagtggcagcccagccacctcctatcaatcaatcagggaagaaatgcaggggagactggggccctcagtgaggggctgcctggcattactcctccaaagactgctgcccccagaacaggcagggggtgtgggagggccagtttcccgccactgggtccaaggagcctttgttcaaaggaagaagtgggccacgggaagaacgggcctgcttctcttcgtgcctgtgcttctggacctccagggaactgttaaacagggaacacctatgtgttaacttgaagggcatgaggacatctgttacagggaaggcattcccagcgccccacatggggcattgaggacagttttggcaattgncggcctggggtgnaaatgtcgttgttgttgttaccaggacagttccacttggggcaagcacaaggttttncttcatgtttctttt

SEQ ID NO: 179343 - DNA, 453 bp, Homo Sapiens
  misc_feature (82)..(82): n is a, c, g, or t
  misc_feature (364)..(364): n is a, c, g, or t
  misc_feature (383)..(383): n is a, c, g, or t
  misc_feature (389)..(389): n is a, c, g, or t
  misc_feature (394)..(394): n is a, c, g, or t
  misc_feature (426)..(426): n is a, c, g, or t
ccattttgcattaaaatgtatttctgtgacttcccaaagtacagacatttccccaggccccagggggtaaagcaatgaggtntgaagtctgccagggtctggccggggccactgagcctgggaaggaagggagcgccgcatgcagcccatctgccaagctgggggaacacagggctgcgcagttttcccagggccgggaggagaggctccaggagaaaaaggccaggtgtctctcccaaagctgctcacccctgccgtcctgcctgggaggcaaaaatgctagggaacacctgaaaacaggcccccgggaggaaaagggaagaaaaagccattcacccaaaggcttgcctccaggggttagcgntttttccccagggcccctncgtttncacangttttccgattgagaagcattgcagttttccntcgatgggaggggcaagaaagccggct

SEQ ID NO: 179344 - DNA, 424 bp, Homo Sapiens
  misc_feature (27)..(27): n is a, c, g, or t
  misc_feature (35)..(35): n is a, c, g, or t
  misc_feature (44)..(44): n is a, c, g, or t
aaggaagccaacccggaatcctcgttnaatttccncctggggtnaatgccccctggtaatgccaatgcaaggtcctcgaatgaacatccccagggtgggttcaatccctcgcaaaaggtcaatatggcatgttccccaatcccaagttgaacaagcaagcaagtcggcccccatactgaacgaggatcttcacccaggttgatgtggccgcaggtggctgcagcatggagaggtgtcccacagctcgttgtccttggcgttcacattggcaccatgggagaggagcagcttcacaatttcctcaaagttgtcgatgcagcactggtgtagggctgtgagtccgtcctcattgcacaaatcagggctgaccttattcttcaggaagtagcgtacttcctcggcgtcgttcctcagcgaggcctcc

SEQ ID NO: 179345 - DNA, 475 bp, Homo Sapiens
ggtagtcaggcacctcatgcaccttccagacatccccgttggccagcgcatactggtaggcactgaccggagcccgatgccattctcaacaggcatgtccagttcacctcgtgggatcttggtaggaaattcggagagtagcacgggcttctccagcctggggttagggtccttattctcttggtctgtcctggtctccctgatgtccccgttgtaggtggaggtccgctgatcctcagctgcactccgctgccacaggatggcctctccctcatactccttcctatacaggttgggtcctgtccgacaggctgggctcgccgcaccacctttcccacgggcttgcctgcgctgggaaggtccttccggcttcaaagggatgaatttgttgccttcaagctgttgaatttcaatgattcaacaatcatggtttgtggtttttaaggttccagcaagcaaggaacttgaatttttt

SEQ ID NO: 179346 - DNA, 1166 bp, Homo Sapiens
gtagtcaggcacctcatgcacctttccagacatccccgttggccagcgcatactggtaggcactgaccggagcccggaggccattctcaacaggcatgtccagttcacctcgtgggatcttggtaggaaattcggagagtagcacgggcttctccagcctggggttagggtccttattctcttggtctgtcctggtctccctgatgtccccgttgtaggtggaggtccgctgatcctcagctgcactccgctgccacaggatggcctctccctcatactccttcctatacaggttggtcctgtccgacaggctggctcgccgcaccaccttcccacggctgcctgcgctggaggtcctccggctcaaggatgacttgtgcctcagctgtgacttcatgatcacatcatgcttgtgtttttagctccagcagcaggaccttgaactcttcctcctcgcacaggtctattggcatctcatccatggatgtccttgcactgaggactagctccatgggacaccaataactctgccatctgcatctgtccccagaaggcagctgcatgcaggggctcccagccatcccagtccttcacattcatcacgcactccatggtccaagaggagctcagctgcccccaggtatccattggctccagctatgtgcagcagtgtggcaccctgggcatctatccagtccaggtcctggcccgctgcgatcatgaagtggatgtccgcaaatcatctgctgctcaggagccacccgcatctcgttgattttcctcttgggtgatgcccctggtatgccatgcaggtctcgatgacatcccagggtgggttcatcctcgcagaggtcatatggcatgttcccatccgagttgacagcaagcaagtcggccccatactgaacgaggatcttcaccaggttgatgtggccgcaggtggctgcagcatggagaggtgtccacagctcgttgtccttggcgttcacattggcaccatgggagaggagcagcttcacaatttcctcaaagttgtcgatgcagcactggtgtagggctgtgagtccgtcctcattgcacaaatcagggctgaccttattcttcaggaagtagcgtacttcctcggcgtcgttcctcagcgaggcctccagcaggccacgctgcct

SEQ ID NO: 179347 - DNA, 355 bp, Homo Sapiens
  misc_feature (24)..(24): n is a, c, g, or t
  misc_feature (40)..(40): n is a, c, g, or t
  misc_feature (79)..(79): n is a, c, g, or t
  misc_feature (240)..(240): n is a, c, g, or t
tggtccctgccctagggacctccnaaacctggtgcccaantgctcaggccacctccctggtccagtcacccacctgcancctcggcagggcaggtacaggggccacctcggatgggaacctgggtccctgcctccgctctgcccctgggtggctgggaggaaaggccctctcgggggtgacctgggcgtcagccgtggaaccccctcctcctccctggagtctgcctgagtccctcgagnccgcgagccttcgctgaagtgcccttgctataaccccctctgcttctggtgtgtgacgaggcccccgatgttcttgattttcccagagaagcaaataaacaacgtgaacagcccc

SEQ ID NO: 179348 - DNA, 303 bp, Homo Sapiens
  misc_feature (285)..(285): n is a, c, g, or t
gacaggcccagcaggtaccagtgctccagaacatgctgcagatcccacggtgcccagtggcagacggagctcaaccgcaggctcatgccccgagaagcgcttgaagttgaaaagctgcacctgcagggtggcccctggcagtccgactgcgggatgtggaagcagcaggtctcgtcaaacacggggcagagcgtgcctcggtgcacttttgtctcatgtctgtgtccggcctgggtggagacgctgacccgggcataggggtccacggtcccccaggcctcaggncggctgcctcctcaggcc

SEQ ID NO: 179349 - DNA, 599 bp, Homo Sapiens
  misc_feature (255)..(255): n is a, c, g, or t
  misc_feature (374)..(374): n is a, c, g, or t
  misc_feature (403)..(403): n is a, c, g, or t
  misc_feature (451)..(451): n is a, c, g, or t
  misc_feature (578)..(578): n is a, c, g, or t
gattgtcacaggggctgagggctacactcagttcatgaactaactgccgtgggcctcctggcagagcacaactggggcttttgtataagaagactttaatattctgtaaggagcttggtcctgtgagtttctgggctctggcctcctgaagaaccagccagaagaagaaaagtagaggtggctttgctgcctcctgggagcccagaacttgcagtaaccctttaggttcctgccccaggcccagccagggctganggagctgtcacagagagggcctcagctctgacctgacacctggctcttccccagcctgttttcttcttttcttaaaagacaaattatggtaccataagcttgccaaagatcccctcctngcctcaggacccctttgccaggggttttngggggctgagcagagccacatccagagtggggtaatagctcaggcggncccgcttcccatttctcaaaccccgctctgccccattgttctcctttcccttatactttttatttaccttgctcaaggggccagaggattttcaagtgttcaaccttggagggtcccaggttccatnccttagttggcaggattcatt

SEQ ID NO: 179350 - DNA, 348 bp, Homo Sapiens
ggtaaaggggggtttacccggaaacccaaggcgtacacacacacatatttcccttaaatacttcctgaactcattaccttttagaataataatacctacctacactttacccagcaattaacttcctcccctaccccaaaatgtttttccttccctgtctgaaaatggaactaatttgtcttattcgtgcttatatctgtattaaatgcaataaagttagtttttgaaatgtaaaaattcactgtgcaattcatatgtcagcaataaaacatagattatttgtatataagttcatttttatagctattgttacatttaattaaatttattcaatatttgcttaaaaac

SEQ ID NO: 179351 - DNA, 365 bp, Homo Sapiens
  misc_feature (16)..(16): n is a, c, g, or t
  misc_feature (112)..(114): n is a, c, g, or t
  misc_feature (144)..(144): n is a, c, g, or t
  misc_feature (146)..(147): n is a, c, g, or t
  misc_feature (150)..(153): n is a, c, g, or t
  misc_feature (155)..(155): n is a, c, g, or t
  misc_feature (170)..(170): n is a, c, g, or t
  misc_feature (189)..(191): n is a, c, g, or t
  misc_feature (203)..(204): n is a, c, g, or t
  misc_feature (225)..(225): n is a, c, g, or t
  misc_feature (273)..(273): n is a, c, g, or t
  misc_feature (286)..(287): n is a, c, g, or t
aggctgtccctcccangggggacggcagtaggtgggtagctggctggcggcaggcccaaccctgcaggaggatgaggggggactgcgtgggtaggcgggaggcgtgggggtnnnggtaggaagttggggttgtaggtgggtggngnntgnnnntngccaggagtaggggnttggatggcaggtgggggnnnggaggctggggnnggaggcacaggtggcggggancggttgggcgggtagacatgggggtggtagggcaggtgtgcaggtggncgtaggcgggggnnagggcaccgtaggagggtccctcggtcttcatcatggactgcaggctctggtagccctctccagacatgtaggagctc

SEQ ID NO: 179352 - DNA, 382 bp, Homo Sapiens
  misc_feature (143)..(143): n is a, c, g, or t
  misc_feature (324)..(324): n is a, c, g, or t
  misc_feature (367)..(367): n is a, c, g, or t
ctgaaccccaggtgaaggggcccggaacacctgctctcacctgagccccaggtgaaggggcccggaacacctgctctcacctgagccccaggtgaaggggcccgggaacacctgctctcacctgagcccctggtgaaggggcncggaacacctgctctcacctgagccccaggtgaaggggcccggaacacctgctctcacctgagccccaggtgaaggggcccggaacacctgctctcacctgagccccaggtgaaggggctccgggaacactttgcttcttcacctgaggccccaggtgaaggggcccgggaacacttcctnttcacttgaggccccaggttgaagggggccccgggaacacttnttgttcacttgaggc

SEQ ID NO: 179353 - DNA, 463 bp, Homo Sapiens
  misc_feature (387)..(387): n is a, c, g, or t
  misc_feature (415)..(415): n is a, c, g, or t
  misc_feature (440)..(440): n is a, c, g, or t
  misc_feature (446)..(446): n is a, c, g, or t
ggcccctggcaatttgcctcaagatgggggtttgaaaataactttacctgactcaaggagtgtctggagcacctcctagtctaagtctgcaagctccagttcttgcctaaaaccatgccagtggccacccttgggctcagacagctctgggccttttgaccacaagccagcccctcgccctctctgtggcatagtcttctctgccccaggactgcagggcggcttcctccaaggcttccaaggctcaaaagaaatttggctccatccaagaaggctccagctcccctactggcccctgggttcaggcccacacccctgggccagggccagagagtgtgtctcaggagaattcaatgggctctagagagacacacagaaagtttgggnatttgggaaattttcaagggtgtatgtntggttcacgtatggtgcaggttgtnctggtnctggggtgcagggaagt

SEQ ID NO: 179354 - DNA, 497 bp, Homo Sapiens
  misc_feature (29)..(29): n is a, c, g, or t
  misc_feature (34)..(34): n is a, c, g, or t
gccccagtggataatcccccaatacgggncaagngggacaggtttacccttgctgggtggcattgtaaggggaatacaaaatatttccgggaaacccattttggtcaaatatgtagtaaaagccctcaaaggttttccatattctttagttgaagaatccccaccctccctggagtctacccctaataacttgacattgggaaacagcctgtgcacaaagatattcatcaatttataactgaaaagttagtaacagcattagtgattggcaactggcacaatggtccatctagtcaatgggagagtacacagccactccaaaataaaatatttagtaatcataaggggagatgcccacgatatgctaagtgaaaacagctgcacaaaactgtatcattacagaagacagcaacaaaactatgttaaaacaaaaagcaaagaaaccatagttgggggggaaagcctgagagacaccaaaatgtgatgttttatttccc

SEQ ID NO: 179355 - DNA, 472 bp, Homo Sapiens
  misc_feature (48)..(48): n is a, c, g, or t
  misc_feature (53)..(53): n is a, c, g, or t
cctgcattccctgcatgtggttgaaaaagggcaaaggccgaaggctgnccccnaccccctcaggccggagcactttgcaaaggagtactctcagcacaacggggaggactgtggggacgctgtttcccaaaaccgaagactttctcgtgaaggaggagcagagagaggagctccttcacgagccacaggatgtggacaaagagaaccctggcctttgctcagcaacataaagcaaaagaccctgtggctctgcacgagctggagagaaataaggtgatctccgctgccctcctggaggacactgttggggaggttgtcgacgtgaatgaatgtgacctttccatcgagaagcttaacgaaaccatcagtacgctgcagcaggccatcctgaaaatctctcagcagcaagagcagcttctgatgaagtcccccacagtcccagtgccaggctctaagaataactcgcaggacc

SEQ ID NO: 179356 - DNA, 460 bp, Homo Sapiens
  misc_feature (78)..(78): n is a, c, g, or t
aagggccaaaggcccgaaggctgccccccacccccttcaggcccggaacaacttttgccaaaaggaattactcctcanccacaaacggggaaggaactgtggggacgctgtttcccaaaaccgaagactttctcgtgaaggaggagcagagagaggagctccttcacgagcccacaggatgtggacaaagagagcctggcctttgctcagcaacataaagcaaaagacccctgtggctctgcacgagctggagagaaataaggtgatctccgctgccctcctggaggacactgttggggaggttgtcgacgtgaatgaatgtgacctttccatcgagaagcttaacgaaaccatcagtacgctgcagcaggccatcctgaaaatctctcagcagcaagagcagcgtctgatgaagtcccccacagtcccagtgccaggctctaagaataactcgcaggac

SEQ ID NO: 179357 - DNA, 444 bp, Homo Sapiens
  misc_feature (330)..(330): n is a, c, g, or t
  misc_feature (423)..(423): n is a, c, g, or t
  misc_feature (430)..(430): n is a, c, g, or t
gcctctcagatgagcagtgtctccatggcgagtgggagcgtgaagatgaccagctttgcggagaggaagctccagagactcaacagctgtgagaccaagtccagcaccagcagctcccagaagaccacgccagatgcgtctgagagctgcccagcccctctgacgacgtggaggcagaagagggagcagagtccgagccagcatggcaaggatcccgccagcctcctggcatctgagctggtacagtgcacatgcacttgaaggagaagcgcagggccatcgaggccaggaagaagaagatggagggcgctgttcggcaaggcagccttnaaagcttcggcaaggctgcattcctgcatgttgggtgaaggaaggggcaaggccgaggtttgcccccaccctttagggccggagcattttttncaaaggnttattttttaggca

SEQ ID NO: 179358 - DNA, 628 bp, Homo Sapiens
  misc_feature (19)..(19): n is a, c, g, or t
  misc_feature (80)..(80): n is a, c, g, or t
  misc_feature (83)..(83): n is a, c, g, or t
  misc_feature (95)..(95): n is a, c, g, or t
  misc_feature (97)..(97): n is a, c, g, or t
  misc_feature (126)..(126): n is a, c, g, or t
  misc_feature (174)..(174): n is a, c, g, or t
  misc_feature (189)..(189): n is a, c, g, or t
  misc_feature (210)..(210): n is a, c, g, or t
  misc_feature (215)..(215): n is a, c, g, or t
gctggcacgctggccacanccccgcaggcatccgggccacacactggtaccgtcccacagtgtggttgttaagggcagtnatnacgagggtcccntnggtgatgaggacacccagagcatcatccnagccattcagctcctttccattcaggcgccaggttacattcatccttngaggttccaccacgnagcccaagatcacagtgcctncgggnttctggacggtggacgcaggctggacggtgacctgagggacctcgttcaaagttcagcaaagcagcctgctgtggctaggaggaggcaagccagtgtgacctcaggcctcattcctctccacgacgttcattcgtcccacgcagcatggtgtattcacaaaggtctgaagccaacgtcccataagccgccagggtcacacaaagagatactgccgtccctggcaacactttcttctactttcgagctgctaccctcagacggtataaatgtcgacaagacttcatgggtcatgggttccaggaagcttgttctgaaactctgctgcagccggcgcctgggaagggcgagccgggcccgggggccagcgtggtgggcgcgagggagccacacagcgccgcgccgcacggacaca

SEQ ID NO: 179359 - DNA, 346 bp, Homo Sapiens
  misc_feature (314)..(314): n is a, c, g, or t
ccacgaagcaggccctgaccagctgtggctttgactgcttggaaaccagcatcggtgcccccggcgtctccatccactcagccacctccctggacagccgagtccagcaagccctggatggcctctgagaggagcccacgacactgcagccccacccagatgcccctttctggattattctgggggctgcagttcgactctgtgctggccagcgagcgcccagctcctgacactgctggagaggccccagccgcttgggattgcagccaagctctgcagtcccagcggtgggacctagggaggcatggtcttgncctctggatcctctggaagccagccgaggagg

SEQ ID NO: 179360 - DNA, 475 bp, Homo Sapiens
  misc_feature (30)..(30): n is a, c, g, or t
  misc_feature (73)..(73): n is a, c, g, or t
  misc_feature (137)..(137): n is a, c, g, or t
  misc_feature (463)..(463): n is a, c, g, or t
aacttaaatccccctgtgaaacagtgggancacctggtaaaatggtccctgattggccctgaaggtgtgggangggatcccccaagcgaagtgaacacgaagagctcaagggacagggtagagcccaccttgaccancccaaaggaactaccctatccagtgccccagtttgtacagccctcttgtatagcatccccactcacctcgctcttctcagaagtgacaccaaccccgtgttagagcattagcagatgtccactgcgttgtcccatccagcctccactcgtgtccatggtgtcctcctcctcctcaccgtgcagcagcagcagctggtcgctggggttactgcctttgtttggcaaacttgggtttacctgcctgtagacaagtctctctcataccaacagaacttccggtacttccagaaccaactcacctgacctgcaactcaaaggtttttttnagaaaaaaaccc

SEQ ID NO: 179361 - DNA, 398 bp, Homo Sapiens
  misc_feature (31)..(31): n is a, c, g, or t
  misc_feature (61)..(61): n is a, c, g, or t
tcctgaattggcctgatgtgtggagggatcncaaagcgagtgacacgagtgctcaaggacnggtagagccaccttgaccaccaaaggaactacctatccagtgcccagtttgtacagccctcttgtatagcatccccactcacctcgctcttctcagaagtgaaaccaaccccgtgttagagcattagcagatgtccactgcgttgtcccatccagcctccactcgtgtccatggtgtcctcctcctcctcaccgtgcagcagcagcagctggtcgctggggttactgcctttgtttggcaaacttgggtttacctgcctgtagacaagtctctctcataccaacagaacttccggtacttccagaaccaactcacctgacctgcaactcaaaaggct

SEQ ID NO: 179362 - DNA, 423 bp, Homo Sapiens
  misc_feature (305)..(305): n is a, c, g, or t
aaggcaaacaggggtcaaccctgggcaggaaacctctcccaactctgccccaggtgttcagacctcttggcccaacctgctcaccccaccgggttcactgtccttgtggggctggagagatgggcataagtcaggaacttgggaggaccaccaccctttcagaggcgttgaagccctggggccctgccggaagggagccccctgctcctcccaacaaactccagaacagcagaaagcgggtgctgtagaggagcactcagctcacggggagggagctcttggctgagcttctacagggctgagantgcgctttggggacttcagccttccttccagtctgggctgagtggggggtccagactacctgatgccccttccccaatttggggactttttgataatataaatatatctgtatatttt

SEQ ID NO: 179363 - DNA, 463 bp, Homo Sapiens
  misc_feature (282)..(282): n is a, c, g, or t
  misc_feature (383)..(383): n is a, c, g, or t
  misc_feature (390)..(390): n is a, c, g, or t
  misc_feature (411)..(411): n is a, c, g, or t
  misc_feature (439)..(439): n is a, c, g, or t
cctcacaggccgggttcctcatcggcgcactcgtcattatcgatgcactccagccgctgtgtgtggtagtagtagccgttgctgcaatagcatgagtagcccggggccgtgttcacacacacgccactcttgcacacctgggtctcggaagagctgacattcgtccacgtctctccggagctcaggtctccactgggcgccaggtagccccggccgtgagggcacaatgactggtactcagctgtctcggtgcccgggcactgctggatgcggcagcgctgnccccagccctcacccacagtacagcagcacttctgccatgtcacattccgagccaggatgttgtcacatgcatccggggccgctgtgtcaaagtagcactnccggcgnccacttcccacagggccctgncttaggtgttgcttgggtcggcgggggnaggggttggccgaagttggcttgg

SEQ ID NO: 179364 - DNA, 368 bp, Homo Sapiens
  misc_feature (339)..(339): n is a, c, g, or t
  misc_feature (346)..(346): n is a, c, g, or t
caggctcgcagccccagggacctgctagccccgttctgcccgccagccacctccgccacccctgccccgccgacccagcacacctaggcagggcctgtggggagtcggcgccgggagtgctactttgacacagcggccccggatgcatgtgacaacatcctggctcggaatgtgacatggcaggagtgctgctgtactgtgggtaagggctggggcagcggctgccgcattccagcagtgcccgggcaccgagtacagctgagtaccagtcattgtgccctcacggccggggcttacctgggggcccagtgggagaccttgagcctccggagagacgtnggacgantttcagctttttccgagaccag

SEQ ID NO: 179365 - DNA, 404 bp, Homo Sapiens
  misc_feature (343)..(343): n is a, c, g, or t
ctcaggcactttttatttcatgctgtgcgggggccccttgtcccagatttgtggccacgtgtccaggtgtctgggggagtgggccaagcctgagagaggagggccctgctccagagatccccaggttgtccctgttgacctatagggaggtctgacttcaggcgttgcctcctgacccgtgagcagtcctgagtcgctggctcctattctgtcacacggggtgggtagtgccaaaagcagcctcctgcagcccttggcgttccggaagagtgacagccacattcaagtctccctgggcacgtgaggtccatgggtgcccctgactcatgtcctgggctccagncaattagcccagacccccatgggaaggttccagcatgtgcaaaaatgcacattgggccagg

SEQ ID NO: 179366 - DNA, 488 bp, Homo Sapiens
  misc_feature (87)..(111): n is a, c, g, or t
  misc_feature (375)..(375): n is a, c, g, or t
  misc_feature (478)..(478): n is a, c, g, or t
gaatcactggtgctatagaaattgagatgcccccccaggccagcaaatgttcctttttgttcaaagtctatttttattccttgatannnnnnnnnnnnnnnnnnnnnnnnngtggatggggacttgtgaatttttctaaaggtgctatttaacatgggaggagagcgtgtgcgactccagcccagcccgctgctcactttcccaccctctctcccaacctgcctctggcttctcaggcctctgctctccgacctctctcctctggaaaccctcctccacagctgcagcccatcctcccgggctccctcctagtctgtcctgcgtcctctgtccccgggtttcagagacaacttcccaaagcacaaagcagttttntcccctaggggtgggaggaagcaaaagactctgtacctattttgtatgtgtataataatttgagatgtttttaattattttgattgctggaataaagcatgtnaaaatgaccc

SEQ ID NO: 179367 - DNA, 321 bp, Homo Sapiens
ggaagcagggaacaactgagcccaaaacaaaattaatcccccctaaggacttgactttggacttcccacataaatgtgaccttgtagaactagatacatatttatcaggtaaataaatatgtaattatttagtaattagatcaagatacatgagcagtctttagcattaataattacattatttttaggaactcttatcaaatatggtcctggatctcttaatttcccatatgcagtgattttagttaaaattccaaaggatttctttttcctataatatctccatttctgagtatcatcataccaaaacaattaatattc

SEQ ID NO: 179368 - DNA, 454 bp, Homo Sapiens
  misc_feature (25)..(25): n is a, c, g, or t
  misc_feature (47)..(47): n is a, c, g, or t
ttggaaaaatctggaaaccctgctnaagaaaggaaaggttaaagggntggcaataaaaacgtgaaaaggggaactcccaagcggccaactctggtccctggctactgaaaccttgcaacttcttggtcctaaattccttccctggtcccgtctctggccctggtcccctctggcaacgtccccctgcttggctcggcctcccacctccatccctggcctcgggtggccccctcggctccctggggactctgctcccctcccagtccggaggtcccaggggggctatggcttctctgagacttcccccggagccctgtcactcgtgttcacacgggggaaggggtgcgtgtggcagaagcagctgtataaatacgggtgcgggaaaagtctccgggtcacttggagagtttgctgatgacgcggatcaacgctgcattctcatccttgaggcgct

SEQ ID NO: 179369 - DNA, 464 bp, Homo Sapiens
  misc_feature (388)..(388): n is a, c, g, or t
  misc_feature (417)..(417): n is a, c, g, or t
  misc_feature (449)..(449): n is a, c, g, or t
atggttcctgggaggcttggcacatccctcatggccccattttatccccgaaatcctgggtgtgtcaccagtgtagagggtggggaaggggtgtctcacctgagctgactttgttcttccttcacaaccttctgagccttctttgggattctggaaggaactcggccgtgagaaacatgtgacttcccctttcccttcccactcgctgcttcccacagggtgacaggctgggctggagaaacagaaatcctcaccctgcgtcttcccaagttagcaggtgtctctggtgttcagtgaggaggacatgtgagtcctgggcagaagccatggcccatgtcttgcacatccaggggaggaggacagaaggcccagctcacatgtgagttcntggcagaagcctggcccctgttttgcacntccggggaggaggacagaaggcccagttcacngttagttctgggcag

SEQ ID NO: 179370 - DNA, 404 bp, Homo Sapiens
  misc_feature (16)..(16): n is a, c, g, or t
  misc_feature (42)..(42): n is a, c, g, or t
ccataacactaggaanggaaggcccaacttcccggggtctgnaaggcccaaaggaaagcaaactggagggggctgcaattcaaggttaaggggagatttctctctgaggaaggaaaaggtattaatgtgggggaagagcagtagaatctagtgacctaaccacagtcctagccccaggcctcagctgggttttccctgcagcgttccctggagacttaagagggcaggacttggcccaggaggtctttgacttgctgggatgagactgagcgcttgcagggagaaatttccgtctgctctgatatctgtatgggccagagagatctggtggctctaaagaccagagatgttagagccaacctcaaaagcagcaacgtcttggcaccatatgaagctggagtgag

SEQ ID NO: 179371 - DNA, 445 bp, Homo Sapiens
aacaacgatatggcaggagcagtgcttggggcccgcttctaccggcagatcaaaagacatccggggatcatcccgatgatcggcttaatctgcctgggcatgggcagcgctgcgctttacttgctgcgactcgcccttcgcagccccgacgtctgctgggacagaaagaacaacccggagccctggaaccgcctgagccccaatgaccaatacaagttccttgcagtttccactgactataagaagctgaagaaggaccggccagacttctaagccaggctgggctgccagtgccatgcaagccacagccagccagcccatccacttcttccacttccttccccgcaggccccaaggcattcacttccggccaccctgttcccgctactgctttacacagggccgggtttcccacgcagaggggaggctgctccacccctactgt

SEQ ID NO: 179372 - DNA, 384 bp, Homo Sapiens
  misc_feature (290)..(290): n is a, c, g, or t
  misc_feature (316)..(316): n is a, c, g, or t
  misc_feature (355)..(355): n is a, c, g, or t
gctgctcaggctcttgccctgctgtctccgcttggcctcactgagaatgtcgatgatcaaggtggcaaactctcgggcattaaagcgggccagcttttgtcgcccctgattccgcgtggctgagtattccgggttaacaggcaggaagggcacggcactgcgctctgtcaccagagtgctgtggttttgggtagccagccacactgcatcattttctcttcgatccacctcgtcatacacgtccatgggcgagttcctcaaaaagccggttgctgagcgcctgcagcttncttcttaggcagctttgggccaattncggataagtcaaggctgttcagccatgctgtgggggatngatgtaattgcccttctttgtgattccgg

SEQ ID NO: 179373 - DNA, 687 bp, Homo Sapiens
tttggctcaaaacacaaatttaccatttccagctgttgctggaacaaaaggaaacaatagtcagaggataaatgtaagaagaaacaatgcaaaaacatgtggaaagaagttgctggtaatgcatcacagaagtaggacatggccacagcagcggggccatctccgcttcccttctttgtctctcccttcagacagatcatgaacaagaacttttaactagcattaattggacatttatgtaaagcaatcggggtggggggaattccgtggagacacacaagcaactcttagttatggcacaaacagtaaggagatctgtggcccttaaagaaacagatgcctgttgccttttcacggagggagacaaggaggcagagaagggggttagtgctacaagagaattctggcactcttggttgttgtcgttaatgaagatgaagacatagtaagtaaaaacaagaaaagaagttataaaataagcttgctttatcttttctagaaacggatgacaaaactcaatgcaacaatgccaggcatatcaaaaggggtccacattcaaggctttcacactttctggcaggtgagaaagtttattaagaaccttcacgtgtgggagtctctcaagagcaaaggtctggttttactgattcgcaatgtcctgacagatcttgccttttcatgccttcc

SEQ ID NO: 179374 - DNA, 442 bp, Homo Sapiens
  misc_feature (409)..(409): n is a, c, g, or t
atttcggcatgaggggacggcagcctcactatccgggcacgcgtcacccgcatacagaacacgtccagcagaccttccggacggagatcaaaatctgagtgcctctcccttccctttccctgtccccccgccccacgcctgccagcaaagcctcgctaaccccattacaacagctccaggacatctcagcccaggttctagcccccacggcaccccagaccccaggtggaccatcctcccaaactagggccctccactctatccaggggcaggccaggggactccctggcttgaacaacatggatggcccagattttcagaatttgggcctccgttcactttaattccaggagttacagggggcttggggttcaggggaagggaagatttttaaaggaacccatttttngggttcaggggggatttggggaccagcagggac

SEQ ID NO: 179375 - DNA, 411 bp, Homo Sapiens
  misc_feature (50)..(50): n is a, c, g, or t
aaaacttaaaccctaaatagccaatcgcctgcaaacaaatggcaaatggnaccctttaagtgtggggtaatgcccgttgtggcccctggcctggctgggatccccagtgtgagtgcctcagaggaaggactatcgcccttccccagcaggacgagtgcagcccccgagagggtcagcccctctgcagccagcggggcgagtgccctctgtgggcaatgtgtctgccacagcagtgactttggcaagatcacgggcaagtactgcgagtgtgacgacttctcctgtgtccgctacaagggggagatgtgctccagccatggccagtgcagctgtggggactgcctgtgtgactccgactggaccggctactactgcaactgtaccacgcgtactgacacctgcatgtccaga

SEQ ID NO: 179376 - DNA, 438 bp, Homo Sapiens
  misc_feature (320)..(320): n is a, c, g, or t
  misc_feature (339)..(339): n is a, c, g, or t
  misc_feature (379)..(379): n is a, c, g, or t
  misc_feature (403)..(403): n is a, c, g, or t
  misc_feature (407)..(407): n is a, c, g, or t
cagaaggcttgatcctgcctgtcctcaagttatcagcatgacacagcggtgctggtggatggtgatggtggaggtttcaaagttgaacctgatgaaaacgctccacttcttcggagccatctgctgctgtggtgacggagttttgctgtggcgcacaggtttccacttgtcataggaaactgtgcttggtgcatcccctgtgcagccggctgtgaactgtggggctccaaccctgcttggtttgcttcaactttctgagtgacgtgcagaccttcacagaggagccgtggggcggctccattccaacgcctccctcgctngcccctggggtgggagctnggggcagggtcccacatttctcagaagggacttcagggantgcagctgcgtcttgggggccttnagcnggaagggaaagatattcaaggcttggggccg

SEQ ID NO: 179377 - DNA, 609 bp, Homo Sapiens
  misc_feature (222)..(222): n is a, c, g, or t
  misc_feature (247)..(247): n is a, c, g, or t
tgatggtgatggtggaggtttcaaagttgaacctgatgaaaacgctccacttcttcggagccatctgctgctgtggtgacggagttttgctgtggcgcacaggtttccacttgtcataggaaactgtgcttggtgcatcccctgtgcagccggctgtgaactgtgggctccaaccctgcttggtttgcttcaaactttctgagtgacgtgcagaccttcacnagagaagccgtgggacggctcaatnccaacgcctccctcgctgcccctggggtggagctggggcaggtcccacatttctcagaaggactccagggatgcagctgcgtctggggcctgagcggagggaagatatcaggctggggccggctgctgggcctgtcctctctgagttgcctcaaatcccctgttccttgagcggtcctggagcctgcctcaggcctcagggcaccacactacttgcctccagggaccagcctgttcaccccacacccagccctgtgacagaggtgtgtcgcgtggccccacttacagatgggtcaactgagcccggggcatctgtccacttgtcatgacagtgagcggccaagctggatgcctgtgccgaaa

SEQ ID NO: 179378 - DNA, 342 bp, Homo Sapiens
  misc_feature (286)..(286): n is a, c, g, or t
atcatggaatcccaaatccccagggaatcccaaatttgaaaatccaatcccaagtccccaggaaacccaatcatgaggtccttgtgcctggtatggaggagactgcagtcaggatatgcattccaggctcccagacacctcaagccctattcacaggcaccagggaaaccccacacaggaattcccatccctgggaaactggagaatttcaatgccccgagtccatgggtttcaagacaccaaattccaagagccccagcccttaaggggaaccccaaatcctaanagcctccattcttttaataaatgggaagggccccaaggcccttgagggggttttca

SEQ ID NO: 179379 - DNA, 403 bp, Homo Sapiens
ccccgggaaaacccccacacgggaattccccatcccctggaaactggagaatttcaatgccccgaagtcccatgggtttcaagacacccaaattccaagagccccagccctaagggaaccccaaatcctaaagcctccatctctaataaatggaaagccccaaggccctgaggggatctcaaatcctggaaccccgatttcaatctacgttctagtcactggcctcaaaggaccccacagcacctgggccagaccaaaagctcgagggagaacctgaaggcccagggggtccagggcggacctggggccccgaccaccaaggacagctcacgactgccccttcactgcatgtccccaaactcagcatgactcctgtcctcttcaataaagacctttctatggc

SEQ ID NO: 179380 - DNA, 195 bp, Homo Sapiens
  misc_feature (123)..(131): n is a, c, g, or t
aaattaatgccaaaaagaaaatgcataatttgtaaacttaattatatgtcttatatcttattagcttagtagttggaaccacttagtctttaggtgcaagactgttgttagatagtactgagnnnnnnnnngtatgtgttatgagactgtacatgtttttttaaaaatagcaatatgcaataaagagatgaattc

SEQ ID NO: 179381 - DNA, 372 bp, Homo Sapiens
  misc_feature (33)..(33): n is a, c, g, or t
  misc_feature (47)..(47): n is a, c, g, or t
aagcccccgaaaaatgttggaaaaatctatganccctgtgtcggaanaagcccagatggtccatccatagtcacggtggtgtcggtgttgcctgtcccctgttcgtgacatctgtccctgctctgcttcatcttcggcccagcacttgcgcccagcagcggatgggcacctacggggtgcgagcggcttggaggaggctgccccccagttccggccatagcaaccatgaagggcatggcccacaccacggtggtcactggaactcagtgtgactcctcagggttgaggtccagccctggctgaaggactgtgacaggcagcagagacttgggacattgccttttctagcccgaatacaaacacctggactta

SEQ ID NO: 179382 - DNA, 534 bp, Homo Sapiens
  misc_feature (42)..(42): n is a, c, g, or t
  misc_feature (73)..(73): n is a, c, g, or t
  misc_feature (79)..(79): n is a, c, g, or t
  misc_feature (99)..(99): n is a, c, g, or t
  misc_feature (121)..(121): n is a, c, g, or t
  misc_feature (388)..(389): n is a, c, g, or t
  misc_feature (393)..(394): n is a, c, g, or t
  misc_feature (457)..(457): n is a, c, g, or t
  misc_feature (503)..(503): n is a, c, g, or t
aggattgacaaagcccttctgggttgatgaaaattccctggnaaaacaagttttgcccccaagcaacgggccnaagccnaagctcgcatcccaagccanagccgggctgccataacgccanccacacctaccaagcgcagcaggtgttgggggaggcccagctcctgggcgcaaggcccctcagcccctagtgaaaatagtgacatacaaaaatatacacattttaacaccatataaattactgacacgagacacacagtgagacggtgcagggagtacggtaggaactggagaggtaataacttaggggcagggtggcggcggtgcaggctaaccctccctgaagccagcagccttagcagtgggggacatctgcccagggggtggnngcgnnacagcccgctgtacctgaggactcggggaaataaattagcatctcagaggctagaaaccgtcnaatactgctgtgtccttcccaagggagctggggagggaccctgggncctggttggccacacagcctctttaaagtgc

SEQ ID NO: 179383 - DNA, 560 bp, Homo Sapiens
  misc_feature (44)..(44): n is a, c, g, or t
aaaggggacatttattttttactatgagattttgcatctaatanaattgcttgtattttcttacaatgttgttcatatggaaccagaacttgttatgtataaatataatgggatgagaatttacatgtttattagaagttttctgatatttataggccaatatatttaaaatatatatattcagaaattggaaacatttaaactgtcaaagagtagataataggttaactaaatgatggtattactctgagagactatagtacatacaataaagacatgctttgaaagtatatatattaatatggaaaaatgaatgttataaaacaacatatgtggaaaaaatgtgaacttatgtaaatatatacttgaagtgctgcaaagtatagaatctctgagtgataggacttgtctttattctttatctgtatttttataaaatctatattttgaatatttatatgtaaagactcgttttagctctataaaattgatctgtagaggtatttttcatctataaaagtaataaagtccagtaaaaaataatatatataaacaatgct

SEQ ID NO: 179384 - DNA, 335 bp, Homo Sapiens
  misc_feature (33)..(33): n is a, c, g, or t
  misc_feature (60)..(60): n is a, c, g, or t
  misc_feature (62)..(62): n is a, c, g, or t
  misc_feature (67)..(67): n is a, c, g, or t
  misc_feature (90)..(90): n is a, c, g, or t
  misc_feature (93)..(93): n is a, c, g, or t
gttcaacgatctgtaccgctacaagccgctaanaatcagcgccgtggtgcgaaacggtgngncgcancgttgggtgccaaggagcgcgantgnagctggccaactcggagagtttcgccgcctggtgccgctacggaagcgcgagttcaagatcggcggcgagctgcgcatcggcaagcagccctaccggctgaagcattcagctgtcggcgcaggcagccacacgctcgagttccagagtctagaggacctgatcatggagaagcgacgcaacgaccagatcgggcgcgcggccgtgctgcaggagctcgccacgcacctgcacccggcggagc

SEQ ID NO: 179385 - DNA, 569 bp, Homo Sapiens
  misc_feature (423)..(423): n is a, c, g, or t
  misc_feature (461)..(461): n is a, c, g, or t
  misc_feature (484)..(484): n is a, c, g, or t
  misc_feature (493)..(493): n is a, c, g, or t
  misc_feature (511)..(511): n is a, c, g, or t
  misc_feature (559)..(559): n is a, c, g, or t
agaagacaggactcaggacaatctccagcatggccagcttccctctcctcctcaccctcctcactcactgtgcagggtcctgggcccagtctgcgctgactcagccaccctcagcgtctgggacccccgggcagagggtcatcatctcttgttctggaagcacctccaacatcggaagtaatactgtaaactggtaccagcaactcccaggcaacggcccccaaactcctcatctatagtaataatcagcggccctcaggggtccctgaccgattctctggctccaagtctggcacctcagcctccctggccatcagtgggctccagtccgaagatgaggctgattattgactgtggcagcatgggatgacagcctgagtggcggggtgttcggcggagggaccaaggtgaccgtcctaggtnagcccaaggttgcccccttcggtcaatttgtttcccancttcttttgaggaagtttcaagncaacaaggncaaaattggtgttttttnttaagtggatttttaacccgggaagccttgaaaattggcttgggagangattagcttt

SEQ ID NO: 179386 - DNA, 400 bp, Homo Sapiens
cccgaaacaccgaaacctctcagcctgtcatccccatgttgcaacaataataatcaccctcatcctcggaccggaagccccactgatggcccaggaaggctgaggtgccggacttggagccagagaatcggtcagggatacctgagggccgctgatcattcctatcgatgaggaatttgggggccgttcctgggagttgctggtaccaatatacatagtaacttccgatgttggagctgcttccagaacaagagatggtgaccctctgccagggggtcccggacgctgagggtggttgcgtcagtacagactgggcccaggaccctgcacagtgagtgaggagggtgaggaggagagggaagccggccatgctggagattgtcctgaatcctgtcttctc

SEQ ID NO: 179387 - DNA, 432 bp, Homo Sapiens
  misc_feature (334)..(334): n is a, c, g, or t
  misc_feature (369)..(369): n is a, c, g, or t
  misc_feature (398)..(398): n is a, c, g, or t
  misc_feature (416)..(416): n is a, c, g, or t
gagaagacaggactcaggacaatctccagcatggccagcttccctctcctcctcaccctcctcactcactgtgcagggtcctgggcccagtctgtactgactcagccaccctcagcgtctgggacccccgggcagagggtcaccatctcttgttctggaagcagctccaacatcggaagtaataatgtaaactggtaccaacatcgcccaggatcggcccccaaactcctcatctatagtagtaatcagcggccctcaggggtccctgcccgattctctggctccaagtctgggcacctcagcctccctgggcatcagttggactccagttttnagggatgagggtgattatttacttttttccgcatngggatattgagttttaaattgcctggggnttttcgggccggaggganccaagtttgaaacctt

SEQ ID NO: 179388 - DNA, 425 bp, Homo Sapiens
  misc_feature (55)..(55): n is a, c, g, or t
  misc_feature (105)..(105): n is a, c, g, or t
  misc_feature (143)..(143): n is a, c, g, or t
  misc_feature (167)..(167): n is a, c, g, or t
  misc_feature (317)..(317): n is a, c, g, or t
gcaggactcagggctatctccagcatggccagcttccctctcctcctcaccctcncttcacttcactgtggcagggtcctggggcccagtctgtgctgactcagnccaccctcaggcgtctgggtacccccggacagtagggntcaccatctcttgttctggtaagncagctccaacatcggaagtaagtaacgtgaactgggtaccagcaggtcccaggaacgggcccccaaactcctcatctatagtcataatcaccggccctcaggggtccctgaccgattctctggctccaagtctgggcacctcagcctccngggccatcagtggggctccagtctgaggatgaggctgattattactgtggaacatggggattggcagcctgaatgaggggagtgtttcggcggaagggaccaagttga

SEQ ID NO: 179389 - DNA, 442 bp, Homo Sapiens
  misc_feature (17)..(17): n is a, c, g, or t
  misc_feature (32)..(32): n is a, c, g, or t
  misc_feature (61)..(61): n is a, c, g, or t
  misc_feature (206)..(206): n is a, c, g, or t
gaaaatatgaatttganaaacgaacccatggncaacaaaaaaaatggccaaaaaacccccntgaactgaaaaggggccccttgttgaacactcaacatgccaaccccgccccagaagtgaaggcaagctgccccagctgaagcagggaccccgcaggaggaaccagagcaggagaatcccctggcaccacccttgctcccagtacnacacccatgggtgctcaatgaagaagtgaggacaacttgctgccatcttcagtttgatggaaatgccttaggcctctgctgccgattgtgaaatcatcggcctcttacctaaaagctcaggaggatttagggggaatgcagatagagcacatgagttcactgtgtaatgaaggaaggggagcctcccagcattagatcttagggaattgttcaaatttaaggaagccctcgtgccg

SEQ ID NO: 179390 - DNA, 415 bp, Homo Sapiens
  misc_feature (12)..(12): n is a, c, g, or t
  misc_feature (46)..(46): n is a, c, g, or t
  misc_feature (399)..(399): n is a, c, g, or t
cccagccaaaangcctcccggtccagctcagggatgctccctgccnagcacaggggcccagggactccctggagcaggcacatagtgagcccgggcagccctgcccagctcaggcccctttccttccccattgaggttggggtaggtgggggcggtgagggctccacgttgtcagcgctcaggaatgtgctccggcagagtgctgaagccataatccccaaccatttccccttgtgacgcccaggtactcagctggcccactccacagccaggcctgccctgcccttcaccgtggatgttttcagaagtggccatcgagaggtctggatggttttatagcaactttgctgtgattccgtttgtatctgtaaatatttgttctatagataagatacaaancccatattatccacat

SEQ ID NO: 179391 - DNA, 619 bp, Homo Sapiens
  misc_feature (15)..(15): n is a, c, g, or t
  misc_feature (27)..(27): n is a, c, g, or t
  misc_feature (50)..(50): n is a, c, g, or t
  misc_feature (78)..(78): n is a, c, g, or t
  misc_feature (107)..(107): n is a, c, g, or t
  misc_feature (118)..(118): n is a, c, g, or t
  misc_feature (588)..(588): n is a, c, g, or t
  misc_feature (606)..(606): n is a, c, g, or t
gaaatggcccaactnaatacctggccntcaaccaaaggaaaaggttgggnaataaggcttcaacaactctgccggaanaacattcctgaacgctgaacaacgtgganccctcaccgcnccaacctacccaaacctcaaatggggaaggaaaggggcctgaagctgggcagggctgcccgggctcactatgtgcctgctcccaggagtccctggcccctgtgctggcaggagcatccctgagctggaccgggaagcctctctggcctggggctgctccctgcccggcaggctgctgtttggcagctggaggtggcaagagctgctggtgctgccagggcgtgttggccaggaatgagctcccagggcagccctgaggaaagggtcttaggaagcgcctcccagctcactactaggagctggggactgtcagtgctgagtggggctggggtacaggagcacctgcctctcctttctttggcttagaagtggggaaggaagagccaggaaaagggaccaaagccgccccagccattgcccctaggccgcctggggactgtgtgtgtgctgagggggcagtgggaggtgggnagctctggagttccctgnaccctgggatcct

SEQ ID NO: 179392 - DNA, 438 bp, Homo Sapiens
  misc_feature (176)..(176): n is a, c, g, or t
  misc_feature (178)..(178): n is a, c, g, or t
  misc_feature (328)..(358): n is a, c, g, or t
  misc_feature (414)..(414): n is a, c, g, or t
  misc_feature (421)..(421): n is a, c, g, or t
gtcatccccaagccaggccagttctccaggtggaactgtagtgtagcgacctcactgctgcgcgcacagtctcccgggacttggactcgagggagtgacgaggaggagctccgagctgcgcctgagccgtgccagccggcggaacctcaggcggtggacgtcggcgatactgttgngnacggtgaccggctcactctgcggcgccgtgctcccgctgctcacccaaagaagttgtttccattttaaaccggtcttttggggctgcagtaaaaaataagaaatggagttttcttgctttttactctaaaattcaatgtaattaaatttnnnnnnnnnnnnnnnnnnnnnnnnnnnnnnngtgttaaaataaaatgtttcttgggacaaggaattcccctgaatttcagctgttantagtggnttcattgtttttggcac

SEQ ID NO: 179393 - DNA, 405 bp, Homo Sapiens
  misc_feature (22)..(22): n is a, c, g, or t
  misc_feature (34)..(34): n is a, c, g, or t
  misc_feature (49)..(49): n is a, c, g, or t
  misc_feature (303)..(311): n is a, c, g, or t
  misc_feature (381)..(381): n is a, c, g, or t
aaaaggcaactggttccttagncaatttctgganaattcaaacaaacgnggggggcggcccactggttcagaggcaggacagccagccaagatggggagagaaacggggagagaaagaaacaattctaactgactcctatatgcagccagttggaatcatgcctaaagctttgggtctgaaggggcccccaacacaccacctgccttgggaaacagcgaggatggtgcagagctttattgagactccagtggcccatccagttcatctccaggcacccccaaaaacagcaaattacacaagannnnnnnnnaaaaaaatgaacaccattttccacacatacacacacacataaagtttgtttcctgtggcatttaaattantctggttggtccatagaaaataag

SEQ ID NO: 179394 - DNA, 279 bp, Homo Sapiens
  misc_feature (104)..(104): n is a, c, g, or t
  misc_feature (132)..(132): n is a, c, g, or t
  misc_feature (154)..(154): n is a, c, g, or t
gattttagaaatcgtttaataatgtaatgctagttttcataattaaatatcaataaattcaagtggtatgaaagttacactcgcgagtttcaacagaaaaagancgttaatattttggaggccaggccaggnacaggtaatggtttgtaaagtnttacaaaccctttcattaagcaactctgcctagaagctgcctctcactgtagccaagagtctgacctgcacctgataactcagtaagctagtgggacgttagagagtgccaaacaattctttaat

SEQ ID NO: 179395 - DNA, 481 bp, Homo Sapiens
  misc_feature (15)..(15): n is a, c, g, or t
  misc_feature (23)..(23): n is a, c, g, or t
  misc_feature (53)..(53): n is a, c, g, or t
  misc_feature (415)..(415): n is a, c, g, or t
ttacaaaggaacacngggagaangaaagggcatccagaggatgagatttcccnggctccacattcctgtaccttagttaaacagcacttttttcattttcttctcacaatatacagaactatgagaaaatgtgataattgatgtagcattataaacatgcccattaaaactgtgaggtccagtaactattaaaactaccacttaaaagcacaaattacacatacagatcaatctctttatatggtaaactgaaaacctgtgaggacttgcaaaactatttcaatgaccatgctatcaacatttgtataaatataaatttaagcatttaaattaatactactgtattctttactcaaagcaatgatgtcatacagtaacataaggaaagaaagtaggtttgtttgcagcttttgtnttgttgctgctcttgttattattgtggctgctgttgcttttgattcaacttttaaccatgtatctt

SEQ ID NO: 179396 - DNA, 491 bp, Homo Sapiens
  misc_feature (465)..(465): n is a, c, g, or t
gactgctggtgctgctgaagctggacgaggacctccacgtgaagtacccgcggctcctcaccttcgcctcccagctcaaggctggcaagggcctgaccattgttggttctgtcatccaggggagcttcttggagagctatggcgaggctcaggccgccgagcagaccatcaagaacatgatggaaattgagaaggtgaagggcttctgccagggtggtggtggccagcaaggtgcgggaggggctggcccacctcatccagtcctgtggcctgggaggcatgcggcataactccgtgggtgctgggctggccctacggctggcgacagagcgaggacccccgtgcctgggaagaccttcattgacaccgtgcgctgcactaacggcttgcccacctgggccctgcttcgtgcccaagaacatcgcctttttaccccagcaaccacgagcgttaaccggggagggncaaatagacttttggttggattcctt

SEQ ID NO: 179397 - DNA, 415 bp, Homo Sapiens
aaccttaaccccctgaggccaggtaatcccccctactgcctgtgtcgttccccctaatggcctagggttggacccacacagtcctaacctaattcccgactggcctattttaaaaagagccaggagtaacgaacccagagtggcggggtgaaccagtttggtgggaaggacggttaggaagaggtaactaaaggtgactccggtcaaagcaggtgaccgagatgagtcaggatggagcaggtgacccaggggaacagatgtgaactagtgattaggactggcgggaaagttgtttactgaaactagaggcaagggggtgaagagaaccaggaagttaaactttaaaatggagaatcaaagaacaggaagctgaacagactgacatactgattctttgaagagaaacttggggttc

SEQ ID NO: 179398 - DNA, 570 bp, Homo Sapiens
  misc_feature (40)..(40): n is a, c, g, or t
ctggtgcctggactgttagaaatgcaaaatgcttgttccncagtgccacagagaaatagcactcgagcatccatttaatgttctcagcaaggcagttttgactttttgcataaagggtgaccctcgcaggtggagccatggcaagagcatacctggacacgggagggacaggaggtcttatccctgaggcaggtagtccctactgctgtgtcgttcccttattggctagggttggaccacacagtctaagctaattccgactggctattttaaaaagagcaggagtacgagccagagtggcggggtgagcagtttggtgggaaggacggttaggaagaggtaactaaaggtgactccggtcaaagcaggtgaccgagatgagtcaggatggagcaggtgaccaggggaacagatgtgaactagtgattaggactggcgggaaagttgtttactgaaactagaggcaagggggtgaagagaaccaggaagttaaactttaaaatggagaatcaaagaacaggaagctgaacagactgacatactgattctttgaagagaaacttggggttc

SEQ ID NO: 179399 - DNA, 407 bp, Homo Sapiens
  misc_feature (177)..(177): n is a, c, g, or t
  misc_feature (243)..(243): n is a, c, g, or t
  misc_feature (249)..(249): n is a, c, g, or t
  misc_feature (265)..(265): n is a, c, g, or t
  misc_feature (290)..(290): n is a, c, g, or t
  misc_feature (311)..(311): n is a, c, g, or t
  misc_feature (363)..(363): n is a, c, g, or t
  misc_feature (373)..(373): n is a, c, g, or t
gagggtgcttttggtgcggcctgttggtcgggctgaccattggttgcacttgtttctacttcgttagacatggcaagaaggcaggcagcaaacctcagtaccagtggacacttggtgacaccagggcgatcccgatggagaagtctcaaataaacataacctcccacagacaccggnctagctattgcctccgtgaagcgaggcatgacttccccgcgcccggagcctccagggtaacagcgnagggantgcggcggggcctcgntttaaatagccgccggccggggagntttcggagccgcgcggcccanttcccgggcgagagatatgggtttctaatcagatgctgggcagctgaggganttccccgggnatttgccagggtgttttttgctgcctgggggttt

SEQ ID NO: 179400 - DNA, 161 bp, Homo Sapiens
acaaaacctgaaatatttttacttttttaaaactttgatctaagttgccttagacctcatggactcgatacaagagtaatatgaattgggaaataaaacactttaatagccacaataaactttgttagaaatgtacatgttgccaaaataataataataaa

SEQ ID NO: 179401 - DNA, 452 bp, Homo Sapiens
  misc_feature (11)..(11): n is a, c, g, or t
  misc_feature (64)..(64): n is a, c, g, or t
aaaaaggggancagtagcttcctcatcggccctcccacatttcattactcaataattgtggccntccctaatgtctcatgcccccctaagcacttattacaatgtctcaacagccttctctcagcctctcaaaatattagtcatcattaaaataaatgtctgatgttaaagcatcagggtcaattgtactgtgacacctaaaatttcatgctgcatcccacccaggtcctcagcctaatggctttcatgcccccaacagactgctaaactctttgaattagtcaagcatatccctcaagggacaaggggttaccccaccctctgatttctaccaagcctgcctccccgaccctgtgctccagagtgaacccccgggtagacctgcacagatgcagtgtcatcccctgttgggctgagtatgcgagatgaataaattacggtgaatttcgtct

SEQ ID NO: 179402 - DNA, 407 bp, Homo Sapiens
  misc_feature (13)..(13): n is a, c, g, or t
  misc_feature (122)..(122): n is a, c, g, or t
  misc_feature (150)..(150): n is a, c, g, or t
  misc_feature (172)..(172): n is a, c, g, or t
  misc_feature (347)..(347): n is a, c, g, or t
  misc_feature (361)..(361): n is a, c, g, or t
  misc_feature (392)..(392): n is a, c, g, or t
gcacttgtgtggngcattaacaaattcaacatacaagatagcattacatattgtagattagcattacagcattatgcaatttcacacaattcatgttagcttttccagtttcctttttggtncaaaatttgacacatttatgtcatttcngagtttcatttttacaagagangacacaaggtaaagaaagacaaccactttggagagggatcatgggtgagggcaatgtcactgtcatgggccataggtacaagcccttccaaggacaaggggacctgcgttattccctctcctgaggcaaggctgcccctgtcccacaaaccagttctatctgttttccacatctnggggcactgtcccntaaacatggtccatcttgggctgtgcttccngtgaggttggacctg

SEQ ID NO: 179403 - DNA, 411 bp, Homo Sapiens
  misc_feature (28)..(28): n is a, c, g, or t
  misc_feature (162)..(162): n is a, c, g, or t
  misc_feature (333)..(333): n is a, c, g, or t
  misc_feature (341)..(341): n is a, c, g, or t
caaaataaacataacctccccacaaaanaccggctaactattgccctcccgtgaaacgagcatgacttccccgcgcccggaacctcccaggctacagcgcagcggatgcggcgggcctcgcttaaattaccgccggccgggagcttcgcaagccgcgcggcnactcccggcgagagatatggttctaatcagatgctggcagctgaggactccccaggaatgtgcccaggatgtttttgctgcctgggcttggtaactccccctcaacgtgtctgcagagtcttccaaacttaactgtttattaactcggctgcagcggcgcagaggaccccngctccccntgagtccgcgagccccaccagctgggggcgatcgcagggacccagcgacgggaggggaaatgtgttcggg

SEQ ID NO: 179404 - DNA, 480 bp, Homo Sapiens
tttccaatgaactaaacaacaaaaacttgccctgaaaaactggaacggaaaacttaaaaacccaacccctgggtcccctaaaaccgaaggcctaaggaactgggcaacgtaagagggaaaacaaccacatccccttccctgaaaccccctttcctaaggttaagcactggggtgccccacagctatggaggcagaacgggctgaactctgtatcatccctcctttgcccctggacattcttgggcagtgtcaatggcactgaaaggccaccagctggggtttggcaagactaagggcctggaaagaaggaagggaaggggtgaggcgcttctccctccagtcctggtgctggcatcagtctgggagctgatgggatgaagaggtgacctctgaattcagcctcttgaatcagaaggcggttctcaaattgggctgagcgcattgctaaagagccagccctgagcacaggtcagagggaag

SEQ ID NO: 179405 - DNA, 393 bp, Homo Sapiens
  misc_feature (373)..(373): n is a, c, g, or t
gagaagttagcatgaactttccctcaaactatccccattgcagaaagataatcagcacataattagagaggagtgaatttccttaccaatgtttgtagtggatgtgaaagttaaccaagaccaggagctacaacatgtctaggaggaattcatggtaaagtaaaaagaggcaacctggttagctcccacatttggactcaaggatctcagaagagtgaagcacctgaaggtttctgggagtttctgtgggagctgcagaatctttgcttctgtttctgattgaaaatgtatcagaatcctcagaaaaggaggtgttattctctgatgtgctcagcctgggttgacagctgaggggtccactgggagggagctngggccatgaaaacctcctgg

SEQ ID NO: 179406 - DNA, 502 bp, Homo Sapiens
  misc_feature (14)..(14): n is a, c, g, or t
  misc_feature (22)..(22): n is a, c, g, or t
  misc_feature (43)..(43): n is a, c, g, or t
  misc_feature (84)..(84): n is a, c, g, or t
  misc_feature (106)..(106): n is a, c, g, or t
ggtcaactttcccnaaaggaanctgtggctttcatggcagccnacaacaagaaaggggtccctggaatcctgttcccagtcaangaagcgctggctcccagcactnagagtggatccacatggggccctcactagggcaagagggcagccctccttccacaggagccaagagcatagtgcaggggcaaggcagggcagaagggcaggagcccacccccaggcctcccaggattcccctggaaggggcccagcctggaggccttcacagcccttcccaatgtgaactgggtgaccccaggtggaggcaggagttgacagcatggatagagacaggtaaggccactgacctacatctgggggtctgctaaccatgggctgctcaagggctgaagccagcagtggtggccgggccagcaaggtgtgtgtggtgggtagcactgctgtggctttaatggaggcttgtctgtgacagaatactcagcaagggacacgggggactttg

SEQ ID NO: 179407 - DNA, 383 bp, Homo Sapiens
  misc_feature (13)..(13): n is a, c, g, or t
  misc_feature (87)..(87): n is a, c, g, or t
atggaaagggccngcctacaaaaggggtgtgatgccaggcccttgtgaatccacctttatattttggaagacacattagagggagcnggctatttccaaagaaatttccacaagtgccctcatttccttaatgtcacaagcatttcctgatttataatcataacccctttcctaatgtattagccttatgaagttcccattttttgccctaagaggtttaatcaaagcaagataaaactatgcttaataatattcagttacctgaaagagctattgcagaaatgcctaatatattaccagaaagtagcttaatgtctcaaataaatgtcaagttgtccaagatcaaactgataggcagcttaatgagggataaatgtcactct

SEQ ID NO: 179408 - DNA, 359 bp, Homo Sapiens
  misc_feature (174)..(174): n is a, c, g, or t
  misc_feature (315)..(315): n is a, c, g, or t
  misc_feature (326)..(326): n is a, c, g, or t
  misc_feature (347)..(347): n is a, c, g, or t
gtgctctggctggctgtctctccctttctccccctctctctctcccttaggtctgtctccaccgcaggcccaaggtgaaagtcctccccttgccggagcagtctggcagggcctttcgtggctggaagtggccagtttggttccggtgctgacccctaggccccagcgcaggcncttcccgtgctgtctgtcttcccctctctgtttatgtctgcgctgtgtctcacacttcagagcctccttgctttctgttaggttcccatctctccttctgcctcactctggggcctcttctttctacttgtacaattccanctctctagggnctctggtcttaatgttccctntctgtctggttt

SEQ ID NO: 179409 - DNA, 477 bp, Homo Sapiens
  misc_feature (29)..(29): n is a, c, g, or t
  misc_feature (418)..(418): n is a, c, g, or t
  misc_feature (437)..(437): n is a, c, g, or t
acactgccctggaccccatattgccaganagtggggaaacgggtgtgagtcccgtaagaccccgtagcatcaatcctcacatatacccacggaaaaacacatgaaaacccaagttacgttgtttttggaacatcagaaaaacaagtagtgacatccgtgaagtgcccctagccctgttgtgaacacacggtgtggggatgaacacgccgccctagcccgtgacacacggcgtggggatgaacacgccacataatgcactggtgaccctgttttgtaagcagtactcccaacttcactgccttttccgtgaggatattccatcattcccacttctgcccacaagaacaaaataattcaaactttatgcactgaagtaactctggaaggtagaagtgccgggagagtcccttggagatanaaaaacctcaacaataaanaaaagcaatttaaaaatccaactgcagccgggggcggtgg

SEQ ID NO: 179410 - DNA, 417 bp, Homo Sapiens
  misc_feature (321)..(321): n is a, c, g, or t
ttcagaaacttcattgaaaaaacctagccctgtacagctgcccttttaaagaggtggccattgcagggtctctgcctccccagcaggtggcagatgctcccggccactcgtttaaataactgtcccctggaggggcacggggtttgaaggcagggcccctgcaccctcctgggggacacccgtgcatgtttacgccttttctggttgtgtcagtggccggagcatggcagctgggcatcaataaacacctccgaggaagctggattcgtgtgtgctggcacgggggagggcgtttgctgggtcacatcgagtagggaccanttcgccctatagggtgccaagccttagggaggccttagaagggtaggcagagacctttttcaaggccacgtgggttttttaacaggcagtttttga

SEQ ID NO: 179411 - DNA, 455 bp, Homo Sapiens
  misc_feature (325)..(325): n is a, c, g, or t
  misc_feature (331)..(331): n is a, c, g, or t
  misc_feature (409)..(409): n is a, c, g, or t
  misc_feature (422)..(422): n is a, c, g, or t
tccagagccactccaataatacagaaacttcattgaaaaaacctagccctgtacagctgcccttttaaagaggtggccattgcagggtctctgcctccccagcaggtggcagatgctcccggccactcgtttaaataactgtcccctggaggggcccggggtttgaaggcagggcccctgccaccctcctgggggacacccgtgcatgtttacgccttttctggttgtgtcagtggccggagcatggcagctgggcatcaataaacacctccgaggaagctggactcgtgtgtgctggcacgggggagggcgccgggcggggccntgggtngggcatggccttgatgttcaaggtcactccgggatgttcgatcaccagggtcatcgttttccatccaagggattcgtnccccgttaactgnatcgttgaaacattttgcccaggggaccctgtt

SEQ ID NO: 179412 - DNA, 284 bp, Homo Sapiens
  misc_feature (271)..(271): n is a, c, g, or t
ggaatagattttcaactttattttcagtcatttctatttccttggttatgaacaaaggtagcaaagtgcagttgtatcagcagtgccaatagaaattacagagtttttcatatccctttacagtttgccacaggtatcttaaaatattgtttacactcatctctcttcagtttaccattgtttaataggcctaccctcgatctttttattcaatatgttaataaagaaacctatacacatagtatcacgttatacattttaaaaatatttngacaactgtatat

SEQ ID NO: 179413 - DNA, 381 bp, Homo Sapiens
  misc_feature (155)..(155): n is a, c, g, or t
  misc_feature (203)..(203): n is a, c, g, or t
  misc_feature (264)..(264): n is a, c, g, or t
  misc_feature (286)..(286): n is a, c, g, or t
  misc_feature (303)..(303): n is a, c, g, or t
  misc_feature (353)..(353): n is a, c, g, or t
gtacaataaagtttaatcacaattataaaaatgtggcgtcgggtttgcgctattaacatatgtacagtccagcccagcaaaagggacccaccccgccatcctggcctggctgagccggggagtgacaccagggtggaagggtgaccctcagggtntgggcaggaacagatgaggcagggttccaggcacggagtccccaggantgggggttgcagagcccccccaggggaagaaacatggccactgccccagagacccctaaantggggaggggtacacgcagggnttaaggggaagtccccntttaacacaaagcgagaggattttttagccccccgggatagattttttanagggccggcaccccaggttttccacagg

SEQ ID NO: 179414 - DNA, 392 bp, Homo Sapiens
  misc_feature (51)..(51): n is a, c, g, or t
gtcagaagacaaccctgaatgccaccccatagagaaaactgttacctttcngaccgtaatgtaaattccaggaagacagacgctgcaatccacagattttaaaaaaattgtttgcaccttaaaaatagttgaatgcctggtggaaagttactttgcagatgggtgtaaggactcatggccctctgaggtgcggcgtgaagatgccccttttacccgttgacgtttattttacgtaaaataaactgttgtttccaatgcaatcaactctgtattatatgtataaatattgtaattctgcaattggggaaaatagttacttcactagtaattttcatcatttaagagtgatatttctaattcacaaaagttaatattaaaattatcttgaatat

SEQ ID NO: 179415 - DNA, 458 bp, Homo Sapiens
  misc_feature (135)..(135): n is a, c, g, or t
tacaatgaccttttgtgccaactgttaaggccaaaacgggggaaactccacaaccctaaataaatagcgctccttccccttccaatgtgtgccattgtcggcccttccctcgggttctccctccctcccagcctncctgggggctttttaataaacttgtcctcaccctcgtcagcccactactgtctgcagcccctttgcaaagtggatgccactgaatacagtccggacagacattgtgggggtctttttattaaatcaagaacattgttaaattcaattaaggtttactctgctgccttggaagacttacgatctcaacagttcatacgagcaggtgaaaggattataaatagaatttcgttaaagtggaacagacgacaagaaagccttttagcaagagggcatgctcactagtggttagtaagctgtcgactttgtaaaaaagttaaaaatga

SEQ ID NO: 179416 - DNA, 444 bp, Homo Sapiens
  misc_feature (14)..(14): n is a, c, g, or t
  misc_feature (22)..(22): n is a, c, g, or t
  misc_feature (133)..(133): n is a, c, g, or t
  misc_feature (143)..(143): n is a, c, g, or t
cctcccggggtaanccgtgcanaacgacccttggttcaactttttcaggggtcgtccccaactctgtatctcccagcccactcccaactgtggaaggctgtaaaatcccagatttccacctgttcccagtctncctttgcaanccttaggatggcctatgtggatcaggtgtggcccaatgaaattgaagaggaagtctacccgggcttctgggaaagcttttcccaataaaagacacaggcatggctaacacctcccctgggcctcttcttccctaccttgattgagggtgtgatgcctggagccacagcagccactttgctaccatgacaaaaaggccaagagaatcacagagtcattgaccctatcattatttcaccaagccaataccagccgccatccttctccagaattcttgtaaataaaataaatccctctttgttt

SEQ ID NO: 179417 - DNA, 356 bp, Homo Sapiens
  misc_feature (345)..(345): n is a, c, g, or t
attcggcacaggcccaacaacaacctggtgaacgtgcgagaccagtttgcatactactctctgcagtgtctctgtcccaaccagcactgcgagttccgaatgcgtgggcactaccactgcctccgcaccggctgctattttgtgaccaacatcaccaccaagctcccctgggcacatcaagaagcatgagatgggcggacgggcggggcagccaatggctttcaaatacttcaccaagcgcgaggagtgtggcaggctagggttgcaagtacaaccagggtgaacagccactttccactgcatcccggagggcttgccagttcttctttcttcttaaggaccagnttgaccttcca

SEQ ID NO: 179418 - DNA, 398 bp, Homo Sapiens
  misc_feature (162)..(162): n is a, c, g, or t
  misc_feature (305)..(305): n is a, c, g, or t
  misc_feature (325)..(325): n is a, c, g, or t
  misc_feature (327)..(327): n is a, c, g, or t
  misc_feature (331)..(331): n is a, c, g, or t
  misc_feature (336)..(336): n is a, c, g, or t
gagccattgcacagtcagctgcagaagtcctgctgaccacctagtcatggacaaaggcccacgaccagtgacaccctgcgtccctgtgtgcattaagttcattctgggtcgcagccatgaagtgtcaccagtatctactactgtgaagtcagctgtgctgtntttccattcgcttccacggcttctgcctcctgccataaaaccagcgagtgtcgtggtgcaggcaggccctgtggctttgagggctgagggaagtcagagccccagggcgcccacgaagcagccactgggataccccaccccgncccgccctgcccgccccccncnaaancagtnctgcccccgcatgggagcccccgtgattagtagcccgtatggttcacgttggacccacccaa

SEQ ID NO: 179419 - DNA, 455 bp, Homo Sapiens
  misc_feature (431)..(431): n is a, c, g, or t
  misc_feature (441)..(441): n is a, c, g, or t
cggaagttaccgagagtctctgtggccttaagctggaggtcaacaagtaccagtacctgctgacaggtcgcgtctatgatggcaagatgtacacggggctgtgcaacttcgtggagaggtgggaccagctcaccctctcccagcgcaaggggctgaactatcggtatcacctgggttgtaactgcaagatcaagtcctgctactacctgccttgctttgtgacttccaagaacgagtgtctctggaccgacatgctctccaatttcggttaccctgggctaccagtccaaacactacgcctgcatccggcagaaggggcggcttactgcagcttgggtaccgagggatggggcccccccggataaaagcatcatcaatgccacagaccccttgaggcggcagaaccttgccccaacttaattttccttccntttcccgttnaggttttcccttgg

SEQ ID NO: 179420 - DNA, 513 bp, Homo Sapiens
cctaaaaaaatagagattatattatcacgaagaagaggaatacaggttcctcattctttctggcatggcaccagaaattcccaggtggaaatgaatgatgtcaaaaccaaaaagaaggggcagggtggggccaggaggatagttcccaataaaccccatatgacagcatagacctttctttaaatgttcccaagtgctaaatttgcaagaaaacaggcactaatttcattgtcatcatctgggaagagttagtgtccaagggaaagctcagcgggaagggagggaagtgaggtggggcagggtctggcgctcaggggtctgtggcattgatgatgcttttatccgggggggcccatcctcggtaccagctgcagtagccgcccttctgccggatgcaggcgtagtgtttggactggtagccagggtaaccgaaattggagagcatgtcggtccagagacactcgttcttggaagtcacaaagcaaggcaggtagtagcaggacttgatcttgc

SEQ ID NO: 179421 - DNA, 552 bp, Homo Sapiens
  misc_feature (100)..(113): n is a, c, g, or t
  misc_feature (513)..(513): n is a, c, g, or t
  misc_feature (517)..(517): n is a, c, g, or t
  misc_feature (530)..(530): n is a, c, g, or t
ctgagacggattcttgttctgtcgggattacaggtgtttaccaatttataagatgtctgaatgcagatcacctctgacatctttgggaacaaggctaggnnnnnnnnnnnnnncctcttggtgggctgctgctttctgggagtgggagtgcagcctcctcacctccttggggcccccactgagtcctgtgagctgctgcagggcccaggcccagcacccaccctcctggactgcagccccccaatctgtggttggggatgctgctggctgctgcccaggggcctcccctcctgccccagggcaggaggactgagagcttagggactgccttgccaagggtccaagtgccagccagcaggggccaccagtccctgggccaccccaggctgctcttgctcccctacttgcccagctgagccctgcctggggcacattacccattccgagtagcttcagagagctccacagggttggtatgcacccgtatcacagatgacaaaactgcggctcagncctncgtgccgaaaaangggggttttaggaccaaaaaaa

SEQ ID NO: 179422 - DNA, 232 bp, Homo Sapiens
  misc_feature (33)..(33): n is a, c, g, or t
agcccctcgctggggcccctgtgtgcatctttnagggtcctgggccaccaggaagggcagggtcttatagctggggacttggcttccgcagggcagggggtggggcagggctcaaggctgctctggtgtatggggtggtgacccagtcacattggcagaggtgggggttggctgtggcctggcagtatcttgggatagccagcactgggaataaagatggccatgaacagtc

SEQ ID NO: 179423 - DNA, 417 bp, Homo Sapiens
  misc_feature (47)..(47): n is a, c, g, or t
  misc_feature (90)..(90): n is a, c, g, or t
  misc_feature (117)..(117): n is a, c, g, or t
  misc_feature (149)..(149): n is a, c, g, or t
  misc_feature (351)..(359): n is a, c, g, or t
aaaaaccggggaatccccaggaggcaggcccctcctgctgctgccantgctgcccaaaactgccccagcttgtgaggccccaggaggagncccctgtccccactcggtgctgcctgnctcttctgaccccctgctgtgaggaatgggantcttggtcgaaaaaattggttttccttttttgtataaatgaaaagaatcccaggagaagctgccaccctcccctcccagcgtgatgcgctaccttgcttcggcgtcttgtcgccctttccgcctttggtccagggacagcccagcagatcctcctggttctgacctggggggtgtttgcatcacccccttttacttgtattnnnnnnnnntgatgggttgaaaatgtactgaggattaaaaatgtacttttttataaataaagtgttt

SEQ ID NO: 179424 - DNA, 614 bp, Homo Sapiens
  misc_feature (27)..(27): n is a, c, g, or t
  misc_feature (35)..(35): n is a, c, g, or t
  misc_feature (102)..(102): n is a, c, g, or t
  misc_feature (408)..(435): n is a, c, g, or t
ttaaatgtggacaaaggccacccttgngttaaaantttggtttgccttccataatttccccagaacctatatataaatatatctcttaaatagcaaatattngtagttagtgagtgatgatcactcccaaccttatccttacccatattggtttcagggataggattaagagtgtctttggaagagaaaaatacacacaaccctgtggtttagaatgacgctgaggccttaggctgtgggcctagaacaactatgtgagtgaattcacccatctcatactttgaatcaagcatgcattcctgttttctcattgtgaagtatccccagttgttttccttcagtgttgagtttttgtccttttaaattttattatattttgctctccctaacatttgactgttttttatnnnnnnnnnnnnnnnnnnnnnnnnnnnntaataccctcgatgccactggatactcacaagcagggttatgctccttcatcttgggcttgtttgcctaaatgaaagggtttaatttattttgtacctcctatgcgtgggatagtccagggtgcagagccaggacttgcttgtaattgcacctgctatacttaaatgtatagccctaga

SEQ ID NO: 179425 - DNA, 584 bp, Homo Sapiens
  misc_feature (22)..(22): n is a, c, g, or t
  misc_feature (72)..(72): n is a, c, g, or t
  misc_feature (221)..(221): n is a, c, g, or t
  misc_feature (359)..(359): n is a, c, g, or t
  misc_feature (386)..(386): n is a, c, g, or t
  misc_feature (479)..(479): n is a, c, g, or t
  misc_feature (485)..(485): n is a, c, g, or t
  misc_feature (501)..(501): n is a, c, g, or t
  misc_feature (547)..(547): n is a, c, g, or t
gccagcctggaatccaaggtangaagaaggggtgaaatccaccccacatagttgttcctaggcccccacagnccaaggccctcagcgtcatcctaaacccacagggttgtgtgtatttttcctcctccccaaagacactccttaatccctatcccctgaaacccaatatggtaaggataaggttggagtgatcatcactcactaacctacaatatctgccnatttaaacaaatatatttcatatatagttctggaaattatgaagcaaaacaaaatataacacaaagatgcatttgtcacaattaactcaagttgcagcaacagcagaattgtgggaagggacagagagagagggcctntgcaaatgcagcaagtacgtcctgaanatatgtcacatagtgcaacagtcagattacctcagttaactactcgtcaccgcacacaacatgactaatgtcacattgtcactttccattaanaaaganaaagaacggtgtttcntctcagaagttgccctacgaattttagacatatagctttaattgantctataaatatgtctaaaatgtggctttattcttctc

SEQ ID NO: 179426 - DNA, 437 bp, Homo Sapiens
  misc_feature (12)..(12): n is a, c, g, or t
  misc_feature (45)..(45): n is a, c, g, or t
  misc_feature (274)..(274): n is a, c, g, or t
  misc_feature (308)..(308): n is a, c, g, or t
aaaaattacaanaaaaatttgtgtatgtgtaacagctgtgttcanatcccacagtgtaagctgtgaatatggtttggatgtttgtccccctccaaatctcatgttgaaatgtgatccccagcattggaggtggggcctgatgggaggtgattgggtgatgggggaagttgcctcatgaatgacttggtgccctcctggaagtgatgagtgagttctcgctgagctcactcaagatgtggttgtttaaaagagtgtggcacgtccctcccccaantctccctctcactcccgctctcaccatgtgacanacctgctcccccttcaccttccaccatgattggaagcttcctgaagcccttaccagaagcagatgccagccccacacttcctgtaccacctgcagaaccataaaccaaaataaagctcttttctttatc

SEQ ID NO: 179427 - DNA, 454 bp, Homo Sapiens
  misc_feature (21)..(21): n is a, c, g, or t
  misc_feature (25)..(25): n is a, c, g, or t
  misc_feature (226)..(226): n is a, c, g, or t
cataaacctgccacatcctgnggancagaaggtctccatgcggggagtttattgacagaagagcatggaacagaagacagacctgacagtgccagcagctcctgaggggtgactggggagtcatttggtggagcagagggagcccaggaatcgctggttgagagagggcagaatgctgttgtcatgagcagtgtgatgctgccacagcccagacccaggggagcgntgcccaaaggcctggggtgggtcccggccttgctaaagttgaagtgctctgctccttgtaaagtgggatcgagtgagtacatattatgcgctctgggcaccgctggggcttcgttttccctgggtgggctctgggggaagccagctcctgagtctttgggccacagatggggtaaaagattgagttcataaaaagttttgggccagatgccaagtcccgggttcaggt

SEQ ID NO: 179428 - DNA, 531 bp, Homo Sapiens
  misc_feature (511)..(511): n is a, c, g, or t
ttcataaatcggccacatcctgtggcacagaggtctccatgcggggagtttattgacagaagagcatggaacagaagacagacctgacagtgccagcagctcctgaggggtgactggggagtcatttggtggagcagagggagcccaggaatcgctggttgagagagggcagaatgctgttgtcatgagcagtgtgatgctgccacagcccagacccaggggagcgctgcccaaaggcctggggtgggtcccggccttgctaaagttgaagtgctctgctccttgtaaagtgggatcgagtgagtacatattatgcgctctgggcaccgctggggctcgtgttccctggtggctctggggaagccagctcctgagtctgtggccacagatgggtaaagatgagtcataaaagtgtggccagatgccaagtcctggatcagggaaggacggcggctccgtgacaccagccctgagggggccagctgccttgggaacctatcgggggccttgnggcagccagtggcttccaga

SEQ ID NO: 179429 - DNA, 270 bp, Homo Sapiens
  misc_feature (256)..(256): n is a, c, g, or t
gctgcttgcctctctccagaaattcattaaaggcgcgctggtagctcctcaggaacgcaggcagctccaccagcagcacccgctttatctgtgagcccaagtccagcgtgatgctctcggccttggctggggcctgggaggtgatctggatgatgtcgatggccagctcgctgtggcagtggccgtccagcctctggggaggcacatcctcagcccagcgccgtgcctctagctccagagctcggtccatcaactncctcacattggccg

SEQ ID NO: 179430 - DNA, 425 bp, Homo Sapiens
  misc_feature (381)..(381): n is a, c, g, or t
  misc_feature (390)..(390): n is a, c, g, or t
  misc_feature (412)..(412): n is a, c, g, or t
ggaccagcttgtgatctccgctttcgaagcattgtacagtgtgttaatgattttcgcagtgtttccttgaacttgctacagacacattttaagaaagcccaagaaaatcagcagattgggagggtagaatttcttccagtcaactggcacagtcctttgcattctactggtgtgggatgtagatctgcagcgaataaccctgcccagcattaaccgcctcaggcactttcaccaatgacacaattctgggatgtcttcttctacaatagtcccacctactgtcagactattgtgggacacagttgcttcttgaaatggaaccgaatatacacacttttttctacagagggaaccctgattttcaaaggggggtgttttccnttgctgggncataggtttggggtcggtttanatttggtttggta

SEQ ID NO: 179431 - DNA, 373 bp, Homo Sapiens
  misc_feature (253)..(253): n is a, c, g, or t
  misc_feature (330)..(330): n is a, c, g, or t
  misc_feature (345)..(345): n is a, c, g, or t
  misc_feature (355)..(355): n is a, c, g, or t
atcttcaccaaggttgtgctggaggcgccactcatcacagagagtgccctggaggtggtccgcaagtactgcgaggatgagagtcgcacctatctgggcatgtccacacttcgagacctgatcttcaagcgcccgtcccgccagttccagtacctgcatgtcctcctcgacctcagctcccatgagaaggacaaggtgcgctcccaggccctgcttgttcatcaaacgcatgtatgagaaggagcagctgcgngagtatgtggagaaatttgccctcaactacctgcagctcctgggtgcaccccaacccaccgttcttgtgctgttttnggagctgacaagggncacagaggtnggcagcaccttgggacgg

SEQ ID NO: 179432 - DNA, 221 bp, Homo Sapiens
  misc_feature (153)..(154): n is a, c, g, or t
  misc_feature (157)..(157): n is a, c, g, or t
gcacaggtcccctccctcagtcctgcagacctcctcaagctgggaaggaccaaggattttgggaaataactccaccggcttacagacagtgcaccccaggacaaagagtcatggtgtaaattttaattatcctttgtagaggcttcaaaaaannggnaaatctagagtgcagaggttcagtctggtccacacagttctgaatgccttttaattatcataac

SEQ ID NO: 179433 - DNA, 420 bp, Homo Sapiens
  misc_feature (63)..(63): n is a, c, g, or t
  misc_feature (385)..(385): n is a, c, g, or t
  misc_feature (395)..(395): n is a, c, g, or t
  misc_feature (402)..(402): n is a, c, g, or t
gcctgagtgttggccggaggactgctggcccggcctcccttccgtccaggcagccgtgctcangaacagacctagtgctgagggatggataggcgaggtggcagcgtggagggctcggcgtggatggcagcctcaggacacacacccccgcctcaaggtgctgagcccccgccttgcactgcgcctgccccacggtgtccccgccggaagcagccccggctcctgaatcaccctcgctccgtcagcgggactcgtgtcccagagaggaaggggctgctgaggtctgatggggcccttcctccgggtgaccccacagggcctttccaagcccctatttgagctgcttcttcctgtgtgtgctttggaccctgccttcggcttctgnggcaataatntgaattncaaaaaatgttaactgct

SEQ ID NO: 179434 - DNA, 455 bp, Homo Sapiens
  misc_feature (70)..(70): n is a, c, g, or t
  misc_feature (101)..(101): n is a, c, g, or t
  misc_feature (197)..(224): n is a, c, g, or t
  misc_feature (401)..(401): n is a, c, g, or t
  misc_feature (430)..(430): n is a, c, g, or t
  misc_feature (441)..(441): n is a, c, g, or t
cttttttcctctactccttccccttcacacccccgtggctggaaggaacctcggcttccctgaaagcttnggggtcccacccttcttaccccacccgggangaacgcccagggccccgggcttgtttctcctcttgttttccttttgggcagtttgatcactgatcgagtaaggaatgacctttagattgtgcgacnnnnnnnnnnnnnnnnnnnnnnnnnnnnaaaccaagaatgatttctcctgcttccttctcctcaccatcttcccagacggagttcaaaggccacttctcaagcagcttttggcaccttcagcctcagagtggaatcttttaaagacaggacccctatgtccagggaaaggggaaaaggaactttgccaatgatagtgaccacagncaaaagcaaataattattaattattaatnataataaaagnggaaattaaattta

SEQ ID NO: 179435 - DNA, 376 bp, Homo Sapiens
  misc_feature (270)..(270): n is a, c, g, or t
taaaactgtgaagtactaactttccaaggcctgccttcccctccctcccactggagaagccgccagcccctttctccctctgcctgaccactgggtgtggacggtgtggggcagccctgaaaggacaggctcctggccttggcacttgcctgcacccaccatgaggcatggagcagggcagagcaagggccccgggacagagttttcccagacctgggcttcctcggcagacctgccttcccgtcaggacccacattcatcttaggctcncccagcccccactgttgaaggggcttggccaggggcccgaagcttgcccccaacccccggccttaagcaaccagcaaccccatagggccccccaggacaacacaca

SEQ ID NO: 179436 - DNA, 352 bp, Homo Sapiens
  misc_feature (32)..(32): n is a, c, g, or t
  misc_feature (43)..(65): n is a, c, g, or t
  misc_feature (85)..(85): n is a, c, g, or t
  misc_feature (87)..(87): n is a, c, g, or t
  misc_feature (89)..(89): n is a, c, g, or t
  misc_feature (120)..(120): n is a, c, g, or t
  misc_feature (123)..(158): n is a, c, g, or t
  misc_feature (226)..(226): n is a, c, g, or t
cccccatagggccccccagacacccacacacnatggcgtgcgnnnnnnnnnnnnnnnnnnnnnnntggacagtagatgggccganananacttggcccgagttcctccatttccctggcntgnnnnnnnnnnnnnnnnnnnnnnnnnnnnnnnnnnnntccttaaccccgcaggacgggcctacaggggggtctcccctcacccctgcaaccccagctgggggagnctgctctgccccgacctccttcaccaggggttggggccccttcccctggagcccgtgggtgcacctgttactgttgggctttccactgagatctactggataaagaataaaactacatttattcta

SEQ ID NO: 179437 - DNA, 330 bp, Homo Sapiens
  misc_feature (57)..(57): n is a, c, g, or t
  misc_feature (67)..(67): n is a, c, g, or t
  misc_feature (134)..(134): n is a, c, g, or t
  misc_feature (314)..(314): n is a, c, g, or t
ccaaagagactggagcatctgactcacaagaagaccaaactgtggagaaataaaaanacctctttantttttgattgaaggaaggttttctccactttgttggaaaacaggtggcatctctaattggaagaaantcctgtagcatcttctggagtctccagtggttgctgttgatgaggcctcttggacctctgctctgaggcttccagagagtcctctggatggcaccagaggctgcagaaggccaagaatcaagctagaaggccacatgtcaccgtgggccttcctgccaccagtcactgtccctcaaatgncccaaagaccaatatt

SEQ ID NO: 179438 - DNA, 446 bp, Homo Sapiens
  misc_feature (22)..(22): n is a, c, g, or t
  misc_feature (50)..(50): n is a, c, g, or t
ctgctgtgggaaggaacccccnggaatgtgggctggaaggaacaaggtgnccctaccgctggtcccctacagcacaggcccccaggtgggcctacatcagggtacgattttatgaaggcctcctgagttggtggctgactctggcgtcacccatagacacccacaatgcgtggaggccgacttggcgttttctgcttctctcaagaaaacatcatctggtccaacctcaagtatcgctgcaatgacaccatccctgaggacttccaagagtttcaaacccagaatttcgaccgcttcgataattaaaccaaggaagcaatctgtaactgcttttcggaacactaaaaccatatatattttaacttcaattttctttagcttttaccaacccaaatatatcaaaacgttttatgtgaatgtggcaataaaggagaagagatcatttt

SEQ ID NO: 179439 - DNA, 471 bp, Homo Sapiens
  misc_feature (46)..(46): n is a, c, g, or t
  misc_feature (56)..(56): n is a, c, g, or t
  misc_feature (457)..(457): n is a, c, g, or t
gttgaaggtaaataccgcaacagaaaaactcctgttgaagtccccncaaggtgggncgtgaagctccaaaacccggccccaggaaaaaccgggatcggggatggaactcctccctccgcactggtgccccgtcccatgatctccgtacttggccaaccgtgtcattcctcatggtacacgttggggcctgtacccgtcgtttctcgcttgatgatgtctatctccatgtgcttgattttgattctcaccagcaggaagtatatcttccctacaatgacatctttcaagtggtatttggatttattgtactcaaattcaatgtgcagacagtcctcaatcccaacctccatcttgatggaagagttcagctctgggtatgtgctgagtgtgtgaactacaatgtccatctctttgacaacatcattgaggcggcggctgatggtagcacgaaggaaantagcgtagcttcac

SEQ ID NO: 179440 - DNA, 455 bp, Homo Sapiens
  misc_feature (23)..(23): n is a, c, g, or t
tccaaaaccctgtaataaccccnaccctccaaagacacccagcctgtattatagaatccacagctgtcaccctgtgactgtccagaaacagaaggtgccaattgggattccttaggttggtgacagaatagcactggatcccacaggcccagagacctaggagtgccttatcaaatgaggttttaggctctgaaaggaaggaatgagaaggtgtgccgggacaaggaatagccagttcccataaaacttgggaaacgtagatttctcaaaagtagggtccgacacaattttttagttactttttgagaacatttaaaaataaatacattgaaatgctgattagagagcgaaagtaatttaggttgctttttcaatctgaggttgttttaaaaaagttattgtatgaaaggtattaaaaaataattatggtgaatatgttggcaggtaagatttga

SEQ ID NO: 179441 - DNA, 650 bp, Homo Sapiens
  misc_feature (421)..(433): n is a, c, g, or t
  misc_feature (555)..(563): n is a, c, g, or t
ggagacagtgaagtgatgtgggcactgactacttaacctaaaacacaaaccaagtgagggcatggggaagctggcaggcgttctcagtgcgtccatgtgagctcttttgtagatcaaacccttactcgtacaaaataaaatggaggcaatttagttccaaagtgacttctcaggctttcccatgtagctagaccttgtcaaccatcacaaagccagactgtgacctgctgactcctgggggacattctgtttatttaattttgtccctaggaatgaacactttgtaagttgtgcattgttgatttttgtcaagaaggtattttaaagtccctcctttttgttttaaattcggtttctgctgcagtttgcaaaatgtttgctgtgccgtgtcttgcaaagcacttagtgcaaaggagaaagnnnnnnnnnnnnncacctgacacttttggtctcactgtgggtttggcactaagaggcacgatatctgaaggaggtcattccagttttaaaagtacggacagtgctgttggaactgaccacaaaaatgtattgttnnnnnnnnnttgaaaaccagcagtgatttgggtccccctgaaacctctgtgaatcggaggtgggcccaggagggtgcaggacgcagcagaaatagt

SEQ ID NO: 179442 - DNA, 473 bp, Homo Sapiens
  misc_feature (17)..(17): n is a, c, g, or t
  misc_feature (34)..(34): n is a, c, g, or t
  misc_feature (43)..(43): n is a, c, g, or t
  misc_feature (53)..(53): n is a, c, g, or t
  misc_feature (66)..(66): n is a, c, g, or t
aaaaacccaagaatttnacccaaagccccatctnggaaaacanctgtggtganaaggtaaggctgnccgcaggtggcaaccagcaagaaatcccttgtcccccccaggcaataagcaaggccctaaaaccttccacagtccccagggggcaaggctgtcgttgcagagtctgtagtagccgcaggtcgttgaccagcctgtgcacattctgggtgaatgagggcaggtcccgatccatcttgaaattccgccccagcacacttttctggttggcatccacaccatcacagctggtcaggaactctgggaggaaggcggcaaagaagccatcaaagtcgactgaggccatgttgtagaatgcgatgccaatctcctcctgcagaagatcatgggacttgtggaccaggacctggagcagcacgttcacaaactggaacagcatggcagtccggaagatcttcttgtggtacagc

SEQ ID NO: 179443 - DNA, 595 bp, Homo Sapiens
  misc_feature (64)..(64): n is a, c, g, or t
  misc_feature (84)..(84): n is a, c, g, or t
  misc_feature (92)..(92): n is a, c, g, or t
  misc_feature (575)..(575): n is a, c, g, or t
aaacccctccgcctgctccaaacgcccctggaacaaccgtcccattcctcagttggaccccaanaaagccactctgctgggcancggccaanatgtggaggagcggcaaaaggccaggcaacgttgcttgcggtgggagaagccaaggaatgtaaccaaggcccatctgggaaaacatctgtggtggaaggtaaggctggcgtcaggtggcagcagcagaagtccgtgtcccccaggcagttagccaggcctagagcttcacagtgccagggggcaggctgtcgttgcagagtctgtagtagcgcaggtcgttgaccagcctgtgcacactctgggtgaatgagggcaggtcccgatccatcttgaaattccgccccagcacacttttctggttggcatccacaccatcacagctggtcaggaactctgggaggaaggcggcaaagaagccatcaaagtcgactgaggccatgttgtagcatgcgatgccaatctcctcctgcagaagatcatgggacttgtggaccaggacctggagcagcacgttcacaaactggaacagcatggcagtccgnaagatcttcttgtggtacag

SEQ ID NO: 179444 - DNA, 363 bp, Homo Sapiens
  misc_feature (330)..(330): n is a, c, g, or t
  misc_feature (337)..(337): n is a, c, g, or t
cttgtactgcctgccaccgcggaggaggctggtgacaggccaaacagctgcgaagaaacaccctttcatctcagagtccactgtggcactggccagccctccccagtacaggggtgctgcaggtggcagagtgaatgtcccccatcatgtggcccaactctcctggcctggccatctccctccccagaaacagtgtgcatgggttattttggagtgtaggtgacttgtttactcattgaagcagatttctgcttccttttatttttataggaatagaggaagaaatgtcagatgcgtgcccagctctttcaccccccaattctcttggtngggaggngtgtacctaaatatttatcatatcct

SEQ ID NO: 179445 - DNA, 466 bp, Homo Sapiens
  misc_feature (356)..(356): n is a, c, g, or t
  misc_feature (389)..(389): n is a, c, g, or t
  misc_feature (410)..(410): n is a, c, g, or t
  misc_feature (415)..(415): n is a, c, g, or t
gaaaaacagccccaaagcatgatgtttcccccatgcttcactgtaggtatggtgttctttggatgcaactcagtctctggatgaggtccttcgcttcttcagatacatccgtgacatgggatgggaactggaatcgctcttcatggttcatgatcttcccataggtctccacgagtgactccgcataaaacggcgtttctccatagagcatctcatacatgcagacacccagagaccaccagtcacactcaggcccgtatttgcccatgccgtcctccatcgcctgcaggatctccgggcgagatgtagtcaggtgtgcccacggccacgggagggactgcacagtggccatcatnattgcatctttcaaacatgatccaaagttcagnccagggggggattatggaccnttttnacgttccaaaagggacttgttcaggtttaatgtattttgtggcacgttaat

SEQ ID NO: 179446 - DNA, 444 bp, Homo Sapiens
  misc_feature (11)..(11): n is a, c, g, or t
  misc_feature (42)..(42): n is a, c, g, or t
  misc_feature (73)..(73): n is a, c, g, or t
  misc_feature (352)..(352): n is a, c, g, or t
gtttaactgantggctgctaggctctccttcctccctgttanaaaggtgccccagctgaggcaggaggcaggnagaacaagaaccctaaggcccaatttgcgctgcccttccctagaactgaatcaaaacgaaaacccccacctctcccacgccccaagtaaggaaaggatcagaagctactccctttgcaaccccacctttccactgcctcacagatgaaaaatggaaagtacctctgattggtcccctcccacaaccaatctgactggtcgtggggcaggtttcatttacatagggtgtaaccaagtaaccaatgggaaacctctagagcatatttaaaccccagaaaantctgtaaccagggctcttgctgcttgctcgagcctaactcccactctgtggagtgtacttttgtttcaaaaaatctgtacttctgttttgca

SEQ ID NO: 179447 - DNA, 532 bp, Homo Sapiens
tttagcggtgaaagatattacaagtgtttatttgttaggattagattttagtgcaaatgacaaagcccaaaagaacagaggatcaaataagattgaaatgtattaccttctcataagtatacgaagtttaacacaagtatgggagttctgtaataattaagatcacaggctcccttctcatagcctggcatgtttactcctgtgtcagcctgaatggcagcaaaaataaaataaaatgggagtgtggggaggagggcacacttccttcctttttaagaaaaaggcacacattttctggatctttcacacaccaattctacttctttccctttgacaaaacttagccacaaagctattcctagctgcaacaataatcagaaaatggacacctaaaactttagaaattgtaacactgaggatgaatgtaagaatggatactgggaagcattttctatcacaataagaaatactaatatgaagaaaagaatgataaaccagaagtataaactgtaacagacaaacacaggaaaga

SEQ ID NO: 179448 - DNA, 305 bp, Homo Sapiens
  misc_feature (295)..(295): n is a, c, g, or t
cagcatgccccagttttcccagtttcaaaatatattatttagcagtgaggcttaactccccagtaaatgaaggggtctgtgagtaggggaacccttcagactggttatattatgagctgtagaactgttgcccattttgttgctcccagttgtgcccataaagagatgtgtctgagctggagacttaggctcagatggggaacaaacagccaagtaccaaccttagtttggtccaataggtgaattttagcaactctctaaactcagctctatacctgtaagactcagaagaaanacatatagtg

SEQ ID NO: 179449 - DNA, 414 bp, Homo Sapiens
ctttttaaggaagccacttgcttgatatcaaaagtgctgtggaaagaaaggaggggaaaaaaacccacaaataaatgtagaatctagtttattttaccaaactgtatatttttccacttaacatttctacattagcaatgatgtaactctccaacatttccttataaaaaaggcaaacaagaagtgacaactcatgctccaaatattaaaaaatatatttaaacatatgatcaagaaggatttggggccgtgagtgggtaggctcacatctgtaaccccgggggttttggggagggctgagggtgagtgggatcacggagggtcagggagatcgaggaccatcctgggggctaacatggggggaaaacccccaacttctacttaaaaatacaaaaattgggctggggcctgggt

SEQ ID NO: 179450 - DNA, 476 bp, Homo Sapiens
  misc_feature (119)..(149): n is a, c, g, or t
  misc_feature (151)..(227): n is a, c, g, or t
  misc_feature (289)..(289): n is a, c, g, or t
  misc_feature (298)..(313): n is a, c, g, or t
  misc_feature (391)..(391): n is a, c, g, or t
  misc_feature (413)..(413): n is a, c, g, or t
  misc_feature (424)..(424): n is a, c, g, or t
  misc_feature (432)..(432): n is a, c, g, or t
gggagtgagccactgtgcctggactatcccacttggtttttgactgaaggggaagtgtagaaatatattgatttgtgatttctggtgtcacctgtgttaccaaaaatcaaaacaaatcnnnnnnnnnnnnnnnnnnnnnnnnnnnnnnngnnnnnnnnnnnnnnnnnnnnnnnnnnnnnnnnnnnnnnnnnnnnnnnnnnnnnnnnnnnnnnnnnnnnnnnnnnnnngttcaagcgattctcccacctcagcctcctgagttgggtcctacaggcgcacacgaccacgnccagctaannnnnnnnnnnnnnnnagtagagttggggtttcaccatgttagccagggatggtcttcgatctcctgaacctcgtgatcccacttcacctcagnctcccaaaattcctgggggttnacagatgtgangttaccantcacgggcccaaatttttctttgatcatatgttttaaatataat

SEQ ID NO: 179451 - DNA, 358 bp, Homo Sapiens
  misc_feature (315)..(315): n is a, c, g, or t
gtgaggggtaggatgacggcagcgttaggccagaagtgccaacttttcacggtctttgttgctgcagaagtcaagaaaaatttagcctctttccaagggctgttgctgcttggtttctgttgctatcacaaggagaaaaaggtatttcagagggagtttttcttgttcaagcaagagacagttcagagattaccggctttttcaaaccaggctgctttagtgaaagggacttgcttcctctactctcaatgccctttcctctggagagatggaaagtggatttaaaaggtgaagagttggaaaaggaaggtggtnggttatggaattcacaggatcacaaacacttttttaaaaattt

SEQ ID NO: 179452 - DNA, 650 bp, Homo Sapiens
  misc_feature (266)..(266): n is a, c, g, or t
  misc_feature (268)..(268): n is a, c, g, or t
  misc_feature (484)..(484): n is a, c, g, or t
  misc_feature (527)..(527): n is a, c, g, or t
  misc_feature (554)..(554): n is a, c, g, or t
  misc_feature (573)..(573): n is a, c, g, or t
  misc_feature (599)..(599): n is a, c, g, or t
  misc_feature (603)..(604): n is a, c, g, or t
  misc_feature (612)..(612): n is a, c, g, or t
  misc_feature (635)..(635): n is a, c, g, or t
aattcggcactaaggacggaagcgaggcctgggaccaagagaggcccaggctactggaggagtagaaggatgggccccgtgggtccccactgccccggtacgagggggcccaagaccctggcaggtcaggggccctggcaagccagatctggagctgctgctccctgctgcggagacccggaggcttcgcgttgaccaagttccttaaagaactggctgatggggcaggaggtccaggcctgggctctcgggccctcctagagcantntggagcttgcagctcagacccccactttgagttttatttatttaaatagtagttggatgcttggcacgtcgtcctgtaaataggaaacccttgcctcatcagttttcctgatttacaagtgcaatattttaggccaatgccttggggagaagctgccatgcaaaggtgggacaccattcttccagctttcaggggatatgctcgtccgggcaccgntggcaggcagctggccttctggactaaggcaccctgggggganactgcagtctggctacacacagagatntgggcccccctgggtggantgtccctcgggggctttgggaaagcntggnnccctcagnccacacagtagccaagttctggngcaaataaaaggcct

SEQ ID NO: 179453 - DNA, 467 bp, Homo Sapiens
  misc_feature (47)..(47): n is a, c, g, or t
  misc_feature (135)..(135): n is a, c, g, or t
  misc_feature (183)..(183): n is a, c, g, or t
aacccaggggagctaacccttaacccccacccttggaacactacccncccaaacctggcaacactaacccggttcccccagaacagtttttaaaaggcccaaccatagagggtactgtaaagtgtacaagttacnttatatatgtaaggtccacttgagcggaactgccttttacatcaaagnttaaaaccgatcttgtgttccttcaaaccttcaaaactatctcatctgtcagatttttaaaaccccaacacaggttttggcatcttttgtgctgtatcttttaagtgcatgtgaaatttgtaaaatagagataagtacagtatgtatattttgtaaatctcccatttttgtaagaaaatatatattgtatttatacatttttactttggatttttgttttgttggctttaaaggtctaccccactttatcacatgtacagatcacaaataaatttttttaaata

SEQ ID NO: 179454 - DNA, 352 bp, Homo Sapiens
  misc_feature (43)..(43): n is a, c, g, or t
  misc_feature (115)..(115): n is a, c, g, or t
  misc_feature (324)..(324): n is a, c, g, or t
caagggcagtggggaatcgaagcaggggcttccctagcttcanatcccccaggcccctgcgcctctggaatgtaccaacaaggggcaggggtttcagggggctcagcctcttcanggggcaggcctcagccctgggtttgtcacagtctggccttgaatttgcctttggccttgaccttccgacaggtgctaggaattgttccgacttcaaagggcagaggcaacaaggcacttccagctgggggcctcggaggcacaggagagcaggagcctcggtgtgaaaggagggggagaagaggggagatgatcagaagtctttgggangaaggggcttctgagggagaccagcttt

SEQ ID NO: 179455 - DNA, 394 bp, Homo Sapiens
  misc_feature (54)..(54): n is a, c, g, or t
  misc_feature (380)..(380): n is a, c, g, or t
acggccgaagcaagcagcagcagctggctgggtacatccctggccaatgctganacccatccagcacttctgcaccccagcacggctccccggcgaccctgctgcagcctgctctcccctacgctggccgagatcattcgcctgcaggaccccagtgcccatcaagattgaggtggccacttatgccacctgctaccctgacttcagcaaaggccacctgaacgctatcctggccatcaaggggaacctatccaacagtgaggtcaagcgcatccggagcatcttggacgtcagcatgggggcgcaggagcctcccggcccctattttcccttataaagcccagggccgccgtgagcgggattcagcaatggtggaatgnaaagacagaactgg

SEQ ID NO: 179456 - DNA, 464 bp, Homo Sapiens
  misc_feature (313)..(313): n is a, c, g, or t
  misc_feature (318)..(318): n is a, c, g, or t
  misc_feature (362)..(362): n is a, c, g, or t
  misc_feature (392)..(392): n is a, c, g, or t
  misc_feature (429)..(429): n is a, c, g, or t
cccagggacaccgtgcagtgtcggaaggccagctttgagctctatggcgctgacttcgtgttcggggaggacttccagccctggctgattgagatcaacgccagccccacgatggcaccctccacagcagtcactgcccggctctgtgctggcgtgcaagctgacaccctgcgcgtggtcattgaccggatgctggaccgcaactgtgacacaggagcctttgagctcatctataagcagcccgtcaccacttccccagccttcacaccaagggcccagctgccttctccccatgtactccgacaccagggcncaggntcctcagacggacagcacagcaagctgggtggggcactaaggcncctgttcggaccacagggcaagggctttgnagggacttttacccacgggttaagggttttcattttnccttcccaccgaaactttgattttcaaggtgggca

SEQ ID NO: 179457 - DNA, 317 bp, Homo Sapiens
  misc_feature (15)..(15): n is a, c, g, or t
cggggataagccccnacccagcatgggcccgaaagcccgcctggcccgggggactccagagctcggctgaaggggtgcaggctgccatatgccacgtagaagggggcgggataggtgccacctgggggtcttggcggacgggtaggcggtgccatccctgccgtagtcctcacctgagctgggtcggtacaccgaggatggaagacccggcgggacttccggaccttcttgggctgcgtgtctaggctgccgtctgccgctctccgccgggagctgccggagtaggaggggtagtactgggaggtccccttcatgcc

SEQ ID NO: 179458 - DNA, 375 bp, Homo Sapiens
  misc_feature (18)..(18): n is a, c, g, or t
  misc_feature (59)..(59): n is a, c, g, or t
  misc_feature (219)..(219): n is a, c, g, or t
  misc_feature (258)..(258): n is a, c, g, or t
  misc_feature (327)..(327): n is a, c, g, or t
atgcagaatttggttatntcccgttgctcccctaaagcctgaaaacctttggaaccccntctcgagggtgttctttgaagtcacaaatcactgcggttgggaacgttctaacccagagccggtggaaatacagcacccctggaatagtttaggaagataatggaggcccgtgcaagattttacagacccaaatctgcactatatcatggtagattcaancccaatagaaacggttgatatctatcaagttgaaagganaattatttgttatttatctgtactgaccagtgaattagtgaattgagtgttgagtgttagaattaagcntcatagaggccatcacactcttctgaaatttcccctggtaatgaggaa

SEQ ID NO: 179459 - DNA, 513 bp, Homo Sapiens
  misc_feature (52)..(52): n is a, c, g, or t
  misc_feature (110)..(110): n is a, c, g, or t
  misc_feature (119)..(119): n is a, c, g, or t
  misc_feature (223)..(223): n is a, c, g, or t
  misc_feature (327)..(327): n is a, c, g, or t
aaacactaaatagtgtaatatttctttgactttaaaaaaattacctggtagncaaatcaagataaataattgctcattttctgagacaatactgcaagacaggatgaagntaagtaggnaatgacattcatttaaacatgactttgctttatgaattttgtctcttttttggttctctttttcttatattcaagttacaaatgtacaagtatccttactaagnagtgctccttttgtattttacatatatacagtatgaaaatacattgggaacactagggaaagtttttaaataacagttctaatttatcagaaaattgtgttttngggattgagttctttgtctcagcccaggaatcccagggtcctgggcctgggttttctaatgctgtcatctcagttcgatattttactttaggaatctgggaatctcctaccttaatatatgaccatggactttggaaagggcaaaagggggaatccaaggaattaaattaaaaccaaactttaatc

SEQ ID NO: 179460 - DNA, 374 bp, Homo Sapiens
ttaaggcctccccgaacctcctggttccaggtttaaatgcctccacagttgccccccatcaggtggaaatgacgcctggatccacacaaactgtgaacatattaaggatgaaggtgccagaaagaccccccctggcccgtactttgtgcttgagttgagtgctgtcccagaatgcattctggtggctggagacggtgatgaggcagttcctgagctaggagattggtaaggcataggctgaagctgaggagatggtggcccagaaagcggtgaactagccaagggatgagaagctgctggggaagctgttgtagcagaccctgaatgtgaaggaccatatgtaataggttgtaactgagacgaaggctgacctg

SEQ ID NO: 179461 - DNA, 414 bp, Homo Sapiens
aaaggttcttaaaagaaaagctccggaaacaacaagcccctggtgttccctgtgaagaacgctggaacctgcaagaacggggaagctgcaatgcccacctgctgggtaaccacgggccgggccctggggtcccacgcctttgggttgggtgtgtctgatgtcttgccaagcgccctggtcctgtcctcttgagctgcccttgcccagcactgcactctggaggtgggtggtgcaggcggtggagggacacaggccagctcaagcccgctggtggcagggcgttttcccaccgggatacgggaagccacctgtgctcaggctaggccctgggatcgggagttacactaccctgtcccaagccgagggggccggtggaatgacttgagcagctctgggagtggggaaaaaagacgc

SEQ ID NO: 179462 - DNA, 432 bp, Homo Sapiens
  misc_feature (21)..(21): n is a, c, g, or t
  misc_feature (78)..(78): n is a, c, g, or t
  misc_feature (83)..(83): n is a, c, g, or t
  misc_feature (103)..(103): n is a, c, g, or t
  misc_feature (109)..(109): n is a, c, g, or t
  misc_feature (117)..(117): n is a, c, g, or t
  misc_feature (127)..(127): n is a, c, g, or t
  misc_feature (141)..(141): n is a, c, g, or t
  misc_feature (159)..(159): n is a, c, g, or t
  misc_feature (236)..(236): n is a, c, g, or t
  misc_feature (296)..(296): n is a, c, g, or t
  misc_feature (312)..(312): n is a, c, g, or t
gggcccctggaaaatggcaanccatcagttgctcttgctgacccctcggaacaaaagccgcaaaggtggtggctgaanaacantggcgcggggggcccccaantgcgcngcctccancccaccccanagctgttgctgaantcaggccaacctccccancactggtatctgagtaacggctaaaaacctccttcctctggttttgaaaagcagttcgggttgtccaaatctgtaanattcatctccattttttaaaaaggtttctctgaacgcccccaggcccgagccgcggtgancgtcgtgttgcatgancctgggccccgggcttcccgtgcgcctctgccgcaggtgcttctgggcacccatcctctgcgtttcatttgcagtcgactgtacagaaggcactcaccacaataaacctttcctgaaagc

SEQ ID NO: 179463 - DNA, 471 bp, Homo Sapiens
  misc_feature (20)..(20): n is a, c, g, or t
caacaggtgccccggaaaangaacaagccagggaaaaaacgttgaaaatccctcccctgaaaaaccttaatgtccgtcctggccaatcctcccggttaaatttccctccttcccaccttgtcccacgggccaggggtggggaatttccctgttggtgccttggggatctggcccagaagtggcacactctggggctcccacatccctcagtgcggccgttggataagcggaaagaattggaatggctcccagcttgcttgtatttcttaaaccttaacatgtacaaaactatgataataaacacgatcactagcagagaggacagggccaccatcaccgcaataattggtgtctcatctgaaggagggaaagtttctggagtggttgctgcggtgctggaattcccctcccagggttctgttctggcatccgtgaactggttatctggaagccacgttccatttggtgaaa

SEQ ID NO: 179464 - DNA, 477 bp, Homo Sapiens
  misc_feature (347)..(347): n is a, c, g, or t
  misc_feature (355)..(355): n is a, c, g, or t
  misc_feature (362)..(362): n is a, c, g, or t
  misc_feature (392)..(392): n is a, c, g, or t
  misc_feature (397)..(397): n is a, c, g, or t
  misc_feature (405)..(405): n is a, c, g, or t
  misc_feature (423)..(433): n is a, c, g, or t
cctccttggaagcagcctcacaggtggcctggataggacatgcagggagagcgttgaattcctccctgaagagcttattgtcgtctgccattctccggttaatttcctcttccagcttgtccacgggcaggggtgggtatttcctgttggtgcttggggatctggccagaagtggcacactctggggctccacatcctcagtgcggccgttggataagcggaaagaattggaatggctcccagcttgcttgtatttcttaaaccttaacatgtacaaaactatgataataaacacgatcactagcagagagggacaggggcaccatcaccgcaataattgggggttntcatcttnaaggggnggggaaagttttttgggagtgggttgcttncggtncttgggantttccccttcccaggggnnnnnnnnnnngggcatcccctgaaccgggtttttttgggaaggccacggttccc

SEQ ID NO: 179465 - DNA, 335 bp, Homo Sapiens
  misc_feature (322)..(322): n is a, c, g, or t
tgagagacgggaatggccgctgccaggccccaggacctagaagggaaaggaaataccttcttctaggggaacagcctcaaggctcatccacaacatggacctgcgcacaatgacacagtcgctggtgactctggcggaggacaacatagccttcttctcgagccagggtcctggggaaacggcccagcggctgtcaggcgtttttgccggtgtacgggagcaggcgctggggctggagccggccctgggccccttactgggtgtggcgcacctctttgacctggacccagagacaccggccaacgggtaccgcagcctagtncacacagcccgct

SEQ ID NO: 179466 - DNA, 441 bp, Homo Sapiens
  misc_feature (18)..(18): n is a, c, g, or t
  misc_feature (39)..(39): n is a, c, g, or t
  misc_feature (52)..(52): n is a, c, g, or t
  misc_feature (74)..(74): n is a, c, g, or t
  misc_feature (79)..(79): n is a, c, g, or t
  misc_feature (110)..(110): n is a, c, g, or t
  misc_feature (412)..(412): n is a, c, g, or t
gcttgctggttgtggcgnaacttctttgacttggaaccnagagaaaacggcnaaagggtaccgaagcctagtgnaaaanagcccgctgctgcctggcgaacctcctgcanaaaatcccgctatgtggcctccaaccgccgcagcatcttcttccgcaccagccacaacctggccgagctggaggcctacctggctgccctcaccccagtccgcgctctggtctactacgcccagcgcctgctggttaccaatcggccgggggtactcttctttgagggcgacgagggctcaccgccgacttctccgggagtatgtcacgctgcataagggatgcttctatggccgctgcctgggcttccagttcacgccctccatccggccattcctgcagaccatctccattgggactggntgatccttcggggagacactacaaacgca

SEQ ID NO: 179467 - DNA, 1224 bp, Homo Sapiens
gattctgttgctggtggggtgggcaagctgggactccagagcaggcctgccttgccctcctccctatcaggtacatgggctttgcatctgtccccaccagtcggtgcacactgtgagtgctgccaagacctgcaccaggatcatccatgacatgcagcagagcctgggcacccccatgcctgctgggatgaatgccatgctctactctgcctggccatacctgccacaggtccgcccaccccatatctacctttctggttctgcctcagaatgtgagtgccatgggcatgtctacagttgtcactttgacacagctgtgtgtctggttatgtgagtggaggtgtgtgtgatgtgtgtcagcacaacacagctgggcgccactgtgagttctgctggcccttcttctactgtcatccctgagaggatccctgttcccctcggtcctgcagacatgagtccttcaacccctaatcccaacactgactcttatccttcagctccatggtgacctctgacctaattccatccttaacctctgacctctgatctagcctgtgactgtgaccctgtgggtgtctggaaggggatttgtgtgatgctcacattaatgagatccatggcctcctctctgggcagtgttgctgcaaagtgtgtgtatggggtcagcactgtgactcctactggcctggtcactatggcctgagctccacccaacctcagagctgccagtgtgagtgacactcagggtgggcccccgcctccatgtcctcctggctctgcccccagttactgccctgataacacacgcacctacccacctcactgcagttccattagcaagctaagagccctaagccttcgcctgcaggtgtgaccccagggttcaggtccctggtactcatgtctgttatccctccagtggtacctgtcactgcaaatgctttgtctctgggcaggacggtagccattgtctggtgaggcttggcccaccttctgatttaaccttgacctttggcactgagcttcttggagctatagccttataatgagtataaggctatagttatcatgactgtggactgagccttgtacttgggtgggtgccgctcactgacttggtcaccagggtcagcatcactttggctagctgaacctgtatatgccctcaggtgggagtttcggaaacaaaagggaaattgattaaacttgataaaataccctgga

SEQ ID NO: 179468 - DNA, 221 bp, Homo Sapiens
  misc_feature (180)..(180): n is a, c, g, or t
  misc_feature (199)..(199): n is a, c, g, or t
agtgtctttctgatcaagggggacaaagtctgggtatacccgcctgaaaagaaggagaaaggatacccaaagttgctccaagatgaatttcctggaatcccatccccactggatgcagctgtggaatgtcaccgtggagaatgtcaagctgaaggcgttcctcttcttccaaggtgaccncgagtggttctgggacttngctacgggaaccatgaaggagc

SEQ ID NO: 179469 - DNA, 454 bp, Homo Sapiens
  misc_feature (253)..(253): n is a, c, g, or t
  misc_feature (396)..(396): n is a, c, g, or t
  misc_feature (419)..(419): n is a, c, g, or t
cccttgattcaagtgaagaagcaatctgtctttattatgagaaactggggaggtggggccaggccagactcaatgtcagaaggcccctcagtgagaagcgaagaagcaatctgtctttattatgaggaactaggaggtggggccaggccagactcatgtcagaaggcccctcagtgagtgcagcccaggagactgggtcacattctggggttgcggaagggccttggctgcattcagtttctccacatcactntagcagtacaaattgggaccatggatgaggtacaagccgggaccattgggcggaacatgagttaggggccaagggacttttccatacacaaggctccgtctaccttctcatgggggccaaggaagctttgtccacgtggcttngggctcctgacttcaggtccagncaccacagccgccgtcctgccttgatatgggagcc

SEQ ID NO: 179470 - DNA, 407 bp, Homo Sapiens
  misc_feature (40)..(40): n is a, c, g, or t
  misc_feature (117)..(117): n is a, c, g, or t
  misc_feature (150)..(150): n is a, c, g, or t
  misc_feature (162)..(162): n is a, c, g, or t
  misc_feature (196)..(196): n is a, c, g, or t
  misc_feature (225)..(225): n is a, c, g, or t
  misc_feature (254)..(254): n is a, c, g, or t
ctggccgggttatgaattcacgccccacccatgcgggaanatcaacaagaaattctctgtgcgctattaccctcaaccctggtgctgataaacgaggaggaacggcgctacttcaancagcaggaaatggtgttgtggcggaagggtganatcgtacggaanagcatgtcccacccaggcggccatcgcctcacancgctttgagggcacccacctccctgggtnaggtgcggacccccagccagctgtctganaacaactgcaggcagttagccccagggccgagaagatgctgggcacccacccagcacccccatctaccaaaaccagcggctgggggcgggggcggaccttgtgaggctcagttgacccgttacttgcaacctgaaaacaaatcatgaattttg

SEQ ID NO: 179471 - DNA, 403 bp, Homo Sapiens
  misc_feature (63)..(63): n is a, c, g, or t
  misc_feature (126)..(156): n is a, c, g, or t
tggaaacccagccagtgaatttgggtcccccctgaaccccctgtgaaatcggaggtgggcccnggagggtgcaggacgcagcagaaatagtccccagaaaggagagacgggtcatgcagcgggctnnnnnnnnnnnnnnnnnnnnnnnnnnnnnnncaccatacatctccaaatgaagtatttattaacaattgtagtgtaagcctgtgataaaatagcacaaaggttctttaaagaagttcacttttaaggcatcagaaaagttaatgtggcaaacattttaattaaaacatcagaagtaaattttattttaaactttaggcctctgaatttttccagtaaacacagttcagctatgtggcaaagtcaatgggtggcatctaaaatgactttttacattcta

SEQ ID NO: 179472 - DNA, 409 bp, Homo Sapiens
  misc_feature (217)..(217): n is a, c, g, or t
  misc_feature (226)..(226): n is a, c, g, or t
  misc_feature (380)..(380): n is a, c, g, or t
agtcgctgtcatgcccgagttcgtcaacgccgcttaaaaatgtgactgtggtggccaccaacacgtgtgggactccgcccgaggaatactgtgtgcagaccggggtgaccggggtcacaaaggtcctgtcacctgtgcgacgccgggcagccccacctgcagcacggggcagccttcctgaccgactacaacaaccaggccgacaccacctggtggncaaagcagnaccatgctggccggggtgcagtaccccagctccatcaacctcacgctgcacctggggaaaagcttttgacatcacctatgtgcgtctcaagtttccacaccagccgcccggagagctttgccattttacaagcgcacacggggaagacgggccnggggtttcttaaccagtattacagttggt

SEQ ID NO: 179473 - DNA, 393 bp, Homo Sapiens
  misc_feature (29)..(29): n is a, c, g, or t
  misc_feature (62)..(62): n is a, c, g, or t
  misc_feature (111)..(111): n is a, c, g, or t
  misc_feature (149)..(149): n is a, c, g, or t
ccttaagacacattaaagagacattaccngggacacccgcaaagtatgtcccccccgggganaaagcccaagtgcagatgcctatggcccacagatgatatggtttggccnctgtgtcccccactcaaatctcatcctcaagttgtaanccccggatgtcgagggagggcccctggtgggaggtgattggattggttcgcatgatagtgagggagttctcacgagatctggttgtttgataagtgtctggcatttctcctgtgctgtctctcctgccaccttgtgaagaaggtgcctgcttctccttcgccttccgccatgattgtaagtttcctgaggcctccctagcaatgcagaactgtgagtcaattaaacttcctttctttataaatt

SEQ ID NO: 179474 - DNA, 339 bp, Homo Sapiens
  misc_feature (19)..(19): n is a, c, g, or t
  misc_feature (201)..(201): n is a, c, g, or t
gaaatctatgaacttcttnaattgcatatatttatgactcttacatctggtaccttttaaaacagctaacatatagtatgcttatttcctataagttaattaatatatgactatttaaggtgagaagagtctcatttgaagaattacaatagttatattcataccatgggaaatcaatagtttttctaaacataaatttcnaagctaaagctttagcaatttaagttatttaactaccaatgcatgaaattcttatcagattgtcccatttggattacagtttaagtcatttcaaggctgttcacaattatttgtgcattgggtgggggggaaagcacc

SEQ ID NO: 179475 - DNA, 589 bp, Homo Sapiens
ctggcataaaataggcattcaaacattcctttagggctttacagtgcacacctgaggtttagagacagttcccccccacaccctcttgagccttgtccttcctggaatttttggccttcttgagagcttccttgattttcttatgacagccatgaagccacagtggcttttggggatccattaattcctcaaaaaggtgcttggaacggcaagaaaggttctaccagcctccaaccatctctgattgcccccttctcttccctcctgaccttcaagccagagaatctgctgtactacagcctgggatgaagactccaaaatcatgatctccgactttggcctctccaagatggaggacccgggcagtgtgctctccaccgcctgtggaactccgggatacgtgggtgcggacagccctgggctggggctgtgatggtggggggaaccaggagttgaagggcagagatttgtcaccaccacgtcctcttccctccacagcccctgaagtcctggcccagaagccctacagcaaggctgtggattgctggtccataggtgtcatcgcctacatcttgtaagtgggcttgct

SEQ ID NO: 179476 - DNA, 470 bp, Homo Sapiens
ggtggcaatcacagtctttaatcattaattgtcatatttctgatttgttagcaagtgccagcttgtaggctgtttgaagtacagaactcagaggaaaaaagaaattaaattttagctttctggagagcagcccctctctggcaccatcaaacacttctttgtttcccttcaacttggaactcttcaaacatcaggggttgtgagggtttggccattcttttatcttgggtccatgtgagtgacagaaatggtgcggcctggggaaagatctccctcctttacattttctcttctccctcctcctccttattctaaaactgtgcctccaacagaggggcaggggctcttgtaggagagatcccgggcccagggacagggagatgccaaatctaatttatcttcactgaggggcctttgagaaaaacgcttcaggggccagggttcagtgggctcatgcccattataaattt

SEQ ID NO: 179477 - DNA, 405 bp, Homo Sapiens
gataaattaagatttggccattctccctgtccccgggcccagggatctctcctacaagagccccctgccccctctgttggaggcacagttttagaataaggaggaggagggagaagagaaaatgtaaaggagggagatctttccccaggccgcaccatttctgtcactcacatggacccaagataaaagaatggccaaaccctcacaacccctgatgtttgaagagttccaagttgaagggaaacaaagaagtgtttgatggtgccagagaggggctgctctccagaaagctaaaatttaatttcttttttcctctgagttctgtacttcaaccagcctacaagctggcacttgctaacaaatcagaaatatgacaattaatgattaaagactgtgattgccacc

SEQ ID NO: 179478 - DNA, 475 bp, Homo Sapiens
  misc_feature (65)..(65): n is a, c, g, or t
aaccccctccccgctgggaaccgcgctttgcctttgtctgaacggaactctctcccagggaatgnccgccggggaggctcaaaagctgtgtcccttgcgaattagtttggtaaaacttggttcaagcaaccctggggaatgtggggaaaatgtgtgcctgccacagtatcaacgttatcagctgccctgttcatgtcgcctctccctgaaggacactttcataacacagtaacacttaggagaaggttcccctcctttacttctgtttctctgctgataaacaaatgtcaggcatcttcctggatccgggccctgattcactaagttactgtatatccattgcccttttttgtcctccaaacactgagctctcagtgctcttctggctggatccagattgtgaagattacagccccactggttcctttcaggacttgggggcccaacattccatctccagggcctcaaggagcct

SEQ ID NO: 179479 - DNA, 428 bp, Homo Sapiens
  misc_feature (95)..(198): n is a, c, g, or t
  misc_feature (226)..(234): n is a, c, g, or t
  misc_feature (417)..(417): n is a, c, g, or t
ctcccaccatcagctacagccaatttgtcagtcacgtgagtaaaccacctgggacgtgaatcctctcgacttaaccacctcttcaggtggccagnnnnnnnnnnnnnnnnnnnnnnnnnnnnnnnnnnnnnnnnnnnnnnnnnnnnnnnnnnnnnnnnnnnnnnnnnnnnnnnnnnnnnnnnnnnnnnnnnnnnnnnngagtctctagtcttcctagctccttaannnnnnnnnccttaggcacatattcactatttcatattaccatatttgtcatctattttctgggtttccctttcttcaggatggtaaggctaagttgggtgcagggggttttttgtctgtttccccaattgtcttggaaggagtgttctggattttacaggtagggacacttcccataaaattttgtccaangggattacacc

SEQ ID NO: 179480 - DNA, 400 bp, Homo Sapiens
  misc_feature (42)..(42): n is a, c, g, or t
ttaataaaaacccatgcccaatccgtctgccctttccccttntccctccctttaatctgggcgactgtttttggaaactggggtaaactccctgccaggcaggcagccaggagatatctcccaagtcaggctggcatggtggggtgctatcctctgtacaaccatgaggaagatgaggcaaataagatcaagagagcattttgtgaacaggcgatgacccagtttgtacctgtgctttgtggctagtgaaactgtacatctgaagctgtccaaactcccagacacaaggaatctcagttgcaactctactgtgatatattatatggcagtgattcttatttaggaaggactttgatttctccttggccatgggttcttgggttaaagggcctcggctgtg

SEQ ID NO: 179481 - DNA, 490 bp, Homo Sapiens
  misc_feature (437)..(437): n is a, c, g, or t
  misc_feature (451)..(451): n is a, c, g, or t
  misc_feature (475)..(475): n is a, c, g, or t
cctgaataagggacatgcaagggccagaagtagcttgactctcgcctaaatatctgtgcctttgcctgtcctttctcccactctactgaaacccggaacagattcccgcttgccttctgatgaagagaggttaggtaaagagagtttggaggaaaaaagacaccaggaggcaggctgcggggtaggagagggttctgagaggaggcagcaatccagaatacctccttttctagccagcatcccttgaacttttgaaaggttgtgcctaccactggctgggcacaccaggggcaatgatttccctggcagaagggaagggaaagaatgttttcacccttggcatccttcttgggagaagcttaccagcctgttgcttcagtttgagttggtttcacattcaggattttgggttttatgggttttccttcctccctgtnttttgccccgaacnttgatcaacaggggtgaaaaaggnccacctgagggtttc

SEQ ID NO: 179482 - DNA, 434 bp, Homo Sapiens
  misc_feature (17)..(17): n is a, c, g, or t
  misc_feature (180)..(180): n is a, c, g, or t
aacgggggtgaaaaganccaccctgaggtttcccatgccctctccccattttagtggtagcattttgtgtctttactcccacccttcacccctagttcccaccaaggttcacacacccagatgtaactgtttttccagcctgagttgtatggattaaccttcagtcccactgtaaatacncccgggatggggtggggttggggttgtttagggagaagcagcccagacttgcctttgtgaactgaatgtaattttatgcaattttgagtggcctttcaaccctaagatgaatggttttgttttactggttgttgttatatagttttgagtattctgtgtttgaaagtttgggaataataatattcacttctatatgatgcctgtaaacacaacagtatttataaatgagtaaataaaactgtgttttaactttg

SEQ ID NO: 179483 - DNA, 406 bp, Homo Sapiens
  misc_feature (48)..(49): n is a, c, g, or t
  misc_feature (51)..(51): n is a, c, g, or t
actgtacctgcgagcccccactggtgctggatggctcgcagcgccgcnngncttccaacgagagccagagcctcgatgacaatctgggagtgtgctggcaggaagtgggggctgacctcgtgtgcagccaccctcggctggaccgtcagccacctacacagagtgctgctgcctgtatggagaggcctggggcatggactgcgccctctgccctgcgcaggactcagatgacttcgagaccctgtgcaatgtgctacgcccccccgcatatagccccccgcgaccagggtggctttgggacttccccttacggagtacgggcccagacttagggtccacctttaccaggggccttcccattattggggccttgagtttgttacccaccaccttgcggtaaccctta

SEQ ID NO: 179484 - DNA, 380 bp, Homo Sapiens
  misc_feature (22)..(22): n is a, c, g, or t
tccagctcctcgtaaggctcanccagggaaccagcatagcttccaccttcaggaggctcctcgggctctgggaaggagcggcgggtgtcccgggaccgatagggcaagcgggtgcccgggccaggtggcgcaggagcctcagattcgccataggggccaccatcgtcctcaaagtctggcatgtcgaagcggggtgccccataaggaacctcccggcgggcgaagggcccaggtggcggtgggtaggggtcgtagggtagcgcaggtggtgggtacaaatcaggcccatatgggaggccctggtaaggtggacctaagtctgggccgtactcgtaggggagtccaaagccacctggtcgcggggggctatatgcgggggg

SEQ ID NO: 179485 - DNA, 390 bp, Homo Sapiens
  misc_feature (119)..(119): n is a, c, g, or t
  misc_feature (200)..(200): n is a, c, g, or t
  misc_feature (209)..(209): n is a, c, g, or t
  misc_feature (377)..(377): n is a, c, g, or t
ggaaccagaggtttgagaagccctgagtggtagagtaaggcctccagcgctgcctctgggtgcagggcagagtggcagaggagagggggagaggcactgggcaccatgggggccagttncccacttcggggatctctctcgcagaaccgagggtcccattcaacggggttagatgcccagggctagctgttgccacaganctgtaaagnaacctgagtcctgggacatgcccgagtgactcaggagtggctgcttgggcgggctctgtcaccctagagatgttatacattctgggaactgggacaggagtggctgcttgggcgggctctggcaccctggggatgttattacattcttggggaactggacaggaattngcttgctttgggt

SEQ ID NO: 179486 - DNA, 452 bp, Homo Sapiens
  misc_feature (11)..(11): n is a, c, g, or t
  misc_feature (433)..(433): n is a, c, g, or t
cgcggagacgnatcaacagtacctgacgcctctttcagccccggatcgccccaccagggaatgggcgacaagatctggctgcccttccccgtgctccttctggccgctctgcctccggtgctgctgcctggggggccggcttcacaccttccctcgatagcgacttcacctttacccttcccgccggccagaaggagtgcttctaccagcccatgcccctgaaggcctcgctgggagatcgagtaccaagttttagatgggagcaggattagatattgattttccatcttgcctctccagaagggcaaaaccttagtttttggaacaaaggaaaatcaggtggggagtttcacaatgtaggaggattgaagtttgggtggatttacatgtttctgcttttgaacaattacatttcaggcaccatttttgaggnagggtgaattttctttgga

SEQ ID NO: 179487 - DNA, 384 bp, Homo Sapiens
  misc_feature (22)..(22): n is a, c, g, or t
  misc_feature (29)..(29): n is a, c, g, or t
  misc_feature (40)..(40): n is a, c, g, or t
  misc_feature (55)..(55): n is a, c, g, or t
  misc_feature (92)..(92): n is a, c, g, or t
  misc_feature (150)..(150): n is a, c, g, or t
  misc_feature (259)..(259): n is a, c, g, or t
  misc_feature (352)..(352): n is a, c, g, or t
gcccagaagggagtgccttccnccccagncccatgccccntgaaggccctcgccnggagatcgagtacccaagttttagatggagcaggatnagatattgatttcccatcttgcctctccagaaggcaaaaccttagtttttgaacaaangaaaatcagatggagttcacactgtagagactgaagttggtgattacatgttctgctttgacaatacattcagcaccatttctgagaaggtgattttctttgaattaancctggataatatgggagaacaggcacaagaacaagaagattggaagaaatatattactggcacagatatattggatatgaaactggaagacancctggtcagtatggtcttctaataaaaataaa

SEQ ID NO: 179488 - DNA, 454 bp, Homo Sapiens
  misc_feature (16)..(16): n is a, c, g, or t
  misc_feature (31)..(31): n is a, c, g, or t
  misc_feature (45)..(45): n is a, c, g, or t
  misc_feature (50)..(50): n is a, c, g, or t
  misc_feature (59)..(59): n is a, c, g, or t
  misc_feature (66)..(66): n is a, c, g, or t
  misc_feature (81)..(113): n is a, c, g, or t
  misc_feature (167)..(167): n is a, c, g, or t
  misc_feature (441)..(441): n is a, c, g, or t
taaaaggggaaccagncggacaagaaacccnttagccaaagggcnagccncaccagggnaagtaanccggccgaccttgtnnnnnnnnnnnnnnnnnnnnnnnnnnnnnnnnntgaattgtatatttaatgaatgaacatgtacaatttgcccactgggaggaggtnccctttttgttgggtgagtctgcaagtgaatttcactgatgttgatattcattgtgtgtagttttatttcggtcccagccccgtttccttttattttggagctaatgccagctgcgtgtctagttttgagtgcagtaaaatagaatcagcaaatcactcttatttttcatccttttccggtattttttgggttgtttctgtgggagcagtgtacaccaactcttcctgtatattgcctttttgctggaaaatgttgtatgttgaataaaattanctataaaaattat

SEQ ID NO: 179489 - DNA, 448 bp, Homo Sapiens
  misc_feature (31)..(31): n is a, c, g, or t
  misc_feature (89)..(89): n is a, c, g, or t
  misc_feature (99)..(99): n is a, c, g, or t
  misc_feature (121)..(121): n is a, c, g, or t
  misc_feature (146)..(146): n is a, c, g, or t
  misc_feature (154)..(154): n is a, c, g, or t
  misc_feature (180)..(180): n is a, c, g, or t
  misc_feature (196)..(196): n is a, c, g, or t
  misc_feature (207)..(207): n is a, c, g, or t
  misc_feature (223)..(223): n is a, c, g, or t
  misc_feature (227)..(227): n is a, c, g, or t
  misc_feature (350)..(350): n is a, c, g, or t
  misc_feature (375)..(375): n is a, c, g, or t
  misc_feature (397)..(397): n is a, c, g, or t
cgctgctcagggcccattcactgccccaatnctgaaagccctctcaaaacaaacggggaaggtatcccaacctcaaatcatcattgtgnccccaggaanatggaaatacacccaaatgganagcccctggcatgtaccccacaganactgaaanttggtgcctggtggttgtggtggcanatgatattacctgaanaagggacgaangggtgctgggcagganaaancatcagctgtccagttcaggcctctcctctttccctggtgtcttcattttcctccgtctccctgctgtcccttaccctctgcccaatctctcattacccctggtcttgggagttgccttctgnggatactccactgggggtacctgancctggattagagggcagggggnggatattgcctagccaaagtgggtgttcaataaaaaaccatttggagatgg

SEQ ID NO: 179490 - DNA, 498 bp, Homo Sapiens
  misc_feature (403)..(403): n is a, c, g, or t
gttgggcttcacagtgtggccccacagcaccagttattgataaaaagagctcccctttgctgacagaactgctggatttggttctcattggtccagacgaggaaggtatccagcctcaagtcatcattgtggccaggaagatggaatacaccaaatggacaggcctggcatgtacccacagagactgagagttggtgctggtggttgtggtggcagatgatattacctgaagaagggacgaatgggtgctgggcaggacaaagcatcagctgtccagttcaggcctctcctctttccctgggtgtcttcattttcctccgtctccctgctgtcccttaccctctgcccaatctctcattactcctgggtcttggggagttgccttcttgaggatactccactngggggtacctgagcctgggattaggagggcagggggaggatattgccttagccaaagtggggtgtttcaataaaaaaccattttggagatggttg

SEQ ID NO: 179491 - DNA, 354 bp, Homo Sapiens
  misc_feature (246)..(246): n is a, c, g, or t
  misc_feature (262)..(262): n is a, c, g, or t
  misc_feature (265)..(265): n is a, c, g, or t
  misc_feature (335)..(335): n is a, c, g, or t
cccagcctccctgcctccatctccgtccagggcagccccgggccctgctccccactgctaagtgtgtctgctgagcgctggcccccattgagtcctgagggctggggcggggcggggttagtgaggtcagcgtcttgtccgagaggtccctgtgacagcccgggatgagccacgggtggagggcagtggggccttgccagggggaggaccccactcttcctgcagggacctcccctgcgccggctnccagtccctggcactncgnccacccagggctgttcagcttccaccttcagaggccggcccgggaaacccttccaaagccgagccggttncgcttgtgcacgcggttca

SEQ ID NO: 179492 - DNA, 408 bp, Homo Sapiens
attcggcacaggacggggcccggcttcccaaaccacccagcccacattcctccttcctgctccgaacaggtcccgtgtgagcccctgcccccgaattgcgtgctgtcccatggacgctccagtctcttccgtgtgtgtcttgagtccctaactagacagttagctccctgagggcaagggactgtcatttcctcttgagtcctaccagggtctagcacaggactgggctcctaactctcaggaaacacttgtcggctgactggtgcctcaagcgctgggagcttgtcggtgggccggtaatggggcagtgcacgtgggggagagggtatgttgagttaactcaagggtgcctttcttggggctgtggggttggttccctgggggtcaaaagtgggatgttcggaaggc

SEQ ID NO: 179493 - DNA, 524 bp, Homo Sapiens
attaatttcaaccagacaggatgaaacagagtagcaatgatggtttccattctttgacttcctttctgttataaaataacaacatggttcaaggagctatgtctgggacattaacaaagccaaaatcttgattagcaagatgtaatgttgaaagtactggttccaagcttcctgaaataatggagagatgataaaatagaaagtttaatagaaaagtataattaatggtaagaatagcagtttacatttcttgattattaatcaatgccaaggatgtatattcagtctagaatttacagccctcaatatcttaaactcaccctacctttcaccctacctcaccctatcctacctcaccctaccttatgtctcaacagattcccctccccatagctaaaccttccacgcgcagggttctggccagccttgactattcatctttcccacactattcaatattttctggatttcatatatcaattatgcctcctccttgctttctttttctattttgttaaaattct

SEQ ID NO: 179494 - DNA, 279 bp, Homo Sapiens
  misc_feature (80)..(80): n is a, c, g, or t
  misc_feature (88)..(88): n is a, c, g, or t
tccatatttgaacaccagctgattgagagaaggggaatgagaagagctggatgagtttaaataactttcattgttcagantcctgaanaggagttgggataatggccatcttttctttcctatcctttcttcccccctcactgtgaaaaataacagtccaccccaagtcatacactggacccagtgctgcggggacaggactgtgggtttcttggtcacacctgtgttggtgctcaatgcagtgtagacatgttttcaaataaaacaaataaaatgtgt

SEQ ID NO: 179495 - DNA, 414 bp, Homo Sapiens
  misc_feature (37)..(37): n is a, c, g, or t
  misc_feature (118)..(118): n is a, c, g, or t
  misc_feature (206)..(206): n is a, c, g, or t
  misc_feature (212)..(212): n is a, c, g, or t
  misc_feature (218)..(218): n is a, c, g, or t
  misc_feature (264)..(264): n is a, c, g, or t
  misc_feature (340)..(340): n is a, c, g, or t
cctaagtgacctgcccctaaggaatgaaaagcaaggnccccggtgggagtacccccaccgaaggcacttgggctcccccggaacaggaggccgtgggaaactctggcttaggaaaacntgaacacaggggcaacagaggcaaactgttgttcgagttaaatataaatctcaggctctttaaaggtaaaaggtttaaggataatccntttggnagaagnaaagagtgaggctgaaagtaaagccacatgacaagcatataaaaanaaatgcagatgatacaaatatgaaagaggccttcagtgtttgtttattaagaatcttaatgcagtttactgatggnttaaaaacagctaacattgtctgaaaattttgttacctatgagaagttggaaataaataaaagcaaaataaact

SEQ ID NO: 179496 - DNA, 393 bp, Homo Sapiens
  misc_feature (72)..(72): n is a, c, g, or t
  misc_feature (365)..(365): n is a, c, g, or t
gcaagttaaagcatttttatattcccaactagtaagtgtgccctcacagccgtcgtcctcgtggccccgggncaggtgaagggtgggcacagggtctggggccaggcgggtcccaaggaaactcaagctcagaggctgggaaagttggggcagcccccgggaggcggcccaggggctggggggttctggctgcagacgcagtggccatgtctctgtcgtcctggcctcctggtcagtaagggggcattgggattccagcccacaccgccagggtttcagtccctgagctgggctccatgctagggggagcacgggggcctgggagaacggcttcagaccttcagcagtggcttcccagggacttnaaaaggggagaaaggaagattccctgcc

SEQ ID NO: 179497 - DNA, 869 bp, Homo Sapiens
  misc_feature (353)..(416): n is a, c, g, or t
  misc_feature (515)..(593): n is a, c, g, or t
  misc_feature (622)..(683): n is a, c, g, or t
  misc_feature (740)..(748): n is a, c, g, or t
ctgactcctgcccagcagtatgtcttatggcacgaaggttatgcagtgccacaggccgggggctgtcccagacctctgtcttcagttatgtggttcctctgctcagggcctgagattccactttgttatattcagatccatcagctgagaaatttttcaacagaatgtttaactggtttttaagatttaatctctcagtagcattacggaacaaactctttagattcaaactggggcccgagatcaggcccccctcaactgaagcatcgggacactaaattttttcaaatcgacccctttttcttctgggaatactagagacatccccacagccctctgttgcttccttctcnnnnnnnnnnnnnnnnnnnnnnnnnnnnnnnnnnnnnnnnnnnnnnnnnnnnnnnnnnnnnnnnttcccaattttcctctcttgccaaaaaagtatataatccaaggctgggttgtatgggaacttgatttccctaattacggtggcttttgggttctatacnnnnnnnnnnnnnnnnnnnnnnnnnnnnnnnnnnnnnnnnnnnnnnnnnnnnnnnnnnnnnnnnnnnnnnnnnnnnnnngctgtggctgggcatggtggctcacactnnnnnnnnnnnnnnnnnnnnnnnnnnnnnnnnnnnnnnnnnnnnnnnnnnnnnnnnnnnnnntgcagtgagccatggtcatgctactgaactccagtctaggcaacagggagacccttnnnnnnnnnttaaagccaggtgtagtggcatatgcctataatcccagctgcttgggaggttgaggggaaggattgtttgagcccaggagtttgggtctagcctccgcaacataacgaaatgcaagctctt

SEQ ID NO: 179498 - DNA, 852 bp, Homo Sapiens
  misc_feature (100)..(108): n is a, c, g, or t
  misc_feature (165)..(226): n is a, c, g, or t
  misc_feature (437)..(500): n is a, c, g, or t
tgcggaggctagacccaaactcctgggctcaaacaatccttcccctcaacctcccaagcagctgggattataggcatatgccactacacctggctttaannnnnnnnnaagggtctccctgttgcctagactggagttcagtagcatgaccatggctcactgcannnnnnnnnnnnnnnnnnnnnnnnnnnnnnnnnnnnnnnnnnnnnnnnnnnnnnnnnnnnnnagtgtgagccaccatgcccagccacagctttaactttttaagtacggctactagtaaaacttacactgcacatgtgggcttgcattatatttacatgggaacagtgctgggtatagaacccaaaagccaccgtaattagggggaaatcaagtttcccatacaacccagccttggattatatacttttttggcagagaggaaaattgggaannnnnnnnnnnnnnnnnnnnnnnnnnnnnnnnnnnnnnnnnnnnnnnnnnnnnnnnnnnnnnnngagaaggaagcaacagagggctgtggggatgtctctagtattcccagaagaaaaaggggtcgatttgaaaaaatttagtgtcccgatgcttcagttgaggggggcctgatctcgggccccagtttgaatctaaagagtttgttccgtaatgctactgagagattaaatcttaaaaaccagttaaacattctgttgaaaaatttctcagctgatggatctgaatataacaaagtggaatctcaggccctgagcagaggaaccacataactgaagacagaggtctgggacagccccccgcctgtggcactgcataaccttcgtgccataagacatactgctgggcaggagtcag

SEQ ID NO: 179499 - DNA, 404 bp, Homo Sapiens
  misc_feature (380)..(380): n is a, c, g, or t
  misc_feature (390)..(390): n is a, c, g, or t
ctgactcctgcccagcagtatgtcttatggcacgaaggttatgcaagtgccacaggcgggggctgtcccagacctctgtcttcagttatgtggttcctctgctcagggcctgagattccactttgttatattcagatccatcagctgagaaatttttcaacagaatgtttaactgggtttttaagatttaatctctcagtagcattacggaacaaactctttagattcaaactggggcccgagatcaggcccccctcaactgaagcatcgggacactaaattttttcaaatcgacccctttttcttctgggaatactagagacatccccacagccctctgttgcttccttctcccttgggcctcccccttcttccctctnttcttccttncctgtgcctgtctt

SEQ ID NO: 179500 - DNA, 869 bp, Homo Sapiens
  misc_feature (353)..(416): n is a, c, g, or t
  misc_feature (515)..(593): n is a, c, g, or t
  misc_feature (622)..(683): n is a, c, g, or t
  misc_feature (740)..(748): n is a, c, g, or t
ctgactcctgcccagcagtatgtcttatggcacgaaggttatgcagtgccacaggccgggggctgtcccagacctctgtcttcagttatgtggttcctctgctcagggcctgagattccactttgttatattcagatccatcagctgagaaatttttcaacagaatgtttaactggtttttaagatttaatctctcagtagcattacggaacaaactctttagattcaaactggggcccgagatcaggcccccctcaactgaagcatcgggacactaaattttttcaaatcgacccctttttcttctgggaatactagagacatccccacagccctctgttgcttccttctcnnnnnnnnnnnnnnnnnnnnnnnnnnnnnnnnnnnnnnnnnnnnnnnnnnnnnnnnnnnnnnnnttcccaattttcctctcttgccaaaaaagtatataatccaaggctgggttgtatgggaacttgatttccctaattacggtggcttttgggttctatacnnnnnnnnnnnnnnnnnnnnnnnnnnnnnnnnnnnnnnnnnnnnnnnnnnnnnnnnnnnnnnnnnnnnnnnnnnnnnnngctgtggctgggcatggtggctcacactnnnnnnnnnnnnnnnnnnnnnnnnnnnnnnnnnnnnnnnnnnnnnnnnnnnnnnnnnnnnnntgcagtgagccatggtcatgctactgaactccagtctaggcaacagggagacccttnnnnnnnnnttaaagccaggtgtagtggcatatgcctataatcccagctgcttgggaggttgaggggaaggattgtttgagcccaggagtttgggtctagcctccgcaacataacaaaaagcaagctctt

SEQ ID NO: 179501 - DNA, 482 bp, Homo Sapiens
  misc_feature (338)..(338): n is a, c, g, or t
  misc_feature (353)..(353): n is a, c, g, or t
  misc_feature (388)..(388): n is a, c, g, or t
  misc_feature (415)..(415): n is a, c, g, or t
aattccttcagctcaaaatattcaatatgctggggtgccatattttcaagtagcatgtcctgaaccctgtgatagttataaaaaagaataaaagattgagatgtatatttcttggcagggacagtatgagcaaaaccaagagctggccatgagtgtgggacacttagggagttctttggagagcaaatagtaaattcaatggctgttgagtcagtgaggagaatggattgactcaggagcaaatggtttcactttaattggacagtctatcccacccttccagggactgtttcagtatgaaagaattttattgtcatgtgaagagtgaaaacaaactngaattttccaattanaaatgggagagactatgatgtccagtattttgccntgcccagcccagtccccctaacggaantcactgttcagggtccgtttacccggtttcagacccagggaggagcccccagacacaggtgatgttt

SEQ ID NO: 179502 - DNA, 893 bp, Homo Sapiens
aattccttcagctcaaaatattcaatatgctggggtgccatattttcaagtagcatgtcctgaaccctgtgatagttataaaaaagaataaaagattgagatgtatatttcttggcagggacagtatgagcaaaaccaagagctggccatgagtgtgggacacttagggagttctttggagagcaaatagtaaattcaatggctgttgagtcagtgaggagaatggattgactcaggagcaaatggtttcactttaattggacagtctatcccacccttccaggactgtttcagtatgaaagaattttattgtcatgtgaagagtgaaaacaaactgaattttcaattaaaatggagagactatatgtcagtatttgcctgccagccagtcccctaacgaaatcactgtcaggatcgattaccagcttcagaccaaggaagagccccagacacagatgatgtttctccaggtggcacgttctaagcatgccccacatcagttctgatttgaacacataaatatcatctccctcttggctccgaaaccctccttcatcactgtgtgccaagcaaggtttgtgagcgtcatgccagtcatcttggcagctctggtgaatggtgctgaatatgaattcctacacttcagagtctctaccctttgatgtagacagcgcatgtttccaagttaatccaaggttgtgcaggagtgcagcccagaaccctaaaatggatggaaactgaaacttcagctgttatctgttgttatacaaaacatggactgctagtccaagtctttacttccatatgtggctagctgaggtgagcgacacagcagagactctctacaaaacccggtaactaaagtaaattcatttttcttttcctataaaaaa

SEQ ID NO: 179503 - DNA, 219 bp, Homo Sapiens
  misc_feature (22)..(22): n is a, c, g, or t
  misc_feature (62)..(62): n is a, c, g, or t
  misc_feature (136)..(136): n is a, c, g, or t
aaaaaatttgccactgttggcncctattgtttcaaaaacccaaaaacaaccatattaacccnactacccacccagcaacctcccccccacatatttagacccagcagtccgggttttgccccagtgagctcccttnccctactttgcaatgtaaaggtccaggttcctcatgagatctctggcaggctggtgttggccccaggcgccatggctcacaca

SEQ ID NO: 179504 - DNA, 481 bp, Homo Sapiens
  misc_feature (20)..(20): n is a, c, g, or t
  misc_feature (28)..(28): n is a, c, g, or t
  misc_feature (42)..(42): n is a, c, g, or t
ttgccaaaagtaggaaaggnacctcacnggggcaaaaccccnagaactgccgggtccaaaaaaaggtgggggggaaggtgctgggtgggtagtggaaataaatatgcctgtttttgggtttttgaaaacaatagagcccaacagtgcaaaattcctataggaaggaggtaccctaactagaaatgtgaggcagaatatctagaagtaaattttcaaatatgcgtaaagcaaaagtaaacaaggtgttgtgtttttaagttaatggttgaaggtggcatctcaacttatagccaaaagcaataaaactgatgccatttagagctccattttcaactattctcttctcactccttataattaatctgacacaaaccctgctatcttcccagtgtaatctggcttccttccatttccaccaccactctgataggtactggcccacgttagatctactacagcttctctaattaaaaattaactc

SEQ ID NO: 179505 - DNA, 528 bp, Homo Sapiens
tgtgtgagccatggcgcctgggcccaacaccagcctgccagagatctcatgagaacctgacctttacattgcaaagtaggaaaggagctcactgggcaaaacccagactgctggtctaaatatgtggggggaggtgctggtggtagtggaataatatgcttgtttttggtttttgaaacaatagagccaacagtgcaaaattctataggaaggaggtatcctaactagaaatgtgaggcagaatatctagaagtaaattttcaaatatgcgtaaagcaaaagtaaacaaggtgttgtgtttttaagttaatggttgaaggtggcatctcaacttatagccaaaagcaataaaactgatgccatttagagctccattttcaactattctcttctcactccttataattaatctgacacaaaccctgctatcttcccagtgtaatctggcttccttccatttccaccaccactctgataggtactggcccacgttagatctactacagcttctctaattaaaaattaact

SEQ ID NO: 179506 - DNA, 464 bp, Homo Sapiens
aaaaatgtattgtactcaggagacggacaccctaaataacctgacttgatcactatgcattatgtatatgtaacaaaacttcctcatgtgggtcattaaatgtggtttgaatatttgtcacctccaaatcttatgttgaaatgtgattttcaatgttggagatggagcctagcggaaggtgtttgggttatgggggcagatccttcacgaatggcttgctgctctccccacagtaatgagtgagttcttgctctgtgaggtcatgtgagatcttgtttgaaaaggagcctgacacatctctctctctcttattgtctcaccatgtgatacgcctgctcctccttcaccttctgttatgattgtaagcttctgaggcctcaccagaagatgaacaaatgttggtgccatgattgtacagcctgaagaaccatgagccaaaataaacgtcttttataaataaataa

SEQ ID NO: 179507 - DNA, 998 bp, Homo Sapiens
  misc_feature (788)..(796): n is a, c, g, or t
  misc_feature (837)..(918): n is a, c, g, or t
gcataagccaccgtgccctgccattgttaatattaaatgtacttcactgaatcctaattttttggaaaactgatcagaagtcactatctatgtatcacatatgcatatataaatatccacaatcaccataatttgtgtattttactaaccagtttaatacagttttctggctgtatgagagtcaaaaatcacataaaaagcttcataaacatatcaaaataatcttttgattgcattaggggaacgtaaataaaagagttccgggagatattaagaaattcctggagactcccttctgggaaaagcacagaatagtagaaaaggcagtggggctatgagttaggtgctggagttctagtcttggctccctaactactggcttgacagcaacttgaacatattacaaatctctttaagctttagttttctctctataaaatgaagaatgcagatttagggaactctattagtcccccagcacaatgtttctagattctgaaactattactatgtgagtaattctattcaattaattttatttacaaatgggttctaacagtcattacttcttctccatgactaatttggttatggtcttgacacttgttttccttaaggacccaagtagcctcaatgatttcagactattcaccaactcatcttcctgctacttctctttcatcttcaaatgttcaaaaattgaatacactgtttatgaaatagcagcaattctacccagctctcaatatgctccataatttcgcctaacttttctaatccatcccttnnnnnnnnngggaaggaaggattagatggaaaaacagggacttaagagannnnnnnnnnnnnnnnnnnnnnnnnnnnnnnnnnnnnnnnnnnnnnnnnnnnnnnnnnnnnnnnnnnnnnnnnnnnnnnnnnattatatcatcacatttttgtgtaatatatcacagaccaaggacccaggctataagaatttgttaagatttggtaacctt

SEQ ID NO: 179508 - DNA, 939 bp, Homo Sapiens
aattcggaacgagggggagaactggctcacatgattacgagcagaaatcccacaacaggctcttggcaagctggggaaagacagaagcccgtagtgtgactcagtccaagtctaaaagcctcaaaaccagagaagccgactgcgtaggtctcggtcttaggatgaagccctgtaatcctccaggaggccgctggtgcaagtcccagagtccaaaggccaaagaccaggaagtctgatgtccaagggcaggaggagaggaaggaagcatccagcacgggaagacagagagagtgatgagcaagctgctcacccttttctcttctgcttgctttgttctggcctcactggcagctgatgggatggtactgcccacattcagggtgtgtcttcttctcttagttcacggacccaaatgtcaatctcctttgacaacaccctcacagacacgcccagaaacaatcctttaccagccatctaggcattcctccgtctagtgatgttcacacctcatattaaccatcacaatacactttgtgtatagccagaaggtggtctaggcagcaatagatgtaatgttttaattacatacattaattgtaatgtgaactcttggtaactcttatttttattgaagaatctaggaggtaaacagttttaattatgcaccagatgcgtatcccaggatgaagggcaatgcctggggttagtccaaaggcttgattctcaagacacataggtttacagatgagataagcaagctttaaaagtattacagaagcaaacttttttatcctaatacatctagcagacaatagtatctgacctgcttgactaattcagcccagatatctaaattaagttttgaagacatttctattttaccaataatttttaaactgtctctagcaaagattattaaagtcacataaagtgaatgct

SEQ ID NO: 179509 - DNA, 572 bp, Homo Sapiens
ttgcattctctaacaatgtatggaatgcaaacttgttgtattggtagatgcttggttgcaatccttggtaaaagtagcatattgtgaatttcaacaattcccaacaagtttgaaattaaacttgtcaataattgagcccattatcctccctaccacgtttcagttatttccatcaccaccatcctccagtatttcaggtccaggacattaaaattatttctgacacctcttctgttgcccacttgcagtctgttactgattcttactgactgaccacattttattctcttgacacagtatcatctgaaactctgaagtagattaatcaacttgtattcctctgttctctaaacaatctaaccttaaaaagtaagaattatcttaaagcatcttcttaaagactatgctcagaaatttaaggttactttcaattgcctgcaacttgtatccccagcaatgatctttattaattctcaaacattgtgagagccaagtaaaccagatttctgttccatgctcacctctgcctgtttctacttgccctcctctgtccgtaatcaacttatttttct

SEQ ID NO: 179510 - DNA, 383 bp, Homo Sapiens
  misc_feature (354)..(354): n is a, c, g, or t
gttgtattggtagattcttggttgcaatccttggtaaaagtagcatattgtgaatttcaacaattcccaacaagtttgaaattaaacttgtcaataattgagcccattatcctccctaccacgtttcagttatttccatcaccaccatcctccagtatttcaggtccagggacattaaaattatttctgacacctcttctgttgcccacttgcaggtctgttactgattcttactgactgaccacattttattctcttgacacaggtatcatctggaaactctggaaggtagggattaatcaacttggtattcctctggttctctaaacaatctaacccttaaaaggtaagggntttatcttaaagggcatccttccttaaag

SEQ ID NO: 179511 - DNA, 372 bp, Homo Sapiens
ccagttgttccacccacgtgttaatcccaagtttaagattcccctagttggataatccacacccagatcaggctttaaaagatagacccaaactagaccagaatgtgtacatttcagcagatcagcaattgcaaaatgctggtgctatttactgacgtagcactggatccaaggactccgtggatataaatatttccagattcctctgcattttaacaataacaagaatggtcagacggagacacatggttacagcatataatatcgatccaatggtccagtgttagttacaaatcagtttatacagttttgctccattttctatgaattttgtctttcaaataatcttttatagaatgtatattcaaaaac

SEQ ID NO: 179512 - DNA, 410 bp, Homo Sapiens
  misc_feature (24)..(24): n is a, c, g, or t
  misc_feature (54)..(54): n is a, c, g, or t
  misc_feature (87)..(87): n is a, c, g, or t
  misc_feature (224)..(224): n is a, c, g, or t
  misc_feature (381)..(381): n is a, c, g, or t
aacctggtcaacaattcccgaaanacataaaaactgaggctgttgtcccccaantgcggcaagaaaaaatcaaccctcgtccctcangctggaatcccagtgatggtcagggaggctgtgtctcccgaccctggatgccagaagaatctctctgaaaatccctgaagggccgcttgttattcctgtaggacacgagtttgggagggtggccttggtcctgcctnagccaagctgctccttggttgccaacattgttgctgtccccagtgcaggtgagtgtggcggtctgtcccaggcccttggacaccgagggtggctgagtcagccctgcctggaccagtgacactgcagagtgagtgaggagggtcaggaggagcaganccagggcatggtgcagattcccactatgc

SEQ ID NO: 179513 - DNA, 462 bp, Homo Sapiens
  misc_feature (70)..(70): n is a, c, g, or t
ttgtcccccctcgtcctttcctgggggtgggaaggaaatgtcccgaattgcctgcggcctgaaatcccangcccggccgaatgaagggtcgccttgaaatttgcccagcaaaagtctcccgctcgggcacttgcaagcaggacatgatccggatgaaggcccgacgcatctccttgttggtcagagtgtaaatgatggggttggtgccggagttgagcacagctaacacccaggaagtactccgctctgaagaggatgtcacaggtcttcaccttgcagcccacatccagcaggagcaggatgaagagcggtgcccagcaggcgatgaagacgctcaggacgataattacggtcttgagcagcgccagcgacttctcagagctgcggctggccttggaaatgttcttgcggaacgtcaggcggcggctccgagtcctgaccaaggagtagattctgccctgt

SEQ ID NO: 179514 - DNA, 566 bp, Homo Sapiens
  misc_feature (16)..(16): n is a, c, g, or t
  misc_feature (168)..(168): n is a, c, g, or t
  misc_feature (345)..(345): n is a, c, g, or t
  misc_feature (427)..(427): n is a, c, g, or t
  misc_feature (448)..(448): n is a, c, g, or t
  misc_feature (458)..(458): n is a, c, g, or t
  misc_feature (480)..(480): n is a, c, g, or t
  misc_feature (508)..(508): n is a, c, g, or t
atgtggaagaccaccnacagatacgtgcagcagaaacgcttgaaagcagctgaagctgagagcaagttaaagcaagtttatattcccaactataacaagccaaatccgaaccaaatcagcgtcaacaacgtcaaggccggtgtggtgaacggcacgggggcgccgggncagagcctggggtggccgggcctgcgagactgttacatgtcgtctctgcgcatcttgttggacatattggaagaaatatggtggcttgaaaatgccaacccggttagatggagagaggccaggaccaaaccgcagtaacatgagtccccacggcctcccagcccggagcagcgggancccaagtttgccatgaagaccagggcaggctttctatctgcacacgacgaagctgacgcgggatcgcccggcgcctgtgccntggagatcctgcgcccgtggnacgcttgcgnggcacccctaccttgcccattnaacagcgcggccattcaagggcaggttngcacggcgcgggtttccccgaagcctttccagagcccgttggttgttgaaggagggcg

SEQ ID NO: 179515 - DNA, 449 bp, Homo Sapiens
  misc_feature (85)..(85): n is a, c, g, or t
  misc_feature (87)..(87): n is a, c, g, or t
  misc_feature (410)..(410): n is a, c, g, or t
  misc_feature (430)..(430): n is a, c, g, or t
attcggcacaggggtgtgccccgccattccagggcacttactgtaacagctctcgcaggcccggccagccccaggctctggccgncngcccccgtgccgttcaccacaccggccttgacgttgttgacgctgatttggttcggatttggcttgttacttaaagagggaaaggagagacgagaggagttgcaggagcacaaacctcgagggcccatgtgccagcaggcaccgcggctgaccaccccttgtccagaaccacgtcctcgcacccctcggcctcggcagggatcttcctttctcccctttcagttcctggggagccactgctgaggtctgagcccttctccagggcccccgtgcttccccctagcatgggagcccagctcaggggactgaacctgggcggtgtngggttggaattcccaatggnccctttattgaaccaagga

SEQ ID NO: 179516 - DNA, 406 bp, Homo Sapiens
cgttggtttccgcaacttcctggattatcctcgccaaggactttgcaatatatttttccgccttttctggaaggatttcgctgcttcccgaagtcttggacgagcgctctagctctgtgggaaggttttgggctctctggctcggattttgcaatttctccctggggactgccgtggagccgcatccactgtggattataattgcaacatgacgctgggaagagctcgtgggcgtgcgacaacgcgggcgcagaaggatgcagacggtgaccgccgcggtgggagggagcttttggtgggccgctcagcgccaaggatccgccttcacagtggggggtgtacgagtccggccaagtttgatgaatgttggacccagacagcttggtcctttgccttttgggccatt

SEQ ID NO: 179517 - DNA, 491 bp, Homo Sapiens
  misc_feature (29)..(29): n is a, c, g, or t
  misc_feature (43)..(43): n is a, c, g, or t
  misc_feature (149)..(149): n is a, c, g, or t
  misc_feature (164)..(164): n is a, c, g, or t
atttgggccatttaaggaacatggcaagnacttcctgaaaaanactgtatttgcaaaacccatagctgtgggtccacatttcctatgtgtgtcccagtgcccctgttgttgaactttcacccacctctgctggcaacagctggagcccnaaagacctccctcanaccttgccctgggaataagggtgggcatattctttcaaaatgagaagtgacagctgtgaagaataggcctcttccaaattttccatgttgggaagaaacattagctcctcagggggtgcgtgaggtgtctgaaggaggttctctgctccatgaggtcagtgcagagcagtgggcatgccacagtagcaatgctgtgtgggttactgtttgtggacaaagggccattcagtttcttaatatagtcatatgtcatctttaccattaagcccttgtttctctttcatatttcatctacaaaacagcacttaaaagctctcgttccgaatt

SEQ ID NO: 179518 - DNA, 330 bp, Homo Sapiens
  misc_feature (283)..(283): n is a, c, g, or t
gtgagagtggtattcataactgcctccccgattttatctgtcagaatactctgggatccttccgctgccgacccaagctacagtgcaagagtggctttatacaagatgctctaggcaactgtattgatatcaatgagtgtttgagtatcagtgccccgtgccctatcgggattacatgcatcaacacagagggctcctacacgtgccagaagaacgtgcccaactgtggccgtggctaccatctcaacgaggagggaacgcgctgtgttgatgtggacgagtncgcgccacctgctgagccctgtgggaagggacatcgctgcgtgaact

SEQ ID NO: 179519 - DNA, 397 bp, Homo Sapiens
  misc_feature (95)..(95): n is a, c, g, or t
  misc_feature (348)..(348): n is a, c, g, or t
  misc_feature (376)..(376): n is a, c, g, or t
gggtgttcttgacatcagtctcggccagaaggaggacggagagccgtcttggcaagaagcgaaggtctcgtggtttggttctccgactacgtctntcttgtctatttcaaaactctcccctttctctgaatttttcaaactgagatttaatcgtaagaagaaggggatgtatcggaaagctataaccgaggctgcaaatgccgcaagacacgtggccccggaaatcagggagctcttaacccagtttgaaacgtaactggttccctgaccaggtcaccgacgatgagggcgcacctgctgtcctgggagcttccgatctctgttccggggaccctgtgagcctttctngccggctgcgtgcaaagcccactgggancgggtggttcggcctgggtgt

SEQ ID NO: 179520 - DNA, 391 bp, Homo Sapiens
  misc_feature (318)..(318): n is a, c, g, or t
  misc_feature (327)..(327): n is a, c, g, or t
attcggcacaggggaggtagagagcccccacataccactgtattccccgccaccatggatgacgtccccgccccaacccctgcaccagcaccgcccgccgctgccgcccccagggtcccgtttcactgcagtgaatgtggcaagagcttccgctaccgctcagacctgcggcgccactttgcccggcacacagcgctcaagccccacgcatgtccgcgctggcagagggtttcaagcacagcttcaacctagccaaccacctgcgctcgcacaccggggagcggccctaccgctgactctgcctgccccaaggggttnccgcgactncaacggcctgctgcaacaccaaggttgttcaaaatggtgagaaaactaattgttgctgggtttt

SEQ ID NO: 179521 - DNA, 466 bp, Homo Sapiens
  misc_feature (51)..(51): n is a, c, g, or t
  misc_feature (454)..(454): n is a, c, g, or t
atccccaacaagggtgttaatccattaccccaaatctcgctgttccccccntcaccccctgccagaatcccagcaggtcctaaaatacgtgcctctttgaaaatgtgttactgggattcaaaaatggtgccctgaaggctgtcctaaccctcacaaaagacagacacatgccacacacgggccttggggagggctgtgtattagcagtcaggtgggccctccctgggagagcttgctcaagaactcttctcggaaggaaacccaccttaaggtagggttctgataggcagagcctcccagaggggacagccagctgctagaagatggggttatccagggtttgtaaggtttaaacaacgggcagggaggcaaaccgagtcaaatggtttggaaacctactgtgtgcagggcattctgagggaatcctgaactctgcctctttggcatgacccanaagtgaagccag

SEQ ID NO: 179522 - DNA, 467 bp, Homo Sapiens
  misc_feature (52)..(52): n is a, c, g, or t
  misc_feature (62)..(62): n is a, c, g, or t
  misc_feature (146)..(146): n is a, c, g, or t
gttcaaaagcccaaaggggtgcaacggaatttgcaaaaatctgaaaacttgncaacatcaancaacaaggaaaaattaaggggttcaaggtgaaaaaccctggctcctggtgcctcaagtcccctgccgtgggcccccctggtgantcactgcctctcttggggcctccgtttcctcatctgtgaaatggatggagacacttagagaatcactgcctaagccccccgctccccttatgcctgtaacagaatctcatccatctggacagccacatttcccagcctcccctgcagcaaggtatggccatttcgctctgttctggccagtgggatataaaaagaagggtttcgaggcttcctgggaagacttccaggagacacctagccagcgctggcctctgactttccctcagaatgaggaggtgaaggctggagctctggcaattattttgtgccacgaggcaaccc

SEQ ID NO: 179523 - DNA, 459 bp, Homo Sapiens
  misc_feature (35)..(35): n is a, c, g, or t
  misc_feature (99)..(99): n is a, c, g, or t
  misc_feature (219)..(219): n is a, c, g, or t
  misc_feature (310)..(310): n is a, c, g, or t
  misc_feature (343)..(343): n is a, c, g, or t
  misc_feature (409)..(409): n is a, c, g, or t
  misc_feature (416)..(416): n is a, c, g, or t
agtgaatatcagagtttacttgtgggttgtgcaanacaggagacctttggagacccctctgttatttccttgagccccagaaactacccatgcctacancccaaaagcagcagcagcatgagaacgattaacacacattgaggacctattgtgtgggggtccccggaatgcctcacatgaagtcatgtgtcttgtcagagcccttggagacagggccanttcgtgtccccatattacagatgaggaaactgaggcacaaagcagctaagccctcagccatggggtccacagccagggaaccggggtccanctttccagccgtgcccctggggcctggggctgntccaagtttgggcacacatgggttttgaaatttttcacagcccgagggggttgcagcgggtttttncagagtntgagatttgcacatcagcagctgggggttttggggtttcaggt

SEQ ID NO: 179524 - DNA, 463 bp, Homo Sapiens
  misc_feature (334)..(334): n is a, c, g, or t
  misc_feature (406)..(406): n is a, c, g, or t
  misc_feature (432)..(432): n is a, c, g, or t
tgaatctgcttgctgctgcttcagtgtggtggccatcatgctgtgtgacaaaccaggctgttcacagcttcctcagccccccagaagggaagatgtcaggaagagacatttagttcatttgcctgcaaattttcttctcctgcaaggatctcggtggactcagtcacaaaacaaaggctaaaccaggatttataagagagggcttataaatccctctgccgacgcagggagcagagacttgccggcatgttttgggggtaatgatcgtgggcagggagcagaggtccgctgaggcagtctgtccttgagactaacaaagtcatctgtctgtttnggggaaatctctggtgttggggaacaggcccccaaatctgggccataaactgggccccaaaactgggccttnaacaaattttttgcagcatgtggacngtttgtgctcgccctgacccccacctgaagg

SEQ ID NO: 179525 - DNA, 547 bp, Homo Sapiens
gtagcaaagagtttaataataatagggcatcaagcaagtagaagggaggagaccttcaaatccatctccctgaggagttctgggctggagttttgtaggaatcatggagggaaaggggctgtgtagatttggggttgttgattggtcgggttaagggggatgaaatcatcaggatgcattttttggtgagtcagtttcttgtggcgtcctttggacaacagctgatgtcagtagggtccttcaggcaagttgtgatcagcagggtccttcagaccagccagtgccagtggggtccttcagaccagctgagtcagcagtttcatcagtacacagtatctgaaagaatatcattctggaggctagaaatccacaattaagatctggaagagtttgtttccggtgaaagccctcttcttggcttgcagattgccaccttctcaccaggtcatcacatggccttttctcgttccacaggctgtttgggaagcatggctgaggaggcctcggggaacttacaatcatggcagaaggcaatggggaagcagga

SEQ ID NO: 179526 - DNA, 417 bp, Homo Sapiens
aaaaataatggaaacagtaacgagctttggcggcccatggaaggagaggcggatgtcagccgcaccagcctgcacctcttggaaggtcaaaggaagccacattgctccagtccctggaaaggcttgaacgcagggctgcccgggctgtgtggggtggaagggtggagggcaggttcaagatgcggaaagtcaggtgcttctttctccagcggcccagcaacaggtatttaagggtcttctggttgaagggatcctctaggccacaacgaggctgcctcatgcgggcccttgtggcatcatccagctgacctgagactggaagttcagatgcttcctgaaaagctctcagagcctcggtgatatcttctggcttgaagttattagatccttctagaggcttctgtaggtacccatatt

SEQ ID NO: 179527 - DNA, 462 bp, Homo Sapiens
  misc_feature (12)..(12): n is a, c, g, or t
ttgcctcggaantttgggaaaaatcctatcaagaacctcaaaatttaacccaaggctcggtaacaggtcccagcccttggaacaatgccgcccagtgaaccccaagtgcctcggaaaaggactcctcgatgtgctggaacatgtaaggggtggttgcagatcttccgcagctgcatgatggtgttcatcagggtcttggtgccgcctttgcccttcttgtccttctcggagccatcagtcagcagcacgcccttggcctgcatgtggcggtagagcaactcgctgcagcgcagacatgtcgcacttgatgacgtactccaccttttcgggcaactgggcctcgacttccttcttgagtcgtcggagcaagaagggccgcagcactttgtggagacgccggatgatgagagtggtttcctcctcattcaggtccaccttttccccggtcatggcaaagggtgc

SEQ ID NO: 179528 - DNA, 503 bp, Homo Sapiens
  misc_feature (19)..(19): n is a, c, g, or t
  misc_feature (31)..(31): n is a, c, g, or t
  misc_feature (41)..(41): n is a, c, g, or t
tcactgaaacttggtgaantccaaaactganctgtgcccanggtccaggcccgggaccttctgtgctccgcaccatgttattgaacaaagacggaacaggcgccaccgggcttccttcctttgactcatatgtccggttaaaggtaatgaacaaagttcttgaagattgaagccatcttcacaggcaagtcctgggacaggggatcctcattcaacagggaaatgactgagctgaaagtctcgtttctgttgtctggatggttttgggacagagaagaaatcatggctgagccctgagtgaaggctgacttgggctccccagcacctggaaccttggtgtccactgggccacagtccttccgcagcagcacgtgtcttccgagctcatccaggacttggaagctgcagagcagggttttcttggacacggggagccggcacaccatggggtcgttgcagggtggctcctccagggtggcctccagggagtacagcgacccctg

SEQ ID NO: 179529 - DNA, 296 bp, Homo Sapiens
ggagtttcactatgttggtcaagctgttctcgaactcctgacctcgtgatctacccaccttggccttccaaagtacagggattacatgcatgagccactgcacccggccagggctgttttaaactgatgacatgcctttgtatatgttggggaggagagctgtaggggagcacttgagtagatatgttactattaactatgttggcaacataaataaagcaaaaattgaacagatattcaaggaaaaatagacaaatccataatcacagtgggagatttaacatatgcctctcagt

SEQ ID NO: 179530 - DNA, 728 bp, Homo Sapiens
gggataccccatttcctgaggcatggagaggcatcaccccagtaagttgcccatgccctgtgctggcagcctcccttttacccccaaccatcctttgctctagcttctggccccaaatttgtccaaggagccccccattcaaatcctttccctgctgccacgtggccttccctgtcccacagcttgctctgcaagcctccaatgtctgaagatcttccagtgtcactcatggcccctttagtctcagcccagccataaacttcaatgcaaaggataagtctagattgatttcacagttcttttaacaagtggacttaaaagctagtggcaatacattccttctcctcagagttgaaggcaagttctccctgaagcctgggtgacacatgtccttttcctaagactggggaagagaattgggagtggcagccagttcggcaggaaatttgttagcaggggaagaaactcagatgggagtgaggaacttcacaggaaaagtctggaggagcatccaaggatgatcaacatttattttatgtgtgggaagcaatgcgactttactgttattgaccctttacaatatcccctgtaaatgtatgtttagggttttcttctgaaaaagaaagaaattgttactcagccagtaaatgatacttaaagagagaaagagggggaaaaaaggaaggaagggagagagaaagtgggagtagatgaaagtgagggcgaga

SEQ ID NO: 179531 - DNA, 305 bp, Homo Sapiens
  misc_feature (167)..(167): n is a, c, g, or t
  misc_feature (240)..(240): n is a, c, g, or t
  misc_feature (261)..(261): n is a, c, g, or t
gggataccccatttcctgaggcatggagaggcatcaccccagtaagttgcccatgccctgtgctggcagcctcccttttacccccaaccatcctttgctctagcttctggccccaaatttgtccaaggagccccccattcaaatcctttccctgcttgccacgtggnctttccctgtcccacagcttgcttttgcaaggcttccaatgtctgaaggtctttccagtgttcaatcatgggnccttttagttttcaggccagncataaatttcaatggcaaagggttaaggtttagggattgaattt

SEQ ID NO: 179532 - DNA, 467 bp, Homo Sapiens
ttgaagatgcagccgcacgtggggtgctcggggcagaggacgatgagtgtgagatgcaggaagaaggggccccagcagaggaagaaaatgcccagcaggatggtgagggtgacagcgcctttaaggccaaagccctggtggaccgggcgctgcctcttgtggagccgggcgatgccctgggcgtgctggcaggcccgggccagcatgtggacgtacagcacggccatgagcaccagcatagccaggaagaagaccacgaggcacagcaggacggccacgtggtcgtagtaggcgatgaagagcgtgctgaagacgacactggccacccagatggccgcaacggctcgccgcgcccgcggcagggtcacgatgctgtggtagcgcagtgcgtagaagatggagatgtagcggtccacggcgatggcgcccaggaagcagaggctggacagcatggagctgcaggtgat

SEQ ID NO: 179533 - DNA, 543 bp, Homo Sapiens
aattcggcacgagggggaaatgtttttaatgctgactgcccagaaatatgagaacagctagttaaagaatttttgtaggtgttggctgaatttatgattcaaaatgactataaaaaaagttttgattttagattgaagtcctgctttgttgggggccagacagagaattggagaaaattttaatgagtaaagacttgtagaataaccacaacttgtagtaaaattatggaatattaaatgttgaggcctcaatcgacagactgaactaggccttcatattcttattctatttcacatgtattacagaaggcaaaggaaattatttctaacccaatatttcttcccctctaaatcccctataagagaaggggccctaaccctgaagcgaaggatgaagtgttgctgtaaggaagcgcctggctcaacagtcaggttggtttgtcccaaactgacagaaactttctggattccaaaagtcccattggtctctatctcataggtgacctgaaatgcaaaaagaatcaattaataaaaagtagttat

SEQ ID NO: 179534 - DNA, 693 bp, Homo Sapiens
cacttcatccttacaaaaatcctatgcagaaaggtttaactattatcacacttgatttttatagatgaggaaacttgagcttcagaaagattaagagatttgatctggctcttggtgattgagtagcagagcagtaactgcaagccatgtttttttcccttctagttcagccctcctctactatactgcagttctaatgcaaaaccatttataacagtgccgtctgaaccaggtatcccatttgccttttaaaaataatgacaagtacatatctgctgacattagtcagactactgctattttttaaatacattgaacatggaaggatggcaaactcaaacttagaaataattgagtttcttattttgaggcaccaggactatgctatatttagctactttaactcttgcagaggtacaatatctaggttggcaggtaactatggaaatgtaaatgaattaagaattgttgacagaggtgtattaaattttaagagtctcaggaggtcctctatatctggaagtgggaaaatgacacttcttgctaaactctaagttatcttttaaaacttaagaatctaacagtaacaacaaccattgaatctactactaacaaccactgaactgtacacctaatggatggacttatagtatacaaattatacttcaataaagctgttcaaaagaaaaatta

SEQ ID NO: 179535 - DNA, 481 bp, Homo Sapiens
  misc_feature (54)..(54): n is a, c, g, or t
cctaaatccatttacattcccaagttaccgcccacccaagaaatgtacccccgncaagagttaaaagtagcctaaataataaccaaagcccccggtgccctcaaaataagaaactccaattatttcctaagtttgaagtttggcccacccttcccatgttccaatgtatttaaaaaatagccagtagtcctgactaatgtccagcagatatgtacttgtcattatttttaaaaggcaaatgggataccctggttcagacggcactgttataaatggttttgcattagaactgcagtatagtagaggagggctgaactagaagggaaaaaaacatggcttgcagttaactgctctgctactcaatcaccaagagccagatcaaatctcttaatctttctgaagctcaagtttcctcatctataaaaatcaagtgtgataatagttaaacctttctgcataggatttttgtaaggatgaagtg

SEQ ID NO: 179536 - DNA, 517 bp, Homo Sapiens
ctcagtgtaaaagttatatttaattgccatgctacaaaatgtatgaagttggcactgatagggagaaatagagaacaaagggtgggaagggatagagggaaaattatgttgttacatatacaacaaggttttattttaattaacagtggttacgttttgccaatattaaaaatgcaaaccaaaatttaaaatgctgatctgaaacagcattaagatacaatgtatgcatagtacagtatcacttatgtctttttattagagaaatatggaatgtttataaaagaaattaaccatgggggtaaaattcatatttcatatacaatttggcaatggtagtcccactgttggacaattttttataaaagaaaaaattaaaaatctaataagctacctttatacaaagttgctatatttatgcctttacgtaggaaaaaaacatttataatgcaaattaggacatacaatagtcttacaatattatacaatgtaatgaaaataaaacataacacaaagtttg

SEQ ID NO: 179537 - DNA, 113 bp, Homo Sapiens
attgcacatggaacattcaccaagataggtctcaatacatttaaaaggatcaaaattatgttaaacatgattaacaaaacagaacattttgtagaagagctagaggattaagt

SEQ ID NO: 179538 - DNA, 516 bp, Homo Sapiens
  misc_feature (13)..(13): n is a, c, g, or t
  misc_feature (25)..(25): n is a, c, g, or t
  misc_feature (39)..(39): n is a, c, g, or t
  misc_feature (149)..(149): n is a, c, g, or t
tgtaacctcccanggttctcccaancaagggctgtaaanttacccttaggctgacccaattccttgcgggggcgcaaaaactgctttgaggaaaatgtcccccaggaggaataaactaagaagacgcacctgctatttcaccaatactnatggaagaatacagctaatgaagtggtggcagaagcttggccgtgtgagtgccccagggtaaaagtctctcttctgtccagtccagagcagagacttctcccccgtggacagcagcctgccaccaagactcaagcaacgtaagagtcatctccccagactggctgtcagagcaagaagcacccagccttcctaaaggcagaagagtggaaatctgacagtgcctgccatttccggtacagaggacagcatcaccaggccctgcagtgtctgggggggtctctggggggcagatcctgatgagaggccaggagcctttactggtggaagagcagggaagggcccttgttgggttgaaaggccatgatc

SEQ ID NO: 179539 - DNA, 493 bp, Homo Sapiens
  misc_feature (32)..(32): n is a, c, g, or t
  misc_feature (47)..(47): n is a, c, g, or t
  misc_feature (81)..(81): n is a, c, g, or t
tcgggcaacaagccccccaaaaaactgcaagnccctggtgaagctgnccctctgtaccggaaaaaggcaggccactgtcanaattcccactccttctgccctttaggaaggctgggtgccttcttgcctctgacagcccagtctggggagatgactcttacgttgcttgagtcttggtggcaggctgctgtcccacgggggagaagtctctgctctggactggacagaagagagacttttaccctggggcactcacacggccaagcttctgccaccacttcattagctgtattctccatagtatggtgaaatagcaggtgcgtcttctagtttattcctcctggggacatttcctcaaagcagttttgcgcccccgcaagggaatggtcagcctaagggtaatgtacagcccgtgcttggagaaccatggaagctacacccctacaggtgcatactgttctgcttttccaataaatacgagcggcgatttaaa

SEQ ID NO: 179540 - DNA, 209 bp, Homo Sapiens
tcccctataattctgacccgctcaggcttgagggtttctccggcctccgctcactgcgtgcacctggcgctgccctgcttcccccaacctgttgcaaggctttaattcttgcaactgggacctgctcgcagcaccccagccctccacctctctctacatttttgcaagtgtctgggggagggcacctgctctacctgccagaaatttta

SEQ ID NO: 179541 - DNA, 418 bp, Homo Sapiens
  misc_feature (235)..(235): n is a, c, g, or t
  misc_feature (373)..(373): n is a, c, g, or t
  misc_feature (393)..(393): n is a, c, g, or t
  misc_feature (408)..(408): n is a, c, g, or t
gttacattgtctatgcagaataagcaggcctggtgtctgcaaatgtaccagtccttctcccgcatctcctgggtgcccccttggctttgctctcctgtgtcctgtctttctgcgttttagaagtgagagcctctccttcaccttttgagcaactgagtcatctcaagtcctgagctctgctctgccgcctgctggtgccttgtaaaggtatactcgttacaggccctagaggttnctaatggtccagggttaagtgagaggagactgtactttggtttcaaaggatccttcaccctgatctgcagtgaggtttgatcagatcacctgggagtcccttcgtctgtggttttgggaggcttaaattgtaaaaatncatcccttatgggaattccnaaatttctcttaggntgtttttggg

SEQ ID NO: 179542 - DNA, 492 bp, Homo Sapiens
  misc_feature (24)..(24): n is a, c, g, or t
  misc_feature (84)..(84): n is a, c, g, or t
  misc_feature (93)..(93): n is a, c, g, or t
  misc_feature (127)..(127): n is a, c, g, or t
  misc_feature (138)..(138): n is a, c, g, or t
  misc_feature (143)..(143): n is a, c, g, or t
  misc_feature (164)..(164): n is a, c, g, or t
  misc_feature (208)..(208): n is a, c, g, or t
accaaaactggaaaaggcccaagnagaaagggccccttgcacttgcagcccacgtcagaaaagcccacggtgcctgtcgggaantttcccaantgctccgtgaaaaccatgggcaagttgtctgaanacttggtggantcctntgggcctgtgggaccttgtgncatgccatggtcctctctgaaaccttggtttcttcaagcagtgnaaatgctcaaaataactgctgtctcccatgatggtgtggttacaacgagctgttgtctggctatggcatggctgtgccgggggtgtttgctgagggcttcctgtgccagagcccagccagagagcaggtgcaggtgtcatcctgagttcaggctctgcacggcatggagtgggaaccccaccagctgctgctacaggacctgggattgcctgggactcccaccttcctatcaattctcatggtagtccaaactgcagactctcaaacttgctcatttaaaagaa

SEQ ID NO: 179543 - DNA, 561 bp, Homo Sapiens
  misc_feature (84)..(84): n is a, c, g, or t
  misc_feature (94)..(94): n is a, c, g, or t
  misc_feature (319)..(319): n is a, c, g, or t
  misc_feature (447)..(447): n is a, c, g, or t
tcagaggcccgaccatggagcaggaaccaaatagttgggagctgtggggctgaacagggcagggatttccaggtatcagaaggnaaaaggaggncagctgagcagccacagcagcattagggccaggctaagcaggaaaggccaggctgcccagggcccagcccactcatggctgcaacaatagaacctcgccaacctcctcaattggggttgccccggggctggggtcgaaccacatctggatgcagcggccactccctcggctgtagttgctgaccttgtaggagtgagtccagatttcattgcacagaacagtggntgtggggaagtagaaatggaaaggttggcaggcagctcccactgcgcacttgttaaaccctgaagtccagttccagcccttgtgccagttgctcttgcaggtgtaggaggtgcgacaatcttcccacnattgctcacagtcctctttgcacaggggcacgttcagtacccgctctttgcgccagctctgatccacctgctggatccagggccccaagttgggggagcactcgtagaggcagg

SEQ ID NO: 179544 - DNA, 660 bp, Homo Sapiens
  misc_feature (11)..(11): n is a, c, g, or t
  misc_feature (28)..(28): n is a, c, g, or t
  misc_feature (34)..(34): n is a, c, g, or t
  misc_feature (53)..(53): n is a, c, g, or t
  misc_feature (102)..(102): n is a, c, g, or t
  misc_feature (219)..(219): n is a, c, g, or t
  misc_feature (509)..(509): n is a, c, g, or t
  misc_feature (556)..(556): n is a, c, g, or t
  misc_feature (583)..(583): n is a, c, g, or t
  misc_feature (614)..(614): n is a, c, g, or t
aaattatgtgncaccttacaaacctctncagtgntattcttgggagttcttgnaaatgttgttttaatatttgttgccagtaatgtttctttctttcacagnccgctccgggaatttctgaagttcggggcctttctcagaagactgtaatgtacctgaagtttctgaaatattgcaaacccacagagtttagggctggtgctggccaaaaagaaaagncaacatagagtttaagtatccagtagtgatttgtaaacttgtttttcatttgaaggctgaatatatacggagtcatgtttatgttgagaactaaggatattctttaggcaagagaaaatattttccccttatccccactgctgtggagggttctgtacctcgcttggatgcctgtaaggatcccgggagccttgccgcactgccttgtgggtggcttggcgctcgtgattgcttcctgtgaacgcctcccaaggacgagcccagtgtagttgtgtgggcgtgaactctgnccgtgtgttctcaaattccccagcttggggaaatagcccttggtgtngggttttatctctgggtttgtgttctnccgtgggtgggaatttgacccgaaagctctnatgttttttcgttaaataaaaggggcaacttaggccaagtttaaaa

SEQ ID NO: 179545 - DNA, 628 bp, Homo Sapiens
taaatatgtgcacctttacaaacctctcagtgtattcttggagttcttgaaatgttgttttaatatttgttgccagtaatgttctttcttcacagccgctccgggaattctgaagttctgggcctttctcagaagactgtaatgtacctgaagtttctgaaatattgcaaacccacagagtttaggctggtgctgccaaaaagaaaagcaacatagagtttaagtatccagtagtgatttgtaaacttgtttttcatttgaagctgaatatatacgtagtcatgtttatgttgagaactaaggatattctttagcaagagaaaatattttccccttatccccactgctgtggaggtttctgtacctcgcttggatgccctgtaaggatcccgggagccttgccgcactgccttgtgggtggcttggcgctcgtgattgcctcctgtgaacgcctcccaaggacgagcccagtgtagttgtgtggcgtgaactctgcccgtgtgttctcaaattccccagcttgggaaatagcccttggtgtgggttttatctctggtttgtgttctccgtggtggaattgaccgaaagctctatgttttcgttaataaagggcaacttagccaagttt

SEQ ID NO: 179546 - DNA, 468 bp, Homo Sapiens
  misc_feature (420)..(420): n is a, c, g, or t
  misc_feature (440)..(440): n is a, c, g, or t
  misc_feature (445)..(445): n is a, c, g, or t
gggtgagggtaggaggcatttacaactcagattttatttattttgaaattatcaattgtataaatctaatttattaccaaatagggtcttttaaaaaatatttttatcgttgaaaccttgacaggtacttcatattcttctaataatttaaacagtccaataatgtggtatacactttgacatccaagaactcaccaagatgtttttcagagatttattctcgatttaactatcatagcatttaatgaatctgatttgtagttcaataaattgtgggttgaactacttatccctgtgtgaacattggaattactttctgtcactgaaactgaggtatttggggtgtggtaagtacttcgaaaattgtaatactgtttggggccatggtcctaaattattaaaagggttaaaattggatantaaagtcagaattttttctnttccnttcccaagggtgtacttaggggt

SEQ ID NO: 179547 - DNA, 463 bp, Homo Sapiens
  misc_feature (157)..(157): n is a, c, g, or t
  misc_feature (380)..(380): n is a, c, g, or t
  misc_feature (441)..(441): n is a, c, g, or t
ggtaggaacagcgtaagaggagagagacacattcagcagccaaaggactcggtgcgaaagagcagaacaccatagacaatatgtcgctcttgggacccaaggtgctgctgtttcttgctgcattcatcatcacctctgactggatacccctggggtncaatagtcaacgaggagacgatgtgactcaagcgactccagaaacattcacagaagatcctaatctggtgaatgatcccgctacagatgaaacagttttggctgttttggctgatattgcaccttccacagatgacttggcctccctcagtgaaaaaaataccactgcagagtgctggggatgagaaatttacctgcacaaggctctactctgtgcatcggcnggtttaaacaatgcatttcattcagttatggtttcaccagttttacggccgtatgttaccntcgttcaaccaagggagttctt

SEQ ID NO: 179548 - DNA, 487 bp, Homo Sapiens
  misc_feature (17)..(17): n is a, c, g, or t
  misc_feature (33)..(33): n is a, c, g, or t
  misc_feature (38)..(38): n is a, c, g, or t
ggggatggcagtggggnataatggagccctggnaatcngctgaatttcttccctctgcttcctggacacagaggaggtctaacgaccagagtattgccctgccaccactatctctagtctccctagcttggtgccttctcctgcaggagtcagagcagccacattgcttgccttcataccctggaggtggggaagttatccctcttccggtgctttcccatcctgggccactgtatccaggacatcactccccatgccagccctccccgggcagccccatgttctcctcttttctcaccccctgactttccctgagaagaatcatctctgcccaggtcaactgggagtccctgggtgactccattctgaggtgtcacaaagcaatgaagctatgcaaacaataggagggtgtgacaggggaaccgtagactttatatatgtaattactgttattataatactattgttatattaaatgtatttataa

SEQ ID NO: 179549 - DNA, 415 bp, Homo Sapiens
  misc_feature (375)..(375): n is a, c, g, or t
aataaagcttgcggcgcgccccacaacaacttgaggtgcccgtggccgccgtgggcatcccgcgccgtggtcgcctatcagaagcagcagcaacgcggtcagcgcgggcagcagcacaggcaggacgggaagatggtcgacgaagctcatcatgccccgccccctgcgctgctcgtcgcgctcggcatgccaggtcgtgccgtcgacatggtcggtccggttgtcatgccgctgcgcaaggcaagctcgatcacgaagccggtggtggcgaacgattcacgatcgccgtgaggaccactttggccttcgagggccaaatttccctattagttgagtcgtatttaaatttcgtaattcatgttcatagctgttttncctgttgttgaaatttgtttaattcccgtttaacaaattt

SEQ ID NO: 179550 - DNA, 694 bp, Homo Sapiens
  misc_feature (54)..(54): n is a, c, g, or t
  misc_feature (79)..(197): n is a, c, g, or t
  misc_feature (378)..(378): n is a, c, g, or t
gcaacctctgcctcccgtgttcaagcagttctcctgcctcagcctcccaaatangctgggattacagttgcctgccacnnnnnnnnnnnnnnnnnnnnnnnnnnnnnnnnnnnnnnnnnnnnnnnnnnnnnnnnnnnnnnnnnnnnnnnnnnnnnnnnnnnnnnnnnnnnnnnnnnnnnnnnnnnnnnnnnnnnnnnaataggtgtcagccaccgcacccagcctggagtggccttttatgagaggggacccgtcaaatctgtgccttatggaggggtccggcagcggccacaattgtcttgtcccctcaccccccaacttccccctggaacacctctcccaggcaagacattttcacagcaccattcacaacggttngggccaaaaagaaacttttccttcatcatttcctgcactcgctgaccacaactttggacaccccaggctgccacccctccccacccgttcacccccaggatgctgttgctgtaggacgcctgctgccctgggagccctccccagggatgtgagccagtcccctcgctggtacggaatgccgctgggtgcccggaggcggccatggtgtctcgatggacggcagccagggatgggagcaaccatgggtcttcacgggccatgctttcaggggtttttcaggtcctggcccccggccagttttgccaagagggaaccc

SEQ ID NO: 179551 - DNA, 351 bp, Homo Sapiens
  misc_feature (63)..(63): n is a, c, g, or t
  misc_feature (109)..(109): n is a, c, g, or t
  misc_feature (140)..(140): n is a, c, g, or t
  misc_feature (164)..(164): n is a, c, g, or t
  misc_feature (266)..(266): n is a, c, g, or t
  misc_feature (281)..(281): n is a, c, g, or t
cgttaaccccccaggatgctgttgctgtaggaagcctgctgccctggagccctccccaggttntgagccagtcccctcgctggtacggaatgccgctgggtgcccggangcggccatggtgtctcgatggacggcagccnggatggagcacccatgggtctcanggccatgcttcagggtcttcaggtacctgcccccggccagttctgccaagaggcacccccttccccagcctctcgcctgcactgatgcagacaaaatctcancctgacaggcccaanccccaccccacccctcccccgccgtgtgtggcccctcgccgcatcgttggggttttgttacgtgaaaata

SEQ ID NO: 179552 - DNA, 452 bp, Homo Sapiens
  misc_feature (413)..(413): n is a, c, g, or t
cccagctggaggtttcagggcttctggaggatgctctcgcatagctcgaggtcctctgcccacctcttctctccaaggaaaatgaggactgccccttccccctgcaggattggcccccagcctgcgcatgcaccctcctcttgcccaagtggggagcacagaggcggagaggaatcccttaccacacccacggcccagcttgctcacgagtgtcacctctgtgacggtcaccactgctcccttggagggccacttgagttactgttgcttcctcgcctgctggcttgatgagcaccgatggtggggatctgaccccgaggggcagagctgtcggtgactgaggactggactgtggtgaccatgccgattttgcttcagggagaacgttgcaattgcacccagcagctcctggntctgcaggcggcacagctgggggccctgtgatcctctgg

SEQ ID NO: 179553 - DNA, 674 bp, Homo Sapiens
  misc_feature (31)..(31): n is a, c, g, or t
  misc_feature (37)..(37): n is a, c, g, or t
  misc_feature (52)..(52): n is a, c, g, or t
  misc_feature (66)..(66): n is a, c, g, or t
  misc_feature (109)..(109): n is a, c, g, or t
  misc_feature (622)..(622): n is a, c, g, or t
  misc_feature (663)..(663): n is a, c, g, or t
aagaaagggttcaaccatcggaaatcgcccnaacccntggaagttaaaaagncgttcaaggaaccntcccaggttcccacaggaaacttctaagaaaacaacatcttcnacttccctggaaacttaagtccagctgttgcaggatggcaagggtggcggttattctgggcccactggtgtgcaagggcccagggccaggggctctcatggtcggggagagaggcctggagaagtggtccccagccccagtcacttgggattcttggcacagaaagccttggatgcctccatgggacagtcgcctcagcccctcacaaaaggacaacaatgatccctggagtggccgcgtgggtcccagggtgggtgggcggatggggctccttgggtggcggctgggactgtaaggcgcgctctcggagttccacaaagggagatctcagccccagggagccgcaggacttggctgctacagaaataacaaccactaaaagcgaaaggaataaatatctgtgcgtgtatacacatacgcctagggtgcccactgcaggaacacgacctggcccgccgccccacagcagggtcgtgccggctctgagggaatactggctggggtccctccccntgtgggcccagagtccagctgctggagttggggttgggccncgtgccgaatt

SEQ ID NO: 179554 - DNA, 428 bp, Homo Sapiens
  misc_feature (401)..(401): n is a, c, g, or t
gttcccatccaattatgtgaagctgaccacagacatggacccaagccagcaatgaatcatatgttgtccatccccccctcaggcttgaaagtcctcaaagagacccactatcccatatcactgcccagaggatgatgggagatgcagccttgatcatgtgacttccagcatgatcacctactgccttctgagtagaagaactcactgcagagcattttacctcattttaccttagttgcatgtgatcgcaatgtttgagttattacttgcagagataggagcaaaaattacaaaaacacacagggtagtggggtccttttgtggctttcctagttactcaaattgactttcccccacctttggcacagggtgcttttcaatagtttttaaaattatttttnaaatatatattttaggtttttaattaa

SEQ ID NO: 179555 - DNA, 264 bp, Homo Sapiens
  misc_feature (232)..(232): n is a, c, g, or t
aagattgctgatctagggccactaagtgatgaagcaaaaaggatggctaaaaaggacctcaacccttttgactttaaaaggaaaatagcttaaccttcaacctgtgtgacatttaactttttgaacccaaccgtaaaagctatcttctaaccaacaaaaagttaattaattacatttgggattattacagaattaggaaaattgggcttttaaaataattcaataatttgtnccccggggtttttaatttttccaaaatatttt

SEQ ID NO: 179556 - DNA, 419 bp, Homo Sapiens
  misc_feature (113)..(113): n is a, c, g, or t
gcgggaaccccccaaaacagcccctcaagatggccggatcctagggccacctaagtgaggaagcaaaaaggagggcctaaaaaggaccctcaaccccttttgacctttaaaangggaaaatagccttaacccttcaaccctgtgtgacatttaacctttttgaaccccaaccgtaaaagcctatcttcctaacccaacaaaaagttaataattacatttggaattatacagaattagaaaattggcatttaaaaatactcaataatttgtccctggtttttaattttcaaaatattttctttttgaagagccagattccagtgatcctgcctctcagaaatttccacatttcttatttttcattaggccttaagaagctgcatttgtaaacttgtgtttcattattaaagcttaattta

SEQ ID NO: 179557 - DNA, 371 bp, Homo Sapiens
  misc_feature (26)..(26): n is a, c, g, or t
  misc_feature (333)..(333): n is a, c, g, or t
  misc_feature (349)..(349): n is a, c, g, or t
  misc_feature (355)..(355): n is a, c, g, or t
aattcagaacaaaaatcctatcactnataccgactcactactacagagggaaaaatgaaaggaatctattttcaaaggcagaaagcacctttggcaagtttcaatcacagctcggcactgtattctaacctgtcagggcaccgtggatctcagacgggcacatctattggaggtgatgccagaagaggcttcttgggctcgggatattcttcctcggccactacccagcaggaaaactcatacggaaaagccgtcagcagtcaaaccaacgtcagaactttctctccaacctatggccttttaagaaatactgaggctcaagtgaaaacattncctggacagaccaaangccggnagatacaaggggaggt

SEQ ID NO: 179558 - DNA, 432 bp, Homo Sapiens
  misc_feature (410)..(410): n is a, c, g, or t
attacaaacactactgtgagaagtaatggctaaagtaaaaaagagggcagaaaaaaacatctgatgctataatgcgtctaaataaagaatgtgaaacataaagttttgttctacatcttcactggagattttaaagggcaaggagacctagctccttgagatgtataactatttgctgacaagttggagtgtcattagccagtgttctagaaagtgaataatataatcccccgccccccagctctacattgatacatttcttagctaggagacaaatgttagtttgtatttcgtagaccaaactattttaacatctccattttccatttgtctgtatagacaaaaatgtttggcctacaaagacacagccgtggaatattggaatgaccccgttccgttttcccttaccnggatggttgtttgtgtccccac

SEQ ID NO: 179559 - DNA, 587 bp, Homo Sapiens
  misc_feature (62)..(110): n is a, c, g, or t
agacatccgggtactacatttccatcccttccctattttggcaccaaattagggtgtagacnnnnnnnnnnnnnnnnnnnnnnnnnnnnnnnnnnnnnnnnnnnnnnnnnaacgtcctggactgcacagacctcccactccagaccatccaggcctggttcccaagacccgatccttcccctgcaaccagacagtctacaactgccccctccagcccattttctgccgtgaaaccccagccagccacaccagactctggaaccctttttcgactgccccaactcttggacaccaggccaactagaacacccaacaccaaactgtacagactctcccaccccaacctccccagactctgcacggatgtcctaggccccctccccaactctaaccagaccccatccccctaagtccctttgtcttgacccccaagtcttcaaccagatatcctcggcaacccacctcccaccctcctcctcttctccttcaagacccaactgagcacccgctctgattccccacagcctttctccctgccaccactcccttagtctttcccaggcttactctcccaataaatgtgctag

SEQ ID NO: 179560 - DNA, 569 bp, Homo Sapiens
  misc_feature (40)..(40): n is a, c, g, or t
  misc_feature (89)..(89): n is a, c, g, or t
  misc_feature (116)..(116): n is a, c, g, or t
  misc_feature (375)..(387): n is a, c, g, or t
cccaagaatatcctggtttgaaaaacttgggggtccaaanacaaaaggaacttaagggggaatggggtcctggttaaaagttggggaanggggccctaaggaacatcccgtgccanaagtcctggggaaggttggggtgggaagagtctgtcacaatttgctgttggatgttcctaattgcccctggtgtcccaagagttggggccagtcgaaaaagggttcccagagtctggtgtggctggctggggtttcacggcagaaaatgggctggaagggggcaagttgtagactgtctggttgcaggggaaggatcgggtcttgggaaccaggcctggatggtctggagtgggaggtctgtgcagtccaggacgtttnnnnnnnnnnnnnattgtgcctgactggcctggggttgggggagggctgtctacaccataatttggtgtcaaaatagggaagggatggaaatgtagtacccggatgtctttgtagaggactcagaaggaagtagaggaggggtcttaagtggggctatatgccaagaaagtgggtcggtggggctgagactgtcg

SEQ ID NO: 179561 - DNA, 390 bp, Homo Sapiens
  misc_feature (53)..(53): n is a, c, g, or t
  misc_feature (73)..(73): n is a, c, g, or t
gggtgatgtgaaaggaacaagaagagaatcaagtggctgcagtccttctatanatctggtcactagatccgcnagcttcttcaacttgttgggcttattatatctctgaaaggggacctgaacctgcatcattctgcaaaggagatgattcctgagagatgggtgaaatataatcactaactaaagagataaattcttcactttacttcctagtattgcatcccagaaagggttaaagtaagggatattggctcctgctgatcaggccacagtgtgacacattctataaaatgcatcacaaaactacattattcaatagacttgagtgttgcacctgctttcttatctccttgtaggtggttaagtttcccacaaatgcaatttgttaat

SEQ ID NO: 179562 - DNA, 361 bp, Homo Sapiens
atgtcctagggtgtgatttggggtccagtagactgtgatcccttagcaaaaaatgaacagtgataagtatacctgggggcaaaatcagaatggaatgcctctggtctatataaccacatttctaagcctttgagactgttcctgagccttcagcactaaccctatgagggtgagctggtcccccctatatatacatcatacttaactttactaagtaatctcacagcatttgccaagtctcccaatatccaattttaaaatgaaatgcattttgctagacagttaaactggcttaacttagtatattattattaattacaatgtaatagaagcttaaaataaagttatatctgattataaa

SEQ ID NO: 179563 - DNA, 385 bp, Homo Sapiens
  misc_feature (47)..(47): n is a, c, g, or t
cctccctgaatatgcacccatcaaagaatccttcacttcccaaaaantagctccctacctttaagtgggccctttatgtggtcatccctgaacttcccactgttgaagaatcatgtcctaaatgtcaccttgactttgacaagtctttttgctgtcttgatcttggcttcacaaaaggctcctctgtatttagcactcacatcagtgcccactgtcaaatagggaggctcatcaagggccttcatgatgactctgggaccaaggtatcctctaaaacaccaggttcagctgcaccttcctcggaggcgagatctgaccctggcacgtccagagtcccctctctccttctcccccccaaaaccagcaggcccgggggagagatggg

SEQ ID NO: 179564 - DNA, 456 bp, Homo Sapiens
  misc_feature (50)..(50): n is a, c, g, or t
aatcgcatctgttagtttaatgaataaagcttcctgatagcaccatcaanaatcttcacttccacaaatagctccctacctttaagtgggcccctttatgtggtcatcctgaactcccactgttgaagaaatcatgtctaaatgtcaccttgactttgacaagtctttttgctgtcttgatcttggcttcacaaaaggctcctctgtatttagcactcacatcagtgcccactgtcaaatagggaggctcatcaagggccttcatgatgactctgggaccaaggtatcctctaaaacacccaggttcagctgcaccttcctcggaggcgagatctgaccctggcacgtccagagtcccctctctccttctcccccccaaaaccagcaggcccgggggagagatggggaagaagggcggcgggttccagcggttgctgaggcagaggctccggctca

SEQ ID NO: 179565 - DNA, 511 bp, Homo Sapiens
  misc_feature (21)..(21): n is a, c, g, or t
  misc_feature (425)..(425): n is a, c, g, or t
  misc_feature (430)..(430): n is a, c, g, or t
  misc_feature (451)..(451): n is a, c, g, or t
  misc_feature (460)..(460): n is a, c, g, or t
  misc_feature (467)..(467): n is a, c, g, or t
  misc_feature (475)..(475): n is a, c, g, or t
  misc_feature (490)..(490): n is a, c, g, or t
aaattagaacaattcttaatnattgaaaactgctggtatgaatttcctccttccctcaattaggccagaaactcatcatggggcatgcacagcatctacaggaggaagccccagcttgtgggggctaggatggagcagccgtgagagacacctagccaaatgtccgtttttccatcataaacaatggagcgggggtcagggggagaagagagtgggtaagtgaatggccagaaactccagagggggcctcacacccacctgtgaggtacctccttgccctacccccactgaggcctcaggcccctttgcttgggtcatgctgccccctgtcggctgctgcccctgcctcttcctctgagttctaacaacacagacactggtgcctgaaagccctgctgctgccagggagttcagaattctggctngcctntattgggaattttcctccctntggggattntgcagancatccagntggggccatccactnatggttcctttcattccagtg

SEQ ID NO: 179566 - DNA, 669 bp, Homo Sapiens
  misc_feature (212)..(212): n is a, c, g, or t
  misc_feature (226)..(226): n is a, c, g, or t
  misc_feature (326)..(326): n is a, c, g, or t
ctttaaataaatctataaagtaaaacactgttacaaggggaaaagaaagccccactttatgtatttggttgcccatggttttaggagcatctaacctaatttcaactgaactcctaatgaaactaatcatccacagatgaatctgcttcaaccccttgtctccttccattccaagggcttctggaaatgggcctcctcctacatacaatttnaaagcagagctggngtggaactgttaaaggttaggttcacaggaggaatcaaagaccccatcttccagaggaggtctcaagcacccacgaacatggggagcacctcttcaggancaaacgataacttgaggcggcattaacgctgaaacgaagcaccccttgcagcgtctgttcgctggtgcctgcagatggcctgcgctgcacttgggtcatggcgcacccaacaggagtcagaaggtgactcgccactatggccgtctactcacatgcaacagtccatgcagagggcagctgggggtgtgcattcggaggctttgggatagaaagcaggggaataacactaagggcaggggacaagagtcagcagagaacacgccagggagccacaagggaaaactgcttaagaaaacactgaagacttaagaaactttagtgacttgaaaccactggagttcac

SEQ ID NO: 179567 - DNA, 377 bp, Homo Sapiens
  misc_feature (12)..(12): n is a, c, g, or t
ggagctttgcgnccttcctggcctccaggctgattgggggcatcagcaaagggaacgtcagcctctccacggccatcgttgctgacctgggctcgcctctggcccgcagtcaaggcatggcggtcattggggtggccttctcactgggcttcaccctgggccctatgctcggagcctccctgcccctggaaatggcaccctggcattgccctgctcttcgcagcctccgacctgctgttcatcttctgcttcctgccagagacgctgcccctggagaaacgggcgccctctatcgccctggggttccgtgatgcggctgatcttgctcagccccctgggccctgcttgcggttttcgggctgttcgttcgttggcca

SEQ ID NO: 179568 - DNA, 371 bp, Homo Sapiens
  misc_feature (296)..(296): n is a, c, g, or t
  misc_feature (340)..(340): n is a, c, g, or t
tgaagactcccagggtcgccaagaatgaggcgctctggcacccgacgctgaacttgccactgagcccccaggggactgtgcgaactgcagtggagttccaggtgatgacacagacccaatccctgagcttcctgctggggtcctcagcctccttggactgtggcttctccatggcaccgggcttggacctcatcagtgtggagtggcgactgcagcacaagggcaggggtcagttggtgtacagctggaccgcaggcaggggcaggctgtgcggaagggcgctaccctggagcctncacaactgggcatggccagggatgcctccctcaccctgcccggncttagtatgacaggacgaggggaccttacat

SEQ ID NO: 179569 - DNA, 357 bp, Homo Sapiens
  misc_feature (33)..(33): n is a, c, g, or t
aatccatcttctcatgccaactacgaagacaanaggtcggaagtcacgagcagcccccctccagaagtggccggtgcccctggttcagctcccaagaagccctcatgggttgggacattgcgggaggcactcttgatgtcagcaagggtgacccggtggagatgtggggctgctgccaggtggctgggggtggaggtcctgccgctgtgtggacatagactcgccagagaccgcggaggtgcgtgcctgtctcctgcccaggcctactgctgctggcacggtcctctccacccagccctccttctctgggcagctggcctcggaaatattggaagggatagccgtgcgcgcgtgtca

SEQ ID NO: 179570 - DNA, 575 bp, Homo Sapiens
  misc_feature (490)..(490): n is a, c, g, or t
actgccagtcaggggctgggggctgagcctcaccccccgcctcccctactgttctcatggtgttggcctcgtgtttgctatgccaactagtagaaccttctttcctaatccccttatcttcatggaaatcgactgactttatgcctatgaagtccccaggagctacactgatactgagaaaaccaggctctttggggctagacaaactggcagagagtgagatctcccctctctgagaggagcagcagatgctcacagaccaaactcagctcaggccccttggagcaggatggctcctctaagaatctcacaggacctcttagtctctggccctatgacgccgcctttcactccacagccttcacccctcccacccccatgactggtactgctgtgaatgagccaagtggcagctaaaagttgggggtgttctgcccagtcccgtcattctgggctagaaggcaggggaccttggcatgtggctggccanaccaagcaggaagcacaaactcccccaagctgactcatcctaactaacagtcacgccgtgggatgtctctgtccacattaaacta

SEQ ID NO: 179571 - DNA, 521 bp, Homo Sapiens
  misc_feature (466)..(466): n is a, c, g, or t
  misc_feature (505)..(505): n is a, c, g, or t
ctccacccttccccttagacgccgataagggacaggtcgtactgcttttgtgcgccgtttcctctccctcccccagcttgagaagcagctttcgtctctggggtcgatcgcctacgaacgcgccgaattccacgccagtgtgaggacccttggctgggcctttcttcctcccgggacactgaagctccaagagtagccgcagccttgccttccccaaacgctagccctgaaggggaagaaaagaagcgaggcttgtctgcaggcactcatattccttgatttgatttactttgggagggggagggcggggagttacccctctcctcgcgaacgcttcttttgttccagaaacccaggggaagccagacctctgacaattcgggcaattaaattaacccttgaattttgttgacaaaagtgtaatattaacattcaattgtttaagtgtcataagttgggggcatgnttaaattgtttaattttgaaccagttgcgttcaagacgnaaagacaaatttcgcg

SEQ ID NO: 179572 - DNA, 476 bp, Homo Sapiens
  misc_feature (31)..(31): n is a, c, g, or t
  misc_feature (42)..(42): n is a, c, g, or t
  misc_feature (49)..(49): n is a, c, g, or t
  misc_feature (396)..(396): n is a, c, g, or t
gtaaagaactggggggtagacacaaaacccnggtccaacccnccccacnccctggcgaacggaacacggcacccggcataaagcagcaaacagccttggttccaataaatacatttccccttcattcaaatcagaaaagttaattatagtaaagcatttttaatttgacccatctgtttaataccccacaggcaaaatttatcccacagagtttaagtgtgaaagtgttatttcattgggccttcagctttctaatgctatttgggttcaagattgtctcagcaattcattattggtttctttatatttacctagtactatttaataccaacactatagtgttttgtgttaaaaatgccaaccaaggatattttcacagttctagaaacgagtggnctgaggctttcttcccaataaactaagttttcttttaactgggtttctcacattagcactctgatatctgcacaaaacca

SEQ ID NO: 179573 - DNA, 441 bp, Homo Sapiens
  misc_feature (373)..(373): n is a, c, g, or t
  misc_feature (400)..(400): n is a, c, g, or t
  misc_feature (405)..(405): n is a, c, g, or t
  misc_feature (423)..(423): n is a, c, g, or t
gacacccccaaagcaaaagagtaacagacattcatgtcattgttccccatttaacatcagtcctctcaagatgtcgtgaccccatggtcaccctgaagcccttagattccaacccctcaatcagagacttccttcattaacaaagacccttgttcttatccctcaagaagaaacccaccataaccagcccactgtcacccctaatttacagacaccaaaacagtcctgggaagtgctaattacaggaccccccaagtcttcctaccctctgcaccctcaagaaacccccagtgccttgtatgaagcccaccccacatgggcccacagcttcctgtgctgggccagacttcccagaaaattctcttattttttnaagtaaacgaatttccccttttggganccccnaaaatttgggagggcccntttttagggattttgggg

SEQ ID NO: 179574 - DNA, 662 bp, Homo Sapiens
  misc_feature (568)..(568): n is a, c, g, or t
  misc_feature (596)..(596): n is a, c, g, or t
  misc_feature (605)..(605): n is a, c, g, or t
  misc_feature (652)..(652): n is a, c, g, or t
agattcggcactaggaacctgcctgagaatttcctctggggaggaatctattcctgtcatggtctagtgcctgggagggagagaactttctgggggtagggtgccctccatctgaaacaggccaggtgagcatcatgcacaaggcctccattctgtccgctcagattctgggtggggccacaggaaaatctcctgacttatggggagttggcttgtggttcctcccttggatagcctccatggaaccactataggctttcccaacagctgcctctgaaatagctgctgcttcgagatcctccctttttaaagcactttctaaagccctcaggatggcgggacaaaacagcactggtatattctaggagtaagtgcaggaattcagcagtgagagcatgtctgggaccacctgggactgccatccatttaacctcaaatctctttgggatactcgccctccctggggaaccagagttctggctctaacatttgagcagctatgcacttagtttccagagaagccactaaccaggctgccatgtgtagatgtaggtttctttaagagatncacagggcttgggttcatctgatcactnggatgggtnagctcagcctgggggcatttttagtgtttttccctggtgattaaatncccaaggctt

SEQ ID NO: 179575 - DNA, 464 bp, Homo Sapiens
  misc_feature (20)..(20): n is a, c, g, or t
  misc_feature (49)..(49): n is a, c, g, or t
cccactatgggctttccccnaaaagctgccctctgaaaatagctgcctncttcgaagaaccctcccctttttaaagccactttcctaaaaccctcaggatggcgggagcaaaacagcactggtatattcctaggagtaagtgcaggaattcagcagtgagagcatgtctgggacccaccctggactgcccatcccatttaacctcaaatctctttgggatactcgccctccctgggaaccagagttctggctctaacattgagcagctatgcactagttccagagaagccactaacaggctgccatgtgtagatgtaggttcttaagagatcacaggctgggtcatctgatcactggatggatagctcagcctggggcatttagtgttttccctggtgataaatccccaagacagctggatttggagctggtggcaagttgaaattattaaaaattgatttgtg

SEQ ID NO: 179576 - DNA, 413 bp, Homo Sapiens
  misc_feature (18)..(18): n is a, c, g, or t
  misc_feature (40)..(40): n is a, c, g, or t
  misc_feature (61)..(61): n is a, c, g, or t
  misc_feature (145)..(145): n is a, c, g, or t
  misc_feature (264)..(264): n is a, c, g, or t
  misc_feature (351)..(351): n is a, c, g, or t
aagtttctcagggcaagntcaagaatccctgggttcgaanctaaggtgcaacaaggggcanagctaggtatttcagggacggggtcttcctgtcctcccaggggcgctcaggagcaaaggctttccacgggcctgcgtgggcttngggggcttggagtgcaggagggtgaccggttccgtggcccgcgatggtgagcacctgcgagaaagccactgccacggcttcttccagtggccctgttatcttctcagccagatccgtcnagacctctatgggggctgggggcatgtctcccggcgccttggtccctgaaggccacccggatgcactttctgaatggcatcaccggntacgcggcccttgagctgctggaggaagacccggatttcaagctcgtatcctgtccaacagc

SEQ ID NO: 179577 - DNA, 414 bp, Homo Sapiens
  misc_feature (42)..(42): n is a, c, g, or t
  misc_feature (258)..(258): n is a, c, g, or t
tttgtacccctgggcccagtctctttgaaaccctgagggtgncccgggatctggagcctgcatcctcctaagggggcccaggctttggggacccattgcccaaaggtggacctcaggaggaaagacacttaaagacacttttacatgtctagtaattcttgatgttcatcttcagcaccagtggaaacacatgaacttcgatgcaggtccagagaccatggacactcccacgaggctcagctctcaggcaccccctanacttcagttgagggaaaagctcaagtgccttaggcccgtggaccacagtcttggctgagatcaaagggatgagcaacagggacttctgccacagtgacaatggaattgtgttgtgccttacttcagaggtggtctcttctttcttgtaataaaaaa

SEQ ID NO: 179578 - DNA, 134 bp, Homo Sapiens
aaaggaaaccatagagcagtcctgaaaaaaatttcttcctagttctgcacaggataattacagcagaagacatgggaaaagtcccatggcaatcaccaattgcttaaagaggttttgttacaataaaaatttgc

SEQ ID NO: 179579 - DNA, 336 bp, Homo Sapiens
  misc_feature (53)..(53): n is a, c, g, or t
  misc_feature (285)..(285): n is a, c, g, or t
atgggctggtggagtaatctgcacaggttcaggggccaggctctttctttgantgggctgacttctccatggcttcactcagtgactctgcatacttcatcatagccttgagctgtgagtcagtcagcacccagagcaggtcatccaacaggaacatcagcttggaggatatcacattgcaatctttggttcttcttttgagggctatttggatcctgccttggttcgtaataagcctcaatggagtggtgactgggtcctgatcaccattgtctgtagcatctncctcaattcggagtgttttgccaagttatttccttaaatgttaaaacctct

SEQ ID NO: 179580 - DNA, 328 bp, Homo Sapiens
  misc_feature (24)..(24): n is a, c, g, or t
  misc_feature (217)..(217): n is a, c, g, or t
  misc_feature (251)..(251): n is a, c, g, or t
cagcagcagcccctagaaagtaanccccccgggccttcagatcctaagttagtcccaaaagcctaaatgatttaaagtcaagttgtaatgcctaggcataagcactctataatacattaaattataggccgagcaattagggaatgtttctgaaacattaaactggtatttatgtcactaaaattctaacacaaacttaaaaaatgtgtactcatancatatgctgtaactaggtcttcatcatgcatttnctaaatttgtgtatgcatttgaatatatgaaagaatttatacaagagtgttatttaaaattattaaaaataaatgta

SEQ ID NO: 179581 - DNA, 414 bp, Homo Sapiens
  misc_feature (167)..(167): n is a, c, g, or t
  misc_feature (329)..(329): n is a, c, g, or t
  misc_feature (348)..(348): n is a, c, g, or t
  misc_feature (355)..(355): n is a, c, g, or t
  misc_feature (363)..(363): n is a, c, g, or t
  misc_feature (369)..(369): n is a, c, g, or t
  misc_feature (392)..(392): n is a, c, g, or t
gtccagaatgacaagatgcggactggaaaccttccagccaacatgaagaagaaccgtgttttacagatcattccatatgaattcaacagagtgatcattccagttaagcggggcatagagaatacagactatgtgaacgcatcctttattgatggctaccggcaganggactcctatatcgccagccagggccctcttctccacacaatttaggacttctggcgaatgatctgggagtggaaatcctgctctatcgtgatgctaacagaactggaggagagaggccaggagaagtgtgcccagtactggccatctgatggactggtgtnctatggagatattacagtnggagctnaaggaagngaggangagtgtgagagctacaccgtccnagaccttcctgggtcaccaaca

SEQ ID NO: 179582 - DNA, 427 bp, Homo Sapiens
  misc_feature (85)..(85): n is a, c, g, or t
ggtggaccatcatcattccattccgcaaccggcagagcacctcaagtactggctatattatttgcacccagtcctgcagcgccanagctggactatggcatctatgttatcaaccaggcgggagacactatattcaatcgtgctaagctcctcaatgttggctttcaagaagccttgaaggactatgactacacctgctttgtgtttagtgacgtggacctcattccaatgaatgaccataatgcgtacaggtgtttttcacagccacggcacatttccgttggcaatgggataagtttgggattcagcctaccttatgttcagtattttgggagggtgtctctggctcctaaggtaaacaacagttttctaaaccatcaatgggatttccccaataatttattggggggtggggggagggagaagg

SEQ ID NO: 179583 - DNA, 168 bp, Homo Sapiens
ggcagtctgaacgcccccagaaaattgtgccaaagagtttagaaaaataaatatacaataaaagtaaacacatacacacaaaacagcaaacttcaggtaactattttggattgcaaacaggataattaaatgttcaaacaatctgataaaataaccatttggaaactg

SEQ ID NO: 179584 - DNA, 225 bp, Homo Sapiens
  misc_feature (172)..(172): n is a, c, g, or t
  misc_feature (208)..(208): n is a, c, g, or t
tgatgtactcccctcgtttgtgcagccaaccctccttcacaatagccacgtcgctcatggtgcccgaggctcccgcgacgctcacgcgctcctctcaggctggcgctccccgagcccagctggcctggccacagcctctgatgcaccagctgacaggctgcctcctccaggnagcccctttgacttctttgacccagggtggctcggncttccctaagcccctgg

SEQ ID NO: 179585 - DNA, 330 bp, Homo Sapiens
  misc_feature (139)..(152): n is a, c, g, or t
  misc_feature (171)..(171): n is a, c, g, or t
  misc_feature (195)..(195): n is a, c, g, or t
aatgctgggccctggccgtggctcgtctgttcctttggggggcccgggcgggttgtgggaatcagtcttcacagacagacgtgagcccaggcggaggactcgttccttgcagaggtcagtccctcacctgcaggtgtcnnnnnnnnnnnnnncaaggaggggcaggcacanacccatgtctgacctgaacccgantctggggagcatcttcccgctccggccccacgacctccacagggttacattgtaatatatatgccccagctaacctgtctgatggtggcatcttcctgcagacatttcaaacatgtaacttttatatgaaaaaaa

SEQ ID NO: 179586 - DNA, 433 bp, Homo Sapiens
  misc_feature (21)..(21): n is a, c, g, or t
  misc_feature (38)..(39): n is a, c, g, or t
  misc_feature (41)..(42): n is a, c, g, or t
  misc_feature (50)..(50): n is a, c, g, or t
  misc_feature (213)..(213): n is a, c, g, or t
  misc_feature (299)..(299): n is a, c, g, or t
acgcttacagcacccgctacngaacctcaccaagcacnntnnacacgcancacgggcgagaagctaaccgctgcgaactgtgcggcaagggtttcacgtgcgtgtccaatctcaacgtgcatcggcgcaaccatgccggccacaagccacacaaatgccccgagtgcagcaaggccttcagcgtcgcctccaagcttgcactgcaccgcaagnacgcacctgggcgaacggccagcggagtgcgcaggagtgcgggcaagtgcttcagccacagccgctcgctgtcacagcatcagcgngcccacacggggcgcccgcaccgcttgccgccgtttgccattccagttccgcagtggggcattgccttcgttcttttgaggggggccggcttgaacagggaaaagccaggggttcttttgttgttcttagtttt

SEQ ID NO: 179587 - DNA, 482 bp, Homo Sapiens
  misc_feature (24)..(24): n is a, c, g, or t
  misc_feature (99)..(99): n is a, c, g, or t
ttgggcccaacaaaccatgaatangttaaaccccataaaacacaagacttgaattcgaatccccagcttccacgaacttccttaagctgtgtgaccttnaggtaaagtctgttaacctctctcagccttggctttgtggagtggagtgaagagcagggcctgctttcactggggtgttatcaggatggagggggacaaggcctatgaaagtgttttagcacagcgcctggcagcatcgtgaccagtcacggagtggaagctatcatgatcaaatctgatttctccacggtcaggccagccctgtcactacggatgaggaagagggggtctcatttcataaatgccttcaatgcggcctgtgagaaagacagcttgggacacctgtgtgagctgcctagtctctggcaatgtgggagtcggacccaaacatgagggttctggggccttggcacttactaccatttctacatctccatgaaaag

SEQ ID NO: 179588 - DNA, 234 bp, Homo Sapiens
  misc_feature (113)..(113): n is a, c, g, or t
  misc_feature (127)..(127): n is a, c, g, or t
ctggttcccagcaggggactcgggggatatacagtggctgcaccaaattggaggtgtgggttcctccaacacaatttgcttctgcccgttgtcttcctgccagctgggtttgnccaggatttctccntgtgggggctacatgcgaccctctcccctcctccctgactttagaggctggtgctgtgtcgggaggaaggtcagggctcctgagcagcaataaaggcccaggaagag

SEQ ID NO: 179589 - DNA, 564 bp, Homo Sapiens
attcggcagaggtccttcagcatcaccatgaacggagaggccatcgcctgcgctgagggctgccaggcattgttgacaccggcacctctctgctgaccggcccaaccagccccattgccaacatccagagcgacatcggagccagcgagaactcagatggcgacatggtggtcagctgctcagccatcagcagcctgcccgacatcgtcttcaccatcaatggagtccagtaccccgtgccacccagtgcctacatcctgcagagcgaggggagctgcatcagtggcttccagggcatgaacctccccaccgaatctggagagctttggatcctgggtgatgtcttcatccgccagtactttaaccgcttcgaaagggcaaaaaaccaggtcggcctggcccccgtggcttaagcctaagtctcttcagccacctcccaggaagatctggcctctgtcctgtgcccactttagatgtatctaattctcctgactgttcttcccaggggagtgtggaggtcttggccctgttccctgtcctaccaataacgtagaataaaaacat

SEQ ID NO: 179590 - DNA, 412 bp, Homo Sapiens
  misc_feature (176)..(176): n is a, c, g, or t
  misc_feature (212)..(212): n is a, c, g, or t
  misc_feature (300)..(300): n is a, c, g, or t
  misc_feature (345)..(345): n is a, c, g, or t
  misc_feature (350)..(350): n is a, c, g, or t
  misc_feature (366)..(366): n is a, c, g, or t
  misc_feature (380)..(380): n is a, c, g, or t
  misc_feature (389)..(389): n is a, c, g, or t
tagggagcgcgtcccaaggaaacaagcaccgcataaatacttgagttgggaacccagtgcttccggaagctcggagctcaccttcccgacctcgccgaagttgaaaaaaggcagagcagggagaggggccagctcaccctgctgagagctgctcagtgggcaggcgggacgtgctnccgggagacgcccactggagggatcgcagagcccgncaagctgcgagcgcgccaaagaccctgcgctttcggacgaggagcccaagtcctccgagacggggagggagcggcccgcgaggtgggnagctccgaagagggccgagtaggagctgcatggacagcatgcgtnttttncgccggttcccgacgncgggggcccttcgnggaaatttncagcccttggttggctttttgcc

SEQ ID NO: 179591 - DNA, 425 bp, Homo Sapiens
  misc_feature (74)..(74): n is a, c, g, or t
  misc_feature (214)..(214): n is a, c, g, or t
  misc_feature (288)..(288): n is a, c, g, or t
  misc_feature (310)..(310): n is a, c, g, or t
  misc_feature (322)..(322): n is a, c, g, or t
  misc_feature (338)..(338): n is a, c, g, or t
  misc_feature (347)..(347): n is a, c, g, or t
  misc_feature (397)..(397): n is a, c, g, or t
aatgtgcaaataaatagaaaaggaaaactacattcaaaacagctgcaaaggaaggacaagccccagaacagaanttcctcaagaacggaaaagaggcgctccctagaagcatgcggggatgggaatactgggaggaggggctcggcggggtctccggctgcacccggggcccaggtggctctgcccgagaacggccgtgggctgggtacaggantcttgatggcaagttcccttcttagaaaaccaggatgtgtacaaagtgcctgtgtgacacttggggagcggggntggggagcccagggaggacggntcagcatcggantcgcccagcctgggantcaaaggcntcaggagcctccaggttccacaggaaattttttagaaacacattttccanttcctgggaaacttgagtccagcttttt

SEQ ID NO: 179592 - DNA, 389 bp, Homo Sapiens
  misc_feature (55)..(55): n is a, c, g, or t
tatggaaggagaaccaaaggacagaagacaaaagcgagcaccccccacgcccagnccaacgccatcctctgtacacaattacaacacaggtccagaatgagagccctggcccaggaagtgggggagacagggagggctgaagacagggaaaagaaagccagctccacctcatggtaaggggagctatggagtgtaagaatctgaaactgctgactcccatcaccaggagtcacccctgggatgacaacgggccattcaggacagcacctaggaggggacccagagggaactggggcaggagcgacagagaccccagctgagcctcatgggagatgagaggctccagactcatttgcagctgcccatctgtcctgcccgtgtagggatcc

SEQ ID NO: 179593 - DNA, 402 bp, Homo Sapiens
  misc_feature (233)..(233): n is a, c, g, or t
  misc_feature (266)..(266): n is a, c, g, or t
  misc_feature (297)..(297): n is a, c, g, or t
  misc_feature (304)..(304): n is a, c, g, or t
  misc_feature (324)..(324): n is a, c, g, or t
  misc_feature (328)..(328): n is a, c, g, or t
  misc_feature (374)..(374): n is a, c, g, or t
  misc_feature (384)..(384): n is a, c, g, or t
ccgctcagaggagaagccctttgcactcttcctgccccgggccacgtttgtgagcagcgtgagacccgagagctctcggctgccagagggtagctcaggcctgtccagctacaccccgaagcactctgtggccttcagcaagtggcaggagcaggcgctggagcaggccccgagggaggcagagccccgcccgtggaggccatgctcacacccgccagtcagaatgacctctnggacttccgcagcgagccagccctgtatttctnagcccagcactgccagggaccaagggttagnccagctntggggagttcccggaagctngggnagttagccaggggattactttcaacccgttttttgcctttgttttnggcttcaatnttatttccaacccaaccc

SEQ ID NO: 179594 - DNA, 311 bp, Homo Sapiens
gctggcagcgacgggactgggcgaactggcctgcaaatgggggacacgtggtggcttcaatggacaaatggaaaggtccccaagaagaacccaccattggcagcataatggggagctggctgaagggggtgctgagcccaaggatccaccccctcccgggccccattctgaggaccttaaggtgcccccgggagtagtcagaaagtctcgtcgtggccgtagagaaaatacaaccctacccggaacagcaatagctcccgccaggacattaccttggaacccagccctacagcccgagcagctgtccctct

SEQ ID NO: 179595 - DNA, 469 bp, Homo Sapiens
  misc_feature (96)..(96): n is a, c, g, or t
  misc_feature (102)..(102): n is a, c, g, or t
  misc_feature (106)..(106): n is a, c, g, or t
  misc_feature (174)..(174): n is a, c, g, or t
  misc_feature (360)..(360): n is a, c, g, or t
ttattgagaccttcagtccctacccactcccagaccctgcagagattgtcctctgctccctcatgtggctaaaccttctcaacacccagagggtantggggnaagnacctcatatgcatgacctaccttggctgtggctgtttcagggtggtgtgcggtagtgttgttcttggncatagagcttcaggggctgggatgggccatcaggggaagctgagtatgatagtgaggtgggctggggttccacggtactcaccacaggggagtaagttggtgggagggatgctgaagatgggacatggtttgagagcagcccagaggagtgctgggctgtggcctaggaatacaccatgggccctnttcacactgcactgctcagcttagcacactagggtggcccagacaggggtccacagtgaggaagcaggacaagatggaccacaaaggcctgcagctgggaaagtgctct

SEQ ID NO: 179596 - DNA, 713 bp, Homo Sapiens
  misc_feature (38)..(38): n is a, c, g, or t
  misc_feature (43)..(43): n is a, c, g, or t
  misc_feature (61)..(61): n is a, c, g, or t
  misc_feature (589)..(589): n is a, c, g, or t
  misc_feature (615)..(615): n is a, c, g, or t
  misc_feature (621)..(621): n is a, c, g, or t
  misc_feature (667)..(667): n is a, c, g, or t
  misc_feature (676)..(676): n is a, c, g, or t
  misc_feature (685)..(685): n is a, c, g, or t
  misc_feature (696)..(696): n is a, c, g, or t
gggcccatcaaggggcaagcctcagtcatgaatcattnaggtngggctggggttcccacgntacttcaccacaggggagtaagttggtgggagggatgctgaagatgggacatggtttgagagcagcccagaggagtgctgggctgtggcctagaatacaccatgggccctgttcacactgcactgctcagcttagcacactagggtggcccagacaggggtccacagtgaggaagcaggacaagatggaccacaaaggcctgcagctgggagagtggctcctggctgtcagctgttgggacagggtggaggcaactcattctcatggagcccagccaggtccaggctagaaccatgtgcctctcgaaagagccctgggaaactgctggcagtgtaacttcaggtgtaggggagccgggtctggcttaggaatggatgccctgggtgtgtgacagggatgtggcatggctgagagccacaaggcccccttgtaaggagttggtgctcgggaatcagcagaagcatgcatcaggggcagcagagggagcactcatggagaaccatgggtgtcccaggggaggaaaggtgncctgaagggggaccagcccttcaggncccggncggattttcatctcagtgacgtttgagggagtagtagaagcccttnccactgggncccagttgnatgccattggncataagagaggtgggag

SEQ ID NO: 179597 - DNA, 453 bp, Homo Sapiens
  misc_feature (348)..(361): n is a, c, g, or t
  misc_feature (386)..(386): n is a, c, g, or t
  misc_feature (400)..(400): n is a, c, g, or t
  misc_feature (411)..(411): n is a, c, g, or t
  misc_feature (419)..(419): n is a, c, g, or t
ctgaagtttcccaccaggatgaccccacagccagagtcccttggcagcccctcaccccagaccccccttctaaggaaaaagagaggttcagagcgttggaccttcatgaacagtggcctggctggcgtggcagggccaaggccaccccactgccatcccccttctgtgtgtccctcttcccccagttatgaggcccagggctgaagctctcttccccagcattgcccccacccggaaaccccacctttggagagttaattgtctgtgtgaggtgcttaacctatcagccctgagaacacaaagcaataatctttgttactgagatgcgcggctgttcgtgttttgggnnnnnnnnnnnnnnaatgtttcctaattaaaagagaagnggcattttattggnttttaattttnaatttttntacaagtttgagctgagtcccgagacattaggtt

SEQ ID NO: 179598 - DNA, 415 bp, Homo Sapiens
  misc_feature (187)..(362): n is a, c, g, or t
cctggctctagagcccacactcctgactgctgtactctgctcctctcaataacagctgacagttcatggttacttggcaagggttttcacgtcacaacggatttaattgccacagcattgctaggtggtgggttccctagtttcctgaattttcagaaacgggatgttttgtttgtttgtattttgnnnnnnnnnnnnnnnnnnnnnnnnnnnnnnnnnnnnnnnnnnnnnnnnnnnnnnnnnnnnnnnnnnnnnnnnnnnnnnnnnnnnnnnnnnnnnnnnnnnnnnnnnnnnnnnnnnnnnnnnnnnnnnnnnnnnnnnnnnnnnnnnnnnnnnnnnnnnnnnnnnnnnnnnnnnnnnnnaaattttgcaagggatggttcacgagacacattttggggccgaagggttaaag

SEQ ID NO: 179599 - DNA, 440 bp, Homo Sapiens
  misc_feature (26)..(26): n is a, c, g, or t
  misc_feature (37)..(37): n is a, c, g, or t
  misc_feature (114)..(114): n is a, c, g, or t
  misc_feature (423)..(423): n is a, c, g, or t
tataaggttcccctgggagaaattgncctttcgggcncccactgttaatccactgagactgattcctaatgcaaagcagggaagaccagaggcagaaaccccgggagagtggtngatcagtgcagcccccagatatcggaatggaggagcaaagtttcattcacggatgtttgttgaatgctgctgccccaactcttcctttgtcacctctaggctattccactaagttacttataaactggtggctttaactgagggctgtgtaaaggtactatttggcatgtgaagtcaggataaatttatcgaatgtccgttttccacatgcaactgtgttacagaagtagtaaaattggaagaatcatgtttatggtgttaccactgatggaaacacacaaacaccaagctaataataaatatataaanttaaaaagctaaaaatt

SEQ ID NO: 179600 - DNA, 463 bp, Homo Sapiens
  misc_feature (91)..(91): n is a, c, g, or t
  misc_feature (218)..(218): n is a, c, g, or t
  misc_feature (271)..(271): n is a, c, g, or t
aaaaggtctgggggaaactgtcctgaaacgactgaaccctgaagaggcccgcttaatgctgctttgctttttcataaccgtcccgcaaaantggaacggaggtccccggttgcctggttcaggtccccatggcttgttctctggaacctgactttagatgttttgggatcaggagcccccaacacaggcaagtccaccccataataaccctgccagtnccagggtgggctggggactctggcacagtgatgccgggcgccaggacagcagnactcccgctgcacacagacggcctaggggtggcgctcagaccccaccctacgctcatctctggaaggggcagccctgagtggtcactggtcagggcagtggccaagcctgctgtgtccttcctccacaaggtccccccaccgctcagtgtcagcgggtgacgtgtgttcttttgagtccttgtatgaataaa

SEQ ID NO: 179601 - DNA, 424 bp, Homo Sapiens
  misc_feature (343)..(343): n is a, c, g, or t
  misc_feature (366)..(366): n is a, c, g, or t
  misc_feature (396)..(396): n is a, c, g, or t
  misc_feature (402)..(402): n is a, c, g, or t
gcatttctacatttctgtcctccctgcgttctcagcttgcttaaccattcctctacctcttgcatttttttgcggataaatgtatccccatttctgcttctctgtttcccctccttttccattgtttttccttatggtactactttctcaggtgctacatatcatatatttgtcccatctataacatatttaaatgctataagtagtaactccattaaacaaaggcatttacaaaagcacacaggtgtttagaaaagcaatagtttcatcaattccaagttatgtggatattgtaactggccacaagaatgaaatgggaggggcatttgggtgtcataaggtnggcatgtctttgatgaccaaggnaccaaaacggcccttccattaatatggccnccagtngtaattacccctttttgggaac

SEQ ID NO: 179602 - DNA, 362 bp, Homo Sapiens
  misc_feature (20)..(20): n is a, c, g, or t
  misc_feature (176)..(176): n is a, c, g, or t
  misc_feature (223)..(223): n is a, c, g, or t
  misc_feature (317)..(317): n is a, c, g, or t
  misc_feature (339)..(339): n is a, c, g, or t
ccgcactgcacacgggaatncctaggtcccttcccgacccagccagctgcagggcacggggacctggatagttaagggcttttccaaacatgcatccatttactgacacttcctgtccttgttcatggagagctgttcgctcctcccagatggcttcggagggccgcagcagcctntggaccctggtgacctcctgtcactcactgaggccatcagggcctgnccaggcctggacgggccctccttccctcctgtgccccagctgccaggcggccctggggaggggtggtgtggtgttgggaaggggtcctgcaggnggaggaggactttgagggtctnggggcagctgtcctgaaccgact

SEQ ID NO: 179603 - DNA, 462 bp, Homo Sapiens
gtgctgacaaaccaaggtttacaagtccctgcatcttgaatcagaattgtaacaccttgtggcattggagctatgcaagcagctgttaacctaaagctgttcacttgtacgggttggttaaacctcacctactggtgtataatttatggtctcaatagcagtgcatgattcaggtaagcctcttttagagtagtcaggcagtaagtattaagcacctcctccatacacagcgtttgggtaagtcaatgaaagggtcctaaggacttagctggcacagccctgctcccaaaggcactgtcaattaaaaaatactttcatgcataaagagtggtacatgaccacaacctggggaaagccgtgggaaagggcattaggctttgaaattccacgtcccagttttgggttccatctcttttttaatgggagggtaatgttaaggttagggggaggaaggttggctgt

SEQ ID NO: 179604 - DNA, 441 bp, Homo Sapiens
  misc_feature (21)..(21): n is a, c, g, or t
  misc_feature (179)..(196): n is a, c, g, or t
  misc_feature (380)..(380): n is a, c, g, or t
  misc_feature (389)..(389): n is a, c, g, or t
ggtaaaaaagccttggtgctnctacctattaagaatgtctctttctctatatttattaagcttcaaactttattgcttcgatttttgtggccctatatttagtattagcacaccttggttttgagaaaaaaacagggctttgtttttttaaataattactagcaactctgtgactacannnnnnnnnnnnnnnnnnagagacaggatcttgctatgttgcccaggctagagagcagtggcttttcacagacaaagtcataatgccctgcagtcttgggctcaagcgattctctcttccttgggcctctgggagtagactaaatgtgttagtctttggaatgggaaaacaactattttctcatccattggggtcaatattngactggatncagtagtaggtcttttaccctttctgggacataagtctaggttttagaattc

SEQ ID NO: 179605 - DNA, 655 bp, Homo Sapiens
  misc_feature (108)..(108): n is a, c, g, or t
gccgcctctgtaaccactgcacacaagaaaaccagcttctgggagagggggatgattgttgggactttgcgaattacctaaacagcccagggccgaggcgccgccgcntcgcgtcctggtcctcctgccgggtgtggggctcccctgcccgagatggccagcgggcgcgccgagagtatcctggagccatctagtcttgcctcggaggcggggtgggcttatttgtgcggagaagaaacggatctcttaatggggtgagatttttcctccgtacattgttcccatttccgcagtttcacttggccctcggttttctagccagagtaatcaccaaatgaaattagctggagagcgtttgatggcgcagaatcacggtctgaagatgtttaacgctgtattgccggacgcgtttgatggtgttctcttcggcacaattaattttgcaaagttcagaaatgtgccagacagacccctggcacgcagtcaggactctacagacacaccttgagtaggaaacaggcttgtttgtttcatctgtgatttatgtgatgcaccagcaccaaggccaacgtgttttttaaagacctttcgatgaaactccaaagcaatttataaattggcaaaatgaagcttgttttgtaaaataactcttccc

SEQ ID NO: 179606 - DNA, 449 bp, Homo Sapiens
  misc_feature (19)..(19): n is a, c, g, or t
  misc_feature (28)..(28): n is a, c, g, or t
  misc_feature (35)..(35): n is a, c, g, or t
  misc_feature (47)..(47): n is a, c, g, or t
  misc_feature (70)..(70): n is a, c, g, or t
ccgaaagccacctgccttntacagaatnattttanaaagatacatcnatgtgtatttagttttaaattgncagtctagttccacaaactatgttattccacaggataaattaacggagtagagtgaaaaggctgcaatatccaacatccctgtgatggagagagaacaagagatcaccctgtacatacgagaagtgctgaactgcaaagctgaaggcacggtgaagggagccttaatatcttgagccttttctttgaaaagggtactcattttaaactggatttctcttacacaaaagaccctgaacattgactaaagggaagaatatgtcaaatatttttatgtagccagaatcacagctactgtgaattgtcttaagttgtgattttctcgaagttctgaagtagtgggcttcaaattaatgggcttttaaaatagttgcaagcagt

SEQ ID NO: 179607 - DNA, 382 bp, Homo Sapiens
  misc_feature (53)..(53): n is a, c, g, or t
  misc_feature (94)..(94): n is a, c, g, or t
acggcccccgccaccgccgcctgcaccgctatgatgtattctgcttcgctacngccctcaaggggcgggtgtactacctggagcaccctgagangctgacgctgacagaggcaagggaggcctgccaggaagatgatgccacgatcgccaaggtgggacagctctttgccgcctggaagttccatggcctggaccgctgcgacgctggctggctggcagatggtagcgtccgctaccctgtggttcacccgcatcctaactgtgggcccccagagcctggggtccgaagctttggcttccccgacccgcagagccgcttgtacggtgtttactgctaccgccagcactaggacctggggcccttccctgccgcatttcctta

SEQ ID NO: 179608 - DNA, 467 bp, Homo Sapiens
  misc_feature (382)..(382): n is a, c, g, or t
  misc_feature (408)..(408): n is a, c, g, or t
  misc_feature (437)..(437): n is a, c, g, or t
  misc_feature (455)..(455): n is a, c, g, or t
caagccgggaagcgggatggggacagtgagtacggagaggaacctattctccatgcagatcttgggagctgcaacggtgcatctgtctcacaaaaaggttccttgtcccctgcccgctcagctacccccaaagttcgacttgtagagccccatagcccttctccttcaagcaaattcagcacaaaaggcctctgtaagaaaaagttgagtggggaaggggacacagaccttggggccttatccaatgatgggctctgatgatggaccctcagtgattggatgaaacaagcaatgatgcctttgattctttaggaaaggaagtgtatgggaaaaaggaaaaatgttaaaaaacccctcttagttttaaaacctgaaaagattnccttcccaggagccttaaagttcagncccgttcccatttgcccctggccattccncccacagcaattttacancttttccggaca

SEQ ID NO: 179609 - DNA, 459 bp, Homo Sapiens
  misc_feature (15)..(15): n is a, c, g, or t
  misc_feature (30)..(30): n is a, c, g, or t
  misc_feature (38)..(38): n is a, c, g, or t
  misc_feature (49)..(49): n is a, c, g, or t
  misc_feature (193)..(193): n is a, c, g, or t
  misc_feature (203)..(203): n is a, c, g, or t
  misc_feature (240)..(260): n is a, c, g, or t
aagggatgtctcacntcctgcccctgggcntctcaccngctacgggaantgcctaacacttgggtatgtaaaacctggaagaggtgtggggccaccccatcccctcctcaaagaaattcacaggcacagtatgaggctaaagtaacttccatcttggatgctaatctaccatgttgacttctgataacccagncccctggaangccctctaagatttctacttttatctattaaaagaannnnnnnnnnnnnnnnnnnnntgtaaaccctggccttaagcaagttataggctaagttgtaaacagcattcttgcctttccctgaggaggtgacttcagtgtctcacatgttccttcatgtacccccttttctctatggcatataagccctgggtcggggggtaactgtggggatcactgcctgagacatggcttctgtgcataagtccctagataaatg

SEQ ID NO: 179610 - DNA, 433 bp, Homo Sapiens
  misc_feature (22)..(22): n is a, c, g, or t
  misc_feature (124)..(124): n is a, c, g, or t
  misc_feature (133)..(133): n is a, c, g, or t
ccgaaaagcccctgtccttcanaaaaaaaccgaggattctgggtgctgctttccctactaccctgggctgctgccccttcatccccaaaccctgagaagttcttcttctgcttcctgccccaanatcatcaanaggacctatttccccattttcctgctcttgcctgaacccagttattggctgtggtttcgaaatggctgatcatgaggaagagtctgatccgacacttggaggagcgaggggtgcaggtggtcttttggtgccttaatgaagagtcggattttgaagcagccttcagcgtgggagccactggcgtcataacggattatcccaacagcctgcggcactacctggacaaccatggaccagctgcccggacctcctaagtccagaagcctcgaggtctcctgtttctcttcctgaaaaataaat

SEQ ID NO: 179611 - DNA, 432 bp, Homo Sapiens
  misc_feature (19)..(19): n is a, c, g, or t
  misc_feature (26)..(26): n is a, c, g, or t
atggccccaccccccaggncccaaancccccacagacacacccctaaccctgtggccactggggaccagaaatagatttccccatttgaagaggcacctcccctgtgtccagtccttgtttgaaggaggtggtgatggtggatagaggtgaaggaggtagggagtgcccctcccaagtgcaaaaataacaaatatgattattgacccatcggggaattctcacacattgatttgttttttaagcaattgcccagaaacccccttttttagcttttgcttggggtgggggtaggagttaaggtttattcaatcctgtcctgggtagggcgaaagttaatctagccatgtgatttttcagaaaagtaagtggaacatgctgccacttttcaattctgtcagtgcttccacatggaaacaaaatgcaataaaatt

SEQ ID NO: 179612 - DNA, 449 bp, Homo Sapiens
  misc_feature (298)..(298): n is a, c, g, or t
gcgccccgacgcggctcctggatccgctcctgcctgcgcccgcagcttgaccttctcctgccactagcccggccctgcccttaacagacggaatgaagtttccttttctgtgcgcggcgctgtttccataggcagagcgggtgtcagactgaggatttcgcttcccctccaagacgctgggggtcttggctgctgccttacttcccagaggctcctgctgacttcggaggggcggatgcagagcccagggcccccaccggaagatgtgtacagctggtctttactccatcggcaggcnccgagcccagggaccagtgacttggcctgggacctcccggtctcactccagcatcttccccaggcaaaggcttgtggggcaacggagcttgagagagggcgggagtggggaaggctaagaatctgcttagtaaatgggtttgaattttaaa

SEQ ID NO: 179613 - DNA, 461 bp, Homo Sapiens
  misc_feature (373)..(373): n is a, c, g, or t
  misc_feature (430)..(430): n is a, c, g, or t
  misc_feature (435)..(435): n is a, c, g, or t
gtggaaattaatgctctgttcttcactagaatgtagtaagtggttaaactgagctatcccccacctgatgactattggcatccatttgcaaggccaatggctgggattaagggttaggattatttgtagctagaaggtaattttatttctgtgaaactaattggctcatatttgaggttaggtgtggccttgaccttaccagtacatttatacccactaccagttgactagcccagataattgttaaatggtgcttcttttctgcttctcagtagacttccatgccattacaaaggaaatttgaattaccctagtgtttgtatattcccatggataactatgtataacttctgttacaccagcttatgtattngttaaccattttaagtgtaaaccaatgccaccagctaaccactttaaaaatggaaanctaanttagttcttgctttgggggaaatgcc

SEQ ID NO: 179614 - DNA, 200 bp, Homo Sapiens
  misc_feature (21)..(21): n is a, c, g, or t
ggtcattaacaacaatttatnattggcacacttatcagtaaagcatacataaaatacagctgttttttaacacacggagccactgtgcctttacatgtgtggaggaacatattaatatgcaaatggaaaaattaattctcttataaagtttcacataaatacactggagttgcccaaaaacgaaaagtccccataaaaga

SEQ ID NO: 179615 - DNA, 409 bp, Homo Sapiens
  misc_feature (362)..(362): n is a, c, g, or t
gtgagactcagtgcactgtcctcctcccagcgaccccacgctggaccccctgccggaccctccacccttcggcccccaagcttcccaggggcttcctttggactggactgtccctgctcatccattctcctgccacccccagacctcctcagctccaggttgccacctcctctcgccagagtgatgaggtcccggcttctgctctccgtggcccatctgcccacaattcgggagaccacggaggagatgctgcttgggggtcctgggacaggagcccccaccctctcctagcctgggatgactacgtgaggtctatatctcgactgggcacagcccacctctgtgctgggacaaagggccanggcccaggggcaaacccaggggcaaccccacagggccaagcccaggg

SEQ ID NO: 179616 - DNA, 640 bp, Homo Sapiens
  misc_feature (44)..(44): n is a, c, g, or t
  misc_feature (127)..(127): n is a, c, g, or t
  misc_feature (136)..(136): n is a, c, g, or t
  misc_feature (184)..(184): n is a, c, g, or t
  misc_feature (302)..(302): n is a, c, g, or t
aatgtagctcccagcttgtctcccctggcttctctttgaagganaaaaatgtaaaatatgcactgagaaagcccagcccccgcctgccttagtcagccccggcagcagggcagcccatgggaactcnggaaaagcnggaaccctttccaaaagcccagagatgccctgggctcagatctgtaantctcccaggagctgtgatagagcaggccacacaaagtccctacgcctccctgctgcctcccccagatgcatgtgatggcatcaccattccccaaattgaatatcagcatgcggcctgnccagggactctttagatgcatgaatttatttatatgaaggctctcacagagacacacacagcacttcagtagcatttgcattcctggttaaagaatcaccaatatttaaaataaaaactttcctgaaattgggactgtcatgttatccagaagggctggtacatccgcccaccatgtccccctgctgggtcaggagccaacacaggaccctgcgtgtgagcgtgcctgacatctcacgcacggccactccagagccggtccctgtccttggaaagctgtgaagccttgcgtttgagttccttctcgatactgacggctccgtgctgacattctgagct

SEQ ID NO: 179617 - DNA, 583 bp, Homo Sapiens
  misc_feature (32)..(32): n is a, c, g, or t
  misc_feature (41)..(41): n is a, c, g, or t
  misc_feature (90)..(90): n is a, c, g, or t
  misc_feature (127)..(127): n is a, c, g, or t
  misc_feature (172)..(172): n is a, c, g, or t
  misc_feature (234)..(234): n is a, c, g, or t
ccgggttcaacaaaccaaaccccccaacctgnccccttgtngggttaaaggcttggctccctccccccaggcaacaaaatgatcttcaancagggtgacccgttccctggctctcatggtgtgaatnagggctgctggagggagggtggaggggcacactctcccaggaacnaaggttagcctccagaacagggccctgggagagcagtggcagttcccgctgctggaggaagnaaggcgggagcccctgaggcctagacttcatgttgggggtcctggtgggaagtggcctctcctctgtggccccagaacccctacattgcaccttctgcagggcttcaacggttgcaaagccctgaccagggtcatatttgcactaaggagcctcctgaggtaacagcaagtcccatttagaaggggaaagtatctcccgagcgcgggtggtgaaccccacttattgctgggaaaaagtgaggccaagggcagggctggggtggtattggcacctgagaagggcaggcctagcccagggcctcagctctgaatgaattgctgatgccagccttggccttgggtgaggcct

SEQ ID NO: 179618 - DNA, 386 bp, Homo Sapiens
  misc_feature (11)..(11): n is a, c, g, or t
  misc_feature (21)..(21): n is a, c, g, or t
ggagaaaaatnaaagtggggnaaaagaaccatacagtggtttgggtggaaccacattttttacaagaattgagtccagttatactcccagaaatgaccaagagaaagttggtctgaatcatggaaaaagggcagaacctcaaagaaccagtccctcaaccctacccactcattttttatcctgagcatggacaactaacaactacaaaatcagaaatagaattgagtagagtatgtatatgtgtgtttggagaaggtggggaagaaaaggtagggaaaaccaaagtagaagatactatgcttgtgtaagactttctatctaagcccaagtacaaatatagtttgaaaattgaagatattaaagtgattggaagacagagaagaaaa

SEQ ID NO: 179619 - DNA, 413 bp, Homo Sapiens
  misc_feature (21)..(21): n is a, c, g, or t
  misc_feature (35)..(35): n is a, c, g, or t
  misc_feature (51)..(51): n is a, c, g, or t
  misc_feature (83)..(83): n is a, c, g, or t
  misc_feature (109)..(109): n is a, c, g, or t
  misc_feature (125)..(125): n is a, c, g, or t
  misc_feature (146)..(146): n is a, c, g, or t
  misc_feature (182)..(182): n is a, c, g, or t
  misc_feature (187)..(187): n is a, c, g, or t
  misc_feature (196)..(196): n is a, c, g, or t
  misc_feature (198)..(198): n is a, c, g, or t
  misc_feature (228)..(228): n is a, c, g, or t
gcctccacaactgggagagcnagcccgtcttgaangtttaaaaaaaccccngggtctcccacccttcctttgatttgtgcaantctgtcttcccacagttccggagccntcagtgaggggtagcnacatgccccatgcctgccctntctttccttctttgctcactttactatgggtgtatnttaancttgtaccnanatatgcatgaatgagtcatgcacatgtatncgttatgtatttgacaagtggtggtgaaacaaaatcaaaacagatttgatttgtgtttttgaaatgtcagtacattttgtgccactaacactgtgatgtataaaagagctgtttgaatgccttttaatgttgtgttttgtactctggaatcatatggaaaaagtttgatttgtaatttcaataca

SEQ ID NO: 179620 - DNA, 403 bp, Homo Sapiens
actggtcaaaataccataaccgtaatacctgtgccatgacctcattccatgccatatttttatacaagattaaaatacaccccatagtaaagtgaagcaaagaaggaaagaaagggcaggcatggggcatgtagctacccctcactgaaggctccggaactgtggaagacagaattgcacaaatcaaaggaagggtggagaccctgggttttttaaacatcaagacggcatgctctcctagttgtgaagcattagcaattaggttttaacgcaggcccctttgttccttttggtgtttttggtaatacctgtcataatcccttcattttgtttattttcataagggcttaggttaattatcagaaataaacaagctttggtattttttaaagagaacttcatc

SEQ ID NO: 179621 - DNA, 522 bp, Homo Sapiens
  misc_feature (47)..(47): n is a, c, g, or t
  misc_feature (413)..(413): n is a, c, g, or t
  misc_feature (442)..(442): n is a, c, g, or t
  misc_feature (497)..(497): n is a, c, g, or t
  misc_feature (507)..(507): n is a, c, g, or t
gcagaatctcactgcagctggcaaaaggcattggcagctctcagaantccctttactcaacgttgaagctgcattttggtcaatgtgggtaacttactttagaaaacgacttgagtttaggtctcccccacccatatttaatttttcccaagttgctggtagaagagaaatttaaaagtggatcaatcctcacagagagagttctttttgttgttgtttattgaaaaaaatgcaatacaagaagcaagaccaaacagatatctaaacactacaaccacttctactacgaaaggccaaaacagcagacttgattattgcctgtgtagtctaaagattctgccaatctgattctggctgcccgagtttcctatttttttcaagaaaatgtaaacaactacttgatatgattcatnaattttaaaaaaatttacaaagctccttncatttttgtcaccaaaataatacatttgaggggggtttgtgggaaacaaccagcngggggtgagntcccggggcggaatt

SEQ ID NO: 179622 - DNA, 490 bp, Homo Sapiens
  misc_feature (390)..(390): n is a, c, g, or t
  misc_feature (402)..(402): n is a, c, g, or t
  misc_feature (424)..(424): n is a, c, g, or t
  misc_feature (428)..(428): n is a, c, g, or t
  misc_feature (430)..(430): n is a, c, g, or t
  misc_feature (432)..(432): n is a, c, g, or t
agaatggtttaaaaattgaggcatttcgcatcgaaatcaggatttctggcttcccttaggcatttgggagcaccagcagaatggggtcactattgttgcatgaagacaacacctctgcacccctggatgtggccacggcagtccctaccccattgacttgcgcccagcccacattacacatcctcatgacctgcgtggcaggaggtctcactgacatggctctgtcagcagtggctggtacccttgtctcctgggccttgcttagagttggggctcatctctgctgcagtaactgagccaaggggtggttttgtggccacaagaatcatctttatgcaggctcagcaatgcagggccagggaacttatatctacggcagccttaaacccnaaacccaagganagagagaaagtgtcatcttttnaganananccttcttcctgctgggagagagccttgcccaccttcctgttggctctctgtccgcttc

SEQ ID NO: 179623 - DNA, 130 bp, Homo Sapiens
ctggtggctgccttctcatttcccagaggcttcagagtccctcagtccttgggttgcaccgtcctcccaccagactgacccaggggccagtccacttcggtggggaaccactaagataggtgtgctctcc

SEQ ID NO: 179624 - DNA, 445 bp, Homo Sapiens
aggatcaaaactcctccctcatgatcacccatttcgaaaaccacacccaataactggttccaggcaagagcaggaaaatgggaaaataggtccctgttgatgaatgttgggcaggaaaccagaagaagaacttctcagggattgggatgaaaggcagcagccccaggtagtaggaaagcagcacccagaatcctcggcttattgtgaaggacaggggcatctcggggttggcagccttgcatttcttcatgaccgagctcttctccgaggcccagatggtgatttcattacggtcatagcgtctcaccaagcctgctcacggatgagctcttcgttcttccctttgatctctacgctcatgggtgtccttggaaacctctggaacaggtcctccagacgaaccatgcgccggtctgacccgtgagcaaagtggcctggagagaag

SEQ ID NO: 179625 - DNA, 414 bp, Homo Sapiens
  misc_feature (247)..(247): n is a, c, g, or t
  misc_feature (368)..(368): n is a, c, g, or t
gcaagacttggcccctccacctgtccctaacggacggcaggtcaggaaagccaggactcaggggagaagcaaacccccaggattgaaggctagggttctagggcctttgggtggggagggcccgggccggacagcctcagctccgtcccctgccccacaagattcacctgggcctccagtcccacgctggccccaactactgcagctctcggcttccgcccaacagcctctggaggtgaggcggganattgccctcagcgaggctgggcggcgggtcctgctgtgccatctccctgtgcgcctgagcagatcaatccaccagttgcaaaacagggctaacggcaccttgcaggacagcagcacggttncattccctcatggttcagttgccttttgcgggccaaggaatttttg

SEQ ID NO: 179626 - DNA, 467 bp, Homo Sapiens
  misc_feature (59)..(59): n is a, c, g, or t
aacgccaatgcggtgcccagcaacacaaatcctctgtcaccgtcagggctgtaggctgnctttcccaggggcagtgaagcccgcaacttcccattgactgaaatacaggtgcaaggaagtaggtgacctgggccccaggacgttcccacgctgagctctgtacccacaatcttggcttcggaccccaatgcccaggtggaaaataggtcccagggaatgtggcacccagaggccgtagtgccgctacaaactgtccgcggcgtacagtgtgtatgatcacagttccatcctcagatccagacacagccatgtcaagttcagtgctgatggccacacagctcactgcagccccatgcccatacaggacctgcacaggctttggtgccaggcctactgacagaccaccctgatgcaggagccgccacaccatgcacgtggtgtcccgggagcctgacctgtgccgaagt

SEQ ID NO: 179627 - DNA, 445 bp, Homo Sapiens
  misc_feature (366)..(366): n is a, c, g, or t
  misc_feature (419)..(419): n is a, c, g, or t
gactttgtcactctcaaatataaatgtgaatcacttaaaagacatttgttttcctgtaataaataaaagattagtaattagttttacgtttgctttcaagggattctggttgtatttattgtcaactaaataactttgatcaaatagccaagactctaacatataggcaagagtttgtagggaatcgtgagttgcttggcttatactgtgttcttggtgttaagtattaacaggaatatggcctggtaattagaacttgtccatcagaattgccaaaagtggggattcgggggtctctgcctatgggagggatgtggttcagaaataaaggaatttggaatagggataagctgtaggggagggtcnttaggtattgaggattgagtattctggaagattaggctgtggaggaggagggncaggagccgatgggaggggaaccaat

SEQ ID NO: 179628 - DNA, 412 bp, Homo Sapiens
  misc_feature (23)..(23): n is a, c, g, or t
  misc_feature (32)..(32): n is a, c, g, or t
accccgggatgaaaaaatcgcantcttgaacnagggcctgacgtccttatggaaaatggcgttgtggcccttggagaactaatctccggctgtcagccgacggggactctccagcagggccacggctccctgcaaagcccttggctgggggatcggacaaggctctcttccagtggaggcaggggcgcttgcccctgcaactgggggccctggccaggctcacagatccacatgttccccacggccacagcctccgtcacacacacacgtggggacaatcacaggggtggggacacagccaccagctcacaggcaccaatactctctcacactgtgtcccacaccgcacagggcccaacagcaggtgctcctgcccttgaaggattcccaggcttggcagggaaaattgacc

SEQ ID NO: 179629 - DNA, 268 bp, Homo Sapiens
  misc_feature (18)..(18): n is a, c, g, or t
aagtttccttcaggacanggccccatgtagtccagctctacaaggtggctgctgtgtgaactaggctacatgccgaaacgggactgtcgggggaatcagcagggggggcagaccaacagccctgtaagacatagcaataaagattataaatagcatccttctgaccgccttttgatgtactgtccaaggccaggtggaaaatctttcctcccctgcctttccccactaatcaccttcccctcatttttcaataattgtttctgagccc

SEQ ID NO: 179630 - DNA, 497 bp, Homo Sapiens
  misc_feature (25)..(25): n is a, c, g, or t
  misc_feature (104)..(104): n is a, c, g, or t
  misc_feature (195)..(195): n is a, c, g, or t
aaaaacaaaaaagctcggctccttnccccccaaggaacaattaagctttatttgtctcttcccacactgcaggcccccagctgggcaggcaaggggtgggaaancaggaacagggggcagggagggagggtggcaggcagggaggaaaatggcaggtggctggaacacaagaaagcaaaggggacccagctggtncccttgccccaggcccagccccaatactcctgctctcccttctccctggctagagaaaggtcacggagaagagacaggggagcaggtcccagcagcaggagaagcagcagcagctgtttccttcaccaataaatatacttcattaccaagctagaagagaggggtgggaagagggactggggtgggaaggaagggggagaagctgccacctgtgttgctgggattaaagcaatgagatggtgccagaccccccaccactatcctcaccctccacttgtcttcttaaaactgtgaaaaagctc

SEQ ID NO: 179631 - DNA, 604 bp, Homo Sapiens
  misc_feature (53)..(53): n is a, c, g, or t
atttccagaaaatatagttctccttttttctgcatgaaggatacatcgtggtnccacatgctttaagcaatttaaacaagagagataagaggaaaatgcaaccaccacatctgacttgcccaatgtagactttcctctattagattgaagtacacaacctaatatgatatattattttgtagtatctcagactttgtaaataaataccattatttttatatggaaattttatagaagagctatttctgtatacgtaattactcctgattttctgaaattgcttctggtagataacagacaagtcctaagcagtgttccactaagggtggttcccgggcctgcctgccgtggagttgactgggggaattttacagttttgcgatcctaggattcgtcccagacgctcagtcagaagtgctggaggtggggcctgggaagctgtatttgtaatgaactctggtgttttttgtccattaaagtgtatctttgtccatcctataagattaaaggaaagaaaaagcatctcaaatgagtgtaagttgttcttgagaaaaaaatgtatcagacttttatgatttgaatgaaatgtattatagaaaaaaaa

SEQ ID NO: 179632 - DNA, 367 bp, Homo Sapiens
  misc_feature (236)..(236): n is a, c, g, or t
  misc_feature (243)..(243): n is a, c, g, or t
  misc_feature (294)..(294): n is a, c, g, or t
  misc_feature (317)..(317): n is a, c, g, or t
  misc_feature (323)..(323): n is a, c, g, or t
  misc_feature (342)..(342): n is a, c, g, or t
ggaggtgcctcagccatggcatggatccctctcttcctcggcgtccttgcttactgcacaggatccgtggcctctcatgacatgactcaaccaccctcagtgtcagtctccccaggacagacggccagcatcgcctgctctgcagataaattggggactaaatatgttgcctggtatcagcagaagccaggccagtcccctacattactcatctatcaaaattacaggcggccctnaggggtncctgagcgattctctggctccagttctgggaacacagccactctgaccatnagcgcgacccagggttttggatnaggctnactattattgtcaggcgtnggacagtaagactgttgttgttttt

SEQ ID NO: 179633 - DNA, 715 bp, Homo Sapiens
  misc_feature (76)..(76): n is a, c, g, or t
  misc_feature (212)..(236): n is a, c, g, or t
  misc_feature (238)..(238): n is a, c, g, or t
gccaacaggcaaacaccacacctctcacctgcaggaggaacagcagggccaccccaccccgcggacgtccggttgnagtgcggtttagacatcagcagaagtggctttcagagtcagaacagccatgacgtggacatcacccgtcacactgataaagtgatgcactcagtactccctaatgttaatcacacagtgtaaaaatatattgcacnnnnnnnnnnnnnnnnnnnnnnnnnantttgtttcccttccttgaaaaaaacttagtacaaactagtagttacacgaaccctttcaaagtttcccttaagttgtgcagatttcctttgtggtttggcttggtttagttttttaagaggtcgaaagaaagaagtaaagcatctcgatgtgccccaggactccccatcacatgccccagcgacaaacgctgcacccctggaccaccagagctcacaaagtgttcagtagtaagaggaggaaagatgcaggttcagtgtttgaaggacgttctagcctattgataacatcacggtccagcctcatcttccccctgtgccatcccctcgtggtgtgtgctgtggggtgggagggtggccagtgcacgcgtgattgcccacaggaggagatgagctgggccagtagagggacaggtaagtgtccagggccaaggcatctccatctcaactcctccccactccacttgtacagcaggacc

SEQ ID NO: 179634 - DNA, 439 bp, Homo Sapiens
  misc_feature (30)..(30): n is a, c, g, or t
  misc_feature (391)..(391): n is a, c, g, or t
  misc_feature (419)..(419): n is a, c, g, or t
ctccggcacaagcttccagctctgcagctnggggtgacatccccagtggtttgtcgccaagaccatgtggtggacttttcgccccccaaactgatgagtccgggagaatatatggagagagagatgtaacaaggggaaggcctcctcccttctgagcacacacacaaccgataaccaaagagatgctgcagtccagggtctgaggtcccgctgggcatccagcttccctgctccatgggccagtccctccccagcccagcagtccctccaggcttacatccaggaaaactatggaaggaactttgagatgggggcaagacaattcctggggtgtctttctgggacaagatcttaggggggagtttacctaggcaggacctttccggatttnacgttgattgttaacaggggggttcccntttttttcctttgttcattg

SEQ ID NO: 179635 - DNA, 659 bp, Homo Sapiens
cacagggcctcccactggcgagccaacagcgagatgagcttctctctgctctcagcactggggacaaacacctgccactggacttcacggccctggctggctctagccgggccacctggcacctccccaaagtggtccagggtgacactgcccatgaggtcatgaccttgcacgtcatcgaagacgagggtgagggcctgcgggtaggtctggtagcccatgagcactcggtccaggtcccggacgcggcggccatcgtccagccggtacctgtctctctgcggcggctctttggcaaaactcgggcaagtgggtaagtggacacagtcctcatcccaggaggaaagatctcggaagctggtgaagcaaggaagtgtccttggggccgcagggggcccctgcaagcacccagggggtggcatgcccacctggaaggcctgcacgtacagcaggatgctgagggctggggccttctctggctcagccatcttttgggccacagtgaacgtcaggtccccaatctcctcctcactggggtaggtaaacttgacgcgactagagtggatcagctcgtagttctccatcttccctgtggtcttgttcccaaactcggagtagaagtccttgtcaacaggctccggcgagggcgtgcgttccag

SEQ ID NO: 179636 - DNA, 412 bp, Homo Sapiens
  misc_feature (15)..(15): n is a, c, g, or t
  misc_feature (34)..(34): n is a, c, g, or t
  misc_feature (43)..(43): n is a, c, g, or t
  misc_feature (118)..(118): n is a, c, g, or t
  misc_feature (236)..(236): n is a, c, g, or t
caattcccaactggnaaaatcaatcaagtcccgncggcaaccncttccctctggcagggccaaggctcgcgaactgctggggtgggcggaggtcgctgccctggggatcggacactgngaacttgcggcggctgcaactcatgctcaggacccagcccagcttgttgtgtagcacctgcttgaggcccggcggcagcggcagaccctccagcgtgtctcccgagtctgggccgcantggcgcaggcggtggcagcacaggtactggagggaagtggcgctggcacaggagcgggtgaccttcatcctgctccgggccgccgtggagcacaccatcgggtagaatctcttgttctgcagcttggtggctgccacacctatacacttcctgttcttgaaaaaggtgagtgtgcc

SEQ ID NO: 179637 - DNA, 441 bp, Homo Sapiens
  misc_feature (37)..(37): n is a, c, g, or t
aaatgttccccaggggaataaacattccccattgtcnacctatgtaactgggaatgtgaccagcaacacgatgttttgatatgtatgaaggcgataactctggaccgatgacaaagtttattccagagtgctgctccaaaaatccctgctcttcatggtgaccctatgacgacggaagcacaagactgaataacgatgcccaagaatgcccatagaagcacttggaagtaaagaaatcaggaacatgaaattcaggtctagctgggtatttattgcagcaaaaggcttggaactcccttccgaaattcagagagaaaagatcaaccactctgatgctaagaacaacagatattctggctggcctgcagagatccagatagaaggctgcatacccaaagaacgaagctgacactgcagggtcctgagtaaatgtgttctgta

SEQ ID NO: 179638 - DNA, 329 bp, Homo Sapiens
  misc_feature (15)..(15): n is a, c, g, or t
  misc_feature (144)..(144): n is a, c, g, or t
  misc_feature (283)..(283): n is a, c, g, or t
gctcaggtgctgggnccctggttcccggaaaaatgtgccttctctcctcccttttcagggaccgccccctgtctctcaagggccaggcctctccctcctcccaggaaaccttcccctaccccttgtcgcccctccctcccagancacctgctgtctgggtggctcactcagcacttggtgtggccttcccttctacctaacgggatggggctcccccaggggctgtcccggaggcggtgggcctggttaaataaggcagggtttatatgcactttcttccganctgtacctgagaggtttgtggaaaagatggcaaatggggaataaaa

SEQ ID NO: 179639 - DNA, 714 bp, Homo Sapiens
  misc_feature (306)..(306): n is a, c, g, or t
  misc_feature (613)..(613): n is a, c, g, or t
  misc_feature (626)..(626): n is a, c, g, or t
  misc_feature (636)..(636): n is a, c, g, or t
  misc_feature (644)..(644): n is a, c, g, or t
  misc_feature (651)..(651): n is a, c, g, or t
  misc_feature (661)..(661): n is a, c, g, or t
  misc_feature (675)..(675): n is a, c, g, or t
  misc_feature (695)..(695): n is a, c, g, or t
ggcttgaccgaggccgtgcggactgcaggttccccgactgctcatcaaccgggacttggtggggcccttggcttggcatcctcgcagcagggacgtggcccagctgggggacgtggttcacggcgtggaaagcctagtggagcttctgggctggacagaagagatgcgggaccttgtgcagcgggaaactgggaagcttgatggaccagacaaataggatgatggctgcccccacacaataaatggtaacataggagacatccacatcccaattcttgacaagacctcatgcctgaagacagcttngggcaggtgaaaccagaatatgtgaactgagtggacacccgaggctgccactggaatgtcttcttcaggccatgagctgcagtgactggtagggctgtgtttacagtcagggccaccccgtcacatatacaaaggagctgcctgcctgtttgctgtgttgaactcttcactctgctgaagctcctaatggaaaaagctttcttctgactgtgaccctcttgaactgaatcagaccaactggaatcccagaccgagtctgctttctgtgcctagttgaacggcaagctcggcatctgttgggttacangatcccagacttngggccgtgcnggtccccnagccctntttcatgttnccgaagtgttagtnttgagggcctggggtgccgnaattttaggcatgttgggt

SEQ ID NO: 179640 - DNA, 367 bp, Homo Sapiens
  misc_feature (295)..(295): n is a, c, g, or t
  misc_feature (297)..(297): n is a, c, g, or t
  misc_feature (299)..(299): n is a, c, g, or t
  misc_feature (302)..(302): n is a, c, g, or t
  misc_feature (354)..(354): n is a, c, g, or t
gctgcggcaagacctacaccaagagttcgcatctgaaggcgcatctgcaacgcacacaggtgagaagccctaccactgcaactgggacggctgcggctggaagtttgcgcgctcagacgagctcacgcgccactaccgaaagcacacgggccaccgcatgtcccagtgccatctgtgcgatcgtgccttctcgcgctccgatcacctgggcgctgcacatgaaacggcacatgtagccgggacgcccccgcccacctgcgcgcggccgtggcgggttcccacgcgccgggcggcncncnctncccaaactgtgactggtatttattggacccagagaaaccgggccggcacagngtggctacagagg

SEQ ID NO: 179641 - DNA, 328 bp, Homo Sapiens
  misc_feature (35)..(35): n is a, c, g, or t
  misc_feature (48)..(48): n is a, c, g, or t
  misc_feature (120)..(120): n is a, c, g, or t
  misc_feature (125)..(125): n is a, c, g, or t
ggggttcaagaagcgacctgggggtgaactgaaanggaaggcccaggnagggccttcgtcctctgcctcctccccttcctcgggaggctccccagaccctggcatgggatgggctgggancttcnctgtgaatccacccctggctacccccaccctggctaccccaacggcatcccaaggccaggtggaccctcagctgagggaaggtacgagctccctgctggagcctgggacccatggcacaggccaggcagcccggaggctgggtggggcctcagtggggctgctgcctgacccccagcacaattaaaattaaacgtgagctgca

SEQ ID NO: 179642 - DNA, 748 bp, Homo Sapiens
gcagcagtgaataaagtaagctaatcctgggcttgggtatttgtgtcactcatatttgctatgagtggttgatttaaagtgctgatttcatttgcatttcatagcttcatctaattttaattaaaattggaggggcaattatatagtgattaaatgcaaatgttttataatttccaaatttatctgattaacctaaagaactaaaaccaaggtatgttttaagggaattaatgtgttttccaaatcatgttgtggccattgctgtggactggcagtatctattcaccatacataatgactggaaggcggctgtggacaccctgttcctcttggcagcacaggaatggaagtgggtcccagtcctgatgattaacactgaaaagggagactgctggtagcttctggaaaaaatttcctcaagcctaagaaagaagcagagcaagagatgctccttttgcttctggacatcgccttgtctgaaaaagaagcttgcagctggggagctctgattgccagcctgagggtgaagcttgacctgccgatgcagtcagccgcctccgcacttcttgtttagttagatgataaatttccttcctacccaaccattataagctggcagtttggtaactgcagccccaggaacatcgaaaccgacacatctcatgtcataacctaattttgaatatttatttcattgctacttcattgccacttgtacctcataataaatccatttttgaaaaccttt

SEQ ID NO: 179643 - DNA, 507 bp, Homo Sapiens
  misc_feature (409)..(409): n is a, c, g, or t
  misc_feature (444)..(444): n is a, c, g, or t
  misc_feature (453)..(453): n is a, c, g, or t
  misc_feature (470)..(470): n is a, c, g, or t
  misc_feature (489)..(489): n is a, c, g, or t
gattacctttgggtttgaaagaatagctgtgggtgggcaattgaggacacctctttagtcagggacctttctagcaatccactccctcccatcctgttagccatgcagtggaactctccttccctctctgccccaaccccggtgatggctcactctcagcatcttatgggaccatctgagttaacaaccctgttccaagaagactttgtgcagaacttttgttagggtggtcataccttctcaccaccatttggaagacacagtctaatgctgatgtacttaatgtgccccttccagcataggaaataatgtctggggtaacagccatcaaaatcactaaggaatgacattgggtagctatgaggaaagtagtagaggattgatttaaaattatccttcttgtttgggnattaggttaaactaggggaatgttcttttctggangccttgaantgttttttcccctgtgnaagttttggtaccagggtngggtaattatttttcttt

SEQ ID NO: 179644 - DNA, 415 bp, Homo Sapiens
  misc_feature (309)..(309): n is a, c, g, or t
  misc_feature (337)..(337): n is a, c, g, or t
  misc_feature (365)..(365): n is a, c, g, or t
ggctggccaaccagtcagaagacctgagtgtgttctaccccgggacactgctggagaccggtcatgacatcctcttcttctgggtggcccggatggtcatgctgggcctgaagctcacgggcaggctgccttttagagaggtctacctccatgccatcgtgcgagatgctcacggccggaagatgagcaagtctctagggcaatgtcatcgatcccctgggacgtcatctatgggaatctccctgcaggggcctccacaaccagctgcttgaacagcaacctggggatcccagcgaggttggagaaggnccaaagaaggggcagaaagctgactttnccagcggggatttcctgaatgttggcancgattgtttttccggtttgggttattgttgcttaaattttcccagggttc

SEQ ID NO: 179645 - DNA, 456 bp, Homo Sapiens
  misc_feature (133)..(161): n is a, c, g, or t
  misc_feature (217)..(217): n is a, c, g, or t
  misc_feature (376)..(376): n is a, c, g, or t
  misc_feature (401)..(401): n is a, c, g, or t
ctccccacgcatccaaacaagcagacggggtaccagcctcctggtgtgtatcataggatttgttcacatagtgttatgcatgatcttcgtaaggttaagaagccgtggtggtgcaccatgacatccaacccgnnnnnnnnnnnnnnnnnnnnnnnnnnnnngtatgtaaattatagcactgagggccctgctgccctgctggaccaagcaaaactangccttttggtttgggtattatgtttcgttttgttatttgtttgtttttgtggcttgtcttatgtcgtgatagcacaagtgccagtcggattgctctgtattacagaatagtgtttttaattcatcaatgttctagttaatgtctacctcagcacctccntctttagcctaaatttttaggaggnttgccccaattttgtttctttcaatttttactgggttaacttttttgtacaaatc

SEQ ID NO: 179646 - DNA, 436 bp, Homo Sapiens
  misc_feature (27)..(27): n is a, c, g, or t
  misc_feature (47)..(47): n is a, c, g, or t
  misc_feature (59)..(59): n is a, c, g, or t
  misc_feature (79)..(79): n is a, c, g, or t
  misc_feature (122)..(122): n is a, c, g, or t
ttcatcaaccgggaaccgtgccttcgncttcatccgcttggaatccnagaacccctggnctgaaaattgcaaaaagcanagctgggacggcaccattctcaagagcagacctcctacggaantccttcgctacacagggagcagcccttgactgtcaagaacctttctcccagttgtttcccaatgagctgctagagcaagcattttctcagtttggtccagtagagaaagctgttgtggttgtggatgatcgcggtagagctacaggaaaaggttttgtagagtttgcagcaaaacctcctgcacgaaaggctctggaaagatgtggtgatggggcattcttgctaacaacgacccctcgtccagtcattgtggaacccatggagcagtttgatgatgaagatggcttgccagagaagctgatgcagaaaactca

SEQ ID NO: 179647 - DNA, 378 bp, Homo Sapiens
ccggcctccagaggaccacccggacgaggagatggggttcactatcgacatcaagagtttcctcaagccgggcgaggaagacgtacacgcagcgctgccgcctcttcgtgggaaatctgcccaccgacatcacggaggaggacttcaagaggctcttcgaacgctatggcgagcccagcgaagtcttcatcaaccgggaccgtggcttcggcttcatccgcttgggaatccagaaccctgggctgaaattgcaaaagcagagctgggacgggcaccattcctcaagagcagacctctacggatttcgctttcggttacacatgggagcagcctttgacttgttaaagaaccttttttccagtttgtttttccaatgag

SEQ ID NO: 179648 - DNA, 444 bp, Homo Sapiens
  misc_feature (359)..(359): n is a, c, g, or t
  misc_feature (397)..(397): n is a, c, g, or t
  misc_feature (412)..(412): n is a, c, g, or t
  misc_feature (418)..(418): n is a, c, g, or t
gattatcttatagaaaatgtatattttttaggatatcatctctattccttctatgttaatgaatcatgctctttagcattgatgaaagtttcaattttgagaatagtagaccttgtcaggtgtcactttgagtgccagcaaacggttgatttgaggcaagaagaataaagtttaaaaaagaaaataaatctaggcatttgcttaataatttgccctttgcagcaccagaatcttatgtgaccacccacattcatctggttactgacgtggttcttgcttcaattgcagaagctatttttggcaccttttgtgtcttttgagggaaccgagtggggcctacttggcttattaatggattncatgtcctcaagtggcacaggggtgttcccgaaagtgnctactgcagtgggtntgcagnaagggaggggggaaaactggaaggca

SEQ ID NO: 179649 - DNA, 270 bp, Homo Sapiens
  misc_feature (190)..(190): n is a, c, g, or t
  misc_feature (201)..(201): n is a, c, g, or t
  misc_feature (225)..(225): n is a, c, g, or t
cgaaagtctggaaaatgtgtgcactaaaaagtgactataaatgttaaattaaaaaaccttcaaagaacacatatcacacattcaatttttaaaactttatataaaagctctattataaatacaaagctaaactatctgagtactaacaacacagttcatacaaagaaacttaacagtagtaaaatacagntatataaggangcttatttttgggtcctttagggntaaaaggaactaagttgggtttttttcacatgggctccgggcaca

SEQ ID NO: 179650 - DNA, 462 bp, Homo Sapiens
  misc_feature (372)..(372): n is a, c, g, or t
  misc_feature (395)..(395): n is a, c, g, or t
  misc_feature (423)..(423): n is a, c, g, or t
  misc_feature (435)..(435): n is a, c, g, or t
  misc_feature (445)..(445): n is a, c, g, or t
ggatcgccctcatgagtgccacctggtacaggtaggtggcgctcacgttcctgcccaaatgcagcccatcggggagtcacagtcagtccccccggcccccctcccagtccctgttggctttcagtagctctcgcatgcagttctattaacagccgtctagaagcgatgctttagtggcctaacccagggtcaaatacagctctttctagcaaaatcaggcagctctgccccatcggtaggggcaccgattagtctactaacagccagaggtccatctagcagggtgccgggaggagctgagcccccggaggtgggtcctggtgacgggtgtccaagaagcggtttccttgggagcttctgcctccgtgggcntttcagcccgcccctgtggcccncccgggtgtggttcagcattgttccctncccaggttcctncattgaaacnttgcccttgcccaaaat

SEQ ID NO: 179651 - DNA, 535 bp, Homo Sapiens
  misc_feature (33)..(33): n is a, c, g, or t
  misc_feature (56)..(56): n is a, c, g, or t
  misc_feature (406)..(406): n is a, c, g, or t
  misc_feature (490)..(490): n is a, c, g, or t
  misc_feature (499)..(499): n is a, c, g, or t
  misc_feature (516)..(516): n is a, c, g, or t
tcagtttccccttcaaaaatgactaagtacggnacttattaactctgagtgccttnccagcactaacattctagtagtattccaggtggtttcacatttgtccagatgaagtcaaggccatataccctaaacttccatcctgggggtcagctgggctcctgggagattccagatcacacatcacactctggggactcaggaaccatgccccttccccaggcccccagcaagtctcaagaacacagctgcacaggccttgacttagagtgacagccggtgtcctgggaaagcccccagcagctgccccagggacatgggaagaccacgggacctctttcactacccacgatgacctccgggggtatcctggggcaaaagggacaaagagggcaaatgagatcacctnctgcagcccaccacttccagcacctgtgccgaggtttttcgttcgaagacagaattggacagttgaggacagttattgtctttntttaaaagnacaaggaaggtttcagnttgggttacccccaaggag

SEQ ID NO: 179652 - DNA, 190 bp, Homo Sapiens
  misc_feature (68)..(68): n is a, c, g, or t
  misc_feature (86)..(86): n is a, c, g, or t
tgtgctacccctttgattatgcagacaacctcatcagctgcctaacttatccatctttgaacttctgnactacttgttgtatctgnctggatatttagttcaactgtatagttttatttacttctgtatgtgtatttttgtgaagttattcacaaaggttaagttaaaataaaaccaagggatatcttgc

SEQ ID NO: 179653 - DNA, 387 bp, Homo Sapiens
gggggcccccctcttgtcccctgtgggtccaaggatgggatgatccccttgaagattccactataaaaaatttaaaattccccttataaatcgcaggggagtggcaggagggcatcacttggaagccgacattacctgtcccctagagccgcacctcctcccacacccccgaagttctgaccccaaagtgaagaatagaggataaggtttgcaggcacagagaggggcagagacaccaggagagagaaaagggagactgggaagggaaggaggaggacaacacagagaaagaacggatctgaggaaaagcaggggcacgggggctccactcccccgcagccccaaacagtgcgccctggggaccgaggacgagagttcccagcccgc

SEQ ID NO: 179654 - DNA, 533 bp, Homo Sapiens
  misc_feature (47)..(47): n is a, c, g, or t
  misc_feature (137)..(147): n is a, c, g, or t
  misc_feature (159)..(159): n is a, c, g, or t
  misc_feature (329)..(329): n is a, c, g, or t
  misc_feature (477)..(477): n is a, c, g, or t
  misc_feature (497)..(497): n is a, c, g, or t
cttcctgggactcagtacacctctcagtttgtcttttaaaaaacagnctgaatctttactacctatttagttctccttgttaaagaaacaggggtgggaataaaatggatttagggacacccagtttgaattgcagnnnnnnnnnnnctgacacatggnccagggctgtggtgcccagcttaatggagtaggctgtccttgggcacttgcatgtgtgaaaggagggttttgcctcttcttgaggcatggcttgagttggtaaggaaagctgtaactcacgaagccctgagacctgcctacccctaagatcgagccttgttttcagtganctggccttgagtcataggaggaggagtctgggacagctgcaggagagcagggccatctgaagcggtaacattgccaccatctccctctcatctagagcagttttcttatgcccttggtttgagctgaatttgatgtgaattcttttgnctccttaataaagtgacctnctaggtgcattagaatgcgaaggcaaatagttgcaa

SEQ ID NO: 179655 - DNA, 494 bp, Homo Sapiens
  misc_feature (480)..(480): n is a, c, g, or t
ctcaaaaatgaatcattgtgttaggattctaattctttataaagaacttcatgggcttcaataatgtctagaaagtaaaataaagaggaatgttaccatccccagctgcccttatttccagagaaccagacgtttgtttcccagttggaaagaagacagttgagcacttcaggatggtttttaaatttggtatgagattctctgccaacaccaagctctgagttaacgtgctttcttctcctggccctgacagagcactacagcatcaaagtaaatctttggggacagtgtagcccatctggcatcctatttgaatttcttcccttctccccaccagtgttgtcacaggggctatgttggcttaaaaggtagtctggcctgctggaatcccttttttcagcttcagaggcagtttttaaggattttaatttggggattacagaggaaacagggattgttttgaggaaccaaaattcaagngggaccaggaattt

SEQ ID NO: 179656 - DNA, 417 bp, Homo Sapiens
  misc_feature (88)..(88): n is a, c, g, or t
  misc_feature (255)..(255): n is a, c, g, or t
  misc_feature (264)..(264): n is a, c, g, or t
  misc_feature (370)..(370): n is a, c, g, or t
gattgcagtggaatgtaaggtcagggcacgtgggtctctctcggggtggggtgactgggagacctagagggaaagcctgctatgcagngtggagagcacaggactggccctgctctgcggcctcctttgtcccataacctgaagttaagtcacatcccctgtcgggacctccgtgcactcatctgtcaagtgggggcgcttcccttccagcatcacctgcagcagacgggctctcgggagtcgtgggttccaggnagctgtttngacccagggacagacattcaaagggacgccagccatccttggtgacaggggccccaacttagcatcccttccctttccctttaggaggaggatgaccggaagcaanccctttcacagacacgagcacattgggcaaaccctattgaaagttgg

SEQ ID NO: 179657 - DNA, 173 bp, Homo Sapiens
gctcgccctccgccgacacgctcaaggccggcctcatccgcacacacatcagccgctgccaggtgtgcatgaagaacctgtgagccggcgcgtgccaggaagggccattttggtgcttattcttaacttattacctcaggtgccaacccaaaaattggttttatttttttctt

SEQ ID NO: 179658 - DNA, 330 bp, Homo Sapiens
  misc_feature (199)..(199): n is a, c, g, or t
  misc_feature (272)..(272): n is a, c, g, or t
ggcgcgtttaaaatgagggaagcagcccctgccacacgcccaggccgtccgccgttctcccgcctgtcctgttggatggaggccgttagacgcatatgaaactgcatgccgcctcctccagagggtggctcaggacacggtgggtgtcaggcctgggtcaggcaagggggctttggccacatggggggcaccttcaggnacaaggtaggaagggcaggggcggacagacaccctgagcccttagacttgtgggagccaagctgaccagagtnaggttttttttagcctaacggaattagagtattcgctggttatccggatcagaaggga

SEQ ID NO: 179659 - DNA, 318 bp, Homo Sapiens
  misc_feature (92)..(92): n is a, c, g, or t
gggaagcaagggccttcagtgtagcccattcttgatccagagctgttgcctgtgacagcggtttctctggatgtcaaaggcagctgcctggntgcccagcttgcttctcgactggtggcccctatgggtgggtgtgcgatggaaatgtgttcctgccggagtctgaggcaccagggtgtgctcaaaggctggccctggtggtggactggcacctgtgcagagtgccgtgtgcttgtggtgcgccatctgaagcaagagtccagcgttctgccgtgtctgtcccccaccatgccccctacaggcggtactgatgggcgc

SEQ ID NO: 179660 - DNA, 462 bp, Homo Sapiens
  misc_feature (434)..(434): n is a, c, g, or t
gctgtttgcaagcaaaccagttgataatcaggctgtagaaagattctattatttcactcttccacactgaaaaacaaaaattacttgaaaaatttttgggtgcattttgcttactgacatttagtgggtcaaaacaaaaactatagtgcttcctgtattccatcgttcacactggtgactttgtgaggataaaaaagaacagagctgtcctctgaaaggaagagaaacccctaatctcatgttgcccagagcttttattttttgggacagcccagggatccaaggacaaaggcctgtgcccacaggaaggcaaaaatacctggcaatgtgcttttttttccctattaggcctctaacatagtatctttttgttgttgttctaggcacccctccccggcggggtcttttcccctggacaccttttcccttcccanatttcctacccagggggacaaacagggt

SEQ ID NO: 179661 - DNA, 396 bp, Homo Sapiens
  misc_feature (165)..(165): n is a, c, g, or t
aaattctcaataaaagagaaatcattttccaataaaattgaaaataactttttaaattattttagcattttacagggcatatttaatcatagcaaaaataaaagctgcttgcatatcttatataaatcttttatagaatcatttctttcttcttctcttgagganctctgactttgaggtcattctagagtaggggtgctcatgaaggaagttttgcggaggttttagaaagataggaaatcacgtacagaggaaggtacttccctctgccttccacaagggcacaccattaaataactatgggaacattcattccctctaataacacagctctgtgcagggaaaccctgtttgtcccctggggtagggaatagtggggagggggaagagggtttc

SEQ ID NO: 179662 - DNA, 439 bp, Homo Sapiens
  misc_feature (373)..(373): n is a, c, g, or t
  misc_feature (421)..(421): n is a, c, g, or t
taggcccttgtaattcagtagggatttagtgcttttattatttacaacagaagttgttaaaaaccaaaattataacaaattttaaaatcttacttggcttttatgtatgattcagtaattggacagccctcagaacccagaacaggttcaaagaacttcagggctgcagtgtactcagagagaatttagggacagaaaacagcaagtggggatatacagtttaactgggattgccttatctgaatctattgaccacctacaattgactaaagctcagagggctgtaactgacacttaggccacttggttatatggaatatactccctaactagtttcatttaggcatggaatgactccctattgggtttgggnctgttggggtacatcataggggggcctaggggccaaatcagtggggcncccccacaaatttttatt

SEQ ID NO: 179663 - DNA, 738 bp, Homo Sapiens
aaaaagtctagaaaaatacacactgaactgtgaatagcagttatatttagaaagcaacattaggatggacttaagtcagggctcggactagagcaaggcaagtgaggtgccaggatgcaaaagttaaggagacacctgacctcaggggcccacaactgcagagcccctgacagtgagtgtctcagtagcctcgccctagtcctggctttcacttaaatatgttttcgaatgtttgtaataaaatatttcttttggaaggcaaaaatagcaaggagaataaataggattaaaggatactaaagcccattcaataaaatttgtaggaggccactgatttggcctaggctcctatggatgtaaccaacagaccaaaccaatatgggagtcattcatggctaaatgaaactagttaggagtattatttcatataaccaagttggctaagtgttcagttacagcctctgagctttagtcaattgtaggtggtcaatagattcagataaggcaatccagttaaactgtatatcccaccttgctgttttctgtccctaaattctctctgagtacactgcagcccctgaagttctttgaacctgttctgggttctgagggctgtccaattactgaatcatacataaaagccaagtaagattttaaaatttgttataatttttggtttttaacaacttctgttgtaaataataaaagcactaaatccctactgaaaataaagggcct

SEQ ID NO: 179664 - DNA, 391 bp, Homo Sapiens
  misc_feature (192)..(192): n is a, c, g, or t
  misc_feature (303)..(312): n is a, c, g, or t
  misc_feature (345)..(345): n is a, c, g, or t
  misc_feature (358)..(358): n is a, c, g, or t
  misc_feature (366)..(366): n is a, c, g, or t
  misc_feature (378)..(378): n is a, c, g, or t
ggccctctcgctggccaacatcagcggccggctgtcgggtatggccaatgccttccggacggtgtaccagctcaacggcctggccggctacttcaaaggcatccaggcgcgtgtcatctaccagatgccctccaccgccatttcttgggtctgtctatgagttcttcaagtactttctcaccaaggcgccantgggaaaaatcgagctccatactaaaggaaggggatcataggaatcttttcttaaaggtcattctctgcctgcatccaggccccttgccctcttctcacacgtaggatcannnnnnnnnngcaggggtgctggcctatggggggcccttttgnttccccaatggcntaggagangagggagggggnacgggaacgggcc

SEQ ID NO: 179665 - DNA, 355 bp, Homo Sapiens
  misc_feature (309)..(309): n is a, c, g, or t
  misc_feature (316)..(316): n is a, c, g, or t
gcttgcttatggcatctatgtcatccaccaggctggaaatggaacatttaacagggcaaaactgttgaacgttggggtgcgagaggccctgcgtgatgaagagtgggactgcctgttcttgcacgatgtggacctcttgccagaaaatgaccacaatctgtatgtgtgtgacccccggggaccccgccatgttgccgttgctatgaacaagtttggatacagcctcccgtacccccagtacttcggaggagtctcagcacttactcctgaccagtacctgaagatgaatgggttccccaatgaatactnggggctnggggtgggtgagggatgacggacattttttaccaggggt

SEQ ID NO: 179666 - DNA, 506 bp, Homo Sapiens
  misc_feature (42)..(42): n is a, c, g, or t
  misc_feature (57)..(57): n is a, c, g, or t
ctaaatgggaaattgggaaaaacaaattccaaattggttggnccttaattttcaatncctgacccgtgggcaggcactgcagggccggcacacgaatgcctcccccagagctgccgggctggaggcagaggctgcagatgacagctgagttcactctcaggctgaaccccccaggaatggagcgcagaggaggaaaaaggtcccacagctgattgggggtccttagctggggctatcaacattctctttttcaggtcccccatcccaagtggcagcaacagcagctctgacttggcctgaagagcttgtggcccgcaggacagccagaagtggggtcaaggaaagcctggtgggaagcactggtcctgatctctgagtgacctgccttagttgacctcagaggtgggtatgggatctgtggggcggggtgtggccaggaggggcactggtgaggtggcctcgatgagcgcagggttgaggatgatgggcagagtcataggctgcac

SEQ ID NO: 179667 - DNA, 475 bp, Homo Sapiens
  misc_feature (23)..(23): n is a, c, g, or t
  misc_feature (75)..(75): n is a, c, g, or t
  misc_feature (121)..(121): n is a, c, g, or t
  misc_feature (179)..(179): n is a, c, g, or t
  misc_feature (347)..(347): n is a, c, g, or t
aatcaaaactgctgttgctgccnacttggaatggggacctgaaaaaagaaaatgttgaatacccccagctaaaancccccaatcagctgtgggacctttttccctccctctgcgctcccantccctgggggttcagcctgagagtgaactcagctgtcatctgcagcctctgcctccancccggcagctctggggaggcaatccgtgtgccggccctgcagtgcctgcccacggtcaggcattgaaaactaagcccaaccactctgcactttgtttcccactcccattagccctgggccacctcctccagttcttcctcttttactaattagttggtcagtttgganagttgactggcaccatggagggtaggcaggtgggggctgggtgggggactgcccacaggagcatgtacatatggaaaaacagaacaacagtggactttttatgatataataaatgtcttagtaccagc

SEQ ID NO: 179668 - DNA, 312 bp, Homo Sapiens
  misc_feature (11)..(11): n is a, c, g, or t
  misc_feature (21)..(21): n is a, c, g, or t
tgcgcccttantgtgaatccnggcttcaatttttgctgaaggttccccctcgtcccaaaactctctcccagtaaaccagttgttcctcccccacctcagccctctcctgcatcctcctgtacccgcaacgaaggcctgggctttcccaccctccctccttagcaggtgccgtgctgggacaccatacgggttggtttcacctcctcagtcccttgcctaccccagtgagagtctgatcttgtttttattgttattgcttttattattattgcttttattatcattaaaactctagttcttgttttgaaattt

SEQ ID NO: 179669 - DNA, 304 bp, Homo Sapiens
cctgaggtgactgcagtctggatgtgatgtaactgtttcccctttgattctccagtaatcctgtttccatccagttccttactctcctctttcctcttccctcgcatgtctccctccagtcctctgtacctagaatagtctcactgtcccccgtttgcctccacgagcctgctgtttccaggaaattacataacgttcagttgggatggaaatcttccggaggacgaatagagtttaattactcattgcgtcggaaagccaagccatttctgtctccagagttgttctcttaaactgaaaaaag

SEQ ID NO: 179670 - DNA, 393 bp, Homo Sapiens
  misc_feature (261)..(261): n is a, c, g, or t
  misc_feature (300)..(327): n is a, c, g, or t
  misc_feature (365)..(365): n is a, c, g, or t
ttatgaggtgtaaaggagggaaaggaagtggggagttaggttcggagaggattatggaatgcctagcatgtcaaatcaaagaattgggctttattctcttaagccatggaaaaccaccagaaagttttaagggcagagaggaatggatggtgaaactagttttttaaaatatggagaaagacctgggagagggaagagattaaaagtagagtgaagttaggaggctgttaaatagtctaagaaacgatagggggtgaaccnagagtaatgggggatggagatttataaagattaggctgnnnnnnnnnnnnnnnnnnnnnnnnnnnncagtgccctgcagacccaagccgggaggatccactttnagggcccagagttccgagacccagccct

SEQ ID NO: 179671 - DNA, 357 bp, Homo Sapiens
  misc_feature (314)..(314): n is a, c, g, or t
  misc_feature (329)..(329): n is a, c, g, or t
  misc_feature (339)..(339): n is a, c, g, or t
ataacagaagaataactgtgtatttggatttacataggtagactttgtgagagtagatgttttaaaaaaatgactcaaattagtaccttttaactgttcagaaaaacaaaacctcaattttctggttttcctgcccattttctctgcttcttcacttggggcagagaaaaagcaagttgcagaatatgcactacatgctgctatttgtttgaaattttaaaagacaatataatactgcatacagataaaggatacatacacatctagtaagagtataaacatgcatgagaataataaacaccaaattcagggtnatagttgcctctggnaggggaggtntgggaggggtcacagagg

SEQ ID NO: 179672 - DNA, 415 bp, Homo Sapiens
agaagtcagtagaattttattcaatgaaatcactcgaaagctgtgtcatctatgtttacccttaaattataattttttacataaaaattcaaaatttgggtgaagattaatattccttgaaaatttccttagaatatactgatttgctactacatttcatttttcctacattcagctagatgaccacttcatttggtgtctctcagccttctgctgagacatttgagtccgagtatatcctcagcattaacagtaaacctacataaagagggcagcccaacagcaaaacaagagttgtataccctcgtgagtaaagaataataacaataggaatattaatgtcagtgatcagaatagttatactgctaccatttaatttctatcaaatatcattctagggcactctgggacccat

SEQ ID NO: 179673 - DNA, 391 bp, Homo Sapiens
  misc_feature (250)..(342): n is a, c, g, or t
tcaggctagatggacccacttccatttggtgtcctcctcagccttctggctgagacatttgaagtccgagtatatcctcagcattaacagtaaacctacataaagagggcagcccaacagcaaaacaagagttgtataccctcgtgagtaaagaataataacaataggaatattaatgtcagtgatcagaatagttatactgctaccatttaatttctatcaaatatcattctagtcactctgtacccannnnnnnnnnnnnnnnnnnnnnnnnnnnnnnnnnnnnnnnnnnnnnnnnnnnnnnnnnnnnnnnnnnnnnnnnnnnnnnnnnnnnnnnnnnnngagcatcaagacagtggtgagagaacccatcattaaaacaaggactatc

SEQ ID NO: 179674 - DNA, 316 bp, Homo Sapiens
  misc_feature (29)..(29): n is a, c, g, or t
  misc_feature (70)..(70): n is a, c, g, or t
  misc_feature (154)..(154): n is a, c, g, or t
agggaatgggagaggaggatgggaagtanacagtggctggtatggctctgaggctccctggggcctgctnaagctcctcctgctccttgctgttttctgatgatttgggggcttgggagtccctttgtcctcatctgagactgaaatgtggggntccaggatggccttccttcctcttacccttcctccctcagcctgcaacctctaccctggaacctgtcctccctttctccccaactatgcatctgttgtctgctcctctgcaaaggccagccagcttgggagcagcagagaaataaacagcatttctgatgcc

SEQ ID NO: 179675 - DNA, 243 bp, Homo Sapiens
  misc_feature (93)..(103): n is a, c, g, or t
  misc_feature (219)..(219): n is a, c, g, or t
  misc_feature (229)..(229): n is a, c, g, or t
aagtctcttatcagattcaatatttccaaatattttctcccattctgtgggctgtctttttactttcttgatggggtcctttgaggcacaagnnnnnnnnnnngataaagtctaatttatcaatgctcacgcatttggggaacatagctaagaagtgttgagagtttctaaagggaatcagcttcagatcttatttgtttccactaacatggggaaagntcacaaaagngttttcattcccgg

SEQ ID NO: 179676 - DNA, 392 bp, Homo Sapiens
  misc_feature (329)..(329): n is a, c, g, or t
  misc_feature (337)..(337): n is a, c, g, or t
  misc_feature (346)..(346): n is a, c, g, or t
  misc_feature (363)..(363): n is a, c, g, or t
  misc_feature (382)..(382): n is a, c, g, or t
tacagtcctagatatacttactgctggtacagttgtactctaagattggtatttgatattcactttactcacaagtagtgcgggaggccagctcctgggcaggccctcgcgatgagcagtgggtcagctgcggtgtgggatgctggagtttgggctgcaggctgacatcatttatttttgcatccctgtctgctttgttacaagctcccaggggaggtggggtttgtgtcttccaacttccctacatgcagaaactgctccctttgaactctcttgggctgaacagcagattactgacagacaatctgtgatatgggtgttttatacgnttcctcgnacgctgggnccaaggcagtatacatncctctgacttaaactgtantactcattat

SEQ ID NO: 179677 - DNA, 361 bp, Homo Sapiens
atcagcaccatggcctggactcctctctttctgttcctcctcacttgctgcccagggtccaattcccaggctgtggtgactcaggagccctcactgactgtgtccccaggagggacagtcactctcacctgtggatccagcactggagctgtcaccagtggtcattatccctactggttccaacagaagcctggccaaacccccagggacactgatttatgatacaagtgacaaacactcctgggacacctgcccggttctcaggctccctccttgggggcaaagctgccctggacccttttcgggttgcgcagcttgagggatgaggctgactaattattgctttgtttttcctataagt

SEQ ID NO: 179678 - DNA, 366 bp, Homo Sapiens
  misc_feature (26)..(26): n is a, c, g, or t
aaacctttgccgtttcccttggaggnaagggaggtgggtaggagaggagcttgggaggatgaggaggagcggtccccgccctcacacaatggcctatttttacccattaaccgagcgcccacatgtttatgaactgcaggatagaaatttagcctccttgtgaaaacgttttgttttactgccctaagaaaatacacatctctaggcttgtctgaccagaaagccagcaaagtcttttgcatcgggtgtggcccttttgtattttatttcccatatttaaataagccttccttaaaccctagccccagtcctgagagctttgagggtagccgaaaccccttatctaataaagtctaactctgtgag

SEQ ID NO: 179679 - DNA, 439 bp, Homo Sapiens
  misc_feature (13)..(13): n is a, c, g, or t
  misc_feature (42)..(42): n is a, c, g, or t
  misc_feature (50)..(50): n is a, c, g, or t
caagcttgaacgncctgggggttgaaacaacaaccccggaanaacctcgnccaaaaaacttcccttgaacacccaccctgtttgccagggcctgaacaattcgaaggttaagcccacagcgtggaacctgcctttgcaatgccctggccctgcctgcggtgtgaatgggcgccctggccctgctccttgaaggcgccgtagggtgtcaggctgggctcctcaggtccttccttggtgcccaccagcaggatgggcacatcagggcagtggtggcacacctctggatgccacttgtgccgcacgttctcataggacggcggactggcaatggagaaacagatgacgaaaacgttggtctgagggtaggagagtgtacggaggcggtcatactcctcctggcccgcagtgtcccacaggttcaggttcactgtgcgcccgt

SEQ ID NO: 179680 - DNA, 544 bp, Homo Sapiens
  misc_feature (503)..(503): n is a, c, g, or t
  misc_feature (525)..(525): n is a, c, g, or t
cagaaggacccagatctctttcagcgaggccttcaacttatggcagatcaacctccatgagctcatcctgcgtgtgaaggggttgaagctggctgaccgggtcttggccctaatatgctggctgttccctgctccactctgagtggaattgctctccctgccccattctggtgtctttccactcctcagcccctcatcttgcctccacccagctgctccatttttgccacatcgtgcgcgtcagccccagagtcactgtccatgtcaccatccttctcctcctttggaatcctctccgcacactgtgggcccttgtctcaggggccacaagctgaactgtgggcatagctctctcttcttctccaagaaggactcagcagcctaacattcccattccgggggatgttgccattggggttggggatgttccccaataattttccgtttaaaccctttcccaattgttcaaagatgtggccaaggggtttccaattggggggganaaattggaaattttttgggggnattttgaattttgtttggg

SEQ ID NO: 179681 - DNA, 615 bp, Homo Sapiens
tcggcacaggaagaagctggtcatggaacacaaaaggaagaaatacctgaggaggaattagcagaggatgttgaagagattgatcacgctgaaagggagttgcggcgtggccaaatcttgtggtttagaggtctgaacagaatccaaacacagattcgagtggtgaatgcatttcgtagttctttatatgaagggttagaaaaaccggaaaccaagaagttcgattcacaactttatgacacaccctgagtttaggatagaagatttcagagcctcatatccccccttattgatgacactgatgcccgaagatggatgctcctacaaaacgtaactcccagtcctccacccttctcccaacaaaaataacaatgctgttgacagtggaattcaccttacaatagaaatgaacaagtctgctacctcttcatccccaggaagcccactacatagtttggaaacatcactctgattgtaagctgaatgttaacacactagctgcattgtaaagaaacaaattgaaactgggtcttttcacatattgtgatggacaagctagtattcttgtctttggacttcaacagaagacacacttgtacgaatgtagattttttt

SEQ ID NO: 179682 - DNA, 479 bp, Homo Sapiens
  misc_feature (66)..(66): n is a, c, g, or t
  misc_feature (75)..(75): n is a, c, g, or t
  misc_feature (374)..(374): n is a, c, g, or t
  misc_feature (386)..(386): n is a, c, g, or t
  misc_feature (414)..(414): n is a, c, g, or t
  misc_feature (450)..(450): n is a, c, g, or t
ggcgtccagttgtactgcggccagcccagcttctccccatgcagctcgttctccgtgcggaccagntccagcagncggcttgaagtagctcaacatggccgaggcgctcatgttgggctggcccgtgatcagctgcatggcttccggccacggcctaactgaaggcccagcttcatgggcggtcgccagggcgctgcccgggcctccttggactggtagatgtcacacttatgcagggggcccgtgtggcaggctgcctggcacagtgcctcgtggaactggaactggatgatgaagctgacaaagtacctgatgtaaggcacgctagaaggaatgtgggaacttgggcccctgggtcaaagtcaccttgagtnctggggcacttngggggcaagaggcctgggtacttcagcntgaggttccaccattcctggttattagttctccttngtgattgtttccttcaattaccttcagcg

SEQ ID NO: 179683 - DNA, 375 bp, Homo Sapiens
  misc_feature (364)..(364): n is a, c, g, or t
cataactgcatttgctaaaggaagacgttagcacgatacggtaaatacagttacagagactacattacgaggacgaacccaaacgccctcatttgtctgctgtcaagtcagtgcgattgccctggatgcttctcccggtcatccaggcctaatgtatgaatcagtactcagccagccgacccagaatgcatctgtgtgcaatgtttacatgctctcagcttgggagagaagggttgttttcaaaacacaggaaccataattgagttaattagggcatgaaaggaaagacgaccctagagctcaggcatcgcgttagagccacactgttatattaataacagtgatgataataataatagtaatnataataataat

SEQ ID NO: 179684 - DNA, 338 bp, Homo Sapiens
  misc_feature (204)..(204): n is a, c, g, or t
gttcggcacagtgaaggataatggtttggagacagagttctattcctgccagcattgacactgtgtctgaaaagccagcatcgacactgtgtctgcaaatccctcagctattctgagtctccgttttctccctgtgagatggagatcataaaatccgcctcatccttaggattattctcctgaagctacaataaggcctgaggnattgtacgctggaagaaacgtgtattaatagcaacttctgtcccaccccatcccccaacacgtcgatcccctccggagcataaaactttcccccagcatctgacctgcccaaggccaccctagcacctaggagc

SEQ ID NO: 179685 - DNA, 476 bp, Homo Sapiens
  misc_feature (346)..(346): n is a, c, g, or t
  misc_feature (357)..(357): n is a, c, g, or t
  misc_feature (421)..(421): n is a, c, g, or t
ggacctgtcactcagactggtaaaaatgagagggaccagcccagcagattggcagagacacacagcagaggtccctggctaatttcaggtctcttatccgtgtaccaaaacgctagctcggtgtcccgatgtccactgtgatttgggtatacaatgggtatctctgtacatccagcacctggtaggtgagtgagttcaaaccatcagagagcattgtctcctttgtgtgtgcaatttcggtcaaacctctgaggattgggttcatttttcttgtctcttgagtggcggatcatgcgacacctcccgaccacagcatttggggcgagatataggacatggccttctnaaaaactaatnctgttaaaaaatgtcatccatctttctccttccccaggccccaataattatttggggaatcccnttgatgggtttggaaactgttgttttatttagaggcaggagacaccttccaaaat

SEQ ID NO: 179686 - DNA, 578 bp, Homo Sapiens
  misc_feature (59)..(59): n is a, c, g, or t
  misc_feature (61)..(61): n is a, c, g, or t
  misc_feature (82)..(82): n is a, c, g, or t
  misc_feature (173)..(173): n is a, c, g, or t
acctgccacccccacccacttccggccaatcccagaggatgccggtgtgaatcccctgnancccccccactgggttacatgnaaaagggagtgaaggctacagatggagctgaggttgctcatcatctgccccggaaaaggggtgattttctggatttcccccggggttccanatgtaaatccacaggatctttatagaggaagaggccagacggaagagggagaacccagatgaggggcacagtgaggacttaatctgatggaactgccctttgaagatggggaaatgggccctgagcccatggatgtgggcagttggagaagctggaaaaggggagaaggagacaggttctccccgagagtctcctgaaataacagccctgacaacacagtgatgtcagcccattgagatccattccaacttcagatctccagaatggtaagagaacaaatttgtgttattttaagccactaaatttgtaatttcttacaatagcaatcaaaagctaacactgtctgttttaaagtggtcattgctttaggaggaaaaagttcaggttaagaaggttcaggattgc

SEQ ID NO: 179687 - DNA, 527 bp, Homo Sapiens
  misc_feature (315)..(315): n is a, c, g, or t
  misc_feature (394)..(394): n is a, c, g, or t
  misc_feature (408)..(408): n is a, c, g, or t
  misc_feature (434)..(434): n is a, c, g, or t
  misc_feature (451)..(451): n is a, c, g, or t
  misc_feature (469)..(469): n is a, c, g, or t
  misc_feature (476)..(476): n is a, c, g, or t
  misc_feature (489)..(489): n is a, c, g, or t
ggcacgagggatatgaacacatacatacacatatgtacacattcatagatacacacacctcaacaataacgttatgaaaacatcaacaacaacgttatgaaaagttcaacaacagtgttatgaatacactcattcatcactagtactgttctcctgaacatgatatgtgggggggaggggatctatgtatcatgacctctccacatctgcccgcagactacccctttttcttctgcaccacccttttccgtaccctcagtgcttggcagtgcctagctttttccaggtgcctgtttgcatgagcactggggagtnccgcaagctttattcccctttaggtgaggggttaattttagcttgggcactgggccgttcgtttttacaacgttcgtgnactggggaaaaccngggcgtttacccaactttaattcgcnttgcaggcacatccccntttttcggccaggttggnttaattnggcgaaggagggnccggcaccgattggtccttttcccaaacaggtttgcgg

SEQ ID NO: 179688 - DNA, 753 bp, Homo Sapiens
tgtggcagataatttttattatggggaaagataactgagaataaagctatcatgcagatatttgcagagataaaagtaatgcagatactgagtggagttttgatcaaactatgcttgaaagccactctaccactagttacacaaaccaataatttcccttcgcagtggaagtcagcttgagttttttcaggtgtttttgtgggtttcaccagatacagcaaagaaattaaaattactgttaatggatgtcaaaaccagtcagaagtatcctaagttatataatttgtcaaacaaccatatacatatattttgtattatatttatccttttgttcttcctttggtaggaaaattgtctcattaattcttatacgaaaggacttaaaattagcaaactttttttgcaaacacatggattccattcttggacttgaggacaacttgacgaacaggctggggaggccttgagtggtctggagccagcttgaagcggagcagagttaatgccactgccactttacactcaattatggcaaaatgctgcccaatgcagttccttaatccagctgagaatggtatgaaggcatagggatgtattttttcagaattttccctggagaatctcaaggggttaaagacctgagggtcttcccagaaataggggttgtggtgaagagcccaaatattgataaacacagttattcctgagtaaacagaagaaaaagcaggtaagtgcatgagcgaagattctgtc

SEQ ID NO: 179689 - DNA, 448 bp, Homo Sapiens
  misc_feature (36)..(36): n is a, c, g, or t
  misc_feature (46)..(46): n is a, c, g, or t
gtccgtcaagttggccctcaagacccaagaaagggnaaccccaggngtttgccaaaaaaagtttgccctaattttaagaccccttccgtataagaattaatgagacaattttcccctacccaaaggaagaacaaaaggataaatataataccaaatatatgtatatggttgtttgacaaattatataaccttaggatacttctgactggttttgacatccattaacagtaattttaatttctttgctgtatctggtgaaacccacaaaaacacctgaaaaaactcaagctgacttccactgcgaagggaaattattggtttgtgtaactagtggtagagtggctttcaagcatagtttgatcaaaactccactcagtatctgcattacttttatctctgcaaatatctgcatgatagctttattctcagttatctttccccataatag

SEQ ID NO: 179690 - DNA, 692 bp, Homo Sapiens
  misc_feature (506)..(506): n is a, c, g, or t
cttcccagctctgccctcgcttgctggccggtctccggggtcagcgcggggccaccatccagccccttggggcccgccccaagcagctgtcgaggacgcactcagcctgcgcagccatggcctcggcaggggcggagaggcggccgggggtccaggaggcgacggtcgtggggcagggacagctcacggaggagcccggcagcgctcagacctccgagtgtccagtggcgggagaccagttcctggtgcctgcccatgaggcccgcggaacccagagtgaagaccagcgcccagcaggcgcagcttcggagtcggagctccaggaggaaggacccaagctgggggaggagcggcccaagccgcatgccggggcgctagaggagagaggccccaggcccgtggtctccattgtgaggccccgtcatggtccaaagagaaagcctgtcaagtctctcagcctcccgggccttcgtgcccatcttaaggctgaagctgagctgccaccncaagctgccgctgcaggaggaggagccagaggacagccagagtgaggcctcaccatctgccaaacagcacaaaaaagccaagaagcgcaagagcctgggggctcccgtgctccacgctgtggccagcatggtgtctgcacccttagagacattgaggctggagcgaaaggcccagcgcctgcggcc

SEQ ID NO: 179691 - DNA, 684 bp, Homo Sapiens
cgaatgaccattatttctaaagagtgaaagcagagatgttccttaagaccatcaaaacatttttgagtggtgattaaatcaagtattaaaaccaacattcaaaaaaacccacaatagttcacttaaatattaatccctacttaaagtatgttggcaggttaaaaataaaggctaaaatataatttctaaaggctgaatgaaagggtaatccaaatacggaagatcacacccaaacttcccaccctgggaaaaatcggctgagaattttggggtctaggccctgctgtatgagcaaattcacttgtccaaccaacactgaagccacagtgccttccttcccactcctttcagtttctcttgtagtctcattaagacacgttcagctactttgttgaaactctggtcaatatcactgagatttcgtttgcattcttggtcatctgcattcagagtagggtgaagctcagtttcatcttccggcctctgctgtaaatacaaagctttcaaaggattcatggtccagtcaaagagtggatcatatagaaggacctctacaatggttaacagagtttcctgagagtttctcatcacttccatggttttctcacagcatcttctgaagacaccttcaacacccgtaatgcccatgccatccacaatatctctggtgagtctaaaaggaac

SEQ ID NO: 179692 - DNA, 660 bp, Homo Sapiens
tattattttattcaataattttggaagtgtgataggattacaaaccttgtccaggccctactctcactatgggatacagagaagccaccataggtaatgaagcaaaaatgaacaataagcaagtagagacaaagaaaacgcagtggctttcaacatgctatcgaaagttggcccaaaactttttcatgagttatttcactggtaatgagtacagctgtagctctctttatcatcacacatgtatcctaagatttctagagaacactagtttgtaattttagatattcacacttaggcaattctgagatgtctctgctgggaaagtgtcagagggaaaaacaaacccttttcagcttcctttctcacagccaggattctttacaatctatatttttcagagagtgattgcaaaggagtttctttcaaaggaccgaatacacttattggagaagagatttacattttaaatgatggtttttaaagtttccatttaattactatagtcaatctttgtttttcagtttccaattattattctcagcatagcctacgtactaattcaccatgatttctaagcaagtacttctatacatgggatgattttattttcgttaaggcaattggaaataaatgctaggaacaaattcggcagagaaaaaa

SEQ ID NO: 179693 - DNA, 548 bp, Homo Sapiens
agagtacagtaattcaaatatagcacagtacagagtttaccaaaaacacataaaactttgctagatagacagtgaggtggaaaggaactaaaatgtatctctcttgaatagcatttggggttcaattgaatttgttgtgtttacaacagcaaagcaccgttagcctggacagttgcttatggcatcgatagggttggataatattctgggatttgttgcagcagaattcctctatctgatgatcagcagttgaacataaacttcataattatagtaaaatttaggaaaaactatgagtgtgaagagtatgaactgattgggtagattaggcagagtgcattatgggcaagacaaaggttttcgatattaacttcttttaaaataaactttttattttcaaacagtttcagttttacagaaaaaatgtgaagctagtacagagaggtctcatttaccccacacccagtttctcctgttattagcatctcacattaatatgtggtatatttgttacaattaataaaacacattgatatgttaatattatt

SEQ ID NO: 179694 - DNA, 701 bp, Homo Sapiens
  misc_feature (182)..(257): n is a, c, g, or t
tttaaaactcttctgcaaatgcatgattcttattttagttttaaatgtattttagctcttgaatttgaaaaaacttgtccattaactgtgctatgactcaaaggttaacttttagcacaatcattaaattataggcttgagtgacagacagacttaggacctaggttcgtatcctggctttnnnnnnnnnnnnnnnnnnnnnnnnnnnnnnnnnnnnnnnnnnnnnnnnnnnnnnnnnnnnnnnnnnnnnnnnnnnnaaccatctaggtttgttgcaagaaatcagtgatatctaatttcatgtgaaatgctggcacagtgtctggcatagtaaattttaactgtcattatcagtgttcagacctgagaagaaatactctcctgccatttctctttgagattataaggcaagctcttaagagtgggagtggttataccttcctacaatatttcctgtgatttgaattttaaaaactgtacaaccaaaacataaaaataaagtggataccaaggctgaagttattacagctgtcctctatagtaatatgattttgtttataatctgtgaaagtttaaagtttaaatttattgacattatacgtttataaacaaattagatttatactaataaatattagtaatagttttttatgtattgaagtttctcactggattttgtctaaagaaaagtggttctgttg

SEQ ID NO: 179695 - DNA, 637 bp, Homo Sapiens
  misc_feature (18)..(18): n is a, c, g, or t
ttttcttgttaaataaantaatgttttactgaggaaaatgtcaacatataatcagtgaaagtggtctacatatgatgtaataattgttcataattctttttaaacaacaaatgggggtaaatatgaatgaaagaagtaaaacacatctggaacctcgcgttgttcagggtttttgaggcaattcagagctaactgcaagattatgctatgaaactgaagccatttctatatcatagtgagaattctaatgtaccagaaacaggcagaaagccatcttcagagaatgaagactcaaagataaacaacggcacagcaaactgaagagagaattagaccccagggaaattttcacttttcattaggtagagggcagtagaagacactgaacttggggactgaatactggttctgcaggttagtgctgaccccgggcataacagtcaatctttttgaatgacaatttcctcgtctataaattaggtacagtgagatccaccagcttgttttatgactcagagccatgaaaagcgaagataataatgcacttaatatcattttgtacactataaagggctactcttagaaaatgaagatttgataactttaaaaaaaagaattaaagataaaagccaattta

SEQ ID NO: 179696 - DNA, 352 bp, Homo Sapiens
  misc_feature (336)..(336): n is a, c, g, or t
gtagctctaaaactcctctgcttgcttacatacaaccagacaccagtgccttctgaagctaatccaggccatttttataacctaatgcagtagcactttgcaattagatgaagaagatcggtgggatttctttctgtggtgattaaaatgtgtcaggggaagaaatcaagacaatactccaagtgaaaaatataaagtcagttatttctttaatatttttgtgttatagtaatcatttttatattttgagcatactttttcttgtctacttaaatactcaaaattaattataaaatgtaaatgtaagcacaatgaggtaccctctcatccccgttnaaaatgggcctttttc

SEQ ID NO: 179697 - DNA, 813 bp, Homo Sapiens
  misc_feature (356)..(356): n is a, c, g, or t
  misc_feature (787)..(787): n is a, c, g, or t
tgctctatgaaactgagtaaagtttcatttcctgattcaagaattgcagctaaaatatcctctggacaaagaagaagggaaattttttgataacagatgtgttgactccttacagtataaagccaatttctgtcatatctcaccaacaatcctggtttctacagtacatcaattttaagtaatgtgccaaatcatggcagcaaaaatatgttccctctagctgttaggtactttgacttgaaaacaggagtttcaaatcatcttcttcatttctgtgagggattttaatgaaactgctggaaatcataaaatattgttggatattttgtctaaatacaaactaggacttagctcantctatctgtggtattcggtcagacagtatagatggtaaaattttggcaaattgcattcagtctacaaacttcttaccaaagaaaatgaaaagatcttatccattcaatgccttgtacatcttatatacaacactgctaaaaagggatgtgagttgcttaaatgtgacattgagactttcataatgaaagcttttggttacttttcaatttcctcaaaaagtgcaaaagcacttatggagatttttgacttcacagaaatggaaggtaacctctttagacgtgtgcctgcaagatggctgtcattgtagtgagccatagaaacgatgctaaaatgttggcctgccataagatcatattttcaaaggacaagaataatgtcctttgacattggttgaaatctgaaaggagaaaaaaatcaagaatctggaagngggccttaaaaaaatcagtaagtccc

SEQ ID NO: 179698 - DNA, 419 bp, Homo Sapiens
  misc_feature (115)..(133): n is a, c, g, or t
ctgttagtgaaggttccctgggacttttgatattttaaaaattgttcttatgactagtagataaattcattgccataatgaggctagctcccagataaacagtgtattttcttcnnnnnnnnnnnnnnnnnnnggggagtggtccagagctttaagctacttttccagtagtttgcccactttctccgaggtagtttggctgctctttcagtaatgctaattgtgtgtcaaattttgtctacaacagtaggcaacagatgaagataagttggttgaatgtctccagcactatgcatccctattttctatttattgtgtacactcactttcagtaatgtgtttcaaactggtgttttttaaaaaacaaatcaatgtaaggactgaagttgaagtagcaatgtaataaagttaatttgttt

SEQ ID NO: 179699 - DNA, 671 bp, Homo Sapiens
  misc_feature (641)..(641): n is a, c, g, or t
  misc_feature (651)..(651): n is a, c, g, or t
gagtgagccaccgcacctggccagggaattatcttaagggcaatattcatttggaagtataagttaagatgtatgtgttaaatgtcttcagagctatttgttttaaattattgattttttaaaaagcagctataactgcttcaactaatatatctccaaaaataattccctaatattatctataatacctagcccatattcagttaaccccggttatttataagatgacttttaagaagtatgtgagtcattatatttagctgtatggctcttagtcttttcatatctaaaataagccaacttaaatattttaaaaatcgctcttaaaaatatcaaagaaatgtagccagcacatcttctttataataaaaatcagaaagatatagaaagtagaaatatttttatagcttccatcattgtgagcatggatgccttcctgatatatttttctatctctatttacttccctatttgttttctttcacatggttgagttcattttgtatgcaattctccctttaataataggcagtgctgtatcttgctttgtaactttaatgtatttgtaacttttaatggctgcataatataccattaagcgagtgtaccacaattctgcaaacataattcaatttttctgntaacatttangatttttccccaatgggttg

SEQ ID NO: 179700 - DNA, 358 bp, Homo Sapiens
  misc_feature (20)..(20): n is a, c, g, or t
cgaggcccaagaattcggcncgagggtcaaaaagttaggaagttacccctgggaccacgaacatctgcccattatgtttgaaagttaaagggggtgtttaccatctatattgtacagtctttgaaagtttagattcagttcttatttttttctttcatatcctaccagaataccttaaatatagaaggcaccccaaaagtatttcataatttaatccacagcaagaataaaatatccatcttctatagtgtgtaattgctagaccctaaaatagtacaataatattggccctagagctgttcttaatttcatgtaattatagcttgtttcaaaataaagtttgtaaagtctttaaaat

SEQ ID NO: 179701 - DNA, 653 bp, Homo Sapiens
ctgcaaggcaactgttaaaataatttctcacaggagtagagttttctttctttcctaaaaatccaaagtgtttcctcagacatgatcacaccagcctccacaatatatttctagttgtttgggggatgttatcctgctttatatatgaggccaggaaagggtaaaatcctctattcacttacctggttttatacccaggtttccctgtatgtactgtaatggggtgatggaaaagtgaactaacattttttcttgttcctattgttaggtgagagagagagatttgtggggagatggagtggggaggattaattcctttaaaataaattcagtttgatgtacctgcgtgacactcagatggggatatcctattgtcatttgaatgattgatctggtgctcagaggagatgaacaggctgcaaataaggatttgagagccattggaggatggatgataatggagcacatggaagcagatgtggcccttcagagagaaggtgcagagtcagagtgaagggttgcaaaagaaatgtaagggactatgggcagctggggagagaagcacagaattgaaacaatgtatacccttccagacacttttactattcatatacttatatattctttacataaaattggaactatctattgaa

SEQ ID NO: 179702 - DNA, 685 bp, Homo Sapiens
  misc_feature (499)..(499): n is a, c, g, or t
ttagattgaataagagaaactttattacatgttggagatctttcaaaatatgaaaaataaggggcaaaaaattttaaaaactggttttacagatacacatgctaacaatgttctacagttacatttgtataaaatacattatacaaaagatttatagattttgcatacataaaaattaaagcattcagatatttctatgatctaacagtgcaatatgcacatacgtgggaagaaaatactgattacctgagcaacatttttgtaatgcaaattaaaaatgaatccatcagtgcaccatttaaatacagactttaaaaaactccacctttaccctgtaacactgactagatccttgcttcatgatatttctaaaactaagcatatccttcatattttcaactaggtaattttagaagtagatactttaaaaaagaactaattactaagtagtggttcatttaaataactcttcaggacactgaaccaagcaggtagagtnccaggaaaagaaaagctgtaaataaaaagtcctttggaggagataatttaacatgagtcttctaatttttaatgtggccagcagagtgtgtaaccatttttaacatatcttttgaaaatatgaactccataacttcctaggagtgagatagcaaagaaattttattttaaccgagacttcataaaa

SEQ ID NO: 179703 - DNA, 471 bp, Homo Sapiens
  misc_feature (52)..(52): n is a, c, g, or t
aaaatttaggaattttaataggactcactaatggggaaatttgccctcgagnccaaagaaattcggcacgaggccccagggagaaccccagggctggagtccccaatccctgtgctatgggcacaaagagacttcagctcttcctgttgccttggctttttcctgagcaaaaacacaacaaacaaaaaggccagagaagagcacagactctgtccctctcacaactctccagaagagaccccctgattcttcacaccaccggatgccactccagccagcaggattgctacacacaccctctgttctcagaagtcatctgcctgggcagccgcctctcagattcctgtcttcgtttcagacacttttctctgaagcatgcccatgtccaccagccaacgtgcccccgtgttcccccccatcagccaagtgattggggggctgaaccagactttaaaaaagtgagggaaaatt

SEQ ID NO: 179704 - DNA, 623 bp, Homo Sapiens
  misc_feature (512)..(512): n is a, c, g, or t
  misc_feature (521)..(521): n is a, c, g, or t
  misc_feature (578)..(578): n is a, c, g, or t
  misc_feature (581)..(581): n is a, c, g, or t
  misc_feature (588)..(588): n is a, c, g, or t
  misc_feature (592)..(592): n is a, c, g, or t
attttgccttacaagtatgtaggtcattctgtggtgggatttcccatcacatctagtaaaaaacaaccttttcatttccctcctttctaatccaagatcatatttttaaaaagtaggtttctgatgtgccatgaaatatttctgtgaatctgtgtttttgaccaaggaaacagctgagatattaaaccatgtggttgttccacggttcatctggctaccgttctgggtcccctctgaccacctcaaaaagaaaatgaaattgggagattaaatcaagcttgacctcctcttttaatgaggaactttcacgttggacttcctatctcaggatattcttcagtttcatactgctgaggagaaaggaacaagctgcagacactgtaactggtctcccagatgtgtgtatatgccgtgtaaaaccttcacaccgtgtgtgttgtgttcaatgttgtgtcaatctacaaactgactcaaacaacagtttaacgatagagaagacagtgataatggcnaaaaaaacncccaaccccctttttccgtcaaagtgcttgctatggctttcatagctgggacaagtnacnttaagtnttcnggagcaaagtgttcttgaaagaaaatggtgt

SEQ ID NO: 179705 - DNA, 669 bp, Homo Sapiens
  misc_feature (247)..(319): n is a, c, g, or t
  misc_feature (322)..(345): n is a, c, g, or t
ggtttcagtgtcaaactctgaatttgaatgacaatgtcaaactgagaaaacaggatgaaatgcacaaaagtaatgtgtaaattgagtagctgacatcagttgacagataaaagtaatgacagtatataagcgtcaggtgaatgttcaaggaataggaaacaacattgtcaggacgtctgtttggaaaaaaacccttaaaagtaaaattacatacatcagattttatctagatattaaactgatgctnnnnnnnnnnnnnnnnnnnnnnnnnnnnnnnnnnnnnnnnnnnnnnnnnnnnnnnnnnnnnnnnnnnnnnnnnatnnnnnnnnnnnnnnnnnnnnnnnngcttatgccagtatacatgtcagtgatctaagctctggctacataattgaatttcttcaatttgacaagtcaaaaaattgcgactgctgcacaggacacctcactgttacttcatgtgcaagtcagagatttgaaaagaggcattagagatgggggaagaaggcaatgtctaaatggaccttttctgtgccaggattcttctttaaaggctttcttttctgaaacgttttgacttgttcatcactgaatgaggaacaatagtgttttaaattcaaattgtcccatgagttgagatttcttttattaggaaatatacaatttata

SEQ ID NO: 179706 - DNA, 456 bp, Homo Sapiens
ttacagtgtgagatgagtctttaggaacaaaattacaatgtattattatattgtgccaataggatttgagtttaccttatgatagcctaatgtctgaacttggcccaggaacaactaagctataagttatttgcaaacaatatggttgtttactttaaaaactcaagagaagaagctgagaaattgttagaattcataagagagttcagctaaatacaagataatatacacaaaaataaacttttcctatataccaataacaaccagactagaaaacacaatgggagaaagagctacaaacattaatgagatacataaaggaatgtgggaataaacagagatttaccacgttcctggatgagacaattcaatgttgtgaagctattatttccaaattaaattgaatgtttaatgtacataaaatactaacagggttttgtctgaaatgtaagaaat

SEQ ID NO: 179707 - DNA, 891 bp, Homo Sapiens
  misc_feature (386)..(386): n is a, c, g, or t
  misc_feature (570)..(582): n is a, c, g, or t
gtaagtgtatctgtggaagagtggtgaatgttcaaagtggtttacattgaaacgttactttcctcttaagtttctcttctggggttataaatgactgcagatcctccctactgtcttgctgaagcccctcacgcccctggtttgaattcttctccaatcttataaacctcttacaggttattctaacatttttatatctgggggagcttctgcttgtcccataacaaaccctcatttacagcagtgggactggtagctaagttgaggtttgatacatgtttttacttttacttttctttaggttactttgcatcagcagactgcaaactttttcttaaaagagccagatagggaaatagtccaatcctgaagttgggccatgtggncaattacggtaagcaaatagggcctgctgtgtttcaataaaactttatttaataaaacaggtggtgggctgagctgctttgtataatcttaggtaccttgaatccatagtccaaggatggtagaaagacaagagagagaaggaattgggcccggaagtaaaggcttgttaaataggttcattcnnnnnnnnnnnnnctcaacaaattgtgagcaactgccttttttcaagaattggtctcagcacaatggttaaactggtgattaaacagatgagtccctgctttatgaaatttacattttctacctagtgtacattgttcactaaccctaacatgagtcagaaataacatgtaataaagaatggcttggttatatgcattttctcaaaaggagatacatagaaaacacttaaaagagcccaacctaaaaatctgttacctaaagtaagacatcccataattttcttcaaatcagtggttctcagccttgattctacattaaaaa

SEQ ID NO: 179708 - DNA, 752 bp, Homo Sapiens
cattgatactttgagggcctgttgtcacgtgatgctataccagcgtcagattggaacttggtgtcttgctgctatggagtctgctgtcagtctggtcagctgcacctgaactccaaagggaggtgggtataatgagccatgtccaatccccgtcccttcctggcctgagctcatttttcaggttcttcagaatccccctggtggagatgagggatccattcagtgggttggggaagcttagagttttatttttgatttacactatgtgaagcagaaattaaaatactgtaaccctgatagggttattttaaagctgcaggaatcaaggcaggttgccgtgggtaagaggatagacaggcaggtcatgtagcaggacgagctgcggacaaaacccctcagacaccaggttaaggaaggatttggctttattcggccgggagcttcggcagactcgcgtctcaagaaccgagctccccgaaaacacagttcctggcccttttaagggcttacacctctaaggggtccacgtgaaagggtcgtgatagattgagatcacatgtggttagagtgggagggggggtaatcttttaacctcaggccctggtcatcggtggcaccggctggtcttgctgctgacttcattcctgttgtttttcaacttttacttcatccttctcttcagagacaggagacagtaaaagaaatggcctctctcctctgtcagagtggagtcccgagctcccagaaatgcc

SEQ ID NO: 179709 - DNA, 458 bp, Homo Sapiens
tctaggtgacagagtgagaccctgtctcaaaaagtaaataaataaataaataactgaaatatttactttatacttcagtaatgctgattgtgttttgcaaaatttatgttgttcttgtattttaaaaatataaagtttttattagctcccaaaggccatattatagacagtatatctgtgtaagaataccaccaatatattgagaacatgataaaaacttctcctactgtctctttaatgcttatttgaaaattttctcattagtctattattaatgattgtaatgtattttctatgaagttttactgttcttcattgaatagcaatgattcacaatgtcttctcttcatgagtacacacagttaaaaactgcagatatctaaagaattatttttcatagtatatctatgttgtattcagcattttatgcattaaaatctctcttattatcgattcta

SEQ ID NO: 179710 - DNA, 702 bp, Homo Sapiens
  misc_feature (454)..(465): n is a, c, g, or t
ctctatttctggtcaccctgacccttgctttctctgagtccctgttggcttaacagtccaccccctacctttggcccctaatcattctctaaatggtctcatgtaaaggtattctgtgcctaccgatctaatgcatctcttccaggagggcagtgccctcctcccgaaacctacttttcagaagagagaaaaaaaaggaaattacagtgactccatatgtagctgtcaaaaggctgaaaaaccttcaaatcctacttcatctctccacacaagcaatgggccatttgggaatcagactgcaaatgctaacatcttttgtgtatgcatgtgtcagaaaagagtgtgagtaacattttgttggaataaacctttaaatgcacatataccatatcagttacattcatatcaattttctcttctggatcttgaaacatttccattacatgtaatagannnnnnnnnnnnaagtctgagacaaaggaggaatgatacaaaagctgttagcagactgaatattcagtgaaaagatttgcttatttataaatttggtttgaactgctagctaaaattatagctcctggaaattccctcataaataaatatgatcaatatatttgaaacctttctagattgttaagacaagccagaagtcataatttcggaattcagttctagtggtaactgctgcttccggaaaatgag

SEQ ID NO: 179711 - DNA, 679 bp, Homo Sapiens
aattcggcacgaggaggagccacagctcatccagtcccctgcatttcgtgataggaaaaaaagaaaggaagcccagagatattaagtatcttcccaaggtcacagagctacctagagtcagcactagcactagtggccagctctattatatccctcagtcactcaactacttcccattgcagtatcttggaccaagtaagctgaacttgattgagcagcccccatgaagcttcgtaacaaaccatagaacaaaggaaattgaaatcaacactagaaaactatgtaggatttttcagcattgttaatttattgaactttagaaaaattatctgaatcagaataatgggaaaaacagcatttcaaatattttgagctatattttgatgccactactgtagtaatattagtttcataaccaaaaaggattaaaagtgaatcagaggataatacagtgtttttagcatgtgtataattttggtataatgagataaaaaaatcttcagagttgggccagattttacaagtcagttatttagtccaagtgcccatatggtaacatggtaagataaagttagaacagaaatgcaaaaataatattgtctatattgtatctgaaaatctgaaaaaactttattttagtcattgatttattttaatgaattaaaaggctgaagtcata

SEQ ID NO: 179712 - DNA, 464 bp, Homo Sapiens
ccgtactccagcctgggcaacagagcaagactttgcttggagaaatgtaaataaatatactctgccctaatgactgcaaaagttaaagaaaccaaagagggactccacagacttaaacaacaaaacccacaaccaaatactctacctacttaagggctggctatatttagtcaagcattaggtaatgcatcagttcttcccttgatcacttatacccataacagctagcaacaaatattcacaacagtgtggtggaaaagttggttatagttaaaaagtacttgaacgttaagtacttaagtacacttgagtttgtggggtttcgaggtttgtttttttgggggaagtactatttctcacatttgcacaacatcactggaataacaattccactttattattctttctcaagcaaagtgtaaatggttgaggctagaaataaaaagttatttttttaaaaaaag

SEQ ID NO: 179713 - DNA, 871 bp, Homo Sapiens
  misc_feature (99)..(134): n is a, c, g, or t
  misc_feature (186)..(196): n is a, c, g, or t
  misc_feature (673)..(673): n is a, c, g, or t
  misc_feature (796)..(796): n is a, c, g, or t
  misc_feature (812)..(812): n is a, c, g, or t
  misc_feature (822)..(822): n is a, c, g, or t
aggagcccatgagatttgagtcaggttgtaagtgaaatcacttacacttttggatagaatttatactcctgctcttataaatcagtggtagacttaccnnnnnnnnnnnnnnnnnnnnnnnnnnnnnnnnnnnnattgccacagctccctattctttcttgcctgcctccacccccctgttcaggnnnnnnnnnnnttgagccttaaagtgacagctgattttttaattgctgaattttgtgaaattttactttttccaagtgtttccaactttaaaaagagaagtgaagacaaataggttggaatggtgaagacaaatggattggaatttcacaggctgtgaataattccttaggatctggcaaaccgtgaagtcttatttgaagaccttatctcctgagagttcttttggagtaggaaaaagaaccctatttgaaatagaccgtttttctcttgtttttaatctgtttaatatttctgatttttaagcagctttcaaaacaagtgtggtggaaaaaaagaaatagtagtaggaagatgtttagggcagcagaactctgggtctaaataagtacatgttcccacttgttgccgatttttgagagtactagggccatctttctcaattttgtattatttgtgtgcatgtttatatcaaagatgcccattttgntaaaatgctatttcctttattaccttggaaactgactcagcctcatgttgctcctaattagtggttaaggctcccatgagttgcagataaaatgatttattttaacaagtagaaggaggtgantcaccttttggattgnaaatatatgnaaatgtctacaaggtctttatctgctttctgtcaggatttatattaaat

SEQ ID NO: 179714 - DNA, 649 bp, Homo Sapiens
  misc_feature (393)..(393): n is a, c, g, or t
tgaatccactgacatcggggaggagcaagagaacagcacgctgacactgggtcagaggctaagaccgacatttctgggaaccactcccggaagggcacagaggagacgctttcagcctctcatcagccagcctggcctgtagctgctgcacgttatgagtgtgttcctggcatgactgcttctaacaaagaaatgctgaggcagtgtcacgctggtgtctgtcctccttacagaatgcctgaacagttccattgactcaaagtgaagatcaaaagaaccaaatgacagcaatagccaagtgtaatcatcagtaaccctgtgttctatccacaggtaaaaaacaatcatcctcttcattatgggtttcaattttaaatgtaatacatttttagnaaatgcctatttccttttataatctctttatataatctaggttattctggctcttaggtcttcatttagctactgaaaagatttgatctcaaatcaatgatctaaccacccatgaccatctcccacctctctccccgtacaccccccagcatgaattctgggaactcaggtaaaatgctttctggaaacctgcctgtattagtctgttgtcaagctgctaataaacacatacccgaaactgggtagtttataaagg

SEQ ID NO: 179715 - DNA, 592 bp, Homo Sapiens
  misc_feature (577)..(577): n is a, c, g, or t
attgaatacctactatgtctgaggcactgtgtacaatgaagaataatacaaacacattgtactcccctagagctacaggttagctctgggcacagtaatacattattacataaaataatgagactgattttcttgggtggcttatgaaacctaatcccattttatgtgagcatttggattttgttcagtgctcttgacatcttcataaaccacctgatcatgcattatatagagacattgtttatccttttttcacgtggtccatcgagcaaaaacttgactagaactagttggggtcaaaacaaaatttaattttgaagcaaacaatgggatagtaattgggtgtttcaggttttgccctatgggaaacagctgttgttttttgcctgcccagcatagcttcttttggtaacagcaccctgatttcactttggggaatcttcttgctcacctttgcaagccttgtagagaaagtgcaggattgactcacctagctcctagctccaggagagggcacgcagtctctgcatctgcttggttgtaacagttgattcagatatagacacgtgagtcaaanaagggcctatggaaa

SEQ ID NO: 179716 - DNA, 664 bp, Homo Sapiens
  misc_feature (385)..(385): n is a, c, g, or t
  misc_feature (428)..(428): n is a, c, g, or t
ccctcccggccccaggacatgcttcaatgcctggtgccataggaagcccaggggacagtcacaacttcttggggcctgggcttcttccaggcctatgctcctggaatggatacatttaaataaagtccaaagctattttattcctgggtttgcctgcgtgaagcactcaccttccatctcttgtgcagcccaggtgtgggagctgccactttttgtggcctgcctccagcagggctgcccaagccacgaccaaccagagcccaaactgcctgccaccacgagcatatcctcaagtcaccaaacccactatttcaaaggcagaaaaaatgctggttcacccaggtggtggctggaattttggagctggctggttgcccattcagtnccaatcccaacacatacctattaagcaactgttttgtatccanggacaatgcgaaacactgaggtgcctcctaggctgtgcatgtcgcagcctggcagagaggtcaaactccttcaataaccaagaagccacgtgatgatgtgtaactactagggcatcagtaggtaaatgtgtctgattgttttaaagaatagaaagggttcttcggggaaagtttcttgggggagagcaaccttcacatgtcattttgggaaaaggaataaaaaatgattgggacac

SEQ ID NO: 179717 - DNA, 428 bp, Homo Sapiens
  misc_feature (385)..(385): n is a, c, g, or t
attatggatggcaccaggctgggcactgccattcttttactttccttcatgcattttttcggatccagagtattaacaccactttttttactctgcccattcaaaaacagtagacgttgcaagttgagttggccctcttgcctaggtgtgcctccttgccttgggattctgacatgaacaggtgaagtctcttcatgattttttttgttgttgttgttaatggtatgcttgctattatggccaatatgtaaatgttactctgaatacatatttatataccatgttacttagtgacattattcaaacatttgtatgcgtatttgtggaaattgtttgcatcagtcatttaaaaaatatttcagcctaagttttctaagaggtatgntgaatacatttttaaaagccagcttaagggtcacagcagcctt

SEQ ID NO: 179718 - DNA, 304 bp, Homo Sapiens
gctttaaatgatggtgtctaatatctcagttttcagaagtaatctagataaactgttaaaaatgaaagacttaagtacatgtaaatgggatgaatgattaggtaaattttgtgtaatttaaaatcttaaaagtatttttgatgcccattggatatctcagtcatttccaattaagaaagggttatgatagggaggaatatgtttccaaaaattgtggaattattctcatctataaaatgctaatatctgatagtttaggattttttgcttcctaaggtttcactaaaatttaaggttactaaga

SEQ ID NO: 179719 - DNA, 767 bp, Homo Sapiens
  misc_feature (97)..(178): n is a, c, g, or t
  misc_feature (407)..(407): n is a, c, g, or t
ctgtaaactccccctgaaagacattcctattaatacagtaaatgtgaacactgacttgtttttataagcacatctgaaagggcatatttgagtctcnnnnnnnnnnnnnnnnnnnnnnnnnnnnnnnnnnnnnnnnnnnnnnnnnnnnnnnnnnnnnnnnnnnnnnnnnnnnnnnnnnattgtaaatgatccccctaccttcaagattctctgattgatagaattttttctttaattaaaaaattttaaatattccttgagttggaagcactgatcaataagtggattgcttagggaggttggaacgaatagattcagtcccaacttcctcttttaaattccctcttcctcactcttcctgcaacacttatttttacagttgagttttaaaaataagtaatatatanaaataatttctgtagtgtggtttcagatttaaaaaattccctgcagacaggctgggcttgcaacccccatcagtcgatggtcagagccctttgcctttttgagaccatttttaggtgagcttggcttcccctggatacagtgtgcagtgcattcttcctgaattttgcaattctggtatctgggtgtattttctaggtgtgtcagggtgagtgtaatcccacctagggtgtggaaaaagccaagaaagggaaattaaaagaggttcctatccagtcatgttaatgatcttccacttgtactatcctgtgcttcgttgttaacctcgaaaacatactttgttggctgcaaaaataacaaac

SEQ ID NO: 179720 - DNA, 719 bp, Homo Sapiens
ctaatgtataccctttctgatattgtatttattaaataaatggtttcaccattatgtgaggtgggtaaaagttagactgcatgcaacttggacatctctgagctggttgttaacttgcagaacaaaaatgctgtggggagaggcttcagggaaaacttgatgtgcctgtggttgttctccatctatttgccctgcctctcttgctgttctggttggtttgatattctgggtctcaccaatttctcttgatttttgtgagaatttggctttgtttcctgttttttaaaatcatattttatctaaatcctttttctgtacacatttttaaaggaagagaatactgtatttttaaataaaggtttttatcttgtccaaagcctaattacaggtaaaatatcctttgtaaaatgtaactaacaaagaatgagaaatttatgtcggagaacattttatgaataaaagggtaagagaattgagtgggtcagtagtaacaggtcttggtggcaagtctcagcttcacagttccaacagttaatgatggtcaggatctgctagaaaattatgttggtcataaaggtatttgataagctctgtttgtgtcatcttagtgaatgcaacctgttaatgataatggctttttcgctgcttgattttcttcttttcctcatttttaaaagctaattaagtttttttaattgaataaaccctaatactattct

SEQ ID NO: 179721 - DNA, 586 bp, Homo Sapiens
  misc_feature (107)..(197): n is a, c, g, or t
  misc_feature (199)..(226): n is a, c, g, or t
ggccgcattcggaccggtccctacaaacaagggggtgattagtatgttgggacaaacacgctgttgctaaatggaaacactgacctcacagtgcatcctcctgccannnnnnnnnnnnnnnnnnnnnnnnnnnnnnnnnnnnnnnnnnnnnnnnnnnnnnnnnnnnnnnnnnnnnnnnnnnnnnnnnnnnnnnnnnngnnnnnnnnnnnnnnnnnnnnnnnnnnnngtcagtgtgttatcggtgtggagcggaggccgcggaggctcctcggtccttcagcacccctcggcccgacgcacccacgcccctcaccccccgagagccgaacgctccccgcaccgcccccggtcccttccctcggccgggagcgacttctgcagctcgttcttccgaatcgcaccagcaatgccggccagccgtagagggaggaagagcccggggagcccgagcatagcgtaaacggctctctgaccttaatttcatcctgcatggcgaatctctgccgtctctctgaacgcagaagggtctgagactggccgtctccttttctttccttgtaataaacatttttcattattcctaaaa

SEQ ID NO: 179722 - DNA, 888 bp, Homo Sapiens
  misc_feature (348)..(348): n is a, c, g, or t
  misc_feature (826)..(826): n is a, c, g, or t
ctttctgcctatattctgttgttacactggactcaactgtttctgaattctgtgtcttcctttttctttatttacttcatcattttattatagtacatgtcaagtctcctgtcaggaaagagtacatggaaggcagagttgttgagtgtctgtgtctttctctgacctctcacttgatggtagtttggctggctctggaattctaggttgaaaaatttccctagaagtttgtagccactgcttcactgacttacagcatccactgctgctaatgagatgcctgattccaatctgatactgatttatttgacaatcagtaaatagtattgacagtacagtggatctggntttcccacccctatgcctggaagcttttaaagtctcttctttatctttgatgtattcagttccctaatgctcagtggaatttttcaatctacagactcaggtactcctactcttggaaattttctcattatttatatgactattccccctttccatgttttttctctttatagagttcctgttcctgctaatcaaatgttggaccttgtggattgatccttagctgcattcattatttccatttctttgtattgtgccactatgagaagagtacccttgattattttcctaatgaataatatttttaacagtaataattttaacaataactagtttaatttctgagagccttttcttaaaagtatcttctgtcacatgaattatctcattcccttcatgcccctgccactgggtccctttttttccctctgtttaccttggttactctcattagactttcctcaaatgtgattcttanacccatatacgtgtgcgtgtgcacgtgagtgtgtctgtgaattaaaaacctaattgagaaaa

SEQ ID NO: 179723 - DNA, 500 bp, Homo Sapiens
  misc_feature (162)..(162): n is a, c, g, or t
  misc_feature (184)..(184): n is a, c, g, or t
aggaggggcctaggtgggttgggcctgagaaccagggcacgggtgtggtgtctgctgggctggagataagactggggagagacaccccaacctcccagggtgggagctgggccgggctgggatgtcatctcctgccgggcgggggagggctctgcccctggnaagagtcccctgtggcgaccanaaataagttccctaacatctccagctcctgggctctggtttggagcaaggggaagggttgccagagtcctgggggccccaaaggagcaggagtctgggagggccccagagttcaccctctagtggatccccaggaggagcagcaccccgagcccctggagtggccccagtacccttcccaagaggcccacagtcccagcccaggacaaagtatgcggcccatccctggtgcgacagcgtgggacaatgtgaacatggactcgaagacatggccctttctctgtagttgattttttaaatgtgccattattgttttt

SEQ ID NO: 179724 - DNA, 530 bp, Homo Sapiens
actccagacgcatcactttaagaactgtgacgctcaccgcgaaggtttgcaacttcactcctgagccaccgagaccacgaacccaccggaaggaagaaactccgaacacatccgaacatcagaaggaacaaactccagacacgccgcctttaagaactgtaacactcaccgcgagggtccgcggtttattcttgaggtcagtgagaccaagaacccaccaattctggacacaccaccttgcccttctacttttcacaggtactaaggtctcaaactcataagtttttccagggttttctgcattgaacaactttttgtttgtttggtggtggtagtgaggaatagaccttccccctttgaaagcttcccttgtttcctttagtctgataaatcagttaccacttaaatatctgcttcctagcttctgaactcatgctgataatgcccatctgctgtctttacatgcctggtgtctctgatggccatttttcttaggggcttgttcagtgcaaataaatgactctctaggg

SEQ ID NO: 179725 - DNA, 519 bp, Homo Sapiens
  misc_feature (11)..(11): n is a, c, g, or t
  misc_feature (483)..(483): n is a, c, g, or t
  misc_feature (495)..(495): n is a, c, g, or t
ccatagagaantaattatttgcactgaacaagcccctaagaaaaatggccatcagagacaccaggcatgtaaagacagcagatgggcattatcagcatgagttcagaagctaggaagcagatatttaagtggtaactgatttatcagactaaaggaaacaagggaagctttcaaagggggaaggtctattcctcactaccaccaccaaacaaacaaaaagttgttcaatgcagaaaaccctggaaaaaacttatgagtttgagaccttagtacctgtgaaaagtagaagggcaaggtggtgtgtccagaattggtgggttcttggtctcactgacctcaagaataaaccgcggaccctcgcggtgagtgtgttacagttcttaaaagggcggcgtgtctgggagtttgttccttcctgatgttcgggatgtgttccgagttttcttcccttcccgtggggttcgtgggcctcggtggctcaangagttaaagttncaaccttcgcggtacggtcacagt

SEQ ID NO: 179726 - DNA, 1170 bp, Homo Sapiens
  misc_feature (239)..(254): n is a, c, g, or t
aagatgacaagagtgatagtgaacctgatgtgttggttgtattgtgaaagaaaaaagggaatcatgggaaatagtatgggtcagctttgagtaactttttccatgggcacaatacggtacatactaattatgaatccaacaaactctatgaggactgtattgtgcaggtgtggagatgggccgtgtgtgtgtgggtgaggagagcagtaaaaaagaattaaagtcaatagataatgttnnnnnnnnnnnnnnnncaatcacatgtcaataaaagccatgttacttggagatacagaaataaataccaaaggaaaaaccagggtgttatgtatggcatagggctgatgtgcttttgtaataagtcagacagaactacgtgattctatgtgcatctatggcttcagggaaagtaaaaaattttatattttatagaaactcaaaagagtgctcattgcactagtatttaaaaccatccacttaaaaaccaggatatttaatcttgtgcaagcaacacaggagtcaagagggccttacgggtaggagcaaaacaaaagatgctgcgattgagtcctgaaagcagaaaacatcctttcttcttcctgatgcctaaaccagaaacgttagcagggaagaaataactgagaggacgctatatttaaggaaaccaaaataatcatgaactcagagcttacctgagctggtaaatacaggcaccatccatatcacaacgctgcctaaaaattgtatttatattgcatgcaaatatttgacaactccatcacaaacaataaaagatcggggagagaaaagccatttagccctgataaagtacatcctcaatttagcctagcagatcagtaccccacaggaataatctggaaggcatgttccctaccccctccaccttctgttatttgcatttctagcagtgatcactgaagcatcaggatttgtggggattcacaagtaacatcatgatgggaggaggcagccctgcctccgatgatgagctgaaaatagctgaagatggtaaaaccaagagcaaagcaacccggctcatagccgaaatttcatctcctcctcagcctctcacagagaagccaggaagagtctgattggcttgcaatcgggtaaacaaaaataaacacataaatgaataaagtccctgaa

SEQ ID NO: 179727 - DNA, 296 bp, Homo Sapiens
  misc_feature (252)..(252): n is a, c, g, or t
aagatgacaagagtgatagtgaacctgatgtgttggttgtattgtgaaagaaaaaagggaatcatgggaaatagtatgggtcagctttgagtaactttttccatgggcacaatacggtacatactaattatgaatccaacaaactctatgaggactgtattgtgcaggtgtggagatgggccgtgtgtgtgtgggtgaggagagcagtaaaaaagaattaaagtcaatagataatgttaaaaactgaaaaanaacaatcacatgtcaataaaagccatgttacttggagatacaga

SEQ ID NO: 179728 - DNA, 488 bp, Homo Sapiens
  misc_feature (42)..(42): n is a, c, g, or t
  misc_feature (54)..(54): n is a, c, g, or t
  misc_feature (61)..(61): n is a, c, g, or t
  misc_feature (66)..(66): n is a, c, g, or t
  misc_feature (77)..(77): n is a, c, g, or t
  misc_feature (190)..(190): n is a, c, g, or t
gcaaacctatatgcaaaacttcaacaagccccccttcccggnggttgaaaaggncgcaatncccangcctgtgtaanaaactttagctctctgccaatgagacttaaattccagattcactcctactccttattagttatctgatttttggaaacttaatctctttaaacctcagtttcatctctaaaangggcataatagtttaccctcatagagtttggggagaattgagtgaattaatgtgtgtgaggacactaagattcccatatagaaataggctcaatgaatagtagctgtttttatttctatgtaaagtgagtagcggtagttgatgggagctgttgaaacaggtaaacagcattctagcaatccttcgacttttgtgatagcaaaccataaaaacaattttagtggctgttttactaattaaaggacatccacaattcaatgtataacagaaaaagtaatgattaaagcttgtgaatctg

SEQ ID NO: 179729 - DNA, 774 bp, Homo Sapiens
  misc_feature (373)..(373): n is a, c, g, or t
tatttataaatgtgaaattgcctctaaccaaggcaaggtacatttccatcacttgtataaaccaataccatgaagatcaccctgttttgtcttctccagtgaaaagtaaaacatttcacttcaagcataaacaaacgaaatgttggcatgcttacttaagttctgagcaataaacagttcaagatatttcaaagataagaaatccagttttcatctagataaagtgctatcctcttcattgttgcaaaatggccactaacatttcccatttcaattttagttcacattatgcccaaagtttgcatgttcatcagtggatgccattaggtaacaaaaatatgttccacagtttaataatagtgtatggaagttnaagtggcttctaaaggaagcccaagatctatgactcaaaaaccagctcaacagcaaaacaccaaatgacccttttaaaggtaccaatattcaaatgctctaataaatacatatataacaaaagtgaaaaaagtaactatagtgagatgaggttcttccaaaaaaattctgtcttgtcaagcattctaggagtctgagccaaagaaacagcgccattttgttcattcctccccctgcccacggacacttcctttgagccacctctatacccagctaactctggtattccctctagggaaggttctgtatcagccctgggactcgccagtgcctcagtaaacagacggactatgttaaaaagttaagttgtacaacgtgctgatggctggaaagatgtagtac

SEQ ID NO: 179730 - DNA, 613 bp, Homo Sapiens
tttggtttggtttgaaatttctttgtttatccagtgaattacaagtagaataaagatctggttctaaattgtcttttggtggtgaagtgccatagaccatttcggaccatttctatgatgtaccagcagcccccacatcacacctcctcttccttggcttgtctcttccccaattcttagagttagcagtgtttcttactgcattcatctcctcagtcataagtgtctgtcaacctccgttgtgaagtcatgagtctcttgagactgaaactccaagaatgtattgtgctcacagtggcgatggtgttcctgtgctggatggtcagtggttgttgacatgtagttagaaaataggtagcaagttccacgcagcctcactctttggaacctagtttctcctatggcctccctttctactgttgttaataacattctattaatgatccatgcctctcttcacaggaggaatattagaatctatggagcagttagtattctttgtcacctaaatttgtctacttctgtacatttccaataaggcaccaccagggcaagggaagattccccacatgtatatccccagctgtttctgtcataaaacttgcatgtgtat

SEQ ID NO: 179731 - DNA, 770 bp, Homo Sapiens
  misc_feature (577)..(577): n is a, c, g, or t
cttccttcatccgacaactctactcgaagcaagacgaaagcaggatgtggcagttgcagtgagaaaggaaaggaaagatgggcagactctgctttctggaaatttcttcacaaagtagagctcatgaactctgtgctgtcttctggtaacatatcatcagtgtttgtattcatggtgtggcacatggatccatggcattgggtaaatctggtggtttttacacatggtcagaatgtgttcaaatacatctcatgatggagacagtaaccaaggtaatgttttgtttcagcattttaaaaagactcccacttaacatttatctcagaatcatgagcctctctctagttgacaattgtccattgttcccccagccccaaattgaaccatacatttatttcccaaaacagaaattgtttctgtaaaaaatatccgaccttcaaaagaagtgtgaggttggatttttcccccttttatttgtcctaagattcccaggagggctggcctcccagcccagatagctcagccacctcacctgcctatcattcctgcattcctactttgagggtctcatcatgcnccactgggtgttgttcctaagaaactgattgattaaaaaatttcccaaagtgtcctgaagtgtctcttcgaaatacatgttgatctgtggagttgattcctttccttctcttggttttagacaaatgtaaacaaagctctgatccttaaaattgctatgctgatagagtggtgagggctggaagcttgatcaa

SEQ ID NO: 179732 - DNA, 444 bp, Homo Sapiens
  misc_feature (399)..(399): n is a, c, g, or t
  misc_feature (425)..(425): n is a, c, g, or t
cttccttcatccagacaactctactcgaagcaagacgaaagcaggatgtggcagttgcagtgagaaaggaaaggaaagatgggcagactctgctttctggaaatttcttcacaaagtagagctcatgaactctgtgctgtcttctggtaacatatcatcagtgtttgtattcatggtgtggcacatggatccatggcattgggtaaatctggtggtttttacacatggtcagaatgtgttcaaatacatctcatgatggagacagtaaccaaggtaatgttttgtttcagcattttaaaaagactccacttaacatttatctcaggaatcatggagcctgctctgctagttgacaattgttcattgttcccccagccccaaatttgaaccatacatttntttttcccaaaacaggaaattgtttnctgttaaacatatccgacc

SEQ ID NO: 179733 - DNA, 419 bp, Homo Sapiens
  misc_feature (250)..(250): n is a, c, g, or t
  misc_feature (374)..(374): n is a, c, g, or t
  misc_feature (399)..(399): n is a, c, g, or t
  misc_feature (407)..(407): n is a, c, g, or t
aaatcagtctgtgtcaagaagaaacaggacttgatcaagcttccagccctcaccactctatcagcatagcaattttaaggatcagagctttgtttacatttgtctaaaaccaagagaaggaaaggaatcaactccacagatcaacatgtatttaaagagacacttcaggacactttgggaaatttttaaatcaatcagtttcttaggaacaacacccagtggggcatgatgagaccctcaaagtagggantgcagggaatgatagggcaggtgaggtgggctgagctatctggggctggggaggccagcctcctgggggaatcttaggggcaatttaaaagggggggaaaaatccaaccttcacacttcttttnaagggtcggatattgttttacaggnaacatttnccgtttttgggg

SEQ ID NO: 179734 - DNA, 615 bp, Homo Sapiens
ccgacgcgcgaggcctcgggaggagcgtcaacttggtaactctcctccggtcgcaagacctggaagtggcctcagggggtcgcccttcctgtccgtcgtggatgaaggggaccacttggcttcagaaatccccgctggcctccgcctcccctggggtttccctttcggcgcaggcggggcagcggcgtcatcacaaccatcgccaccccagtaatcacagcgagcggccctttgcgcacgcgtggagccttctcaggcctcagtacttctcacttcgcccggcaaggctggccaggaggggtgcattctcccttcccccgtatttcaagaccactccccttctgcatgctcggtgtccccagtctgtctccctcgctgcctcccgaggccctggaactgaagcaaagttcgccccgaagccgaccgttctttgaagttgaaatcctcaaaaagcctgcagactgaatagcgctgtactgggcacacgcattgcgcttccagccgcccttgggtgctgcgtgctgggccgggtcgggttggggccttcctacatactcttgcgaccattaggctcttcttgggtgagttgcaagttaaaattaccagggctctctg

SEQ ID NO: 179735 - DNA, 495 bp, Homo Sapiens
ctgggctttttggaatgagtcttcctggtcccgacagttctcctgcatgtccttgtggtggccagtctctgttctttgatgacgaatttgctttctgagtagagtctggtcacctggagctggtttggtggaataaaggacaatggggttctaggatgtagctgggagatacaagctgtgagtactctaataatgagataagttttcttatgcaggccccagttggtcctgaagtccttcctcaaagaggcgatcctgaaacctacaccaagtgacgtgagcatcaggagaatgcgcgtgcagcagcctcccagggtgagtatgtgatgggctggcattcgtttggaagcttagatactgggctggtcattaaaaccttggcttaccttacccgtttggggctcgatgggtgctaaagcagttctgtttgtactttctcgaaaaatggaaggctgtcaatttaaattaaatttatattggtccaaaaaaggccgg

SEQ ID NO: 179736 - DNA, 300 bp, Homo Sapiens
  misc_feature (110)..(164): n is a, c, g, or t
  misc_feature (249)..(249): n is a, c, g, or t
  misc_feature (280)..(280): n is a, c, g, or t
  misc_feature (286)..(286): n is a, c, g, or t
caacaagcacaagccaccacacctggctaatttttaaaatattttgtagcgatgggggcctccctgtgtttcccaggctgatctcgacctccgaggctcaatcgataccnnnnnnnnnnnnnnnnnnnnnnnnnnnnnnnnnnnnnnnnnnnnnnnnnnnnnnntgggctttttggaatgagtcttcctgggtcccgacagttctcctgcatgtccttgtgggtgggccagtctctgttcttttgatgnacggaattttgcttttctgagtagaagtctnggtcanccgggggctgggtt

SEQ ID NO: 179737 - DNA, 540 bp, Homo Sapiens
agaaaatttccttttttattagaatatttaaaaaacaactgaattgtattaattattcacaaaaggaatgacaatccccaaatttgagtggatttctgggtggttcaaggaagcttctacatgtttttcacaggtaatgacactactagttaacagctctggatgtagatgggcaagactggacggccatgcagagaaaagaaaggtgggagtgaaactttacagagaaagcacctgagatgagggaaaggcaccttaggtgtgtttaaatagcattacaaaagctaaacattaaccaggaaatacaagcttttttccctatcacccaagtgacacctgcttcgctttgtcttaggtttaaaaatatatttgatcccaggaaggatctgagtgatctaagttggactaaacaggaggcagtctatagggaatgtgtatttttcaagtaggagcatttctttgcctcttttgttcaggatctcatcattatatatcgtcaatgattggcagtttttaataagaacttaatttgcagagaga

SEQ ID NO: 179738 - DNA, 688 bp, Homo Sapiens
  misc_feature (44)..(44): n is a, c, g, or t
  misc_feature (91)..(91): n is a, c, g, or t
  misc_feature (102)..(140): n is a, c, g, or t
ctttaagatgaaaagtttattttgctttttgcctagaagcaaanctagtgaaaataaaagtataaaaataaatacaatttacattaatgancattccactcnnnnnnnnnnnnnnnnnnnnnnnnnnnnnnnnnnnnnnncatcaaaagcacaaacagtgtctggcacctgtatgagaagaagctatgaacaccaaaaaagaatgtgtaaaacacaggcttttatctttaaattaaaagcactcaagtttctcatccttactctaaagctagttttaactttctccaaaactatttgttttaactaatttgcattacacacacaaaaagtgcacaaaacttttagcatctttcttactggagagacccacaatgctatgaataagctgtatcctgagttttcagaatgataaagcacagtttatcatattaagaagacaatttgatactttgcctataaattttaaaaaattggtaacttggacttttttttgaccatcttctaattttctggttcactcattcaatacatgatacatctcaataaagaaaatcaagtttacacccagggtggcttattatttctgtctatagctggatgtcaaagttaaatttaaaatggcacagaaaattggagaaaacaatcttcatctccatattcttaaaaggatattaagaatatatatagg

SEQ ID NO: 179739 - DNA, 791 bp, Homo Sapiens
  misc_feature (697)..(697): n is a, c, g, or t
cccacactgcccttttggtggtgtgcctgttgggccaaaaattgggtgataatgtagtgtcactttctcagctcaatgcagtttctactttttcttatgggaaaatttttcataaaacctttttgcaccaaaacccaggggtgttttttgcaatatccttgttatcctcgtagtgtgccaagtcagaggctttctcttgcccttttcctgctgtgttctcaggcctcccaagggctgtttgactcaacagtctacatccttcgttgtgttttggagaatgtgggggtgggggtcagagttcaaggtgtctgttcccttttcctgtgaactctttctagtccctatttggggagggtggctggaaacagatttttgctgaatttctggctcagatcttctagccaggaaaggcaagagcccccaagagcccttttttttgacatacactaatcattggccggggtcttggtgacaacttttaaaatcccaaatagttttatttggattatgtaaaagtaagtgtgaaacatgggaacaacggacttccactgagcgatctgaaaacgttacaggttcagtacttccaaaggaagaaacctccaaacccaaaaaagaataaatatgaatttgtatttttgaagaatgtgaaataatgggtgtttgcttaattgctcattttgtataaacttaatattgnactttaaaatatctgctaaaaagtgaaaatttaactttttggaattgaaaaagcaatattaaatactaatgaaatcctaattaaatgcttattt

SEQ ID NO: 179740 - DNA, 694 bp, Homo Sapiens
  misc_feature (60)..(313): n is a, c, g, or t
  misc_feature (326)..(342): n is a, c, g, or t
aaaaaattccacatgcccctttgcaaatctaatctttttcagccgggtgcagtggctcannnnnnnnnnnnnnnnnnnnnnnnnnnnnnnnnnnnnnnnnnnnnnnnnnnnnnnnnnnnnnnnnnnnnnnnnnnnnnnnnnnnnnnnnnnnnnnnnnnnnnnnnnnnnnnnnnnnnnnnnnnnnnnnnnnnnnnnnnnnnnnnnnnnnnnnnnnnnnnnnnnnnnnnnnnnnnnnnnnnnnnnnnnnnnnnnnnnnnnnnnnnnnnnnnnnnnnnnnnnnnnnnnnnnnnnnnnnnnnnnnnnnnnnnnnnnntctgtctcaaagnnnnnnnnnnnnnnnnntatatatatatatatataaaatctttttataatataaaaaatactgtttgtacctgaaaacttattcaacgcatccttacttccatttgtttctgctcctacacgcttgaactgttgcacaatcgtatttaattcagaagagcgctgtgagattctgtgttcagctattcgaagacgttctttcaaagcaaggaattctcgttgataagcaatcagtttttctagaagcaaaaccaaaacagttatagtatatgtcttaaaacaaataaacaatataatctcaatggaactgtaaaattacaaagtttaaagttgagtttttcagaagaaaatattcattgatacagaactg

SEQ ID NO: 179741 - DNA, 304 bp, Homo Sapiens
  misc_feature (252)..(252): n is a, c, g, or t
cccctaccacctgcattttacttaaatgtagctgttacttaggggtgaggaaatgcaacagaagagattctttttaaatttcatgatatgattctattttaaattccaaaggtgttgggttttttcctgattgtattttcaaaacatcaccatgaaagatagatagtgcaagttcatgggactaacaatcgtgaagcacagtctctttttctggaattcacaaggtacctagaattcaaacaagaatcacancatcacatgctaaaaaaacttctagcatctaaaatacatacaagaggctgtg

SEQ ID NO: 179742 - DNA, 741 bp, Homo Sapiens
  misc_feature (64)..(64): n is a, c, g, or t
  misc_feature (378)..(386): n is a, c, g, or t
  misc_feature (446)..(476): n is a, c, g, or t
ggtgaaccaggctattaatcagtttattaatctattttttatatatagacttttcagtagacancagcataaaacatattcttttcaagttcaaattgaactttcaccaacatagaccatattctgggccataaaataaacaatggcaaatttaaaataattgaaatcatattaagtttgttctctgaccctgatagaggtaagccagaaatcaagaacagaaagatatctagaaaaatcccaaataatttggaagtaaaagaacacaattttaaataaaccatgggccaaaggaaaagtcacagaggaaactcttagaactgaactaaaataggtgaattttactgtattaaattatacctcaaaaaatctgacttnnnnnnnnntcctctctgccttcctgaatactatgtctagcattcaatcaaaaccctccaagtgtgccnnnnnnnnnnnnnnnnnnnnnnnnnnnnnnnagaagataagatctacaggccactgaggtgtttaaaatgtctttaaaaatgactctgactggtgtgttgaagaaaatggaagatggtgaaaaaaataggtgaaaaagtggagaagtggagccaagcattggagtctacactggctattctataactgaaattaataactcaatcaatggttttctatttataagcaaattagatacagtgaaaagcattattagtgaactggaatataggtcagcagaaaacctcgagccgaatt

SEQ ID NO: 179743 - DNA, 746 bp, Homo Sapiens
  misc_feature (326)..(355): n is a, c, g, or t
  misc_feature (642)..(642): n is a, c, g, or t
  misc_feature (669)..(669): n is a, c, g, or t
  misc_feature (673)..(673): n is a, c, g, or t
  misc_feature (675)..(675): n is a, c, g, or t
tgaagacagttgaaccttagaagattgagctaagattcttgttttggcaacctgcaagtaatgtttcatttttctattacgtgatctctttgcccatacagttggcagatgttttttccccctttttctaccttaaacttttttgtttggagtacagtctaaaccaacatcagttagccttgattttctttcttttttggacaattgtctggttcattgacaaaagtaacaagtttggaactaagagatatgttacaagctgcacttaacaccacctgaaaacccaagaatcatctgaaggttttgtcagtagtaaggtaggtttnnnnnnnnnnnnnnnnnnnnnnnnnnnnnnaagatggaatagggtgaaggtgaagaaacagcttgacttgtgcctgttttcagataaaggagtaaagtgatctacaaactgtaactatcttgaaagagaaattgatcatcagatggtcgagtactcttggaatgtctctttgctgtttactgtggcctctttacaatggtgagacttatttctaccctctactttccactattatttttttcccctattggataatactagtctgagcagccctaatactagatgtacctaaacagagatacaagccaagtcattgntcagtgtagtcatttcctagtatctgnttanantttgtcacacatcagaatgtatattttatagagcatgtgtttgtctacttgtttgtctactataatatgtc

SEQ ID NO: 179744 - DNA, 412 bp, Homo Sapiens
  misc_feature (397)..(397): n is a, c, g, or t
ctcatctccaggaaccagctctctgtgggccacacatgatgtttgacgaagatcgttgcgagtgtgtctgtaaaacaccatgtcccaaagatctaatccagcaccccaaaaactgcagttgctttgagtgcaaagaaagtctggagacctgctgccagaagcacaagctatttcacccagacacctgcagctgtgaggacagatgcccctttcataccagaccatgtgcaagtggcaaaacagcatgtgcaaagcattgccgctttccaaaggagaaaagggctgcccaggggccccacagccgaaagaatccttgattcagcgttccaagttccccatccctgttcatttttaacagcatgctgctttgccaagtttgctgtcactgttttttttnccagggtgtttaaaa

SEQ ID NO: 179745 - DNA, 615 bp, Homo Sapiens
cacccccatcacccctgcctcctcctcctttccactgctttaaccaaaccttaatgaggtaaggccaggctaggtcagggctcaaaggaaaatgggctcaggaaaacttagtttgcccagccttgtcagctgagattggttttgctttccagccagaagtagaaacttgatgctttttcctttttgcagtgttaaaaaccatatctccagttttattatgttccatcacagttttggggcaaagcccagaaagctgaacttgtttgccttcaaaaacacaaaaccaaggcactgtcttctgtgcttttcagggaggtgggaaggtaaaggagactgcccactataggggctcagttcccccaaaggccttgcacaccttctgataaaccccctggctgaggcaatcctactggctgtgcagacaaagatgtgacagcagcactagatgctgacccaacaagcagtgctgggcctgggcggtggggcatgttcagcactgcgggcagcagtcagcacatgcaagacattcagtgagcagagggctgccctcggcctccaactgcagccgccctggcgcgtgaaatgaaattggtgggccttcctaggattgtaaaa

SEQ ID NO: 179746 - DNA, 477 bp, Homo Sapiens
  misc_feature (89)..(115): n is a, c, g, or t
atgctgaatctcatcagtaatcaggaaaatgcaggttaaaacaataccatttttcacccatcagcttagcaaaaatgagtatatttttnnnnnnnnnnnnnnnnnnnnnnnnnnntgtgaggttcttgtagtaagaatgcaaatggcactctttgtagagtaagtctgttgacatctcataaaactgaaaatgcacacaaccctgtaaatctagcaactgcactcagttgatttcagcccatacatacaaagagacctgcataagaatgttactaggctttgtaaaagcaaaaaataaggaacaacttaaacatcatcagaaggggaactgataaactctggtgtaatccataccacagaaatacaacaccgcatgtacaggaatgtgctacatctatacaaataaatggtcaaactcaaaacaaagatgactttaaaaagaatgacaaaatgtttagcataccattcctgaaaatt

SEQ ID NO: 179747 - DNA, 706 bp, Homo Sapiens
  misc_feature (518)..(531): n is a, c, g, or t
  misc_feature (692)..(692): n is a, c, g, or t
agaaaaaaaaggagaggggactgatctaattctgtcagaagtagagaaaggcttaacaagataagtgatatgtattaaattgtaggaaatgttagataaacagctttctttagtattttttgagttagaaagcaagtttttagcttggggtcagaatatttttagagaaaaagtttaaaatgtgcctaaatctgaaattctggatttaaaaaagtgaaaatctgcatgttcctctaatacctaatgacgaattctaattgcagaaggatgccaataactaaaaccacaaaatgaaccctatgtataccggtgaccttctttactcagaattaattaacacaagcacttgtttcttgcagagcactttgctgtaatttagaacaaattaagggaaaaaatcattcaagtgctgttttcttcacaccatgaagtaagcatgatggaccaaagttaactaatttaaaatattatcatccatttcttgtaattatgaatatcaataccatcttttttcttcnnnnnnnnnnnnnngacatcatgatctatgctattttcaacttgtttcctgtgcttctattaatggaaattgatttttcaagattaatgtaaaatgtgtttctgtttctcccattaagtctcttatttatattagatccaatgtatatgttcctggatatttttcaaataaatanattattaatataaa

SEQ ID NO: 179748 - DNA, 422 bp, Homo Sapiens
ggagtaggatgtggtgtctagctttcagcagtagcacctgtttggtcctcatcaaagtggtttagaggagggacttttggctgcggagcctccctttgttcttgtctgtattctgagacatcctgataattctgtgggttaccccaaactcttaacaaagttttttctctttaagtcagagagagtccatttctgcccttatgaacagaaactccaacccaaaccatcttactgaaagtagttcttccttttactcaattcctttatgggatgaatctccactgacaattattttaccaatttgaaacttgttcatgatctttcttcgcttccagaatgcaagctacttgagggacctcgtctggctgttcgttcaccatggcctttccctgccaggctcctaggagctgcttggcggcggg

SEQ ID NO: 179749 - DNA, 745 bp, Homo Sapiens
  misc_feature (343)..(343): n is a, c, g, or t
atcattgtaggcagcaccctggggggcctcctactgctggccctgctggtcctggcactgtggaagctcggcttctttagaagtgccaggcgcaggagggagcctggtctggaccccacccccaaagtgctggagtgaggctccagaggagactttgagttgatgggggccaggacaccagtccaggtagtgttgagacccaggcctgtggccccaccgagctggagcggagaggaagccagctggctttgcacttgacctcatctcccgagcaatggcgcctgcttccctccagaatggaactcaagctggttttaagtggaactgccctactgggagactngggacaccttttaacacagacccctagggattttaaagggacacccctacacacacccaggcccacgccaaggcctccctcaggctctgtggagggcatttgctgccccagctactaaggtgctaggaattcgtaatcatccccatcctccagagaaacccagggaggaagactgtaaatacgaacccaatctgcacactccaggcctctagttccagaaggatccaagacaaaacagatctgaattctgcccttttctctcacccatcccacccctccattggctcccaagtcacacccactcccttccccatagataggcccctggggctcctgaagaatgaacccaagagcaagggcttgatggtgacagctgcaagccagggatgaagaaagactctg

SEQ ID NO: 179750 - DNA, 341 bp, Homo Sapiens
atgagccactgtgcccggacaaaaaaataataatttttaataaggtagcactggttatcaggtttagagagaggaaaactgtaacttgaagacaagggaaccagctcaaggacacagaacaagcctgtggaatgataagatatggatttcttgaatgaactaaaaaactcagactgataagatgctgtgattgaatatcaataaaagatctgtgccctattgttcacgatagcacaaagcatctgctaagagagcattagaatctttccgaagtaaggcaaaacttaatcagtgacattaccagcacgctgtatgcccttccaaaaatacctgtgccgaat

SEQ ID NO: 179751 - DNA, 503 bp, Homo Sapiens
  misc_feature (85)..(85): n is a, c, g, or t
  misc_feature (486)..(486): n is a, c, g, or t
cagagactggcccagatgaggcattcttcaaatgtttgttgaaatgaatggacaaactcttaggataaatcctaatttgttggcnaactgttatttgattttagaaggccaaactgattttattttagagaggggaaggggaggggaggctcattagcctcttggtagaaagaggactatttctgcaaatgaataggtttccaccttaagtagtgacagtccttaacttcttattatggagtgagtcttgaccgctttccaagttcaatagaagttcaagattgcctctcagtgattagggaaattgaagcttttaaagctcctggtctcagtaattcctcagaataaacctctttaaaagggatattgatggaaatgtacaattaccagtaattgaggttttatctgaggggatggagatgatgaaatggttccttcttggaagttgttggcattttggctttatttttcacaaataaagtgaanaaatattaaaacgaaaa

SEQ ID NO: 179752 - DNA, 632 bp, Homo Sapiens
  misc_feature (42)..(42): n is a, c, g, or t
  misc_feature (72)..(159): n is a, c, g, or t
caagtagctgggattacaggtgccactgtcaccacgcctggntaattttttgtatttttagtagagacatgnnnnnnnnnnnnnnnnnnnnnnnnnnnnnnnnnnnnnnnnnnnnnnnnnnnnnnnnnnnnnnnnnnnnnnnnnnnnnnnnnnnnnnnngtgtgagccacagcgtccagccccagagttttacttcttaaaaataatttattgtaccacaagtagctattggtagagatgaaagctaaagcagaatgatggaatacagttgatgaaactttaagaagcaatgtagcatgtaatcctcatagcttactgtcaggatgaagcctttatgtttacatccaagaactgagttcactgatgtcaacacctaagggaatgttctttgaaccacacagcagagacaattgtcatcaccttggttacagctgtatctcagattgtctttctataatacaggtatatctcctgtaagttaccagcatatggaactgggatgaatttttaaactgtctatcatgcagacagatcagtttagctaacaactctcttgcctttctttaatggtatgtgttgtaagttttttgctttccaaaactttcttctcttctgcctttgaaaaccctgtg

SEQ ID NO: 179753 - DNA, 216 bp, Homo Sapiens
cttcagtaagtacgtgttatttttttcaataaaattctattacagtatgtcatgtttgctgtagtgctcatatttattgttgtttttgttttagtactcacttgtttcataatatcaagattactaaaaatgggggaaaggacttctaatctttttttcataatatctttgacacatccaacagaagaaataaatttcttactttatttttaaaaa

SEQ ID NO: 179754 - DNA, 421 bp, Homo Sapiens
ccttcatttaaaatgctaagatgcaatatcattcacttcaaagtggggaaaatgcagaattgtgtttcctttttatctgtgtgattccttaagaaacatgtttttaaaatatgtgttctaaatggttttttattctgtattactgctttggccatgtggctctcatgactttcattgtaccagattctcagctccctgaaacatggggacgagaagctctggaattacagcaagatttttgttccatgagcgcaatactgtatcattaacatttttaagggtatggattttatagcatctgtgtatgtttgcaaatattaagttattacatgttttaaaatgaggcgtttttcatcttaaattttatatgtttggcaaatatatttttttaataaaatttcaaacccaagttttagcccct

SEQ ID NO: 179755 - DNA, 318 bp, Homo Sapiens
gccctcacccttggagtcttgggctctgttgatcactgactctgccaggtctttcagcaggcaagacagctcagttaaattgagtttggactccactgtagtgcatgcatgagacagcacccccaatccccaacacccacacacaaactttaaatatttgtaacagaattgttaccattaatattgcttaaaggctaacacattagccagaacctagatgtcttctggaaattttttattgcaatgttacttcatctacataaagttgtccaatcactgaaacctccaactgaaataaatggtaaaaattttgttctc

SEQ ID NO: 179756 - DNA, 493 bp, Homo Sapiens
ccaataaataaaataattgttcatatattaatgttcacatgtgaactacatatctaaaatcttggagaaaaatcaaggcaagaatttccagaactgtcctcaaatagctcatttatttaagttttgttaaaaagcaaaagcgaattgattacatttgattaacttttcctattccatgcacaagttaccttaaaacatgataaaaaccttatgggcattacctatcacacagtacttatgcataaacttataatagtaaaattactaatgtttgataaaataagatggaggcattacaaatagtctacagtttgtattttaaggaattggacatgaagaattctagatcattttgtgtctataaacccgactttctatcttgccttgggcaaactttctgtgcctcaatgtactctttaaatatgtgaaggatgctctttttgattaagtgttttgcactcctgaataaagggcatagtataagaacaaaaaa

SEQ ID NO: 179757 - DNA, 575 bp, Homo Sapiens
tttcctcatcttccccccctctgcttgggccgggggctcattgacatggtgcggaaccaggccatggctgatgcctttgagcgcttgggagacaggcagttccagtcacccctgcgctgggaggtggtcggcaagaacctcttggccatggtgatacaggggcccctcttccttctcttcacactactgctgcagcaccgaagccaactcctgccacagcccagggtgaggtctctgccactcctgggagaggaggacgaggatgtagcccgtgaacgggagcgggtggtccaaggagccacccagggggatgtgttggtgctgaggaacttgaccaaggtataccgtgggcagaggatgccagctgttgaccgcttgtgcctggggattccccctggtgaggtgagtccaggggtggaggccaggtgcagggacagtgagtggctgccctactgcatgccctgcccatcatcctttactgaacacctactgtgtatccaccaccttttattgggcacctactgtatgccaatatttgtgctcctatttttattttattaaattattatttattt

SEQ ID NO: 179758 - DNA, 584 bp, Homo Sapiens
ggggattcatgggattcaggaaaccagagttgcagccagtgaaacagcaatcaaaatgacctgagcacacaagctaggcagagcctgctgccctcagtccaactggaacgagttccagtccaactggaatgagaggatttcggggaggaaagtggaaattctatattacttattcattgactgcatcagacaatatattaatccatatgtgttttgaaaatctagaagtgttttacagatttggagaaaattagcaattggtcctgtagaaaataatcaaatttaaaagaccttaattaactgcaagaaaaagtcgagtagaaagtataatcataatacactactttgctcaacagtcatgaatatttacataatgataacgttgaatacctctaaaatatgatatttatactctaggtttggagagaatagaactatttaagttagcataaatacttatacatgaaagtaaaaaggtaatatatagtatctaaaatttagaagtcaaaaattacaataagagtatgttatctgaaaatatggagttaaattacagaagagatagctgaaagaattgaaaatgt

SEQ ID NO: 179759 - DNA, 551 bp, Homo Sapiens
  misc_feature (27)..(27): n is a, c, g, or t
  misc_feature (82)..(82): n is a, c, g, or t
tcgcaccatgtcaatgagcccccggcncaagcagaagtgggggaagataaggaagacctgtttcaagatcgggctcacctcntgcagcttctgatcagagaagagctcaagcacaaaggtggccatgcttccattgatgccaataaagaggtttatgcaggtgagcaccacataggctgtgctgggcacggagaagaagaaggaggctgggtacatgagcggtgtgatcgaccagccatacagtagtagcaacagcaggagagcaggcaggttggcaggggccacatatgccctctgctggaaggccagaaagatgagcaccacgatgcatgctggcaccaagtagttacacatgtcccagagaaagttgccaagccagtagagggtggggacaggccccccatgagctgcaggtgcttggctcgggtgactcgctcctcaatgaggacaagagtgaagctggccgggacaaaggacatggcaaagaccacacagatggagacgaggacgtccaccgaggaggccatcagtgcagcctcagacagctgctc

SEQ ID NO: 179760 - DNA, 667 bp, Homo Sapiens
  misc_feature (530)..(530): n is a, c, g, or t
  misc_feature (571)..(571): n is a, c, g, or t
cagggtctctcgcctgggcaggtcatcatagtacggggactggtcttgcaagagccgaagcattttactgtgagcctgagggaccaggctgcccatgctcctgtgacactcagggcctccttcgcagacagaactctggcctggatctcccgctgggggcagaagaaactgatctcagcccccttcctcttttacccccagagattctttgaggtgctgctcctgttccaggagggagggctgaagctggcgctcaatgggcaggggctggggcccaccagcatgaaccagcaggcccctggagcagctgcgggagctccggattcagtggaagtgtccagctctactgtgtccactcctgaggatggttcccagggaaataccgccagaaaacaagaaggtcagcccactcccagggccccactctcctcccctcattaaaccatccacctgacaccagcacatcaggcctggttcacctctggggtcacgagactgagtctacaggagctttgggcctgagggaaggnacaagagtgcaaaggttcctcgaactctgcaccttcctccnccaggagcctgggatatggctccatctgccttcagggcctggactgcactcacagaggcaagtgttgtagactaacaaagatactccaaaataaaa

SEQ ID NO: 179761 - DNA, 511 bp, Homo Sapiens
agccctgcgaagagcttggggaatgacatcacctctctcctcagaaggatggagcacagggtcactcttcgacctggtcctcaagggtgggagggctctccggcttctgataggacgcaccagggttgaactgggagttgaggtggatgcattttcttcggcaaggtatgttaggaatgtccccatcttgagtcacttgtgtgcagcccagatccaatgggatcacagcagcttctgatccttctgacatttggaatgaagatccctgctcctggtccatctggctcaccacagcttcatatggcggcgggggatccagaggacagaacacttccacacctttgattcgagctccgtagatgtgtggcaggggaataacatcaggaccaaccatcctgcggttcatccggggtgtgcacgagtaaaacgtggcaaaataggaagggggaggcacaggcggcacaaaatcatcagggtcggggatgcgtccatgatcctccgcttcttcagc

SEQ ID NO: 179762 - DNA, 511 bp, Homo Sapiens
ttagaatacacggttcaaccagaattcaaccaggcagataacctgcctgttgctcaagcaatcatcagagttttaaaaaacaaaattaagcaaaaaagacctttccccaaatagcatcattaccacttagctttgtacgacccattcctaggaaagccacattccacttcagagaacatgaccgcttaaggtacagttaaaacaaagtccttgccctttaggtgccttactttttgttttaaattagcctctgaaatgcttttcttgtgtcttctgctgcattcctgaaaactataacttttaaggacacagccctcacttttatagaggaggaagaaaacagcaaagaggtgtctcattagggaggcagaaggttatgaccaatgctggaggtcttcctcttccttacttgttattcaacaagatgggttctatggtgtcgcatgaggtgtgagttggaaatgaaagctgcaccacacttctcacattcatagggcttctccccagtgtg

SEQ ID NO: 179763 - DNA, 672 bp, Homo Sapiens
  misc_feature (353)..(458): n is a, c, g, or t
  misc_feature (508)..(570): n is a, c, g, or t
  misc_feature (589)..(589): n is a, c, g, or t
  misc_feature (621)..(621): n is a, c, g, or t
cgctttcacagttaccctaaactctctggggcagggttattcctttgtggaaccagaggcacagagagagtcaactgaggccaaaagaggcctgagagaaactgaggtcaagatttcaggattaatggtcctgtgatgctttgaagtacaattgtggatttgtccaattctctttagttctgtcagcttttgcttcatatattttagcgctctattattagatatatacatgtttagtattatgtcttattggtgcatttactctcttatcattatgtaatgtccttctttatctgtgataattttctgtgttctgaagtctactttgtctaaaaataacatacgcactcaannnnnnnnnnnnnnnnnnnnnnnnnnnnnnnnnnnnnnnnnnnnnnnnnnnnnnnnnnnnnnnnnnnnnnnnnnnnnnnnnnnnnnnnnnnnnnnnnnnnnnnnnnttttttgacagactctcgttctgtgggcccgggctgggagttcagtgggnnnnnnnnnnnnnnnnnnnnnnnnnnnnnnnnnnnnnnnnnnnnnnnnnnnnnnnnnnnnnnnaggtggggaactacagggntcatggccactgcggcccagctaattttgtanttttcgtaggagacgggggtttcaacacattcgtcagggttggggttcaaa

SEQ ID NO: 179764 - DNA, 291 bp, Homo Sapiens
ggtggaaaggaagacatttatttgcagggcactaagcaaggaggatcaggccactaacgctcaaatccagagctccgtgatggcttgcaggtaagggcttttaaaggtaggagtaaatttcaggaaagcagaagttacaggctaattcataaatcattacacagaggttacccattggttttggcctaaaagggtgggatatcttgaagtgagggcttacaggccataagtaggttcaaaggtcttttggtttgcagttggttaagcaagagaagctttgtttaaaatttt

SEQ ID NO: 179765 - DNA, 436 bp, Homo Sapiens
aatcaggtgcagcagccaaggagacaagagatcagtctcaattccatctccctgaccaactaaaattaggtgtttgtatagcagggaagaagtgaaaccatgtgtgggaaaacaggaattagggagggataaaggaagaggagttggtcaacaggaagcagttggtttgtcagccaatcaagaagggtgagggatctggcttctcactgtccggatgtggtgatttggtgattttcagatcccggatactttctgggaggcctgatggtttgtttcctgagaaaggaattcagataagacaaatgtaactttctcaagttttaagactggaaggatcaatttctatgtttattcaaagagatcagaaacatcagctctgtgggacaattgggttggtttcatagtcacatggtctgtatatttcccagtggtattc

SEQ ID NO: 179766 - DNA, 566 bp, Homo Sapiens
  misc_feature (425)..(433): n is a, c, g, or t
tgagacggagtctcgctctgctgcactccagcctgggtgacagcagaactctgtctcaaaaaaaagatgtggaattcttttctgcaaatgttctctaatagtataccttcttcagtctgtcgatatatgtatgctattattttaccaagtaatacatgttggattggtattgggaaattatagaaaagattatattggattgtttagaaaatatttttaaatgtgaagaaaaatataaaaattactcccttgttccactttccccactctcaagtcagactatgttgttttcatagttagtagctagcagtctaccccactagattatatgcttcacagagggaagggaccctcaagacttcactggattgagtagcacccaataccttgcttgctgcctggtttgtgatgggcatactgtaagnnnnnnnnntctgaatgacaaaatgtttttccataataccagacttcctcttgaagagatgggtcgtaatgttgtagtcttacatgcttacgtagacaatcaaagcaagaatactcaataaatggctatttaccaaatgaaa

SEQ ID NO: 179767 - DNA, 440 bp, Homo Sapiens
  misc_feature (55)..(68): n is a, c, g, or t
gccccaggagttcaaagcccacccctgggcaaccgtggtgagacccctgcctttnnnnnnnnnnnnnngtttaacctgaatctaatcaggcttttataacaaatgtccaatttatgggaaacaaaggaacaagtgaaaagatacataatgcccttatatatcttatataaaaaacaacctatgggaaaaatagtctccttaacaagacttctatcatgagacagaggggaatatactaagaatacgtccaaagccccacatgctatgctaagcctagagattacaaagatgaataagtcagttcctgtcctcaagtaacctactgagaaatctattcaatacttgaatattataaaactaaacttttcagacttcctctttctgtaaaggacacaaaaatagcagcaaaaagataataataaagtattgctagtcccctt

SEQ ID NO: 179768 - DNA, 444 bp, Homo Sapiens
  misc_feature (357)..(357): n is a, c, g, or t
  misc_feature (374)..(374): n is a, c, g, or t
  misc_feature (405)..(405): n is a, c, g, or t
  misc_feature (410)..(410): n is a, c, g, or t
  misc_feature (420)..(420): n is a, c, g, or t
ccaaggtgctaggattacaggcatgagcactgcgcccagccagtccacacaactttttaaaaaaatttcctgacagcagtaacttcatggtccatacagcttaagaagtgtttatgctttaacaactttgtagctgtttgaaaaaataatacacaaacattgaaagagagcatgtctttatttcattctaactatacttactaatggaatatgtgcctgttggaatttgcacaacttctcaaaatttggtatcagaatgggacacctacacactcatttcctgttacgtattggttttcttatgggtatttgcttttgtcataggcaactatttaaaccccagcttttgtgaaaatnatgatgttgatgctatncaaaaggattgttaggggggaactaatgttngaagnagtgtgacantttttgagttgagtagtgcacaca

SEQ ID NO: 179769 - DNA, 479 bp, Homo Sapiens
  misc_feature (387)..(387): n is a, c, g, or t
  misc_feature (452)..(452): n is a, c, g, or t
ggttactttggctaaaaggaggtgagcggcactctgcccttccagagcaagcatggagcaacaggatcagagcatgaaggaagggaggctgacgcttgtgcttgccctggcaaccctgatagctgcctttgggtcatccttccagtatgggtacaacgtggctgctgtcaactccccagcactgctcatgcaacaattttacaatgagacttactatggtaggaccggtgaattcatggaagacttccccttgacgttgctgtggtctgtaaccgtgtccatgtttccatttgggagggtttatcggatccctcctgggtcggccccttgggtgaataaattttgggcagaaaagggggccttgctgtttcaacaacatatttttcnaatccgtgcctgcgatcttaaatggggatgcagcagaattcggccacatcattttgaagcttatncattaatttcccagacttttggtgggg

SEQ ID NO: 179770 - DNA, 448 bp, Homo Sapiens
taattgcaaatatatttattacaatttacagattagttatgttatatacacaaataataatttaaactataaaacccccaactagttacatttaaattattggatctgtagaagccaatttagagtcttctagtcccctaactttaccttccttaaattatacaaaaataaaatctgatagttttgatttcaagttaaagatgaagaagtgttacatttcatcactcagaaatggaacttttacctgtctgtacaaagccttttacatgctacattgacacttaaagcaccattaacaagactttaaatgtataaaatgtttaattaaaacctccaaagattttctctttaagattacgggggtttaactttgttctaactagaattgggatgaaacaagaattttgcttttttctccttcagtccaactttaaaatagtcctttctg

SEQ ID NO: 179771 - DNA, 149 bp, Homo Sapiens
  misc_feature (1)..(1): n is a, c, g, or t
  misc_feature (50)..(50): n is a, c, g, or t
  misc_feature (97)..(97): n is a, c, g, or t
  misc_feature (135)..(135): n is a, c, g, or t
naatagttggggcaccaagtttaagatttattaattttctcctctcagtntagggcagcaattcaccattttcttttcagttcctaaaaataaaaancaacaataataatatgtatatggcatattttaaaaagntggggaacttttaa

SEQ ID NO: 179772 - DNA, 233 bp, Homo Sapiens
ttttggtgtttcaaagataattttaataacttttcttatgaatcagttccaaatatattagagaccaaccatcatgttcttaaaactttgtaacttgcagtcaaatatatggattctatatagtacaaacatttccctacatcaatcaccttcagttggaaagtgcctctccttaaaaagagatcaaaactcaccttccagggtaggtgattactgcgtaagtttcatggagg

SEQ ID NO: 179773 - DNA, 391 bp, Homo Sapiens
ccattataaatattaattttattttaaaagaattggaagatgttacatatattacatactacatataatggcacatgtcagccttttaagcttaaaaataatcttttcccaaactgggattgatttatacccaagtataaaatgacccttggcctatagcaccaacccaggcccagaggaaaagccagttttgaacctgtctgtcctctggcactgggcttcctggatatgacactgagggtcctctccctctggttttattcccgggcagtattgaggcctgggcacagggacccatcttactgtatgctgcaggcctgggggaaatcagggaatctagagggggtaggggtcctctaaccattttataatgaaaaaaagttaaatatgt

SEQ ID NO: 179774 - DNA, 382 bp, Homo Sapiens
  misc_feature (73)..(73): n is a, c, g, or t
  misc_feature (120)..(120): n is a, c, g, or t
atgccaaaagccttaaaccctgtggggcccttacctttcctttaagcccaataatataaaaataaatatgtanccttaaaaatcctataataaaacattagaaattaaagatatgtgccnttttattttgcagatgagttcatttgcttctgtagatgtgttttcagagctaggtacagaggaatgtttgctacctttagcggtgaaaaaagaaagagagtcaagaattttgttggattgtgtttgtgtgtgcatatatttgatatcatcatcatatttgtaatctttggacttgtaatcatagcctgtttattctactgtgccattaaatatactttaccttatacataacgaataaaatacctagatgaagatttattta

SEQ ID NO: 179775 - DNA, 358 bp, Homo Sapiens
  misc_feature (12)..(12): n is a, c, g, or t
  misc_feature (26)..(26): n is a, c, g, or t
  misc_feature (37)..(37): n is a, c, g, or t
  misc_feature (50)..(50): n is a, c, g, or t
  misc_feature (70)..(70): n is a, c, g, or t
  misc_feature (77)..(77): n is a, c, g, or t
  misc_feature (90)..(90): n is a, c, g, or t
  misc_feature (111)..(111): n is a, c, g, or t
  misc_feature (144)..(144): n is a, c, g, or t
cctgggcccagnattccggaagtctncaggcttgggntgaatcatctgancctggccatctggatataanaccctgnaccttaacagtgntctgaggatcctgcacatgcnccagggttgcatcaacatcccagggcaacaacnaacccagaggtaaaccgcaaagggttgtctgaactcgcccgctggctcgatgatggtggctgaggctttgtggatctgctctggaagcgggagatgcagaaaggcactctgtcgcagcatggtctgtagaattttgaccacttctgcaggtttggatgtcatgagtcggggcataaggtcaaggagtttgtccacaaagctgtcctgcaagtgg

SEQ ID NO: 179776 - DNA, 178 bp, Homo Sapiens
gaagtcacattgaacatcccgaatgataccctttcatctctttgtgccatggagctgtgccatttgaacactcactccccttttttttcctttggagcagagaaccttctgcattcaagtctctcagttctttattatgatcagttacccatcaagagctgcttagatgtattaagcc

SEQ ID NO: 179777 - DNA, 516 bp, Homo Sapiens
  misc_feature (300)..(300): n is a, c, g, or t
  misc_feature (334)..(334): n is a, c, g, or t
  misc_feature (350)..(350): n is a, c, g, or t
  misc_feature (454)..(454): n is a, c, g, or t
cctggccccgcctccagttaccctgtactgcccactgccttacagttcagtgcgcaggccttcaccttttcatcaccagcctctctgctcagtgctctggagttcttgaccttgtcctttatcatgagatttgctgaaatcactaatgaaaataactcccaaaagcaacaaacaaaaatattagtttaactgggcactgtggtatattaaaaggcacaagggcattgtgggcttaacacttttgctggatcccaagagacgcacatgatgttaaaaagagatctgggcagcagtactaantactacatttcagtgtaattcatctttgggggtngggtttggccaggggnttttcccaatttccttgatatctgggagtttcttcaccattgttccggcatcctgcggaggtttaatattacagggcgttaagggtcagcaggcaattttgtcnaattaaggtgatggagatcagtaggctgaagtctctaagggtggggccattaattaaatacc

SEQ ID NO: 179778 - DNA, 522 bp, Homo Sapiens
  misc_feature (14)..(14): n is a, c, g, or t
  misc_feature (29)..(29): n is a, c, g, or t
  misc_feature (38)..(38): n is a, c, g, or t
  misc_feature (43)..(43): n is a, c, g, or t
  misc_feature (136)..(136): n is a, c, g, or t
  misc_feature (271)..(271): n is a, c, g, or t
aaacggggcccggnaagcccccaaaagtnactggcccnatgtnacccaacccttctcccccccttgggaaaaccctctcccggaaaaattgtggcccccttgtcctaaagggccccaaaaaagctgaaactgtggncaaaagctctcctccttccttctcccaaagaaagacctcaagcaagccctacattccccaatcccctggtatgtgccccattgggttggatgtccccccacctacttcccgttaaccccttccccattgtcaaanatgtgcccacgggtgccactgggggcacactgaacttgtagggagtgtgattttgttggaggtgcacatggtctctgaatttgacagagaacaccttccctttccttgccatgtcaccctccagaggaagtcacacctcagcgaggtggtttggcatctggggccaactccattacagctatgagctcactgctgtcagtgacgtttggtgttttctgtactgtgtttcaataaaaactccttcaaggtta

SEQ ID NO: 179779 - DNA, 448 bp, Homo Sapiens
gtcacccaaccttctcccccctttggaaaccctctcccgcaaaactgtggccccttgtcctcagggccccacaagctgaactgtggcatagctctctccttcttctcccaagaagactcagcagccctacattccccattccctggtatgtgcccattgggttggatgtccccactacttccgttaacccttcccattgtcaagatgtgcccacgggtgccactgggggcacactgaacttgtagggagtgtgattttgttggaggtgcacatggtctctgaatttgacagagaacaccttccctttccttgccatgtcaccctccagaggaagtcacacctcagcgaggtggtttggcatctggggccaactccattacagctatgagctcactgctgtcagtgacgtttggtgttttctgtaactgtgtttcaataaaaatttcac

SEQ ID NO: 179780 - DNA, 428 bp, Homo Sapiens
  misc_feature (189)..(189): n is a, c, g, or t
  misc_feature (256)..(257): n is a, c, g, or t
  misc_feature (339)..(339): n is a, c, g, or t
  misc_feature (390)..(390): n is a, c, g, or t
  misc_feature (403)..(403): n is a, c, g, or t
  misc_feature (417)..(417): n is a, c, g, or t
gtttacttagaaattgcaaacatttagcaaaggtaagacaaatactattttccatattctacagaaatacaatactttatagctggcttggtacatggtcacataagaacaaatctaatggaaaaagaatatttcattctacttttctgccacttatcacagtgtaataagtgccagtaagtcctgganagacagttgcagaggaagattagaatcccagggctgtttgttaatatacatgattatattgtaaganntaatataaaaacaaaatagggtaaggatatacaattaacatggcaatttaaggctatattattttgaagaaacaggacagantttagtgaacgcaacttaaaaatttgttaatgtagtataatcagcatatcntgggtattttacntgggtatgggattnttcccccctaa

SEQ ID NO: 179781 - DNA, 450 bp, Homo Sapiens
  misc_feature (20)..(20): n is a, c, g, or t
ccctccccaaatgcccctgncttgtcggaaacaaaatttcaatcaacccctagggaaaaaaaaggcccctccctgggaacctcccttaccctggagtaaccggacacccttaaacggaggtgccctgagggtggggtgggatttgcagggtcattatcagaacatgaggataacttccttgcccctgctctgtagccacctccttggcaccggcctctatttgtcataaggcggcgtgggcgagcctgacacaggccagccttggcacgaggggggccaggggttctgagaagcgctgccctgtgagaaccatgctggccttcgtctccatctctggttgacgggctgtccgtgtgcctcctgtgtgtctgcagacaagtcttgctgtgctttatttgtgaaactttaatgaggaaaaaacaaataataaatgttctcgttttgaaactc

SEQ ID NO: 179782 - DNA, 365 bp, Homo Sapiens
  misc_feature (43)..(43): n is a, c, g, or t
ttccccaacgtgggttgaagggaggagggaaagatccgagttncctcaaccacgggcccgggatgtgaccaccctcttcaaaggttggacccccaggcttcaagcaccgagtgaggggtctgttggggacgctgggagagtctctggtgtgaagtggcttaggtctggactggtcagctgtggcaccagccggtcctgcccacgcttcaggatggccgggggctgaccctgtgggagagttgccaagactcggcgataccaaggatggaaccagaggctgtggcgagggagagccaagcatattcccagcaccagggccactgctggcacgtcgtagacatccaataaatatttttggaaggaga

SEQ ID NO: 179783 - DNA, 590 bp, Homo Sapiens
  misc_feature (70)..(70): n is a, c, g, or t
  misc_feature (408)..(408): n is a, c, g, or t
  misc_feature (437)..(437): n is a, c, g, or t
  misc_feature (441)..(441): n is a, c, g, or t
  misc_feature (468)..(468): n is a, c, g, or t
  misc_feature (471)..(471): n is a, c, g, or t
  misc_feature (476)..(476): n is a, c, g, or t
  misc_feature (487)..(487): n is a, c, g, or t
  misc_feature (525)..(525): n is a, c, g, or t
  misc_feature (539)..(539): n is a, c, g, or t
  misc_feature (550)..(550): n is a, c, g, or t
  misc_feature (561)..(561): n is a, c, g, or t
ccctgcgtgcagccccaaggaggaggccgccgctagtggaactggacctcagccggacccgtggtggtgncgggggcatgtttgcggggtgtgtgtggggagtgggggtggccaggattgctggctcttagaaccccttagagcgggaccggtggattccttaaggctctgaagggctgagaacagttctagaagcgtcccaaagggtgctgggaaaggtcccagcgtgggttgagggaggagggaagatccgagttcctcaccgcgggccgggatgtgaccaccctcttcagaggttggaccccaggcttcaagcaccgagtgaggggtctgtttggggacgctgggagagtctctggtgtgaagtggccttaggtctggactggtcagctgtggcaccagccggtncctgcccacgcttcaggatggccgggggnctgncccctgtgggagagttgaccaagactnggngatanccaaggatggnaagccagaggctgtggcgagggagagccaaacatattncccagcaccagggnccactgctggncactgcgtagnacatgccaataaatatttttggcaaggga

SEQ ID NO: 179784 - DNA, 425 bp, Homo Sapiens
  misc_feature (14)..(14): n is a, c, g, or t
acccctttgacttnacaaagtgtcattttccagaatggtcgatgtagggggcccaaaggtcagagagaagaaaatggatacactgctttgaaaatgtcacctctatcatgtttctagtagcgcttagtgaatatgatcaagttctcgtggagtcagacaatgagaaccgaatggaggaaagcaaggctctctttagaacaattatcacatacccctggttccagaactcctcggttattctgttcttaaacaagaaagatcttctagaggagaaaatcatgtattcccatctagtcgactacttcccagaatatgatggaccccagagagatgcccaggcagcccgagaattcattctgaagatgttcgtggacctgaacccagacagtgacaaaattatctactcccaccctcgttccgaatga

SEQ ID NO: 179785 - DNA, 670 bp, Homo Sapiens
  misc_feature (12)..(12): n is a, c, g, or t
  misc_feature (32)..(32): n is a, c, g, or t
  misc_feature (42)..(42): n is a, c, g, or t
  misc_feature (64)..(64): n is a, c, g, or t
  misc_feature (466)..(484): n is a, c, g, or t
  misc_feature (518)..(518): n is a, c, g, or t
  misc_feature (547)..(547): n is a, c, g, or t
gtggaatggagntcccccaggggcagaccccnatgcccctcngcaacgtgcctgaacacgactncctccggctcccaacaaccacacccagaaaccctcccgtagaaacatttaagtaatgaagtcctcaacattacagtaaaaaggtgcaaagggtctcttttacaaatatttatgtacagccaagatcttgttgagttcagtaacagccatctgcgcgtacacatacgcagtgtgcacacggattcagggaactgagcggcacactgaagacgagatcacacgtgtgcacacggattcggggaactgagtggcacgctggaagacgagatcacacatgatgctattttacttttgatcccatgtgctttcctgggcatgatattttagatggaactttttctggtctgtgatctttggtagaaaaaaggtctctaggattattataaaaatgttgcatctattnnnnnnnnnnnnnnnnnnngacagcttgcctcagctggcccaacccctgtcgnaaacacctgatcgcagggtggtcccctcnacctgggtaggccctgtccaccttctgtgatgggagagagcccacagtggttacccgaaccacccttctcagcctcgctggaggccccggggctccaggctccctgtcatgtgctcagcccag

SEQ ID NO: 179786 - DNA, 458 bp, Homo Sapiens
  misc_feature (60)..(60): n is a, c, g, or t
  misc_feature (71)..(71): n is a, c, g, or t
  misc_feature (87)..(87): n is a, c, g, or t
  misc_feature (104)..(104): n is a, c, g, or t
  misc_feature (165)..(165): n is a, c, g, or t
  misc_feature (357)..(357): n is a, c, g, or t
  misc_feature (435)..(435): n is a, c, g, or t
ggaaagcacatgggatcaaaagtaaaatagcatcatgtgtgatctcgtcttccagcgtgnccactcagttnccccgaatccgtgtgncacacgtgtgatctcgntcttcagtgtgtccgctcagttccctgaatccgtgtgtcacactggcgtatgtgtacgcgncagatgctgtactgaactcaacaagatcttggctgtacataaatatttgtaaaagagaccctttgcacctttttactgtaatgttgagacttcattacttaaatgttctacggaaggttctggtgtggttgttggagccggaggaggcgtgtcagcacgtgctgaggggcatggggcctgcccctggggacnccattccacaagctggggccacgggagcttccagctttttcagggacaaagccccggggtgggcgcatcctgagggtntctggggggtgtttgccaggttc

SEQ ID NO: 179787 - DNA, 424 bp, Homo Sapiens
  misc_feature (48)..(48): n is a, c, g, or t
  misc_feature (69)..(69): n is a, c, g, or t
  misc_feature (79)..(79): n is a, c, g, or t
  misc_feature (88)..(88): n is a, c, g, or t
  misc_feature (128)..(128): n is a, c, g, or t
  misc_feature (229)..(229): n is a, c, g, or t
aaaatggcaaatatatcccggtaaataagaagccccagattactgccngataaaagattaaaataggantccaattatncacctcccnttgcaaatcctacaaactaggaggaaggactaaccctttncccgggattagtaactaaatttaatgattacagcaaatataaagttcttttgtaaattattgttggttaatgattgacttgcattgacaacacactttcantctcgcccctttcattctccccctgcaagaacaaaggcaaaatgaacagtgaggaaaacctggaaacaggaccgagtgtttgctatcacttgattcctttgaaggagcaatgctttctcataatataggttttatagtatcatcaagtacatcagttaagcaaatcaagtgctttgtgttctgtatataaattac

SEQ ID NO: 179788 - DNA, 428 bp, Homo Sapiens
  misc_feature (12)..(12): n is a, c, g, or t
  misc_feature (21)..(21): n is a, c, g, or t
  misc_feature (356)..(356): n is a, c, g, or t
  misc_feature (366)..(366): n is a, c, g, or t
  misc_feature (397)..(397): n is a, c, g, or t
  misc_feature (406)..(406): n is a, c, g, or t
tttttttgtagntttaatttnaggcatttatttctcacagctctggaggctgggaagtccaagatggtggctccagcagattcagtgtctggtgaggggggcttcctggttcacagatggtagcttctagctgtgtcctcacatggcaggaggggcaaaagagctccctcgggcatcttttataagagcactaattctatgcaagagggcagagtcctcaggacctaatcgcttccctaaactgttgaccttagggatgagagttcaatatacgaatttttgggggacacaaacattcaggccacagcagtatccaaactatataaggggactcaagtcaacaacaaaggaacaantgacccggtntatggcaaaaatgctcagttttcaccaaccnttagggggnaattgcaaattcaaaacccgca

SEQ ID NO: 179789 - DNA, 452 bp, Homo Sapiens
  misc_feature (22)..(22): n is a, c, g, or t
  misc_feature (143)..(143): n is a, c, g, or t
tttgcctcaaaaaatggatgcnacccccaaagtgaaaaccctactgaatgactcaaaacccttggtgggcagcttttagccgggtctgcaaggatatgaacctcactctggagccctgaagatcatgcctgctgcccactganaaccgctatatccgcgcggtgggggtccccagctctaggcttctcacccatgaaaacgcaaacctgtgctgctgcacgaccacgatgaacggctgcatgaggctgtgttcctccgtggggtggacatatatacacgcctgctgcctgcccttgccagtgtgcctgccctgcccagtgacagctgagccctggaactcctaaaccttttgccctggggcttccatcccaaccagtgccaaggacctcctcttcccccctccaaataataaagtctatggacagggctgtagtagaagtactaacacaaaa

SEQ ID NO: 179790 - DNA, 456 bp, Homo Sapiens
  misc_feature (360)..(360): n is a, c, g, or t
  misc_feature (372)..(372): n is a, c, g, or t
  misc_feature (434)..(434): n is a, c, g, or t
  misc_feature (442)..(442): n is a, c, g, or t
atttcagttcgtgaagccaaagccattccaaggcctgatggtattgaatggagaaataaatacatctgtgtagaagaaccttttgatggaacaaatacagccagagcagtgcacgaaaagcagaaatttgatatgatcaaggatcaatttttaaagtcatggcacagattgaaaaacaagagagatttgaacagtatactacctgtaagagctgctgtcctggaaaaggataactgggcctctatttcttaattaaattcttccaaggaaataaaggaacaatagtttcatcataatacattatgtttaccttccaccataggttgcttttttccatagttcttggttttccatgttttnatttttaaaaangacatataaaggattgcctattttttatttatggaccatttccctaattaaacccccttttngattttanaaaatgtatttttt

SEQ ID NO: 179791 - DNA, 454 bp, Homo Sapiens
  misc_feature (27)..(27): n is a, c, g, or t
ctatataagggactcaagtcaacaacnaaagaacaaatgacccggtgtatgcaaaaatgctcaagtatcacccaaccgttagggaaatgcaaatcaaaaccgcaatgagagagatcacctcatacctgttaggatagctgttatttaaaaaacacaagataaagaatgttggcaacaatgtggagaaaagggaaccctagtgaactgttggtgagaatggaaattagtacagcctttatggaaaacagtatggcggttcctcaaaaaattaaaaatagaaccaccatttgatgcagcaatcccacttctgggtatacatataaaaaagagatgaaatcattatcttcaaaagatagctatactcccatgtttactgcagcatttccacaactgccaaactatgaaaacgacctaagtgtctattggtggacggattggtaagaaaatcgtggcc

SEQ ID NO: 179792 - DNA, 446 bp, Homo Sapiens
  misc_feature (426)..(426): n is a, c, g, or t
gcacccgttcacttactgtataatttaaaatcatttatgtagctgagacacttctgtatttcaatcatatcatgaacattttattttgctaaatcttgtgtcatgtgtaggctgtaatatgtgtacattgtgtttaagagaaaaatgaaacccacatgccgccattttcctgaatcaaattctgcagtggaatggagaggaaaatacttctaggcaagcagctagactggtgaattgggggaaatagaaggaactagtaactgagactcctccagcctcctccctattgggaatcccaatgggctcctgggagtagggaaaaagtttaaactacattcatgttcttgttctgtgtcacttcggcccggggtagtctaccatttactttcaccccaagtcctgctgcccatccagttggggaagccntgatttttcccaaggattcc

SEQ ID NO: 179793 - DNA, 429 bp, Homo Sapiens
  misc_feature (22)..(22): n is a, c, g, or t
  misc_feature (35)..(35): n is a, c, g, or t
  misc_feature (41)..(41): n is a, c, g, or t
  misc_feature (56)..(56): n is a, c, g, or t
  misc_feature (132)..(132): n is a, c, g, or t
  misc_feature (135)..(135): n is a, c, g, or t
ggaaaacccaaaagtgcaaagnaggcataaaagtnccacanaagcccaatgtgtgnagggatttgggccctaaagtagataaagcaaattcccactaagtcttgtaagagggttgacttgaagaaccacttnctnccagtcatatatagtagatatgataattcagcagtcataatttaggaaggcaagagtatactatacatgtcattattttcctcttaagtttgcatttatagaagaaggtggtgggggacaatttaaacttgagttctcaagttctaccttaatgaaataaaacaccattggataagtagtggagattctaatttataaaatattcaccttcatcaaatttctttcattatcaacttttcacggatacttctaaattactattctttatgcacttaaatcttaagagaaatcttg

SEQ ID NO: 179794 - DNA, 454 bp, Homo Sapiens
  misc_feature (356)..(356): n is a, c, g, or t
  misc_feature (399)..(399): n is a, c, g, or t
  misc_feature (407)..(407): n is a, c, g, or t
  misc_feature (412)..(412): n is a, c, g, or t
  misc_feature (418)..(418): n is a, c, g, or t
  misc_feature (435)..(435): n is a, c, g, or t
gaaataaggaaaataagcttatcttaagtttatttttccttggatatacctagattccatacagtgacaatacaaatacaaaggaagaacatctggatttcatccttgacctcatttacaaagcaaaaagagatactggattcagatataaatgtttaattttgcagtgtttaagtcagcaaatcttctgttttttaaaaataagccacatatctagatttttctgtgaaagctctcaattaagtgttgggaactaatttcaaggattttaaaaaatgttatggcagggcttaacgtgtctgaggagccataaatgacctaacgtttcccgttagtctctggaactagggtgatcntcaggttctcttttcaacttccagtacttccgtaaagttttcngtggaccngtagngtaccntttcttcagggtggtgntatgggtttggaggttttt

SEQ ID NO: 179795 - DNA, 442 bp, Homo Sapiens
  misc_feature (68)..(68): n is a, c, g, or t
  misc_feature (90)..(90): n is a, c, g, or t
tgatgtaaagatgtaataaaattccttttcattgtaaaatagtaattaagtcaatttacacagacccnttgtatttaatatgtctccccnatttgtatagaatttccagatggggtcctagatgagaacccctatgccataagccttggatcttgatgaaaggttacccaggatcaggatcaaaaattgggaaatactaagctcttgaagatatttttctgatataattagattgaaaagagcaattttgaaaatgctgtgttctcccagaagtaccagggtgcattatttgacatcaattacttaaagaagttatgagttgttccccaaacagattttaaaaacagcaaaataaaagcactttaagatataattttactgagtttaacttcacagaattatctttttaatgcttggagacatattgaataaactgtagtct

SEQ ID NO: 179796 - DNA, 464 bp, Homo Sapiens
  misc_feature (27)..(27): n is a, c, g, or t
  misc_feature (45)..(45): n is a, c, g, or t
  misc_feature (79)..(79): n is a, c, g, or t
aaggcggaggtcatttaaacaaatcangcaaactgtcccctatanggagtcggccaaaaatttaacaacaaagtgaaangctaatgtacttacgaagtaattttaaaaggccccactggataatgctgcactggaaatggctaaaccccaatggttaaactaaaagtcaacataaaccgctcctacgcttactgggcacccacttcatgcctacatcatgggaaagtacctcttttacagaatgcagatcactgctaacaatccacatgactaagtcttcagtttcccttgcttaacatttgttagcatatatttcagcaaagattaacagtataatgaatgttgagtagtaaaatcctatttaattcgcttcaatttaaaaatgagatatgctgctatggggaacaaatgacctcttgagatttacaaccccctttataaaagtgggaaagctgcctccctaa

SEQ ID NO: 179797 - DNA, 407 bp, Homo Sapiens
  misc_feature (30)..(30): n is a, c, g, or t
  misc_feature (52)..(52): n is a, c, g, or t
gggcctccacccccaggaccttttgggaantaccaaacccctgggtaataanctaacatcccccggttttaatacctggttacaacattttaattaaaacagttaatattggtgattagagcattggtttgccttcatgacctaaacaaatactggctttgaagtcctaggttctatttccctagaagatttaacattagtatccttttaatctttttaagtaaggcatactgcatacatacattacatgcatgctttctaaacaaaagataattccaacttacagttttcctatgtaagggaaaaaatggaattatggtagtttaaaagcagtccatagtctcatccatcacaaacatgctgataggcataaacgtgtttattaagtgaaacgtatcctttaaaaa

SEQ ID NO: 179798 - DNA, 374 bp, Homo Sapiens
  misc_feature (30)..(30): n is a, c, g, or t
tttgccctttgtatatgctgcccaggaaangaaatattaagaatccctgacttggtcatggtgaatcagaaggcctaccctggatttttttatcactctaactgcgcagctaatcattcaacctcaaatttgttttttatgacactccaaggatgcccttagctgcatcactcctttgtcatcaaaagcttagaaataacaattaagcagattcctgagttactaaatgacacataactagaattgagacttaggaacttttagttccatgctaagcccacagggacacaacatctctaaaacattaatcataattgggcacaaatattttttgtcacgattccctcctgccctcatttgcttttatatgtcgt

SEQ ID NO: 179799 - DNA, 788 bp, Homo Sapiens
  misc_feature (14)..(14): n is a, c, g, or t
  misc_feature (140)..(140): n is a, c, g, or t
  misc_feature (530)..(530): n is a, c, g, or t
  misc_feature (614)..(614): n is a, c, g, or t
  misc_feature (661)..(661): n is a, c, g, or t
  misc_feature (667)..(667): n is a, c, g, or t
  misc_feature (706)..(706): n is a, c, g, or t
  misc_feature (711)..(711): n is a, c, g, or t
  misc_feature (729)..(729): n is a, c, g, or t
  misc_feature (744)..(744): n is a, c, g, or t
  misc_feature (751)..(751): n is a, c, g, or t
  misc_feature (768)..(768): n is a, c, g, or t
  misc_feature (771)..(771): n is a, c, g, or t
gcctggtaagtttntccatttaatccataaacacaaagacacatgaatggggaaattctgtaaatgaaagcaatttgggcaaaagcccttggtggtgagcttggtctccctcacaggcaatgacagtcttggccatgggntctagacaacacacaattccaatgcagacctaggaggacattatggaagtgagctgggagaaccaatgatgcagaaagtagactcaggagaggcacagagattgcaccccctgccccaagtgcagtggatcagagagctcagaacagagaagagatgaggagctcatggcctctcgtagcctagcctagagcacacttactgctcactatcttattgtccatcattttaagtcaaacatccccagttcagtgagagtgtacattctccaatattacacacataagggaagatggggtaacccctaaagcctgaatgagaaaaagcttccaggagctgtttttcagatacaccaacatatatttgccaagggcaggcactgtgtttctccnaggcaggcggtaaggccctttgaacagggtttccaggaagaacacatagcagcccagagagttgtgcagccccaaccctggctnccacacagagcaaacatgtaacagaattaaatatttatcctattgtncctgtnctacctcaataaaatatcacactccctttaagcggttgnccttnaatgaacatttgtgtgtncttggaatgaacagncctgtgnctaagcaaattgccatnctncaagcatgtgcaaaaca

SEQ ID NO: 179800 - DNA, 444 bp, Homo Sapiens
  misc_feature (33)..(33): n is a, c, g, or t
  misc_feature (35)..(35): n is a, c, g, or t
cctccttcccagacccagatgcagccaggcacncnggttcggcttgctcaggtctctgtccgggactgggaagccacggagggccgggaaagtggcacactcctgggagctcaagcttcctactctctcatcgctgaataactaccgggcaggactgggtggaacagacagcatatttaggtcattgatgggctgctgggtggatggagctggaaagtgatgggcactgctttctggggctgcccaggttccttccgagggctcgcttttcctgggcagagcgggaaagaggaggggcaggccggtcgcgaaacgcaaatagtcgagaatagcgatccggggagaagcaggtgtctgtgggggcccaagagaagtaccatctcgttaaaaatttcagatttgaactatcttacaaatgggcttcccagaagattccattccctg

SEQ ID NO: 179801 - DNA, 397 bp, Homo Sapiens
  misc_feature (305)..(305): n is a, c, g, or t
  misc_feature (381)..(381): n is a, c, g, or t
gaaatacaaaatgttaaatatgcaagctgtactaatgaaggtgctccttgaagttgattaaggagggctgggctgcttgtggcttcctgcaggggagagaaaaaacagaaggtcaagatggttaccccttgctgccttcatcccatccctcatcatgattcttcttgcatcctcttccatgtgctcttgccacttcccttgacttccatctgtgacatcttagtctattcaccaaaatgtgatctttgtaaaacctaatttaaagcatattacttcttttttctaaagcactagaaaggcttccngtctcgctcaggataataatttttaaagggttaccatgtgataacataggaaccacggcgatctgggcttctcacngcttctcccaatttgg

SEQ ID NO: 179802 - DNA, 416 bp, Homo Sapiens
  misc_feature (24)..(24): n is a, c, g, or t
aactcccagtactctgtaaagttncctgtgaccctgtaagtgtaccccattcctcaggtggtgaaatggtttggatgttttgtcccctcccaaatctcatgttcaaagtgtgacattcagtgttagaggtgggcctagtaggaggtatttgggtcatgggggcggatcccttatgtatgactttgtgccatccccatagtaatgagtgagttctcactctggttgtttatgcaagagctggttgtttaaaagagcctggaacttcctcctctctcgcttgctctctctcaccatgtgacacactggctccccttcaccttctgccatgattgtaagcttcgtgaggccctcaccagaagcagatgccagcgccatgcttcctatacagttctatgcagaacagtgagccaaataaa

SEQ ID NO: 179803 - DNA, 418 bp, Homo Sapiens
  misc_feature (313)..(313): n is a, c, g, or t
  misc_feature (326)..(326): n is a, c, g, or t
  misc_feature (395)..(395): n is a, c, g, or t
tcctcgtgggtgtgaagtgacatctcattatgattatcatgtcttcttaaagaagcaaacacaaccaaattcagaagaatttataaggctggtgtctgattgattgaaaaggccccaggaagtggattttgccttcagagttcaactcctcctctggtgcagtcccaaaacactaggattctgctgtctacccaagagaacccagggaactctgaggcaaccacactggcttcagtcagcttgcaaaactggcttttaggcttgtgtacctgatatacattctaggaaatgaaaccttctttgggtacaaagntcttccactgaantttcctaaaagacatcattcccctgttaccccaaggggaacctatttcctaggattaaggattgcaaanttcaaccctgaaagggggttctt

SEQ ID NO: 179804 - DNA, 387 bp, Homo Sapiens
gaactgtggacagtgaaaaagaggcctctccccaaagcacctgcgcaggttggtgactgagagtctggcagcgggtatcagggcagcctgcagaccaccccaggcatcactgtgtctgaaatgccatgggcagctattttgtggtcttgagcagtcatggagcccttgaccccatggtcccccgtcttcccacctctgtcacacactctttgcctttattcaggttggaatatgttaggtaggagacagattctaggctttaatgatttgccactcactagcctcatgactctggagaggttgtgtgacgtcactgtgcctttggtatataagttaggctgagttaatgaccttctctgaaaaataaactccaaaattcatgtgact

SEQ ID NO: 179805 - DNA, 408 bp, Homo Sapiens
  misc_feature (369)..(369): n is a, c, g, or t
  misc_feature (389)..(389): n is a, c, g, or t
catctgctccctctcagcttccctaagtgctcatgactgagcaggacataaggcagggatgtgctcgctgttcacgacagatttccaaggagtgaaatcaaagactccttagaaatatttcttggcatcctccccaaaacataaatgctattgattgaagatttaatgactcaaatgaatgcaatggctctgactggctttcttgaatgtaccactgttattttttaaacccatgaataattaaatagttcatacccatagtatcgagatggacaaaggcagcaatctttttcaaattttcacgatcctttcaacaaacactgcattgacttaaatcttagcccttccctgacccagggctctatcatnaaacttaaaggcttcagggncactgcaggagggagggcc

SEQ ID NO: 179806 - DNA, 503 bp, Homo Sapiens
  misc_feature (20)..(20): n is a, c, g, or t
  misc_feature (50)..(50): n is a, c, g, or t
  misc_feature (66)..(66): n is a, c, g, or t
aacccctgacctaaaacccncattagtgaaggtgccttttccttttaaantttggctggggagccncttaatcctcccccatttcaaaaggttaatgttcccctggggcttaaccccaaccctccctttgggcaaggttgggacaaagcccatctgggcagtcaggggcaaggactgttggaggagagttagccccaagtaatagctctgcccagatgccatcacatccctgatactgtgtatgctttgaagcaccttccctgagaagggaagaggggatctttggactacgttcttggctccagacctggaatccacaaaagccaaaccagctcatttcaacaaaggagctccgatgtgaagggcaaggctgccccctgcccagggctcttcagaaagcatctgcatgtgaacaccatcatgcctttataaaggatccttattacaggaaaagcatgagtggtggctaacctgaccaataaagttattttaataatgcatct

SEQ ID NO: 179807 - DNA, 372 bp, Homo Sapiens
  misc_feature (171)..(188): n is a, c, g, or t
attcggcacaggaagttttaaaaagagagggagggagatcttcatttctttgaggagatcagtattgtaacgtatgtgaatagatgataacaattaatattactaaaagtcccacatgagagtcctgacgccctctccatgccccacagtaatgtggcttctttcatgggnnnnnnnnnnnnnnnnnnagctgatctcatcctaagcatgctttatttttccttgaaagctaggtatttatcaactgcagatgtgattgaaagaaaataaaattcagtctcaagagtaaaccctgtgtcttgtgtctgtagtgcaaaagtcagaaatgattctaatttaaacaaaaagatactaaatatacagaagttaaat

SEQ ID NO: 179808 - DNA, 399 bp, Homo Sapiens
  misc_feature (227)..(237): n is a, c, g, or t
  misc_feature (246)..(340): n is a, c, g, or t
  misc_feature (387)..(387): n is a, c, g, or t
attcggcacagggatccctgattcagatgaggttctatcagagcatttaccaaaactttagttctcagaatactttacattttcatgtgccagttgcttcttgaaactttctcacatccccagacagaattaattaatatagcataattcaagtggtgacaaaagcatttaagcaaagtacaaggatgaagaatccaatatatcatcttagaatattaaaaaatgcnnnnnnnnnnngagacagannnnnnnnnnnnnnnnnnnnnnnnnnnnnnnnnnnnnnnnnnnnnnnnnnnnnnnnnnnnnnnnnnnnnnnnnnnnnnnnnnnnnnnnnnnnnnntccctcggagtagctggggattacagggcatgggtgctggggtaccngttaattcccag

SEQ ID NO: 179809 - DNA, 482 bp, Homo Sapiens
  misc_feature (322)..(322): n is a, c, g, or t
aaagccacaaccacatacaacacaaagagaaaaagaaatgcaaaaatctctgcgtgcagggacaaagaggcctttaaccatggtgcttgttaatgctttctgaagctttaccagctgaaagttgggactctggagagcggaggagagagaggcagaagaaccctgggcctgagaaggtttggtccagcctgggtttagcctgggatgttgctgtgcacgggtgggacccagacacatcgcactgtgggattatttcattttgtaacaaatgaacgatatgtaggcaggaaagggcacgtcccactcacaaggggacgctttnggggagaatgtccagtttcatgttatgtttcaggaaggaaatttcttgttcataggaaagtgcccaggaaagtgtttttaactttgttccaaaaaaccaaaaaccccagccaacaggaaaatgggggttttgggaaaacagggttttaaattgacttttt

SEQ ID NO: 179810 - DNA, 455 bp, Homo Sapiens
  misc_feature (11)..(11): n is a, c, g, or t
  misc_feature (26)..(26): n is a, c, g, or t
  misc_feature (101)..(101): n is a, c, g, or t
  misc_feature (199)..(199): n is a, c, g, or t
aacttccaaangttttcccccatggncacaaaaccctttgcccacaatcacctccataataattcaactgcccttccatatttggcagtaaacgtcatgcnaagtgaatttgcctgatgattagcaaaattacaaaatgaaagtcaaggtcacttaatcaagaattacagcaacaaagaaattctaggaatgcaggtcnaaggcaagaggctgcagctggcctgataatgataccacttgcctaatgttcatttaggaatttgctatcacaaataaaacacgtatctcctctgagttactagaacagaaaaggaaacaatcaggtattacttatcaccattatatgaccatgaaattaaaatatttccttaataatgattaagagaaaaaaatcattctcatgtgttcataatagaagctctatttctgaatttaaaacactactcagtatttgc

SEQ ID NO: 179811 - DNA, 413 bp, Homo Sapiens
  misc_feature (12)..(12): n is a, c, g, or t
  misc_feature (72)..(72): n is a, c, g, or t
  misc_feature (99)..(99): n is a, c, g, or t
  misc_feature (146)..(146): n is a, c, g, or t
  misc_feature (203)..(203): n is a, c, g, or t
  misc_feature (241)..(241): n is a, c, g, or t
  misc_feature (252)..(252): n is a, c, g, or t
  misc_feature (268)..(268): n is a, c, g, or t
ctccccatccanacccagcctaaggagaccccccggttccaatgaatggatgtccttccctagcctgcagangccctccgccgcacccaaggaatgganaggaggggaccccatgtaaacccttttgtttagttttgtttttgttntttggtgaatgagaaaggtgtgcctggtcatggaatggcaggtgtcatatgactgantactcagagcagatgaggaaaactgtagtctctgagtncctttgctaancgcaacccttgtgaantaatctgaatcttttttatgcagaatttgattcgtatgatcagtactgactttctgattactgtccagcttatagtcttccagtttaatgaactaccatctgatgtttcatatttaagtgtatttaaagaaaataaacacaagtt

SEQ ID NO: 179812 - DNA, 392 bp, Homo Sapiens
  misc_feature (14)..(14): n is a, c, g, or t
  misc_feature (77)..(77): n is a, c, g, or t
  misc_feature (338)..(338): n is a, c, g, or t
actgccacacatantcatacaaatgacttagtaatctaatatgagaagtggtccttcacttatattaggaacttggnaaatatttgttgaatgaatgaactatctatggatatgaatttactactttaatttgtgctttttttgaaaaaaagttttcaagtaagagcaatagtaaacatactgagttcacattttgactcagatcataagacctataaaacagtgattgttacaaacaccacccatcatagacacaaatcaatgtgacatttctgaagactagtaagaaaagttctatcatgttgtagaacgaattctaaccgactaattcactgggncttcaatcacttgtggatatggtcaagaaaagggggctggggctcctaggcttg

SEQ ID NO: 179813 - DNA, 245 bp, Homo Sapiens
ttaatgttactttgtttattaacatgtcgttctaaatattacataaatacagcttacatactagagtatcaaacattgttccagtaagaagttcaagagtacatttagggctatcttaagaaatatgaatactttggcttccattattacattagatgaaaaaatcaattcaaataagagttgtcatatcctgctatgattaacaaaaaaacaagtagaaaaataagagagtgtatttaaaaaaa

SEQ ID NO: 179814 - DNA, 440 bp, Homo Sapiens
  misc_feature (22)..(22): n is a, c, g, or t
  misc_feature (118)..(118): n is a, c, g, or t
aatgacttgcctcaggaacagnatggaaaaccatgaacagaaaacaatgggcttggaaaagggctgttttcatggaacctgcagaaaaaccaaaacaaaatatccccaacaccctccnaaaagcaacaagaaaccctcatgtgatccattccatcccaggaattttcaccatagcaacggaaaggacccgaggtgtcactgcttgtgaggcagcgagaggtcatctctgcatcctagtgggaacccctgaagccctgctaggtgacatcatcgcggaaaacctgccgtggtgcctgccttccaacctgcctccggagggctttcagctggagaccccattggagctcttgaaatgaataagggaataaaattgggagaggatttggagatacacccgtaagtgtaggaacagggcgagatgatcaagggaagaagggact

SEQ ID NO: 179815 - DNA, 408 bp, Homo Sapiens
  misc_feature (320)..(332): n is a, c, g, or t
cagatccttcttggccccagaaagtcatttggcatggctccagccccatggcgtccgcttgtggataactactgtgaagcatggcgaaccgcggacacagcgtcacgggacttgcctccccgctgagcacggggaagattctggaccagaaagcatacagctgtgctaatcggctaattgtcctatgtatcgaaaacagtttcatgacagacgctaggaagtaatggccttctgatgattcttaaagagttttcaattttttcttatgtgaagagttgacactgaaatctaaaatgtttaattgttgtaaatattacagnnnnnnnnnnnnnactacatattcttttacaacaggcaaccaaaggaaaacatacctcaatacactcaaaactgaaggacatagggggg

SEQ ID NO: 179816 - DNA, 448 bp, Homo Sapiens
  misc_feature (161)..(171): n is a, c, g, or t
  misc_feature (389)..(389): n is a, c, g, or t
  misc_feature (419)..(419): n is a, c, g, or t
agtgaaaataggttatagtgaaaaatatataccatttgattaataaaaatgttattggaaaaatgcaagaactgctgtaagaattgctaacattgtgttggaaaataaatatactaagctaagaaacaatgggaaactgtcatatgtagggccaacagccnnnnnnnnnnnaaacccgtccaatttattaatatctagtctaataaaccctgatttataggacctctgcaccttttttgactttttattcatccattcttaatattctacactatggacaaaatccttaaaactccattattgatgaaatggggaacagacttttgtttttgtatgttgggtgttctctgagtgggtgaagggcccaggggagaatgttttgtttgggngggtcacttaggcctttggaaaacatccanttccctgtggactaggccggggtatcctt

SEQ ID NO: 179817 - DNA, 551 bp, Homo Sapiens
  misc_feature (64)..(64): n is a, c, g, or t
  misc_feature (303)..(303): n is a, c, g, or t
  misc_feature (456)..(456): n is a, c, g, or t
  misc_feature (480)..(480): n is a, c, g, or t
  misc_feature (505)..(505): n is a, c, g, or t
attcggaacgaggcttatagtaaatgtgaatgtacacatgagttgttgctgaagctgacaagantagttacatacatgcattttccctgtgccctcatagttgcagttagagttccagtacctgtaggctcacctgggaggcagattagacccaaaggtagatgtttttcccctttccatgaagcatgtcagtgggagttgcttcctttgatttccctagtactaaattttaaggcttttgtaaaaacaaaacaaaactaggagcttggaacagttaaaaatcaacactgctaccatcaattncatcaaatatttacttagagctttcatacatttaagattccagttaaccaataaattagaattcatttcttctgcataaagtaaattttcatacacttgacctactaagacagcaagggtgtcctaaattgagggctttgtataatgccggcntaactaattggtcactaaatgggncgcctggggcaagacctgtaggtcntcacagatttttgtgggcagtttcttcattaatttgctggctgagc

SEQ ID NO: 179818 - DNA, 506 bp, Homo Sapiens
  misc_feature (51)..(51): n is a, c, g, or t
  misc_feature (81)..(81): n is a, c, g, or t
  misc_feature (93)..(93): n is a, c, g, or t
  misc_feature (401)..(402): n is a, c, g, or t
  misc_feature (422)..(422): n is a, c, g, or t
ccctatgctgctccctgagccagaaatggtcatgccagaatcccgggcaanaaaacagcaaaactcagaaatctcccaagnaaaccctttgantggatctgtaccgttgttctcgtcttgctctcttgctgccctgccaccttcaaagctgctttctgtttccctggttcccaggaagacagcggggcacagggtcccctgctttgtgaggagcagctggcttctccctttggccccccaggttttgccctcccacatgtctcccttctggtgacccggaccccagacaaactatgcctgcctccctgaagcccaggcatcctgaggaacttgatagacaaacaatgacagtgttttccagaactgtgggtacgtgtctaatctcagatggtactatgaanncctggagatcaaagtttggntctaattcaacccctgatcctcgaaacggctttcttgcaaagtgtatatattggtttctttgctgaatgaatgaataaaacatg

SEQ ID NO: 179819 - DNA, 352 bp, Homo Sapiens
tccctttcccttaacaagggtggtcaatgaaataaaatcagccgaacatggccatcggtctgcagaaagatgcagaaagacttccaatggtaagacacaagggccccgctattaagtcccgattcaaaaggcatcccccccaggaagctcaggaaacgtcatcccaggctaatgctctttggtgagaatcctgacataggaatggatgaggacatgtgccttagaaatctttttcagaaaaaagcaaatgatttctaacacatttttggttagctttcgatgaaaagatatttctaacatctaattgtatttgaatggaactatattaaaaacacttttcattagccttaga

SEQ ID NO: 179820 - DNA, 563 bp, Homo Sapiens
ggtttgtctaatttcagtatccatactacgtttaacctctgtgaggacaagggagcatgtttcttgttcagaattataaattagtccagtcatagtccctggcacataatattgaaattagtgaatcgtgtgtatcttcataaacatactgtttgtcctggtagagcaaaaattgtcaacctgggattcatggacaaccaatgatgtgaaaaaaacccagtaatttcctgcaagattctgtgcttttccttggagggaagtccctgaatttcatgggactttcaaaagaactgagacattctgacccccagaaagaaagacccaccacagtgataaaagagttccaaagcttcacctccagctttttactgtctctcccaccgccagcatctgcacaactgcaacccctttccatgcaacgacataccctcttccctctctatcaccccataaaaccctcctgtcactttcctgctttggagactatgcccggtgctttatttgtgacaagtaataaaactattgctcaaagcctgcattcttggttggttatggtggctcat

SEQ ID NO: 179821 - DNA, 466 bp, Homo Sapiens
  misc_feature (27)..(27): n is a, c, g, or t
  misc_feature (43)..(43): n is a, c, g, or t
  misc_feature (48)..(48): n is a, c, g, or t
  misc_feature (59)..(59): n is a, c, g, or t
tgtcccccccactgcactaaagtacanctagatgtcccctacngcccnctccccagtgnaaatataaaaatattgcactacattacagatatagtttacaaatgtcattagcagcattactgagctttcctataattgtggtctacagagttaaatacttttaaaacatgagtagattcttataaaaccaaagttttgcattatttcaacagctctttcaaatgcatcagtttcagcaacatgacttgggtatcatgaaaacttccatggtttaatcaataaacaccagactacttacaagtagtaccaccttaccaggttatcaatggtaagttattttttataaagtggttacacactgagcaaattgacctcaagtgtaagttatggaacaataactttagctttcagggaaatttggtgtgtaaattcttctatagcagtgttcttttaaaataagatcacg

SEQ ID NO: 179822 - DNA, 440 bp, Homo Sapiens
  misc_feature (317)..(317): n is a, c, g, or t
  misc_feature (374)..(374): n is a, c, g, or t
  misc_feature (395)..(395): n is a, c, g, or t
gcagagttctggggtgtctccaccatggcctggacccctctctggctcactctcctcactctttgcatagattccgtggtttcttctgagctgactcaagaccctgcggtgtctgtggccctgggacagacagtcaggatcacatgccaaggagacagcctcagaaggatttatgcaagctggtaccaacagaagccaggacaggcccctctacttatcatctatagtaaaaacgcccggccctcagggatcccagaccgattctcgggctccagggtcagggagacacagcttccttgaccatttactgggggctnaggcgggtgatgagggttgactattactgttcactcccggggacattcagttgacancctaacaagtttttcgggaantggggaccaagggttcaaccttccttcagtttcaggccccaaagg

SEQ ID NO: 179823 - DNA, 378 bp, Homo Sapiens
  misc_feature (21)..(21): n is a, c, g, or t
gctttcctaaaaaccaaaatnaatttggcattccaagtatttcctaaccttacgagaatataaagtaaggatcacacactattatagtttaaaaaggctagtaaaaactataggcagaagataaaatttggcccaagacttggtaactgggtgaagttagacttttataagcaattattttctgtttaacagtattcacattaaattatttacaacattttagaatgttttaacacgatttacgcaatcagtcaagtggctacatttactagtttattgaatatgaggtttatccatttagcaatgtaaggaaaactttagttctgtttctcagttatcaggagtgaacataaaactattctaaaccacaattagttt

SEQ ID NO: 179824 - DNA, 404 bp, Homo Sapiens
  misc_feature (12)..(12): n is a, c, g, or t
  misc_feature (53)..(53): n is a, c, g, or t
  misc_feature (86)..(165): n is a, c, g, or t
  misc_feature (176)..(176): n is a, c, g, or t
catgaaacattnctaattaacaggtttctgtgtggacatagtttttccttttnccctgggtctttacctaaagaggaattgctagnnnnnnnnnnnnnnnnnnnnnnnnnnnnnnnnnnnnnnnnnnnnnnnnnnnnnnnnnnnnnnnnnnnnnnnnnnnnnnnnttgctcacttnagtgaactgaagctaaaaatggggtgggggtgcctcacatgtccactccacgtgactctgtttccagcttccatgatgacgcccccaaggactacaggcaagtctctctgaccgccgtgaagcagcggtttgaggacaagcgctatggagaaatcagccaggaagaggtgcctccctcccgcaacctgggcgtctcatggggtgctggggtgtgggcgggcctcaccc

SEQ ID NO: 179825 - DNA, 226 bp, Homo Sapiens
agatggaaaagtttgcagaaagaggcactaatcaatcatcaaacgtaatttttttcccctgaaacacagcaatattagattgctgttctttatcgccttctgcttgcttcccatgaaggatgaagaggcagctgcaattgctgttttgtattttcaagtcttcctgatagcttcttattaaactgattcttgatctgaggctcattctgtggaaaatctagggatc

SEQ ID NO: 179826 - DNA, 522 bp, Homo Sapiens
  misc_feature (493)..(493): n is a, c, g, or t
tgtcggcacagggacatcatcattaatttcacctattatattgtacccacatatattgatgtctccaggggctaataaagagtatttaccacttcactaaatgaccccaattttgccattttcaaacctatgtctcataccttttctgtcacctgaacttactgtcaggttggttggtaatgtgcctgcctcagccagttcactttcttaggtaattcactgcaggttaagaatccacacaaccaagttcatgggaattttgtgtaaaataaaagataacatgcctgagggagagcctgggtgcctttgctatgaattaatatggcactttctgaaaactctaaagcctggggaaacattttagttttttgttaagggtttctaaactgtggctacagatacttgttaagacttttaaaatcagagtaagtatggttcttacataagggcctttcttagggaattatggtgtatataaatcttggaaatatcnttatatacccgagttttagggtccaccgt

SEQ ID NO: 179827 - DNA, 379 bp, Homo Sapiens
  misc_feature (175)..(175): n is a, c, g, or t
  misc_feature (318)..(318): n is a, c, g, or t
  misc_feature (344)..(344): n is a, c, g, or t
tatttaacaagtcaacaccttatcattaagcacttgagatcttgatacatattcaagttacacatctaaaaggtttccactttgcaagcaaacatggtaatgcagagacctcctatttatgaaatcatgtaaaatggttcttcagacacctctatgtcccactgatgctcaagantcaacatttttcaagggggtattcaaggcaaatgacaaccatcttatacatgcagttaaacatttttgcttttccaatgatttgcagggtaaatatgtgtgtgagggctgatgggattctgggacgaggctccaaaggagagnaaaatcactcccagtctgtgaggccngggggaatggggtacatttttacaaggggacgggg

SEQ ID NO: 179828 - DNA, 484 bp, Homo Sapiens
  misc_feature (377)..(377): n is a, c, g, or t
  misc_feature (413)..(413): n is a, c, g, or t
  misc_feature (424)..(424): n is a, c, g, or t
  misc_feature (433)..(433): n is a, c, g, or t
  misc_feature (440)..(440): n is a, c, g, or t
catagttatgtaaaaagagattgcttcatgagctaatggttcatatatgcaaaagggtaagatgaaagctttactttgtacaaatgtaaatagataaagtaacataatacattaatacttcttaaaatgtgctatttgcaaacttacttaatatcagtgaacacagtcggctaaagctgtgttcccatatattgttatagacagctaaacccttcaactatgcaatgaatgttcgggcttttcacaaaagcccgcctaactcaaaggagccttttcaaatccatttacagcatacttaaggtcatattttccctgaacaagcgcttacgtgatatgactctgttttccttgcttgttgttttttgcaaacggggganacatcctgtttttgcaaattgggaccccgggctggnaactttggctntgaagttgnccggttnttgggctcttgggggggtagtgttggcccccgggtaggttcttt

SEQ ID NO: 179829 - DNA, 426 bp, Homo Sapiens
  misc_feature (385)..(385): n is a, c, g, or t
  misc_feature (392)..(392): n is a, c, g, or t
  misc_feature (403)..(403): n is a, c, g, or t
acgtcagatagcactttaatatactagaagaccaaatggaactaattttatttcatacatatattttacagtccagtagacaagatatattgtatttctctgctagtaaagtcatattctctccaaatatgtagacaagaggcttaatgtattataaaagtattatgaagagacattaagattgatgcaaactcaaaaaacacactcacacacaagacttttttttctgccatctttcaccctctaactcgcgatggctccacaaggttgacctgttacgggctgttcccaggacttgatcaccagctgggaatacagtgcggtcacatcagggaaacggtggcaccttacatccgtcagttattggaatacagtggaaaacatnttccctncatctgggggnaaactttggagggttttcttttt

SEQ ID NO: 179830 - DNA, 538 bp, Homo Sapiens
  misc_feature (107)..(107): n is a, c, g, or t
  misc_feature (187)..(205): n is a, c, g, or t
  misc_feature (379)..(379): n is a, c, g, or t
  misc_feature (399)..(399): n is a, c, g, or t
  misc_feature (408)..(408): n is a, c, g, or t
  misc_feature (457)..(457): n is a, c, g, or t
  misc_feature (460)..(460): n is a, c, g, or t
  misc_feature (523)..(523): n is a, c, g, or t
acatagaaaggtagatagtaagatttgcattatggcagtgcattggccagggtgataaagattcaaaattaattttgcaaaatttgaggacctactctgtgccaggnttcatcttggattcatgggaatggcagacttatacttgcgttttttccaagtgtaggtaccccactctgagcatctttcnnnnnnnnnnnnnnnnnnnctgtgaagctgggagacacagaggcatagtctccttcttaaaatttgcatcagagttgaccagcatcccatttcattttgttgtcttatttattcagaaattatggttatctgctttcctgcatggaacgtaaaaccttaaaagtaggggcagaagtgggattcatgcttggantctcagggcctggtttactnagtggtccnaaaagcaaacatctatagggtggtcacaaagaaggaagccaggtttganacnagatgttaaactgtgtgcatctcaattaagcataatccctgcctagatacactgccttatagnaatttctttggaaag

SEQ ID NO: 179831 - DNA, 176 bp, Homo Sapiens
  misc_feature (159)..(159): n is a, c, g, or t
gcatctttaacatggaagtacttcttactgatgattacattttttaaaatcatgcctgccagcccatctaagccaaattcaaacaccactctgcattaaatgaagctgcagcaggaaagctgagcacatagcacccaactgatcggaaagaaacgtacnatgtttaataaaattcc

SEQ ID NO: 179832 - DNA, 681 bp, Homo Sapiens
aatttatagtaaatccatttaatactatgtacatattaatgttgaaatatttgacacagaaagatattcaccatttaaattcaaaaaatgacttaagtggagggtaaaaacagtataatcaggatgagcaagtaaaataaaacgtgtactgagagtggactgagaaagtctacgaagacatacagcaaagcatgatcaaccttctcctttttgcttacctacaattctacaatgtgcatatattacctgtttgtttttaataggagttctttgacttaatttatacagttcaatgatcttattatcagttccttgatttgacctgagtcctggagttcttagctgtttttagtatcctttatcttaaagctctgtctcccactcattaccctggcaattcagtaataactacattaaggtaataaccttctgaatcaattttataagcaaatagataaaatttctatctttagggtaattccaatagataattcctgcatttctacaatgtgcatatattacctgtacattgtttgttttcaataggagttcatggaatttgaaatcagaagaaaaatcctcattacaaaacaacagcattttaattgaattttctaagtgatcatttccggttgtttaaatgcacctgttcaaatcaaagttcatcattttgtttggaac

SEQ ID NO: 179833 - DNA, 439 bp, Homo Sapiens
  misc_feature (53)..(53): n is a, c, g, or t
  misc_feature (197)..(211): n is a, c, g, or t
  misc_feature (405)..(405): n is a, c, g, or t
tacctggggacatcatcctgttggtgacatcatcctgttggtgacaaggtggngatacatctctaatgggacttccctcaagtggcaggcaggctgccaagcaactaacccccatcaagtgccagaccctcccagtgttctgaaagtcatctccatgctaaacagcctgcgttttatatgatttctctacccagccnnnnnnnnnnnnnnntggtccatcatgtacgcagttatctagtcttaagttatattctggcttttttctcccactttattatggagcagaagtaagcctatcatgttcttagaaaggctcttaagaggtgtcctggagtccttgaatcactttagcatctggggtaggatgtgccaccaggaggatttgggctggagcgtgtgtgtttnccttacctggactgctgtctgatcttgctgaaca

SEQ ID NO: 179834 - DNA, 349 bp, Homo Sapiens
  misc_feature (83)..(83): n is a, c, g, or t
  misc_feature (117)..(117): n is a, c, g, or t
  misc_feature (167)..(167): n is a, c, g, or t
  misc_feature (205)..(205): n is a, c, g, or t
  misc_feature (210)..(210): n is a, c, g, or t
  misc_feature (257)..(257): n is a, c, g, or t
  misc_feature (330)..(330): n is a, c, g, or t
tgatacatatggtacaaaattcaaaaaaatacaaaaggagatacagtgaaaagtctcccaatcctgtacctatccaccctggncaccctccccacaaaccaccattggttctaagantttatcctgcagatgtaatcccataaattaatgtgaaatatgcacaagantattcattacagcattatttataggcaaaagacagggnaacantgggaaacgtctgtcagtgaggggactgattaaataaattatggggnttatccattcaatggggttaggtatacaggctggtaaaatggaaatgaggggcagctctaattggcaaggttntaaaaaaagggcaaggtgc

SEQ ID NO: 179835 - DNA, 408 bp, Homo Sapiens
gactctcctcactctttgcataggttctctggtttcttctgacctgactcaggaccctgctgtgtctgtggccttggggaagacagtcaccatcgcgtgccaaggagacagtctcagaggctattatgcaagttggtaccaacagaagccaggacaggcccccttgcttgtcgtctacggtgaaaacgaccggccctcagggatcccggcccgattctcagcctcccgatcaggcaccacttctaccttgaccctcactggggctcaggcggacgatgaggctgtctacttactgtaactcccgggacgtgagagatgaccgtatagtgtttcgggcggaggggacccagggttaccgttccttgcgttcagcccaaagggttgcccccttcgggtcaattctgtttc

SEQ ID NO: 179836 - DNA, 460 bp, Homo Sapiens
  misc_feature (32)..(32): n is a, c, g, or t
cccgagacctgcacactgtaatccttccccantcctccctggctcagatacctctccagattccttccccatccagggttccctgggtgggtgggtcagcagccaggctctatcgattgggaatcagtgccacccttctctggagcccctgggtgctgatgcccctcagctgcaaatctaggttggcaggggtccccattttccttggcattcacccagcaataaagctccaaggtgctccactcctgaccaccactccccactctggtgctgagtgagaggggctgtcctcagaggaccctgggacctgcctcaggccccctacccacctctgccatgcctaggaatcccacccctgtgtgaatgggactccctttcctccatgtgacacccacagggtccatgacccatctaggagactttatagcagttgggtgggaggggaatgctcttaatttat

SEQ ID NO: 179837 - DNA, 296 bp, Homo Sapiens
  misc_feature (276)..(276): n is a, c, g, or t
  misc_feature (281)..(281): n is a, c, g, or t
tttaaaagaaatcttcgaaattatcatctcgtttcacgttaattaactgagcccgcggtcacaaagcttcgcaacggcaaagcaaaagcaagattcatgcctttcaactttctcactacccaagtagcaccgcaagccgaatccgcaggcagtgcaacattgtttgctactcttgcgcagaacaaaaatgctaatcactgcaactgctttacatgaaagtgcacctagaaagacttcaaaacccagaggtacattaactttccaggcaagttcctnccagnctgtgtgccacgagc

SEQ ID NO: 179838 - DNA, 415 bp, Homo Sapiens
  misc_feature (25)..(25): n is a, c, g, or t
  misc_feature (81)..(81): n is a, c, g, or t
  misc_feature (91)..(91): n is a, c, g, or t
agtcttggaaatgtgcttggcaggnatttcaaaaaacctgaaaaccaggtccctggtacttccctgtacccctcagatggnaaaagatccnagagaaaacaaaaataagagaaaatgaagaccccatgaagatagcaaagtagaaaaagaccctggagagcatctggttctttctgcttattttgcaagtcgggaaactgaggcccaagagggggaatagggatagcctgatgtcacatggtgagttaggagctgagcccaggatggtcacccagaactcctaaccgccctcagggactttttccactatgctacatggcctcctgggtggagaggtggcacagagaggatgagaaacaaaaaaagagaaaaggaaaagtaggttgaagacagacaagacaaacgtctctattcc

SEQ ID NO: 179839 - DNA, 315 bp, Homo Sapiens
  misc_feature (67)..(121): n is a, c, g, or t
gattaaaaatgaatgtttgatattacagaatattcataacaaaatggaagaattataggaattaacnnnnnnnnnnnnnnnnnnnnnnnnnnnnnnnnnnnnnnnnnnnnnnnnnnnnnnncaaacacaaggaaagcatagaatagcttttaaaagtagctatgccttcttccaaatgttattttattcaaaaaggtaaccaggttgtgttttaaacctgtgaaatattgtgatgcattttattactgaaagttatttaactgcctttacttgcacataaaaactctcatttacggcccaggtgctgtggctcat

SEQ ID NO: 179840 - DNA, 153 bp, Homo Sapiens
ggtaaactctgtggtaaaatctaaaataatgttaaaaccctaaaagtaactattgaatattctgtaatcttagacatgtatttttcaagctaaccctttgaagaaatgtgttcaaggtaggaaaatataaaattttttggttatttgtaaatt

SEQ ID NO: 179841 - DNA, 420 bp, Homo Sapiens
  misc_feature (382)..(382): n is a, c, g, or t
  misc_feature (395)..(395): n is a, c, g, or t
cattcacttaaccatatttaccatgtcacatagcagatgcacctccaaaatgtttatggtagcaaagaaagctatggcatacattccttaatgattggtctaacctcccagctgttccatcaatgttacaaattttaaatctcaactttattcatgaggcactagaagatctttgaattgctgcctttgcattagcattacaatcctaattgtcctgacaaaaaggtaccatagaaggctgataggaatagagaacggtctactgtacatgtaagggaaaatacacaggaatgaaggaaaatccttcccctcctccaacacataatatttcataatgttaggctttcaggtggcggagggcttaactaggaatggggggccntgtgggggaaacntttttaatttggcaagggagggggc

SEQ ID NO: 179842 - DNA, 313 bp, Homo Sapiens
ggcgataaagggctaatttcatataccgagtatcttttcttgcttacaatcctcactaaaccccattctggatttcatgttgcttttaaaatgctggatacagatggtaatgagatgattgaaaaaagggaattttttaagctgcagaagatcataagtaaacaagatgacttgatgacagtgaaaactaatgaaactggatatcaggaagcaatagtgaaagaacctgaaattaacacaactcttcagatgcgtttctttgggaaaaagaggacaaagaaaacttcattataaagtttttcgaaggatttat

SEQ ID NO: 179843 - DNA, 296 bp, Homo Sapiens
ttctttttttaaggggaaaaaatttgagtgcatcgcgatggagaaaatgtcccgaccgctccccctgaatcccacctttatcccgcctccctacggcgtgctcaggtccctgctggagaacccgctgaagctcccccttcaccacgaagacgcatttagtaaagataaagacaaggaaaagaagctggatgatgagagtaacagcccgacggtcccccagtcggcattcctgggggcctaccttatggggacaaaacccttccctatgacggagatactttccagttgggaataca

SEQ ID NO: 179844 - DNA, 461 bp, Homo Sapiens
  misc_feature (261)..(261): n is a, c, g, or t
cttggcatccatggtacccatcatctgtattaaagggcttaaaaaagcatcattgcaataaaccatactaacccaccactaaagtcacagtcataattgaagtgcacccaaaataaggtccagtgactgtaccttagctttttacttcagacatgtccaaaacttgtgagaacatacaatttaaagttgaaaactcatcattttgggctatttttgaatagggctgaaatatggtgacatgtcaggcactcagttttttgngagctgtcttaaaggtgaggtggaaagtgagagatgattttgctctaattacccacacattctccctaaccctccattttaagacacttagctattaatagcttaagactatcaaaactgcttttgtggattctcagtagggtctagttcaaagccatcttcagtgctagtgattgggtattgttaatttgatgggtatt

SEQ ID NO: 179845 - DNA, 464 bp, Homo Sapiens
  misc_feature (18)..(18): n is a, c, g, or t
  misc_feature (29)..(29): n is a, c, g, or t
  misc_feature (47)..(47): n is a, c, g, or t
  misc_feature (90)..(90): n is a, c, g, or t
  misc_feature (164)..(164): n is a, c, g, or t
  misc_feature (246)..(246): n is a, c, g, or t
  misc_feature (257)..(257): n is a, c, g, or t
  misc_feature (322)..(322): n is a, c, g, or t
aaccctgaaaacccaacnctctggccaanccagaagccctctgcagnccctcgacagccctccttccagtgtcccctcctgcggtgatgncccttacctgcccccagcccgggaccggggaccggtgtttcactgaggacctgcattagaaacatttttaaaantgttgtacaggaagagatgtgtctaaaacagcatcttaaagctgagtgtatttctttggcacaaggggtcatgctgatgaantcttctttcantctgatctttgttcagccaacagaagcgtccttttctaatgtcttccattcctaccccccacccnaaaacaaaagaaatatttgtagcttgctatctgtatttgaatttttagcaattttatatttagatactttgaaaaatgtaaatgactaatttggtcattaaatcttgtgacatattcgatattaaaatgatattaaaataaa

SEQ ID NO: 179846 - DNA, 333 bp, Homo Sapiens
  misc_feature (17)..(17): n is a, c, g, or t
  misc_feature (47)..(47): n is a, c, g, or t
  misc_feature (67)..(67): n is a, c, g, or t
  misc_feature (82)..(82): n is a, c, g, or t
  misc_feature (138)..(140): n is a, c, g, or t
aagcagttaaaaatgtnctgttacctaaaatttgttaacgtgcctgnctgtgtccctacatcctcantcaggcattagtttncaagttcccattttccccccagcaccgtgtggcaccttccccagaaccctcacatnnnttttctaatattcacagggttattgtttgtaaaaaatctatttatttgctttattccatcaagtaatttattttcatgagatttcttggaaatgtggctctacatatcgttagtacaagtaatacattttgattgttgttccctggaataacttgtattatttgatgagttaaataaaatgcctaattctaaa

SEQ ID NO: 179847 - DNA, 403 bp, Homo Sapiens
  misc_feature (21)..(21): n is a, c, g, or t
tggtctcccatggaggctcanaaggaaaagtgtgcaaaagcaggttaggaaagggaaaccaagtccagggaaagtgccccagccggggctcagtggtctgttccaactcccagcgggcactctcagcagcaccccgcagcactccgcttcacatggcatggcttgcagaagagatggttgttcagggggtagcagccttggtccgtgggctcgacagacaggaggatcctgcagtcctcacacctgtagcaattttcatggaagtttcttcccatgcattcgattttgaaggcatctttcccatcccgagggatgatgggattttcacagatgctgcagacgggggcgaatttcctagaagcaaaggaacccatgcttgggaggcgttcatgccacaaccacc

SEQ ID NO: 179848 - DNA, 694 bp, Homo Sapiens
  misc_feature (47)..(47): n is a, c, g, or t
  misc_feature (93)..(93): n is a, c, g, or t
  misc_feature (265)..(265): n is a, c, g, or t
  misc_feature (446)..(446): n is a, c, g, or t
  misc_feature (471)..(471): n is a, c, g, or t
  misc_feature (473)..(473): n is a, c, g, or t
  misc_feature (530)..(530): n is a, c, g, or t
  misc_feature (621)..(621): n is a, c, g, or t
  misc_feature (654)..(654): n is a, c, g, or t
  misc_feature (663)..(663): n is a, c, g, or t
  misc_feature (670)..(670): n is a, c, g, or t
  misc_feature (676)..(676): n is a, c, g, or t
tttccaatgcttgctaacattttttttgggtgggggtgggggtcggnacttttgttaatttctgacgccagtgttttcaaaaaacctctaggngccctttcatcttctgcagtgactgtgatgtaatgataacgttaacaatagtcactacctgattattaattactagtgatatctgataattattgaatgacttgcttttgccagggcaggtgggctaagtgctctttatctatctcctgtaattctcacagccatcctaggncataagtaatattacagtctccgctttatacatgaggagactagttgggaggttaagtgactgtccaaagatcaagagaactaagactgaaaacccagggctcacccctctcagagcctgcctctgtaaacaactatgcaaacctgtctctccaagacaatgtgaatgtaggaacagactnactttgagtgctcttctatttttcncncccccagcattcccaaatttctcagccttcagtcacacccttgactaccctttccgntgttctccaaagacacaggcattatttaattctttcatccatacaccatgaatgcctttgggacttaactgtcaacatagatagtgttttncttaggtaagtaaaaccttttttcctggtcctnattatgtantactagnccttgnaaaatgtggacactttac

SEQ ID NO: 179849 - DNA, 420 bp, Homo Sapiens
  misc_feature (294)..(294): n is a, c, g, or t
gaaggctcctttctgcccaaaaggtctagactgccagcagaggccctgaggacaaagggcactgctataagatgcagactgtatcatgggcacagtgggaaagtcaccatgtgcaaagtccacgggcttgcctgcctctatgcctcagacaggaacaaatcatgggatggatctgggatctatacaacagctccatgaggcaggacaatcatatgaggttttatgctgaattacacccattttcccaatgaggacacataaaacctcccaaacatgtgagaagtttcagacccnaatataataagtgatgtataggcatgtgacctgacgaagtgagtttgtcaaccttgtttcacttgagtgtgaaaaatgctttataattttgataatcttaccttcagcagctttgtaagaaataac

SEQ ID NO: 179850 - DNA, 451 bp, Homo Sapiens
  misc_feature (24)..(24): n is a, c, g, or t
  misc_feature (58)..(58): n is a, c, g, or t
  misc_feature (106)..(106): n is a, c, g, or t
  misc_feature (357)..(357): n is a, c, g, or t
cttctctggcatgcctccttctcnatgtacactatgctgtatttggtgctatacctgnaggcccgcttcacttggcgaggagcccgcctgctccggcccctcctgnagttcaccttgatcatgatggccttctacacgggactgtctcgcgtatcagcccacaagcaccatcccagtgatgttctggcaggatttgctcaaggagccctggtggcctgctgcaaagttttcttcgtgtctgacctcttcaagactaagacgacgctctccctgccctgcccctgcctatccggaaggaaatcctttcacctgtggacattattgacaggaacaatcaccacaacatgatgtaggtgnccacccacctcctgagctgtttttgtaaaatgaactgctgaacagcaagttcttgctgctctccaatctcatcagacagtagaatgtagggaaa

SEQ ID NO: 179851 - DNA, 335 bp, Homo Sapiens
  misc_feature (78)..(78): n is a, c, g, or t
  misc_feature (85)..(85): n is a, c, g, or t
ttaaccccaggtattaaagattattacaaagattatgtaattaaaacaaatacagcaaaagacccagggttgactacnaagatcnaatgggacagaataaaagttacatatcaaaatgcctgctgctgaccaaagggatttgtcacagatctcatcacttagaaaccctacagtggtttccctggtcaccttccagtcaccactacaccttggctccttttagcactcctccctagcttatcactatatgaaattgctttatctctttgtattgtctgtcacctgccaccataatgtgaatttctagacctccatagcatgcaaagctctagaac

SEQ ID NO: 179852 - DNA, 425 bp, Homo Sapiens
agattgcgaagagcgccgctgagaatctgaagaataatcatccatccaaatttgaagatcctatattagttcctcttcaagaatttgcatggcatcaatatctacaggagaaaaaaagggaactcaaaaatgaaacctgggaatattcttcctctgtgatttcttttgttaatggtcagtttctgggtgatgcattggatctgcagaaatgggcccacgaggtgtgggatatagttgacattaaaccctctgcactttatgacgcactcactgaggatttttccgctaagttcttaagagacaccaaggcatgatttcgtgtttttgggacatttgtattgaatcttctccaattgggaaggattgatttttgagctatactgtgatgtgtgtcccaaaacatgtaaaaatttcaggggtttttt

SEQ ID NO: 179853 - DNA, 468 bp, Homo Sapiens
  misc_feature (21)..(21): n is a, c, g, or t
  misc_feature (60)..(60): n is a, c, g, or t
  misc_feature (106)..(106): n is a, c, g, or t
  misc_feature (295)..(295): n is a, c, g, or t
gccagaaatggggcccccacnaggtgtggggaatatagttgaacattaaaacccctctgncactttaatgaacgcaactcactgaggatttttcccgcctaagttncttaagagaacacccaagccatgatttccgtgtttttggacatttgtattgattcttctcccaattggaagattgatttttgagctatactgtgatgtgtgtccccaaaacatgtaaaaattttcaggtcttgtgcacaggaaaagcagggttttctcaacgtggcataagactacattacaaaaattnccatttttcatcgaatagtacagaatggctggatacaaggaggggatatagtgtatggaaaaggagataatggagagtcgatttatggtccaacatttgaagatgaaaacttttcaggtcctcataataaaagaggagtacttggaatggccaacaaaggccgtcacagcaac

SEQ ID NO: 179854 - DNA, 407 bp, Homo Sapiens
  misc_feature (349)..(349): n is a, c, g, or t
  misc_feature (393)..(393): n is a, c, g, or t
cgcttcacggacagctgcggggtctcattcctagctcacctcaaaacgagcccacagcctcggtgccccccgagtcggacgtgtaccggatgctccacgacaatcggaatgagcccacacagcctcgccagtcgggctccttcagagtgctccagggaatggtggacgatggctctgatgaccgtccggctggaacgcggagtgtgagagctccggtgacgaaagtccattggcggttcaggcggggcacagaggatgccgctctgtgacaaatgtggggagtgggcatagttgggtgctgtgggtgaaggcgcgggataagtaccggcaccctgagttctttcgtgtntgccgactgctaacctcaaacctcaaagcaaaaggggtaatttnttcataggaagggg

SEQ ID NO: 179855 - DNA, 583 bp, Homo Sapiens
  misc_feature (200)..(200): n is a, c, g, or t
  misc_feature (244)..(244): n is a, c, g, or t
  misc_feature (264)..(264): n is a, c, g, or t
  misc_feature (448)..(448): n is a, c, g, or t
  misc_feature (497)..(497): n is a, c, g, or t
  misc_feature (519)..(519): n is a, c, g, or t
  misc_feature (522)..(522): n is a, c, g, or t
  misc_feature (568)..(568): n is a, c, g, or t
tttacttaacagactgggcaaaaatgaaaaaagaaacataatatcctgaggctgggcaggagcacaaggaaatgggtctcgtgctgatgatgaatgtgaattgataacagtttttttgtgatttgcgatagacaaaattgaaaacaggcacaaatgtacgttactctggggctcgctaaatagggcactaaataaaacgngtcagtttcttctcccgaggcaagtaaactagagggtagatccncgcgacccggagtctaggancacatcctcgggagtgaacagccacaattcacagacgatgtgtgcagccggggcatgaaaggcccaaggcaaacacaccacgaggtaaacgccgggactctgaggagaggggtggaagccgggacttcgaggaggggtggaattgaacttagagacaggagggagcctcttggcagggcaaagnctgccctgggcaagtgttcttttactttactaaaccttaccttctggtnctctgtctggaaatttaagcgncgncccctggtgggggagagaggaaggggcaagaaaagggggtctgcgngaggagaataaagtg

SEQ ID NO: 179856 - DNA, 386 bp, Homo Sapiens
  misc_feature (288)..(288): n is a, c, g, or t
  misc_feature (364)..(364): n is a, c, g, or t
cctaaccctaaggaaaattccccaggctgtgatctaccctagagaaggctcgctccctgcctactggctcacaaatgaggaccagtgagccatgtccttgttccttgtttgagactgggctgcaggcccaggaagactttccttcacccaccatccccctaacctcggcagggcttctgtcctgtggagttccctgggacaccttgggtctggctcttgtgccaagggctgaaaggaggtaccctcttgggcagatggggggcatcacttgcttcctttgggaagctnctaaggttgctgcagtcaccttcctcatctttgcaggtgctgaaccaacatcatcagtttctattcttaatcaggnccctttcccaattttccatttc

SEQ ID NO: 179857 - DNA, 430 bp, Homo Sapiens
  misc_feature (240)..(240): n is a, c, g, or t
  misc_feature (356)..(356): n is a, c, g, or t
  misc_feature (402)..(402): n is a, c, g, or t
gtaccttggccgtcccgttccacaacaaggtcccttctgcggtctcaaaggcttataagcaagggcgggggcagagggctaaagaagggagtttttgcggcccgagtgggtaatgcgtggaggactcccccaactcgtctctcaaggaaaaggggcttcagaaagggagagagttcttccccctctcctgcctgggtgtcgctccaccagcctcctggccgtcgcgccccctcctcactncgccacccccgggtgtgcctccttccctgcgtctcacacagcccctttcttgtccgcaaagactgaggagcggggagggcgggcctctggacaccggaacaggagccgtgcgcgtnccggttttcagcagggaaggcttaggcgggctcccaacctccgggntttccggtgccttttcccgtttcgttcg

SEQ ID NO: 179858 - DNA, 706 bp, Homo Sapiens
  misc_feature (20)..(20): n is a, c, g, or t
  misc_feature (30)..(30): n is a, c, g, or t
  misc_feature (43)..(43): n is a, c, g, or t
  misc_feature (49)..(49): n is a, c, g, or t
  misc_feature (76)..(76): n is a, c, g, or t
  misc_feature (90)..(90): n is a, c, g, or t
  misc_feature (111)..(111): n is a, c, g, or t
  misc_feature (467)..(488): n is a, c, g, or t
  misc_feature (494)..(494): n is a, c, g, or t
  misc_feature (568)..(568): n is a, c, g, or t
  misc_feature (583)..(583): n is a, c, g, or t
ttcccccccttggggaccanttaattccantggttcctttaantcggangctccttccccctaaaacatctttaangatctccccacccnacaggctcttttcccaagaanttgaaaactgtgttccttcttgcccatcttcacgacatccccctgcccctcttacataagatatttcaacatcaaggtggaagcaggaacttagctgagttttgcaacagagaagcgtattctaggcctacatttatagaaagtgggggtggggaagagccatgagtccacgggggtatatccacaccgagggttgtcacactgggtgggcaagtgagatgggaacgggtgtgtgagtcctgggaacttcagaaacatcaggaaattaccgacatcattggggaaacccttagaaaaatctataaagacacactgtctgcacatgggaggcgctcacttccccctaatgtagactnnnnnnnnnnnnnnnnnnnnnngaaagnaaacccataaacccacattaaccaaacacacacacacatgacaaactctaagtctccagacagacaccctcaantaggcacttggtgtnttcagctctggggctggagagatctggggctttggcctccaaaggcaggagctgctgtccccagagaggagacaacagcttctggaggctctggggactcattggatgggtactggctaggta

SEQ ID NO: 179859 - DNA, 382 bp, Homo Sapiens
tggattaagcctggagtccatggagaattattaccttatattttaacattttggggcctaatatttttttcctgacaagtatcaatgaaagcagaagaaaatcccactcccaatacttagttttcaagacacaatccctaaatatttaaaccccttgtagctggcctataatatatatatattagatgttatatacagtagacttaccaagtcaatagtttaagcaatcaagccacttcactgttcagtttctttacatcatgaaatgaatacttggtattaacctctcaaatttcaagaaaatgtagaataactacagatgtatataattagcatttaactgtccacaaatactttaggaaatcctatcatagtgtttccc

SEQ ID NO: 179860 - DNA, 458 bp, Homo Sapiens
tttaccataatttaattttggaaagacctaggcaaagtatacatcatttagactcaatgggagaaatacttttatggaagataaattcctaacgggcacagccaaagtaacaaaaatgtacatttacatacaactgatccaaacaggaagtaaaagcattatgaaaaaagaacatgatgcaaatcatttccccctgacaaaaggagggatctgcgtgaattacagcaaatcaaatgatttccacattataaaagcaagccatggcttctacagatattttaattccttgggaggaagtttcacctcatctttttttccccagtaaagtaacaatcactgtaggaatttttaagtgcacaaactgcaaaataagagtaactacctctgccatgttcaagcacttgggcaattcagtcacttttagggttgtatcatttaaaaaaggggcaacatttatg

SEQ ID NO: 179861 - DNA, 275 bp, Homo Sapiens
  misc_feature (1)..(1): n is a, c, g, or t
  misc_feature (167)..(176): n is a, c, g, or t
ntgaggcaccatgcctggcctaaagtgtcagtaattctgatttcggttttctcttttagaagttttgatttccacagacttacaaagctaaggaagttttatgtccttgctctggctacactgcagtgttactgaatatcacctgcacaacctttactgcttgcagnnnnnnnnnncctgttgctttgtacatgatccgttattcaaatgggccttattagggatttcaataaaggtgaaatgttaaatacaaaatcacttgtctatttaaattt

SEQ ID NO: 179862 - DNA, 425 bp, Homo Sapiens
  misc_feature (44)..(44): n is a, c, g, or t
aaacagtgaatgccttaagcaaaaatccccaagtggggaacccnacttggggtcccctaaagaggttccttaggatgaaaatggcatatccttcttgggacccatcagggttgaacctagttgaactaaaaagaaggaaaccagaagtccagcatgagcatgaatggtttgctctatctttcttggttaagagacctaaccactgaactgctcagaccgacccactgtggtcaaggcagcggcctctgggctttcctatgcgtttgtcactcttgttctgtgtctcttgcccctttcacactgaggggtctcgccccttggaggatggcgtgtgattttgccacgaggtaaaatattcaacaaatgaaatgatcacaaattttgatatgtgctatacaggaaataaagtgttatgattgagaata

SEQ ID NO: 179863 - DNA, 1173 bp, Homo Sapiens
  misc_feature (590)..(590): n is a, c, g, or t
  misc_feature (854)..(854): n is a, c, g, or t
  misc_feature (936)..(936): n is a, c, g, or t
gcagaaggcaaacccatcaacaaaaattgtcccttaaacaaaaattaaaatcctcaatccagctatgttatattgaaaaaatagagcctgagggatctttactagttataaagatacagaactctttcaaaaccttttgaaattaacctctcactataccagtataattgagttttcagtggggcagtcattatccaggtaatccaagatattttaaaatctgtcacgtagaacttggatgtacctgcccccaatccatgaaccaagaccattgaattcttggttgagggaaacaaacatgaccctaaatcttgactacagtcaggaaaggaatcatttctatttctcctccatgggagaaaatagataagagtagaaactgcagggaaaattatttgcataacaattcctctactaacaatcagctccttcctggagactgcccagctaaagcaatatgcatttaaatacagtcttccatttgcaagggaaaagtctcttgtaatccgaatctctttttgctttcgaactgctagtcaagtgcgtccacgagctgtttactaggggatccctcatctgtccctccgggncctgggtgctgcctcttacctgacactcccttgggctccctgttaacctcttcagagggccctcgctgccagctcttgtatcaggacccagaggaaggggccagaggtcgttgactggctgtgtgttgggattgcagtctgtgccacgtgtttgtgctgtggtgtgtccccctctgtccaggcactgagataccagcgaggaggctccagagggcactctgcttgttattagagattacctcctgagaaaaaagcttccgcttnggagcagaggggctgaattagcagaaggttgcaactcccccaacctttagatgttcttaagtctttccattggatctcattnggacccttccatggtgtgatcgtctgactggtgttatcaccgtgggctccctgactgggagttgatcgcctttcccagggtgctacacccttttccagctggatgagaatttgagtgctctgatccctttacagagctttccctgattcattctgaagggagccccattcccggggaaatatttcctagaaaatttccaaatcccttaaggagaccattgataaaacctgtaggaaa

SEQ ID NO: 179864 - DNA, 258 bp, Homo Sapiens
aataacctagaacttccaataaatgaacataaaaaatacaagatcattataacaatctataactcatgaaatggcatagtctaatatttgcaaagttatgcctcattgaggtgcaattatgtaccacatcctaactctattaaaaccagaatgtagagactttgattaaagggtagacactgccaccttctgaatgcaaaaaagcactctacaggtttacactgtcagaccttaatccttagtaggaaatgtggtctt

SEQ ID NO: 179865 - DNA, 630 bp, Homo Sapiens
  misc_feature (593)..(593): n is a, c, g, or t
  misc_feature (596)..(596): n is a, c, g, or t
gtggctaactgcaagaattaaatcttctatctgagagtaataatttatgatgactcagtggtgccagagtaaagtttctaaaataacattcctctcacttgtaccccactaaaagtattagtctacacattacattgaagttaaacacaaaattatcagtgttttagaaacatgagtccggactgtgtaagtaaaagtacaaacattatttccaccataaagtatgtattgaaatcaagttgtctctgtgtacagaatacatacttattcccatttttaagcatttgcttctgttttccctacctaggaatgtccagatgtttttccagttgatctccccatttgtcaaagttgacctcaagataacatttttcattaaagcatctgagatctaagaacacaattattattctaacaatgattattagctcattcacttattttgataactaatgaacacagctattatactactttctcgttattttgtgtgcatgcctcatttccctgacttaaacctcactgagagcgcaaaatgcagctttatactttttactttcaattgcctagcacaatagtgagtacatttgaantgnatatataataaatattgcaaaataaaatccttct

SEQ ID NO: 179866 - DNA, 485 bp, Homo Sapiens
  misc_feature (374)..(374): n is a, c, g, or t
agttcggcacaggacggccactagcctgaatcggccaaatcgcctagctcagcgtcgctatcccacccagccatgctgagaataaacacacgtcccaggctcatctcccaggactgaaactttcttgctctctttttctcaatctcccagcccctctctaccatattgggaccctcaagaggtttgtgctagcccgatgcctccaccgggcacttagaaggcaagaggacaggatctctcaagacacagcacaattcagtctcttaagattagcttcacaatgatggaaattatttcatcaggtggaaagtctgggtctaatagcagactgcacatgagcagagtgacatggtggtgggcacttatggttggtnggcttgagagccttggggaaattaggggccctaacagctagaattcaaagatgattaccgcagggccctgttaggcaaggaattgggaagcagggggaggggcaggggttc

SEQ ID NO: 179867 - DNA, 458 bp, Homo Sapiens
  misc_feature (330)..(330): n is a, c, g, or t
  misc_feature (370)..(370): n is a, c, g, or t
  misc_feature (416)..(416): n is a, c, g, or t
gcaattataacattgctcttcctttcacgcaccacatgatttagcaagtacttcatattggctccaccattaacatggtcaatggcttctggatactcacagttcaggcacagtttctcctgaagattttttacctctcccatctttaagaaattgtctggatgtccatgaaagatgctgacacttgtattaattcattaaaaaacaccaccccctccctgaaataaactaaaaagtaatgaattcatagaaaaaaatttcaccaagattgaaactagagaatatacctaggacttgcacttttgagctttgagaaatgtgtacctattncaccattccaacgtgaaggaagctctgcagtagggaaaantaatttaacacacttattagtctactgcccatgtaagggtcagctncggcttaagggggcaaaggtggggtgacatcgttatggttct

SEQ ID NO: 179868 - DNA, 401 bp, Homo Sapiens
  misc_feature (89)..(89): n is a, c, g, or t
  misc_feature (343)..(343): n is a, c, g, or t
agggaaccctcttccaggagctctaagggtacttgggaatcaattgtgtccattctgaggtctctccagtgggagggcggcactcctcntccctgggttcaggctgtgcttctggaagcatcgaaatgggatgtctgagccttgaggaaaagcagcagggttaccattaaagtcaagaggggcagctcaggatgctaccagggagcacatcgtttctggtgcctcatctaaaggtaaaacctcccctgacatttcaccagccggatgtcccaaatccctttagccagattgctttttgttaaccaaagctgtgggacagaaaagccttcctttaagtgagctnagggggacagggaaatccaattcagattgaccttttgtgttttcgtaattcggggttt

SEQ ID NO: 179869 - DNA, 358 bp, Homo Sapiens
ggaactgggaggaccatgaaagcactactcagcaatatagagaaatacaagcccaacatgattaaggtagccagtttcttggtgaagagaacatccagaagtgacggctttagacctgactatgctggatttgagattccaaacttatttgtggtgggatatgccttagattacaatgaatacttcagagatctgaatcacatatgcgtcatcaatgagcacggtaaagaaaaatatcgagtctaaagacatgaattctcaccactaaagtcccagataggcatcatatttacgcctgtacttggggaagccagctgtcaagtttgtccccccagggcatcttcacttcagcagggat

SEQ ID NO: 179870 - DNA, 407 bp, Homo Sapiens
  misc_feature (11)..(11): n is a, c, g, or t
  misc_feature (88)..(88): n is a, c, g, or t
tgcctgaaaanggctccttcaaacttttctttaagcgacatcctctgtgccccaattagaaaaagagttgacaggatggtagtcccgnccttaaacagcacagactcaaatctggaaaagagtggcagaaacccctctcccccaacaatgtatccccgaaaataaactgccaagtgcaagagggacaatcttcagaataaataatattctgaaggactggacaaaacagactatttttagacaaagaacacaccaaatactccgaaatttcaggataaccatacatcaagtacttcgtgcaagtaatatttttaccagttaaaagtcattatgaaacacacattcttttaactgaatttcatatgttatataaaacttgaaaagtgtggcacatttctactattaac

SEQ ID NO: 179871 - DNA, 459 bp, Homo Sapiens
  misc_feature (424)..(424): n is a, c, g, or t
agccaccttcaatgcctgccaccctgcccgaggatgtacagagccgtgcccacacatttccttgcaacttgatcaaatttcttaaagcaaacaacaaaaatgtacatttctgtttttccttttaataaacaggtgtactctttatcatggttggtatgatggaccattctttggggcggaggattgattatgttactctctttaaaatctgttcccatattgaacaggcagattggaaaagctatggttcgatttctcagaagaaatgtttaggtcttagtcaatagttttaactatgccatttgtttaaatgagtgcatttgcttcgagggtagtgttcttactaaaagttaggaacagagacctagtggtgtgtccaaggccgtgtcactttcccctttcagcacaccccagcttctgaccncagagcccgggagctgcgtgggacagtgttggggt

SEQ ID NO: 179872 - DNA, 574 bp, Homo Sapiens
  misc_feature (330)..(330): n is a, c, g, or t
  misc_feature (512)..(512): n is a, c, g, or t
  misc_feature (526)..(526): n is a, c, g, or t
gggacattccatctccatggtgcactctgaggggcactgtcaactagagattggccccatccaggtgggaggaacccctttggagtggtgagtatccaatctgctgtgcatttgacaggatctctgaatggctaggtaatggatcccaagcaggctcacaaatttaaatgagggctttgtgtgcagaaaagaggaataagtacagattatttcccctacccactagatttttggggagagtcacccatggaatgttgacaattacttaaaatattttaagctcccttgcctgaattcctgtcctgtccctgaggaatcagatggtcatancagccataggcacccacccgaaatttccctaggagttggagtaatgctagaatttgaagaccttctgagtaaagggcttctgctgccttcttcagaggcaggagaattttgcactggttgtgttaaatgtataaaaagctatatgttcaccagtttactcatttccaatgtgtagatgaatnaaatgtagtgtacnaattatttgaaaatcccagaaggaaggtacttttcaaatacagtattt

SEQ ID NO: 179873 - DNA, 461 bp, Homo Sapiens
  misc_feature (130)..(130): n is a, c, g, or t
ggagaagtttagcaccctccccctaaaggcaggaagccctcctatttaattctctcccttaaaaatagagactacgtaaaataccctgtaataataagggatcttttgctgtttctgacaactttttggntcgcagtcaaaaaagctgttctgaatgtgtcaatttttgcctatctagcttgatgttcattctattctttaaaaacttttatatacaataactcagatcaccccatcaatccatgtctatgttgttcctattttatcatgaggaaactttacattttaagtcagattcacagtaactggtagaaaagtttcttaagctaaaaactgcaatcatgagtgtacaacagttgtgtgtgtgcacactcaattttcccttcatttttaacatctgattcagtggcaatggctgaaaaccttccacaaaaagcatgcttgggagaatatatctaacc

SEQ ID NO: 179874 - DNA, 443 bp, Homo Sapiens
  misc_feature (383)..(383): n is a, c, g, or t
  misc_feature (417)..(417): n is a, c, g, or t
ggccactccccccccatcagcgttcgtgctgtcagccttgcagccttctcctactcattccagctccaatacccagcggctgccagaccgagtgaccggcgtggacacagaccctcacttcatcatccacgtgccccagaaagaggacaccctgtgcttcaacatcaatgaggagcctggtgttatcctgagcctggtacaggaaccccaacacaggcttctcagtgaatggacagctcattgggcaacaaggccagggagccctggggcaggcatgacggcacgtactttcgggcggctggggaattcgcaaaccctgccacggacttttcagttgggaagtgactccttcagaacatttacggttgaaccccggtttggtngggcctgtgtttttctgggagggaccaagctgtnttgcggcaagaaggggttgttggtga

SEQ ID NO: 179875 - DNA, 410 bp, Homo Sapiens
  misc_feature (28)..(28): n is a, c, g, or t
  misc_feature (33)..(33): n is a, c, g, or t
  misc_feature (38)..(38): n is a, c, g, or t
  misc_feature (172)..(172): n is a, c, g, or t
  misc_feature (231)..(231): n is a, c, g, or t
gcccaaaaaaaagccagaccggttaaantgccngattnaaacagcctcgggcacagagggaaggtggaggaaaagtctcttgggtaactgcccaaacttcaccctcatacaatgggccccagtaaaacagtgggccttaataagcacattcctttccctcccaggtgcactnaaatagggaagctaaaagcagacttggggggtatgcctacagctgcagaaaaatgtatnaaagcaaacacaccactctccctcccatataagcacaacaaaaaaacacagaagcagtccaagcctctaagaaactctcccaccctaaatccttaaacactcttagtctgtagaaaagactctaacctaattcagccagcagcccctctcaggtgtgttttctctaaaataaacctgtc

SEQ ID NO: 179876 - DNA, 390 bp, Homo Sapiens
  misc_feature (173)..(173): n is a, c, g, or t
  misc_feature (326)..(326): n is a, c, g, or t
  misc_feature (380)..(380): n is a, c, g, or t
agggctgagcaacacctctctgccctccctccctttgtcccatctcccagcgacttccaatattcatgtttctgagaattgtgtccctcttcaggttccctcttggtgtcctaacctggtattagtaatgtgtcattcaggtgaattttcagtctgaggctctgagaactggntactctcagtgtgttctggtcatcttgtggcttagttgtagaagcaggtgtgtctcttgcctctgcttgcctcctactgcacactcagcacccaggactggaatcaccgactactgaatctcctacatgtattgctgctacttcaagctcctncacttgaaaccttatgattttcccaaggggagatgggacagtgtcatctaaatnttccgaatgt

SEQ ID NO: 179877 - DNA, 468 bp, Homo Sapiens
  misc_feature (55)..(55): n is a, c, g, or t
  misc_feature (61)..(61): n is a, c, g, or t
  misc_feature (66)..(66): n is a, c, g, or t
  misc_feature (77)..(77): n is a, c, g, or t
  misc_feature (88)..(88): n is a, c, g, or t
  misc_feature (203)..(203): n is a, c, g, or t
ttgaaaggttaacccggaacgggaaaatcccagtttggggtgggaatccccgaanccgccntgccngacattggagnccacggatganggaaggtacaaagccccttaagaccaaaactcaaacgggcccgttcctttcctaaggtgtcggtatgtggggagtggtacaaaatggtcctgatgctccttcaaaaacattcacnttttacaacgtcaaggaattaagcataaaaaagatgggttaaaagctttggtttctagtaaaggttagtgtgtgtggctcttttaagaagctgttttgctaaattatttttacttggaatgtttcaaacagatttcaggctgcaaacttgttttataatcgtttgcttctccaagtgaagctcagaaatacctaaaaatagctgtaacgttcgcgttaggaaagatggtgtttattccagtttgcatttttatggtgaaataaaa

SEQ ID NO: 179878 - DNA, 460 bp, Homo Sapiens
  misc_feature (45)..(45): n is a, c, g, or t
  misc_feature (102)..(102): n is a, c, g, or t
ggggaagaatgccccggccccccgaagggtgcgccacacgggagncggcggagcacaaggccaagtgagtttgccactgtcagcccccagacccgtaagctnggctacactgatgtttttctttactaaggatactattcaaaaattaacattttcacctcagtaagtttttagaacatcaaaatgttttctgagccccaagtggctaggttgtaaaagttttataataatttgcaattaaaatacatgatacatattaatccattaaagactagtgggaatgtatcagccagagtagcaagtaatttttgttttataaatcatagtatctgtcatcttgcagtattaccaatgctgttgtaaattgaatttaaagtggtattaaaaaaaactgttaaacaatttttatctgtttgtatatcttactatagattatgtacaagtaacatctaaataaaat

SEQ ID NO: 179879 - DNA, 429 bp, Homo Sapiens
ggaagcctcatgtactgttgtcttctaggtaaccaccctgaagagaaggggtagcatcaggaaccgcaggaaccaagcagcctttggtccagtgctgctccttggaacagttgagtgtggcctcaaaccattctcctgggtagctcagtcataaaacaccgaatgcctgcctcaaaatagcctctgagggaagggagctgttgacaagtgaagccctcaggttgtgtgggattccagcaggttattacagcttgtggggggagggagggtccattccaccagctttgaatcccagggtcccctcagcttcactgggccacagtgtctgtcccaggaagaagcaaatggacagtgaggatgatggagagactacagctgccttgtctaaaacctgggatcttaaaagtgttattttggcttttatttttt

SEQ ID NO: 179880 - DNA, 499 bp, Homo Sapiens
  misc_feature (76)..(76): n is a, c, g, or t
  misc_feature (396)..(396): n is a, c, g, or t
  misc_feature (463)..(463): n is a, c, g, or t
  misc_feature (469)..(469): n is a, c, g, or t
gcaggactcaggtgcaatgtgccagccacttggaactgctaactgagcctccagatggtagtgaatggtctctttnccttcaggtggatgaggaagtcatttaggaaatgttcaaataaccaatatgtggaaatggacacagggatcttctgaagttgctttgaatcaaaaggcaggcagtgctggttcctctgcctgtgtccccaccactccccagctctgtcatgcaggcctgtcctccccaaccccagctggacgtgcctcccaggcctgctgtggttctgacacacaggatcccagggcaaggcaccactttcctcacatgaatggaggagcagcaagtcataaccactcccttgggtatacaatttgctgtgtagtgaagtggaaccaggntcaggctgctggtcccaacctcagagccccaccgcagcccagtagggatgcagcacggcccagaggntccatntggggccccagatgggcaattgcaccattt

SEQ ID NO: 179881 - DNA, 438 bp, Homo Sapiens
  misc_feature (27)..(27): n is a, c, g, or t
  misc_feature (34)..(34): n is a, c, g, or t
  misc_feature (40)..(40): n is a, c, g, or t
  misc_feature (48)..(48): n is a, c, g, or t
cttagctggtgtcgtgtgtgtgtgtancctgggncctggnaccacctnagctgctctaatccaggcagatctagacacattccaaggtgatacctgggaatggggcaatgaagcagttttgttccactcattcatcatatgtgaacggagcaaacaaatcaaccaaggccctgccttcatgggagtgtgtgtcccaggaccgggctgagcgataaaggagccacacagttcatccgaaggtttcatgctgtggaggaatataacacggggcacatccaagaggggggctggagctccgattttctaaatatcaggactgcttcactgagaaggttgatgtttgagcagataacccaaagtgagagaaggatccacacagtcacctggaaggataaacccaggtcaaagggaatgacaaaaatgtggaggttgcagtta

SEQ ID NO: 179882 - DNA, 275 bp, Homo Sapiens
  misc_feature (30)..(30): n is a, c, g, or t
atatgtgctgggtctctagagaagtttttntttgttacaatactgctgctttgagcaattttgtttctcttcattgtctgttagggaaatcacccagctttggcatcttaacaacaaacagtggatgggtaatttttatttctgatacgcatctttagagtcaaatatatcttttccctgtactcctcatgtacaaccaaagaacatacattatgaaaattgtattataatatctggaaacacaacattttcctctggcaggtgacttttgtacg

SEQ ID NO: 179883 - DNA, 586 bp, Homo Sapiens
ggctctgtacccaacggcagacccctctgaaggccaggagcccgcgggaggagatcctgtagccacctggtctgtctcctcagggcagggcaagcacactgcccggccagtcctcctacctcccgagtctgcgggcagctgctgtcccagcatctgctggtcatttcgccctgacagtcccaaccagaacccctgggacttgaatccagagacgtcctccaggaacccctcaacgaagctgtgaatgaagaggtttcctctttaaacctgtctggtgggcccccagatatcctcacctcagggcctcctttttttgcaaactcctcccctcccccgagggcagacccagccagctgctaaagctctgcagcttccccagtgggacagtgttcattgtggcccagagtgcttgcaaggtgaggcctgctgtgcttgcccgcaaaactgagtgcaaaaccaagcactgtgggcatggtgtttccctctctggggtagagtacgccctctcgctgggcaaagaggaagtggcacccctcccctcaccacagatgctgagatggtagcatagaaatgatggccgggcgcg

SEQ ID NO: 179884 - DNA, 208 bp, Homo Sapiens
gttttactgcctattgagacaaccaggtgcataattgattgccctttggccataaaaatgcagtgtcatggatcttagagctaaaaaggactgtaaaaattacccagaacagcgtcctcagacttaaccttctgcaagttatgtctgtatataagaagattctaattgctaactgtttatacttttctgaataaaatagttgtttcta

SEQ ID NO: 179885 - DNA, 502 bp, Homo Sapiens
  misc_feature (370)..(370): n is a, c, g, or t
  misc_feature (453)..(453): n is a, c, g, or t
  misc_feature (491)..(491): n is a, c, g, or t
ggcccaagaattcggcacgaggatgtattcatcctattgaaacaaaatatgacatatacctacattatagattatcactaaggatttataatcatctcttcatctaaaataaaaaattaactggagcctgttgaatgtgaaataaacaaacagtaagtaaaaaatgctcctgccttgttcaggcagcagatatacgcaccgatataactttttgaatgattaaccgcggcattatttggactctccgttttagggactggaaatcccagcctggttgaatgtagttcccgataaggatctcctgaaatctctaaaggtatgacacatactgtatagtccaatctgaagtggggagcgggccgcaagcttnattccctttagtggaggggttaattttaggcttgggcactgggccgttcgtttttacaacgtcgtggactgggggaaaacccnggggcgttaccccaacttaattcggccttgccggcacntcccccttttc

SEQ ID NO: 179886 - DNA, 477 bp, Homo Sapiens
  misc_feature (29)..(29): n is a, c, g, or t
  misc_feature (57)..(57): n is a, c, g, or t
  misc_feature (70)..(70): n is a, c, g, or t
tggtagtcagttaattgttaaaactcccnaatggggtttctgttgttaactgaaagnaaaaaaacaaatnattcccaagagtaacaaaaaatgctggacctccagagaggccccagtgccactaatgtgtttcctatgttaatattagcaacagaaaccttcctgacttgcccaggagagcccccgccgggcagccctggtcactgctagatcttgagagcacagatttcagtatagtattcatgtgaaaccagcccttcatgtaaaaagttttggtgtgtaaaaaaaggcaacttaagcgaggctaattgcccttaccagcattgttgccatgaaattcctttatacagcaagttcttctattcatactgattccacttatgtgcagcacatgagagctgccactagtctacccagcacctttgtgcaaattagaatacacctgcccttcctcgggctgataaagccacacgacac

SEQ ID NO: 179887 - DNA, 222 bp, Homo Sapiens
  misc_feature (14)..(14): n is a, c, g, or t
  misc_feature (51)..(51): n is a, c, g, or t
aattcggaacgagngggagttaagagtagcaagttctagagaagaggctgngtgctgtggccagggtgagagctgctctcgaaaatgtgacccagatcctcacaaccacctaatcaggctgaggtgtcttaagccttttgctcacaaaacctggcacaatggctaattcccagagtgtgaaacttcctaagtataaatggttgtctgtttttgtaacttaaa

SEQ ID NO: 179888 - DNA, 585 bp, Homo Sapiens
  misc_feature (257)..(278): n is a, c, g, or t
cgatgaatccataggatagagaaaaatctgcttgttctattctgagagttctctgagatatcccttcactctgcttggcatttggccattgatattcaacaggtcactgaccaagcttttctaaatttttcagagagagttacttaccaataaggtctgttcttaaacctacctagttgattttcatatctttccataaagtgtcatgattctatcatagaccctgacttaacattgtaaggactatgagtcctccnnnnnnnnnnnnnnnnnnnnnnagcaaattaggacttcggcaggttttcctctcctaaactcattctttcctccacaggattggctttgtccatctcctgctttccatttcaagtgcattaaacaaaacctcaaagggccggggaaggtgagggcaggccaggagtctgtgttctgtgttggagtgttcaagctatttgttaagaaggtctgcaacaggcctttggtgtggctctgccagagactgttctgaacactttgcttgagatccgtgccctgtaaaatggatatgatgttttactgatgtctgtaatacatttgtaaacttcc

SEQ ID NO: 179889 - DNA, 253 bp, Homo Sapiens
  misc_feature (58)..(58): n is a, c, g, or t
ggacctccctccagaatttcctccagatgggggcagtgcaggggaggggttatttgtnttccctgccatggagtgggaatccccagccgaggccctaggccctcagcagggaagggatccccggggaggcaggtcccaggagcagaccctgcccccagcccccacagacacaccccaatctgaaagccatgcgtggtcggtgtatataggaaccatgtacagagcccagagaagccccctacatccccccggg

SEQ ID NO: 179890 - DNA, 436 bp, Homo Sapiens
  misc_feature (23)..(23): n is a, c, g, or t
  misc_feature (31)..(31): n is a, c, g, or t
  misc_feature (71)..(71): n is a, c, g, or t
aagaagaggcccctagtggtcanccttaatncccagactacctctcccactccctcccaagagtttgaagnccccatagcctgatgaaagaatttacatatgggctcccccctgcctttccccactgaaaatcctattcctcatattttgggaaggagcatatgtcctttaactttcaatggtaaacaatctaggatagtgtttaaaggcatggattttggagtcacatatagttggtttgaatttctagcttcactacttaccagctgggtttgaccttggttgatttacttaacctctctgagcctcagtttcctcaactataataacatgggtggagggaggcatgttgaaaatatctacctcagggttgttggaataactgaaacaatgtttgtaaagctttagcacagtgcctggcaagcacttaataaat

SEQ ID NO: 179891 - DNA, 445 bp, Homo Sapiens
  misc_feature (31)..(31): n is a, c, g, or t
  misc_feature (123)..(123): n is a, c, g, or t
  misc_feature (369)..(369): n is a, c, g, or t
tgattcccagttcacttgtccctttaaattngtcccttcctatgttagcactgcccccaggttctacctgttggggatgtttctcagtctcagtgtctggaggggagttcttagcccatgaanaacactgtcccctgacccaggcccactcaacagccgacagtaagtcccagctgaggctgcccagaatggggcaggttttttggaaggtgtccccatcccttctgccccgagcatggtgagctgcaagtctctggaaggttcaccttagccagggcagcttcacacatgggaggatgcagtgatattaaacagtcagcctgcagacatatcaagtaaacaaattattattttaaaaggtattttttnggccagggacagtgggctcatggctgttagttccccaggcattttgggaagggccaaggcagggagggttcaactt

SEQ ID NO: 179892 - DNA, 440 bp, Homo Sapiens
cacaaacacacacacgatgataagcagactcactctaggtcaggcaggggttggtcgaagtcatggaactcgtcggggagggtgatggcgttgtaggcagcctctctgttctcctctggcagatctaccacacctgaaaaaacacaagaacaagaagaaccgtcagcatactggttggctaggcaaggatgtttctgcaggtgacattagggctgggttttgcccaggtacctcacaattcaatttgattctttaggtcttgattcgatattgatccaattgcttcgatatcgattcaataatacgtgcacatgacagaaatacctaaatattatttagaattaaccattttcaaaatgaatttaaccatttcattgtgctttaactagcaaaaagggaatacaccattgtatactattgttcctgagctaaacttgcag

SEQ ID NO: 179893 - DNA, 599 bp, Homo Sapiens
  misc_feature (27)..(27): n is a, c, g, or t
  misc_feature (39)..(39): n is a, c, g, or t
  misc_feature (226)..(226): n is a, c, g, or t
  misc_feature (400)..(400): n is a, c, g, or t
  misc_feature (509)..(521): n is a, c, g, or t
attattgaccagttgtgtgccaaaagncttattcctcgnattaaaatggagcacttaaaaatattgctaaaaagcaaatgcctacacactggtctttgcagcaaataagggtatttatacttttaaaatattttaagtccataattggattaatatacacaccttcttatgtataaggagttcagatcatataaacactgtacaatccaaaaaaccccctactgangaataaaactaaataggccttatggataagaaatacagatattccgcatgtatttacaaatatcatagacacacaagtttggtcaaatactgtaaagaaagaagaagtggtttcacattataatggaccaaaatgtttatctaccttgactcaaagtcaaataaaaatataaanctcagtatgtaactcctgcagtttaagacatcatgacagtatacagatagatagaaactgttgaccaaattatacagcaaatgttttgtaggttaagtgtaggtctttnnnnnnnnnnnnngatcattcataggattcatagcaacaatgataaacaatgtcctgatttgtggtgttcatgtgggtgcctaattcatca

SEQ ID NO: 179894 - DNA, 477 bp, Homo Sapiens
  misc_feature (18)..(18): n is a, c, g, or t
  misc_feature (29)..(29): n is a, c, g, or t
  misc_feature (33)..(33): n is a, c, g, or t
  misc_feature (41)..(41): n is a, c, g, or t
  misc_feature (46)..(46): n is a, c, g, or t
  misc_feature (58)..(58): n is a, c, g, or t
  misc_feature (61)..(61): n is a, c, g, or t
  misc_feature (67)..(67): n is a, c, g, or t
  misc_feature (78)..(78): n is a, c, g, or t
  misc_feature (83)..(83): n is a, c, g, or t
  misc_feature (89)..(89): n is a, c, g, or t
  misc_feature (93)..(93): n is a, c, g, or t
  misc_feature (100)..(100): n is a, c, g, or t
  misc_feature (104)..(104): n is a, c, g, or t
  misc_feature (117)..(117): n is a, c, g, or t
  misc_feature (129)..(129): n is a, c, g, or t
  misc_feature (134)..(134): n is a, c, g, or t
  misc_feature (156)..(156): n is a, c, g, or t
  misc_feature (162)..(162): n is a, c, g, or t
  misc_feature (167)..(167): n is a, c, g, or t
  misc_feature (170)..(170): n is a, c, g, or t
  misc_feature (177)..(177): n is a, c, g, or t
  misc_feature (183)..(183): n is a, c, g, or t
  misc_feature (186)..(186): n is a, c, g, or t
  misc_feature (191)..(191): n is a, c, g, or t
  misc_feature (271)..(271): n is a, c, g, or t
tgcaccattgcagcgggnatccgcttggntagntagcattnccggnaaaggtgaaggnagnatgagnctacgatccgncaggnccaagnctgncaacggnctgncaggagttctggnattagctcaggnccagncgtcagtagcagtcgtaagggnccgggncgggncgncaacggncccggnagntctgncttccgccttctatgccgaatcggactatgaatgccttcgccccctaccccgtcccagaaattcggagggtggccctggnactcgttggtgctgcagatgaagagcatgagtgtgggggacccccgaaccttccccttcatcgagcccccaccaccagaccagcctgggaaaccgccatcctctacctccgggaaccagggggccctgggacagctcagaggccctcacacccattgggttccctgctagcccagctgcctgtggaacgttgtgattgggaagatg

SEQ ID NO: 179895 - DNA, 497 bp, Homo Sapiens
  misc_feature (45)..(45): n is a, c, g, or t
  misc_feature (50)..(50): n is a, c, g, or t
  misc_feature (190)..(190): n is a, c, g, or t
  misc_feature (224)..(224): n is a, c, g, or t
  misc_feature (466)..(466): n is a, c, g, or t
actttactcatgtatttgtagtagctgcatttgtcattaataagnagagnacataatcctcctgttatactcagtatcattatatgctagtcaacctgattcactaacacacagtatgtaacaaccaaaatatacctaaaaggtatagtctctaggagttttattaatagtaaaggtaaaatctctcagntttcctacctctagaaagaggccatctcactagnaataggatattatgcatactgaggctagaccagaagagtctggaacaaaataaacacagcctttataatcaacttgaatactggtgttaggctgagaactctgtaagtccctttaaaaattatgtatcttttggttcaaggattaagaagcataatgacaacaaaaaaagcaggcaggaatttatgaataaggtgttgtttattattaaaacaataatttggtaaattcctattaaggtccngtggctataattactgggtattaaatataac

SEQ ID NO: 179896 - DNA, 495 bp, Homo Sapiens
  misc_feature (22)..(22): n is a, c, g, or t
  misc_feature (47)..(47): n is a, c, g, or t
aaaagggtgtgaacgtctaaanggtgttataacccgtgggccccctnactgggagttgaaagcctttccccgggtgctaaacccttttccaagctggatgaaaaatttgaagtgctctggatcccctctacagagcttcccctgactcattctgaaggagccccattccctgggaaatattcccctagaaacttccaaatcccctaagcagacccactgataaaaccatgtagaaaatttgttattttgcaacctcgctggactctcagtctctgagcagtgaatgattcagtgttaaatgtgatgaatactgtattttgtattgtttcaattgcatctcccagataatgtgaaaatggtccaggagaaggccaattcctatacgcagcgtgctttaaaaaataaataagaaacaactctttgagaaacaacaatttctactttgaagtcataccaatgaaaaaatgtatatgcacttataattttcctaataaa

SEQ ID NO: 179897 - DNA, 401 bp, Homo Sapiens
  misc_feature (376)..(376): n is a, c, g, or t
atggcccttctgttctcaggatggagagaacacagaagctactatccatgtcaggatttattctatttatatcttattacaataaaattagtggcactttattcataaatattcatgagcctgttaattgttagttgtcttcctgtagctgaatcaacaagttattttcaactcaattttatgacttgcgaaaaagcttttgccctgttgtgtaccataacatttaaaagaatggaaaatgactgaaatccaatttagattatttttagagtatttttccagcaaattcaatttattctgaaatttaaatccagatcttttctaatatgggtattacaatgaaaagaattaaagaggaagatttgaatttttcagntttcattttcaaaaactatttaccc

SEQ ID NO: 179898 - DNA, 458 bp, Homo Sapiens
  misc_feature (164)..(175): n is a, c, g, or t
  misc_feature (385)..(385): n is a, c, g, or t
  misc_feature (421)..(421): n is a, c, g, or t
tcttgctaatggaaatcttaccacctttcattttccctctgttaccaaatttcagctcttaggagctgctctacaattctgaatttgcttttcttgcctctctttagtcacctgtcacaggaggttcctgctcagtaatgatattgtgagttaggataataacnnnnnnnnnnnngtgcttcagatttagaagaaaagatcctgtttccatttgaaaggaactgtaagcttttatcttttaaccaactgaacaatacaccaaaagcagcctagggatgagcatttctttgaaagcaattaggttattcacctgggtattaaaactatttactgttaaaaaaatctgtgacttcatgaagttgatttttaaaggcagcatcaaaancttgaaaaggaaggggaaaaaatagggcagcttctnctgcacttgttttggggctcccccaaaacaggggccc

SEQ ID NO: 179899 - DNA, 498 bp, Homo Sapiens
  misc_feature (395)..(395): n is a, c, g, or t
  misc_feature (453)..(453): n is a, c, g, or t
gggaggtaagagtagggtcagagttactcatcccttttcaaagaattgtgggtggaagtttgtaaaggccattcatttgattttcaaaatcaaagcgacactctaacttccacttggccttagatctctgctataccctgccatagccttgatgccactgggcacaagccacctgccaaatacaggagtggcctctcccagcctgggcatgataggggggtctgtgccctcagatgtgttgacagctgctcttctgaattgccacacctgtgctacacttgggaattctgtgctctgactctgcagggtagggaccacgtgccatcttcacacagaggtcaaccgatggagcccactcactcgtaacatggccttctttccacagtggggaagcntgatcttgggcagggggccgccctgttagggttgggggatggggttgctgttgtgaantgtttgacgtttcgtttcatggggaaaaggggaaggtgaaagatt

SEQ ID NO: 179900 - DNA, 535 bp, Homo Sapiens
  misc_feature (153)..(153): n is a, c, g, or t
  misc_feature (405)..(405): n is a, c, g, or t
  misc_feature (469)..(469): n is a, c, g, or t
  misc_feature (471)..(471): n is a, c, g, or t
cggcacgaggaagaacataaaggtaaaacaaaacaaaacaacattttgagaacaaagatgaccataaccactgaagggaatcacatcttttaagacaaattcatattcttttatttgttatggcagatgacaagatggtacaacctttaatcntttcccaaaataaaacaaagggcacagcatctgtagtcagccgacaactatttcggccttttgggggtgggtctggccgtacttgtgatttcgatgggtacgtgaccctctggctggaaggacttgccccctgcccgtgttacatagtggcattgtttctgtggggcgggcccaggcacttttccgtcaacgttgtactgtatgtgatgaattgcgttggtctctgcatttttcagaagaggagtaaccgcnccaggtaccttgacctttgtacagcccagaggccaacactgtgggtgtgtgactctttagcaananaaacccatgtggtgatgatgtgtatatatatgtgaggatgtatcgggaagatttctaaataaat

SEQ ID NO: 179901 - DNA, 231 bp, Homo Sapiens
  misc_feature (221)..(221): n is a, c, g, or t
atgagctttaaattttgagtttaaaaatgtacatcaggagcagctggggagggtctttttttaaaaaaatctttcaaatttggttttctgtgcatatggccgttttgtaaatactttggggtttttcatttttttgaaagtagatgaaatctgttgtgggatttttttcccgaaacattacaaaataacctgtttatttacatgcaaataaacttctttgnataaaaagta

SEQ ID NO: 179902 - DNA, 255 bp, Homo Sapiens
gtgagcttcttctgattctcacctgcttgctttctggctgtcttagtcagtgtgtttacaggcaactaaagcctgttcctaatttatcaaaaaattataaccaaaattcaccatagcctaagagagtaaaccccacctccaaagtgatgccaaggccaaaacctcatcaaggaaccagacacaggtcaaaagtggtgagcaagccatggtctctgctcctggggaactcacacgctgacccccgaggagccttgg

SEQ ID NO: 179903 - DNA, 156 bp, Homo Sapiens
  misc_feature (126)..(126): n is a, c, g, or t
aatcggcaacgaggaaaggaaagaaactaaccaacaaaagagaaaaccaaaaataatcacaacagaaaccagctgccccaaaggaggccagtggtggggacgcagagggtcctcagagcaggagtnacaagggaggaaagaccaaaaaaacaacca

SEQ ID NO: 179904 - DNA, 405 bp, Homo Sapiens
  misc_feature (27)..(27): n is a, c, g, or t
  misc_feature (41)..(41): n is a, c, g, or t
  misc_feature (63)..(71): n is a, c, g, or t
  misc_feature (116)..(116): n is a, c, g, or t
ggaaaggactaaaaaagtagatgggtncccacatgggtccnagcagttcaatggatatccatnnnnnnnnntcccaatactctgtcttttcaactattctatcctttgtcccttgncttattgccctcatggtcacagaatcgttgctgtagctcccaagtaacatgtttgcacacaattgcatttaagtcaggcaggaaggaacttactgtttctctttatagcaggaaacaaaaatcttctgagataagctgaccaacagactttttctttcgtctcattggttagaactgggtcacttgcccattcccaaatcaatcatgagaaaaggggaatgggattgccatggttgcataagccaatgatgctttattctctcaggctggaggaaggggctgcatcttc

SEQ ID NO: 179905 - DNA, 395 bp, Homo Sapiens
  misc_feature (270)..(270): n is a, c, g, or t
  misc_feature (332)..(332): n is a, c, g, or t
ttattgaagtcttactaagtagcagccttatactcagtgctaagaatacaaaaatcagtaagacagaacacacagatctgaaaatagataaattacaatccaagttggatagtgtttgtattatgtaggatgtcttcagttgcaagtaacagaaaagaaataatggctaaaaaaaagaaatgtttaatcatctcacaaatcatgaaagactaaaagtagatggttccacattgggtccagcagttcaatgatatcataaaacacttccantactctgtctttccactattctatcctttgtccttgggcttattgcctcatgggtcacagantcgttgtctggtaggctcccaggtaacctgtttggcacacaattgcctttaagttcgggcggg

SEQ ID NO: 179906 - DNA, 473 bp, Homo Sapiens
  misc_feature (277)..(277): n is a, c, g, or t
  misc_feature (281)..(281): n is a, c, g, or t
  misc_feature (353)..(353): n is a, c, g, or t
aggaagcggctaaaaggtttgggccggggagttccccattcgttctccggggagggagggactttacacctacccctcaccggaaagctagacccgcttcagggccaggagtagcgtttccgcagcacgatttcctaagacgagagggatttagccaagagcacagacttggattccttctgtccctccccacctttctctcccaatgaagaaacgtttatatcctgtgattactctaggaaaggggcgtattaacggtcctttgcttccccgcagngganaaaagcttgacgaacttcacagaagagttcaagcttgggaaataatgggagtttataggagaaaagatatantttttaaaaagcttctagggtcagaagtactacacagtgctttttaaaaagtgttttattgaggagttttacagacagaagcccgaagttgggaaagaccctatgggttttttagattgg

SEQ ID NO: 179907 - DNA, 407 bp, Homo Sapiens
  misc_feature (17)..(17): n is a, c, g, or t
  misc_feature (55)..(55): n is a, c, g, or t
  misc_feature (79)..(79): n is a, c, g, or t
  misc_feature (154)..(154): n is a, c, g, or t
tcctctcccccatgaanaaaccgtttatacccctgtgattactccgggaaagggnccgtattaacggcccctttgcctnccccgcaggggagaaaaagcttgacgaaccttcacagaagagttcaagccttggaaataatggagtttatagagnaaagatatatttttaaaagctctaggtcagaagtactacacagtgcttttaaaaagtgtttaatgagagtttacagacagaagcccgaagtggaaagaccttatggttttgtagatatggtgactccagtctttgttgtataaaggttgggggagctgataaggtttttgtacagtattttctccttcgttgtattgatttttgtataaaaatgtaacttctacgtgtctaacacgtattaaatatttataat

SEQ ID NO: 179908 - DNA, 440 bp, Homo Sapiens
  misc_feature (15)..(15): n is a, c, g, or t
ccctttcctcctccnggtccatgaaaggtaagggggaaattaaaaaaactgaggggggaaagaaagggaaccctgtgggctttaactccgttttggcaaatacccccagaaaaagtcctttttgaaattattattgaatggaaagtaatcgctgttcccattttgacctaatcttccctactcttcccaatctgatggacatactcatccatacttgaaggcatatcaaaattgacaaccagcctgacactgatcaagtctaggcctcgtcccaagactcctgtgctcactacaacttcatagtctccttcaagtaatcccttcaatatgtttttcctttctatttgcgacttctccgaatgtatagatatgcttttcagccctgtgattttctgaacggcttcactcaaaagatctgctcctagtttgcagtccacaaa

SEQ ID NO: 179909 - DNA, 486 bp, Homo Sapiens
  misc_feature (17)..(17): n is a, c, g, or t
  misc_feature (26)..(26): n is a, c, g, or t
  misc_feature (50)..(50): n is a, c, g, or t
aatgaaaaataaccccnctgaaaggncatgtccccggggctgaaaccganccaaagggcctttttccaactgaaagttccttaccttccccagaaacctgttccaaaaagcctgccccccatccaggttccagcaggcttgatgactcccaaatttggctttttaagacaagcctaaaatctccctcccagagaatcaaaatgtaggactgaggtaaagagatattaaacaagaaggaacttttctgttggcataagagatttgaatgaattctttcgaaaatgttggtacatttgacaggatgggtcaaccacatattcataatactgacagaaataacactgtaacaccaagatgagggacacagataacctattgatacgagcaacagaaccagcctccctcttctttctctcacttcatactaaagattttatgctgaaatctcaggtttgccgtaacttttccacctttttttaaaatttc

SEQ ID NO: 179910 - DNA, 390 bp, Homo Sapiens
  misc_feature (17)..(17): n is a, c, g, or t
  misc_feature (77)..(77): n is a, c, g, or t
caaagacgggtttcccnaagtgctgtacagtggcccctgaggttacagttgaattagaaaaacgaaatgtacttacnggaaataagaaagcaaacctttcaaatgagagtgatgatttctttaaaaaaaatcagtttttttctctcaaataatgttcctttatttcacgaaatcgtcaatccttaagcatgagcagggataaacaactcctagaaggaactcaattcattccttccctggattttctctgttgttaaatcacaaaaatgatagtccccaatcgtttctttataggaggttattacatttcattacagtcactgcattttgactgttgtgtttagaatttgaatgtacatccaaaatgatgagtttcaatttaagagcctt

SEQ ID NO: 179911 - DNA, 618 bp, Homo Sapiens
ccagaccgaggccatgaagcagattctcggggtgatcgacaagaaacttcggaacctggagaagaaaaagggtaagcttgatgattaccaggaacgaatgaacaaaggggaaaggcttaatcaagatcagctggatgccgtttctaagtaccaggaagtcacaaataatttggagtttgccaaaagaattacagaggagtttcatgggcactaagtcaagatattccagaaaacaataaagaaagacagcacgtcgggagcagcttatgagagaagaagctgaacagaaacgtttaaaaactgtacttgagctacagtatgttttggacaaattgggagatgatgaagtgcggactgacctgaaacaaggtttgaatggagtgccaatattgtccgaagaggagttgtcattgttggatgaattctataagctagtagaccctgaacgggacatgagcttgaggttgaatgaacagtatgaacatgcctccattcacctgtgggacctgctggaagggaaggaaaaacctgtatgtggaaccacctataaagttctaaaggaaattgttgagcgtgtttttcagtcaaactactttgacagcaccccctcgttccgaa

SEQ ID NO: 179912 - DNA, 381 bp, Homo Sapiens
  misc_feature (132)..(145): n is a, c, g, or t
  misc_feature (178)..(187): n is a, c, g, or t
  misc_feature (363)..(363): n is a, c, g, or t
ggaacctgaagtgatttacacttaatgggtgattaatccagtattctttaccctgaatgtttggatattaaagttcctttatgttttctataacctgtgggatcttcttgcagtgattattgtgtgtgagannnnnnnnnnnnnnggtctatccatattgttatattcactcaggtannnnnnnnnnaatcttattccagaatcagtggtttatattgggttactgtttaacaccaaatgggaattgggcattctgcagatttaattaattatggaaaccagggggtctcattttccttggctggatacttgttggaaaatgaggattcacattctaggtctttattttcccacccgtttttngtccccggtggcttggta

SEQ ID NO: 179913 - DNA, 269 bp, Homo Sapiens
attctcatcccatcttagacatgaggatattggaactcagagaggtggctattgcattgcgcagaacgctacagagcccatgctcttcccagagcagcacccacaaaagcaagcattgattttgtgctcagtgtgtgccaagcactgtgcagagggtacacagttcctgccaggttaacaccctcccttcaggcctcccaaaggcataggcttgcaaagagcagaaggtgtgaaatcacacttttcctcttggcaccctggttccctga

SEQ ID NO: 179914 - DNA, 413 bp, Homo Sapiens
caaaaggaatcctctactgccacctcggattttatttattttaaataatccccctccccccatcctcaagcgccaaaagtactgggtggaaacagtcacttggagagctaatggaacctggtgctaagtcaccccgtaggcaactgtgtcggctccagagattggctaagcatttggaagcaggcctagtggagaaacaagcaagcagcagctctcacacactgcagcactccaggggtaggccctaaggcttggggaaggaggggaatcagaacccttcagggtcaaccacctctgcattttaaccccctcagggggagttgagtggggggtgcgggggttgcaggggatggaaacagagcctggggtattgaaggttaaaaatgttttcccaacaggcaccttttaccctt

SEQ ID NO: 179915 - DNA, 535 bp, Homo Sapiens
  misc_feature (18)..(18): n is a, c, g, or t
  misc_feature (23)..(23): n is a, c, g, or t
  misc_feature (37)..(37): n is a, c, g, or t
  misc_feature (65)..(65): n is a, c, g, or t
caaaaacaaatgatccangaggnttcattattttttngcctcccttttctaatttgcttcttttngaaagtaatttattttctaaaattgaagagccacctgactacagttactttagggtaactgaatgtggttgtgcttttgccttttaaagagttagttctgactacattcatataaggctttgttttcaaggatgtctggaattcaaacccctgggactgagaatatcacccagggaaaaaaagatgccaaattgaactaaaaggctactttacaattttgacctgtggattttatttaatgagggacaatcaacaaggctaagtaaaatagttccctggaatatgtctgacagtcatatgaataggataaaagctgctgaaacagtgctcaaagcaagttatcaccaattctgaattctgaatattgcacctaaattcacaatgataatagctatttttaaaaataccactcattatgtcttcaaactctaatctaccactcttagatcataatgccaagagtaacccct

SEQ ID NO: 179916 - DNA, 477 bp, Homo Sapiens
  misc_feature (396)..(396): n is a, c, g, or t
  misc_feature (416)..(416): n is a, c, g, or t
  misc_feature (450)..(450): n is a, c, g, or t
  misc_feature (467)..(467): n is a, c, g, or t
gccatttcagatcccccagaccagatgacctatcttccttccagctctgagtcacttcccattgggacttgcggttaatcgaagtcactgagaccatttgcaagaggctcctggattatagcctgcacaaggagaggaccggcagcaatcgatttgccaaggttggattcgggattgtccttcatccgctctggggtcaggcctgcatgtatcttagtgtgtctgctggtgtgagtgtgatttgaagatgaccacctggggatcttccttcattggcctcttcccattctttgattgccgtttgtgctcctcccctcttgagtgggcctcatttttcagggcacatgcatggaggggtctgggggcctgtttcatgaggggtcctggtttcaaatntcaggacacagggcaggaantgcttccacagttggttggccccctgggggaacntaaaagacattaggaangggggagaat

SEQ ID NO: 179917 - DNA, 166 bp, Homo Sapiens
accaatctgatataaaaataatgtagaattagaaggggtctttgctgaagacagtgagatcatttcagcacccaagcatgaggtgatggagcctagaccaaaggatgccatccaatgagtgggggtgacagagacaacaaatgtttggaaggtagcacagtggact

SEQ ID NO: 179918 - DNA, 373 bp, Homo Sapiens
  misc_feature (211)..(211): n is a, c, g, or t
atggaaaaagacaactgaatgccctcaactgaatgtcttcatcccctcttgcctgaaatttccaccttcccataggctggggagggagtcagttccagagcagaggagggtgacagggttgaggagggacttgtgagagctagaacttggcaaaatggcctagcccacccttcaaaggggaaaagagggaggaacaggggatgaaaagttntccgcagccttcccttgaactctcccctgctgggggaagggaggaggttaaagcaagaccccctgcccaggtggggagagctgggggccaggggagaaggggacaaatggtagggacacattctgtttgagcacaatgctaaaaattctgtacatcctttgg

SEQ ID NO: 179919 - DNA, 372 bp, Homo Sapiens
  misc_feature (103)..(103): n is a, c, g, or t
  misc_feature (265)..(265): n is a, c, g, or t
  misc_feature (273)..(273): n is a, c, g, or t
  misc_feature (286)..(286): n is a, c, g, or t
gacagtgaggaggataggacccacttacacgcttttatgtcagccgcgatcccacccccacaagcgtctgcaaaacccttcctggggccttggcgacacctgntgtcctcacggcgcgcagaggcgcgccgtaaaccttgtgtgcattttacacgacggcggggactgaggtccttcgcagcccagagccggagcccggggtcggccgagcccgcaggaccggcttcctcgccgactctcacggccttcacccagccccctggcnccatggcnggcgccggcgttnggcattagtattcattttgaagacgtggttgtgaccttcactggagaggaatggggtcaactgggacctggcccagaggaccctgt

SEQ ID NO: 179920 - DNA, 383 bp, Homo Sapiens
  misc_feature (16)..(16): n is a, c, g, or t
  misc_feature (21)..(21): n is a, c, g, or t
  misc_feature (48)..(48): n is a, c, g, or t
  misc_feature (73)..(73): n is a, c, g, or t
  misc_feature (91)..(91): n is a, c, g, or t
  misc_feature (108)..(173): n is a, c, g, or t
  misc_feature (204)..(213): n is a, c, g, or t
aagcctggaagtgggnaggantgccttgaagtcctggggagggtccangcctgccagtgagccccagggtccnggcccactgcactccccncctgggtgacagagtgnnnnnnnnnnnnnnnnnnnnnnnnnnnnnnnnnnnnnnnnnnnnnnnnnnnnnnnnnnnnnnnnnngattaatatgacatggctacgagatatattnnnnnnnnnnctctaataatgttccctaataaaaatattataacttactatttagggtatatcttgttttttctggggacaagcttagagggcaaacagagctcagtgctgcattcatttctcagtgattgtgagatgcaggcgctaatcattactatcaatcaagctttcccacatgta

SEQ ID NO: 179921 - DNA, 355 bp, Homo Sapiens
gctgaggattgtctgttcatcccaggtggtctagtctgcctggatcagatgtccttccctgctgctgttgggcaggcagctcagccttttggctccagccagctctggtgtgactgtcaacgccctgcaccccggcgtggccaggacagagctgggcagacacacgggcatccatggctccaccttctccagcaccacactcggtgagtcccctcccagcctggggtctccacgtggagccctccacccctgctttctcagcccagggcccaggaccctccctcagagaccgtccctgaggcctcatgccttgctccttcgcctaacgtcttcttgaggcacagagcacaggtcc

SEQ ID NO: 179922 - DNA, 297 bp, Homo Sapiens
tacggagtctcacaaggcacaaacaccctcaccaggaccaaataaataactccacggttgcaggaaggcgcggcctggggaggatgcggcatctgagctctcccagggctggtgggcgagccgggggtctgcagtctgtgaggggcctcctgggtgtgtcccggcctctagagcgggtccagtctccaggatggggatcgctcactcactctccgagtcggagtagtccgccacgagggaggagcccagactgcaggggtgccccgtttccggggtttcaacttcctcctgggaaga

SEQ ID NO: 179923 - DNA, 265 bp, Homo Sapiens
  misc_feature (227)..(227): n is a, c, g, or t
  misc_feature (235)..(235): n is a, c, g, or t
  misc_feature (255)..(255): n is a, c, g, or t
aatagacggaatactggatttattttgttttcttccagtaatgtttctcatcatggactatcacattttactgaatgtcttcagcaatcgcctgtttctatttctgatttccagttgataattagacttctttatgcatcatttgtgttatttttttctaaatatatatgtatatttgcagcttatatgctgccctttttttctcattcagacaactttaggaatanttttcctntttattaccaatattttccnatttagtagg

SEQ ID NO: 179924 - DNA, 426 bp, Homo Sapiens
  misc_feature (229)..(304): n is a, c, g, or t
cgtctgcctttgtttcccccgttaacgtttaatttggaaacgaaatccccggggaatgcaaccagccccgcgctcggaagcggcggtcggaattccgtgcgcagagggcacacaaaagcctcgaggatcattgcctcgaccccatcccccaacccgcggcgaacgcccctacgggctgggacacctccaccctcggactgctgccgggtttcctccggctgcgaccctnnnnnnnnnnnnnnnnnnnnnnnnnnnnnnnnnnnnnnnnnnnnnnnnnnnnnnnnnnnnnnnnnnnnnnnnnnnntcaggttattaggaggattattaatttgaatggcagtttaggggaaataaaaaaaagaaactccagacacttccagacgccgagaaggggctggagagagcaggcagcaacgctaggccgcg

SEQ ID NO: 179925 - DNA, 301 bp, Homo Sapiens
gaaattatgtgttgtgtataagtaagttagttactaaacatatggcatggttattgataaacttgttgctatttttttccaaatgctatcagtgtttgtggacttttaaaaattagtttgaattttggaatgttctgtgataaaatataatttcaactattttgtacatttaaatatgccatgttgtatatgtctgtatttaaaaatgttgtaaatatctgcattttaaggaattatggaaaggattttcctcaaaaatgacaggaactctcccatacttaattgtggacacattataagg

SEQ ID NO: 179926 - DNA, 529 bp, Homo Sapiens
  misc_feature (24)..(25): n is a, c, g, or t
  misc_feature (419)..(419): n is a, c, g, or t
  misc_feature (445)..(445): n is a, c, g, or t
  misc_feature (468)..(468): n is a, c, g, or t
  misc_feature (498)..(498): n is a, c, g, or t
  misc_feature (518)..(518): n is a, c, g, or t
ggagaaccaccaaccggaccatcnnctctgtggacgacttccagaattacctccgagttgcatttcaggaggtcaacagtggttgcacaggaaagaccctccttgtgagaccttacatcaccactgaggatgtgtgtcagatctgcgctgagaagttcaaggtgggggaccctgaggagtacagcctctttctcttcgttgacgagacatggcagcagctggcagaggacacttaccctcaaaaaatcaaggcggactgccacagccgaccacagccccacatcttccactttgtctacaaacgcatcaagaacgatccttatggcatcattttccagaacggggaagaagacctcaccacctcctagaagacagggcgggatttcccagtggtggcttccaaaggggagttggaagcnttgcctttcccgttttaacatgtttnagcttgaaaaagcagtcaactgntcgggggaaccctgagtgtaagtgattaangcattccacagggcaatttnggcaagggaat

SEQ ID NO: 179927 - DNA, 434 bp, Homo Sapiens
  misc_feature (20)..(20): n is a, c, g, or t
  misc_feature (342)..(342): n is a, c, g, or t
  misc_feature (364)..(379): n is a, c, g, or t
  misc_feature (382)..(382): n is a, c, g, or t
aagaccccgcccacggggcnccccccagagatggccagcaatcggaagtgagcaaaactgccgcaagtctgcagcccggcgccaccatcctgcagcctcctcctgaccacggacgtttccatcaggttccatcccgaaaatctctcggttccacgttcccctggggcttctcctgacccagtccccgtgccccgcctccccgaaacaggctactctcctcggccccctccatcgggctgaggaagcacagcagcatcttcaaacatgtacaaaatcgattggctttaaacacccttcacataccctccccccaaattatccccaattatccccacacataanaaaatcaaaacattaaactaannnnnnnnnnnnnnnnacnacaaccctcttaaaactaattggctttttagaaacaccccacaaaagctcag

SEQ ID NO: 179928 - DNA, 508 bp, Homo Sapiens
  misc_feature (431)..(431): n is a, c, g, or t
gatctagacaatctgtgcctgctacgagatcttgaatgcctagatgaatacgggcttctgcttcgggattttccagaccgtctgagcacagggctgtagggactgcgagagcggcgccagctgctggctgctgtagggactaggggacacgtcgccgccccgctcgtaggagctgtggcggctgtagctagggaagcggcggcgactgtagggactcggggagcgcggcagccgccgagaataggggctgctgccacctcctgccgggctgggggacttgcggctcctcaggctctgagaggccctgtgggacaccgggctgtcgtcccggcctcccagtgggctgagggaccgccgccgcctgtaggccttaggctcggtcttgtcctcccggtaggccttgggcggttccttgtaggccgaaggcggcnccttggacgacttagtccggctgcggtgggccttcgagtcccggtcttgcggctgctactgctgctggatgtggccg

SEQ ID NO: 179929 - DNA, 421 bp, Homo Sapiens
  misc_feature (64)..(64): n is a, c, g, or t
  misc_feature (276)..(276): n is a, c, g, or t
  misc_feature (389)..(389): n is a, c, g, or t
tgtttactctcattcatttactcaagatgaactgaaagacagcataacatagtgtggccaaggnctttaatttgagaactcctatatcccagtgctatgtccttgcattgcagttttgagaaacaatacatgaaaagttattcacttccagagatcaccctggtacagatacatttgccatcataagcagagacagataaaaggattgggtactgactcatttttataagccacccagatgatctccaataggtatatatcaatttatgtttagantcaaaatgggaaattcaaaaatgtaataattcctgactgtacttccgagggtctgtggaggtctcgctctattgcccggggtgagggggcggtctcagctcactggcaaactnctggccttccgggggttcaaggcggtttttcc

SEQ ID NO: 179930 - DNA, 1313 bp, Homo Sapiens
  misc_feature (389)..(402): n is a, c, g, or t
  misc_feature (738)..(746): n is a, c, g, or t
  misc_feature (984)..(1048): n is a, c, g, or t
ttgggtgttgcctgctgaactcggaggggagtttggagaaattttagacagcagctctgtgttctttttttgccgcagccaataagataatagcagaattagccaatcctaaaaccttctaaagacgatttttgagcatcccactgggattatttaatttttctttttgacgtgtgtttttagtttagaagtgctgtattccacaaggtttaagtcagtgaggttggaagataccctatcttttttattcaaaaagcacaatcaatcttttgtttgaaaatctatataaagtacaacttgcttttagcatgattattttcctaaataaaaagacaaagaatttacttactttatgttaattacgggcatgaagcaaaaggttttctttnnnnnnnnnnnnnngtgcagtgatgtagggctgtggttagttaaccgtactgagttatccatctagcatctgtggcttgctggaagggtagtattaactatttaacatgtaatggtgtacttcactcttacctagcacgctgtcttctcattgctttgggggagggagggtctctctgctggcactgtctaacttgcttacctgctgactttgcagtttgcttgtgctatgacatttattgtaggtgctatttagggtaggcttaaagtgctgggtggtgatttgagttcaaacaataaaaaattgtattttttcaatattgtataaacaatagtgttctaattaccttnnnnnnnnntaatgaccagttaagaattgcttttgatcttgtcaaaaaactgaatagaccccagtttcgggaaggtgtgtgagcagtgccatgactctgccccttacctaatcccacatctctctaatgataagacattggctcgcctctgaccagagccccagcaccagagagcggaagatgcagaattgtcaaatgacctgctgggggaggttgtaggagtttagcagatttgagtgtggctgcnnnnnnnnnnnnnnnnnnnnnnnnnnnnnnnnnnnnnnnnnnnnnnnnnnnnnnnnnnnnnnnnnccatctaagtctgtgtgatgaaggtgggataaggctcctctgttagtgctggaagctcctgtaattgccgcatggatcccactgtgccctcttgttctgtgcaagtctgtcctgtctgggcactaaccttggtcccatgcatgtttatgttctgggtggggctttgcctctccactgggaaactgacttttgctgggttgaacagagtcccttatgctttttgtcctctccctgcgcctgggagagtgggagtaggagcccaaac

SEQ ID NO: 179931 - DNA, 1645 bp, Homo Sapiens
  misc_feature (796)..(860): n is a, c, g, or t
  misc_feature (1098)..(1106): n is a, c, g, or t
  misc_feature (1443)..(1456): n is a, c, g, or t
ataaaatgctggtgaaactgcacagtaacctcaaggagggtgatgaaattgacgacaaagccaaatgtcagtgtctaagatggctaccactgaccctgtgcccaaaagccccccggtgctggggcttccagagggagcccaagggtggtggattcaatgttgccaggttgcaaccatcttgcttgttggtgtttggcaagagcttgagctcagttatgtgaacaggggcaaagaatggcttgtgctggtaaaactcaagggaggatccaaaaactatgggcactaaaaaggggagggaaaccgccagaagtggctctgacctgctgccgctgccaccacctctaaagccaagaatgtagagcctctgcccagggatctggatgctctcctgagtgttggaagggcagcctggaaaggcatttggtggtgaaacaccgctgctccagacttacgctaccatctattgttgggggcccagagtccttggattcactgccaggccttcttccagatctttctgtacctgtgtgtttgggctcctactcccacctctcccaggcgcagggagaggacaaaaagcataagggactctgttcaacccagcaaaagtcagtttcccagtggagaggcaaagccccacccagaacataaacatgcatgggaccaaggttagtgcccagacaggacagacttgcacagaacaagagggcacagtgggatccatgcggcaattacaggagcttccagcactaacagaggagccttatcccaccttcatcacacagacttagatggnnnnnnnnnnnnnnnnnnnnnnnnnnnnnnnnnnnnnnnnnnnnnnnnnnnnnnnnnnnnnnnnngcagccacactcaaatctgctaaactcctacaacctcccccagcaggtcatttgacaattctgcatcttccgctctctggtgctggggctctggtcagaggcgagccaatgtcttatcattagagagatgtgggattaggtaaggggcagagtcatggcactgctcacacaccttcccgaaactggggtctattcagttttttgacaagatcaaaagcaattcttaactggtcattannnnnnnnnaaggtaattagaacactattgtttatacaatattgaaaaaaatacaattttttattgtttgaactcaaatcaccacccagcactttaagcctaccctaaatagcacctacaataaatgtcatagcacaagcaaactgcaaggtcagcaggtaagcaagttagacagtgccagcagagagaccctccctcccccaaagcaatgagaagacagcgtgctaggtaagagtgaagtacaccattacatgttaaatagttaatactacccttccagcaagccacagatgctagatggataactcagtacggttaactaaccacagccctacatcactgcacnnnnnnnnnnnnnnaaagaaaaccttttgcttcatgcccgtaattaacataaagtaagtaaattctttgtctttttatttaggaaaataatcatgctaaaagcaagttgtactttatatagattttcaaacaaaagattgattgtgctttttgaataaaaaagatagggtatcttccaacctcactgacttaaaccttgccaa

SEQ ID NO: 179932 - DNA, 1417 bp, Homo Sapiens
  misc_feature (669)..(747): n is a, c, g, or t
  misc_feature (971)..(979): n is a, c, g, or t
  misc_feature (1315)..(1328): n is a, c, g, or t
ttccagagggagcccaagggtggtggattcaatggtggcaggttgcaaccatcttgcttgttggtgttggcaaggagcttgagctcagttatgtgaacaggggcaaagaatggcttgtgctggtaaaactcaaagggaggatccaaaactatgggcactaaaaaggggagggaaaccgccagaagtggctctgactgctgccgctgccaccacctctaaagccaagaatgtagagttctgcccagggatctggatgctctcctgagtgttggaagggcagcctggaaaggcatttggtggtgaaacaccgctgctccagacttacgctaccatctattgttgggggcccagagtccttggattcactgccaggccttcttccagatctttctgtacctgtgtgtttgggctcctactcccacctctcccaggcgcagggagaggacaaaaagcataagggactctgttcaacccagcaaaagtcagtttcccagtggagaggcaaagccccacccagaacataaacatgcatgggaccaaggttagtgcccagacaggacagacttgcacagaacaagagggcacagtgggatccatgcggcaattacaggagcttccagcactaacagaggagccttatcccaccttcatcacacagacttagatggnnnnnnnnnnnnnnnnnnnnnnnnnnnnnnnnnnnnnnnnnnnnnnnnnnnnnnnnnnnnnnnnnnnnnnnnnnnnnnnatctgctaaactcctacaacctcccccagcaggtcatttgacaattctgcatcttccgctctctggtgctggggctctggtcagaggcgagccaatgtcttatcattagagagatgtgggattaggtaaggggcagagtcatggcactgctcacacaccttcccgaaactggggtctattcagttttttgacaagatcaaaagcaattcttaactggtcattannnnnnnnnaaggtaattagaacactattgtttatacaatattgaaaaaatacaattttttattgtttgaactcaaatcaccacccagcactttaagcctaccctaaatagcacctacaataaatgtcatagcacaagcaaactgcaaagtcagcaggtaagcaagttagacagtgccagcagagagaccctccctcccccaaagcaatgagaagacagcgtgctaggtaagagtgaagtacaccattacatgttaaatagttaatactacccttccagcaagccacagatgctagatggataactcagtacggttaactaaccacagccctacatcactgcacnnnnnnnnnnnnnnaaagaaaaccttttgcttcatgcccgtaattaacataaagtaagtaaattctttgtcgtttttatttagccaacttttttgtacaaagt

SEQ ID NO: 179933 - DNA, 1514 bp, Homo Sapiens
  misc_feature (140)..(151): n is a, c, g, or t
ttggatcatattactataataattttaagactatccaaggatagtttactttcttgttttgtgaatttatccactacttgcctttccctgtattaccttgatgatattgcagtgtgagcagagttaaagtttacataggnnnnnnnnnnnnaatcagttctaggcatagaatataaatgtgtattgtcaattaagagtaaattaataccttttgttcattttgtcttatttccaccagagggcagataaaacttgcagactttggacttgctcgattgtatagctcagaagaaaggtaagcataccttcaaatgaatattgtagatactagagtttagtattagaagctatactaagaataccttattgatagttttattttttaaaagagaagtttacttttcatggttagtacataaaacattgaaattttataccatattgggttgattattgtaattacaatattttatacattatctcaatttaaaaattgatcttcaacaggtaaaaatgatttttttaaatgaacatctttaagtgtaactgaagtgaacttaaatttctaatgcgtattcagatattaaatattcttaatgaaaaccttttaaattgcatttttaaacttataaactttggtttcattattattttagacagattttattgttatatctacagttctttgtttttttaactccctagaaccctttatttaaaccaactgttgggaggatgttcactgtataagacacaaaaatgtagaacttttctggctaaagttggattatatacccaacttggctttctttgtgcctggtggtagtgaaatatgatttgtcttattaaaactaatatgggatttcaaaataaaatatttttgtgcaatagtaggttttatgtaaataaaatacggaattaatttggcttaataaatctttagtccatttaccccattccttttttgtctttatttccatatgtgtatatatatatctgaaataatatagttaaagaattttaaaattattttatgacaattttgtcatttctttaatatcaccataatttaatataatgaaacatcagttgattgcagtcttaggaatagatgtttactttcatttaatctttgctttttttggttaaagcaataaacaaaaactctcgtttgaatttttcagagtaaaaagtcttattttgttaaatcttgcagcgcctgtgacataattctggaaagtattttccttatatagtgttctagagtagaggtttataagtgatatgttttggatctattcaagttccatgaaacccctcagaaagtgctgggattataggcatgagccaccatgcccagctgagaagcatatatatgactaaattaatgtggctattattttgggcaagttctggttaattaagaattctatctgctaagctggttgagatttcactgtagttagattttgcttatataagtttgtgtctgttgttaattatgtaaatccttt

SEQ ID NO: 179934 - DNA, 1332 bp, Homo Sapiens
  misc_feature (335)..(467): n is a, c, g, or t
  misc_feature (937)..(1005): n is a, c, g, or t
ttggcttccttcgtgccctcatccagcaaatagtggatatttgtgtcatgtgtgggacagctggcacactcaaacagggctgatccaagatcttaaagggaccattgagacaggtatgggcaggataaagggaccagtaaggaatggcaaagcccggccccccagggctggcaacaggagggagcagttaccacctggagttgtggctctgggcggaggcctgcggccatgccaaactccaagtagggcaaaaaatgccccacttctcttcggatttcttgctgggctcacttattggctaaacccagcaggaaatgctgggcaagggaggtttnnnnnnnnnnnnnnnnnnnnnnnnnnnnnnnnnnnnnnnnnnnnnnnnnnnnnnnnnnnnnnnnnnnnnnnnnnnnnnnnnnnnnnnnnnnnnnnnnnnnnnnnnnnnnnnnnnnnnnnnnnnnnnnnnnnnngtttggaaagtgtttcctattcttattggcactgatagcctgggctaggggctcctgtgggaggcagatacaagtttcccctcatggagcctgtgctttgttgggagtcatgggtggaatgaatccccctcctcccagcctgggggtgctctcctcattgccttccactccccggcagctgagatagtgctgaggctgttggctggggcagggcctaggctgcgaggtggccccatcgtgggcacactagccctgcacccctgggcattggtgcgtccgccaagaaatgtttaggtttccattctcagcctggtttcttccccctcagggcccagcaagaaagaacagccccttctggccttcctgctgggggacagaggctcccagagccacttctgagttggggtacagacttcggtggctcatcagatgaaaggaggtgcagagagagcctgaagttggctctgtgnnnnnnnnnnnnnnnnnnnnnnnnnnnnnnnnnnnnnnnnnnnnnnnnnnnnnnnnnnnnnnnnnnnnngacccatatgtgagctcccagggccagccctgtggacacttgtagagtctggggaaaggttccgggcataagtggggggcatgggaatcggcctcccctgctcctcatgttacttccttaagtcatcacaatagccctgaaaagcaaaggcctcatctccatggcacaggtgatgaaacaggaagactgaagtctaggcctggccggcctacggccacattcagccaacagaccatctctccttccacagaggagaagcgcatctaccgggtgcctgttttcacagcgctcttctgccaggccctgctggaagagctggagcacttc

SEQ ID NO: 179935 - DNA, 1014 bp, Homo Sapiens
  misc_feature (150)..(167): n is a, c, g, or t
ttgggaatgagatttctgggtcatatgattaatgtatatttaacttcataagaaactgctgcattgtttcctaaagtggctgtgccattttgcattcccccagcgaagtatgagcactccagcctgggcaacgagcaaagctctgtctcnnnnnnnnnnnnnnnnnntggttgctgcgtgatgaggcagttggtcaaattagttttcagaaggttaagggttctaaatatctagagtaaagaaactgaattaattatctgagcggcctcattgtgaatcactgtacactcaggaaccagactgagttgaaatcctgtctttgccacctattgacagcacgatcttaagtggattttagcctctgcctgtttctcagctgaatgtgagtttaataatagtgcatgccccaaagttgttggttaggaatcaatacatgaaaaacatttaagaatggtgccgggcacagtggtaactgacatatgagcacctgcctctctctgctcagatacagaaggtggtcatggcactaggagactacatgggcgcctcctgtcacgcctgtatcgggggcaccaacgtgcgtgctgaggtgcagaaactgcagatggaagctccccacatcatcgtgggtacccctggccgtgtgtttgatatgcttaaccggagatacctgtgtgagtaattcggttctccaatcccctgggtcactttgctcttgtgcacgctttccagtctttcagcgtaagccagagtcattcccaaggatgctggtttctctctgggggaagagctgctctgtgatggagcccatgcgtgtcatctgagcctctggcttccctgccagtgcagccctggcagtgtcctacttcccagggctgttgtctgcctggcggggaagtcctgggcaaaggatcagtctttgtactctgagagcagactacttggctcctctctgtttttatcagcgaagttgggatatatctctccacatttccctaatcatatgctatatat

SEQ ID NO: 179936 - DNA, 1452 bp, Homo Sapiens
ttggctttggaggtcgcccgggctaaggaacatggaaggacgctgggtggagagtgaggggagaggatcccagctccccggtgggggaaggcgggtgttggtggggagcagctttgggaaatccgggatcaggacattgtgtgaaggacaggtggctctggttagggggcggggcgtccctgcaaggaggtgggaagggaggccccagggagttctgaaacggggaagggcctcagtgttgtggggcaagggtgttaggtctcgaatctgaaagtgttcctgagtggggcgtcagaggcgaagggctccgcaggctgggaccttgcccctgcactctgtgggctcagttgtggggagggaggggccggtgggcaggagggagaagtctgccctgcctgccagctgtcatgaggctgggccacacaggcccaggccaggggctaaggacttggtcaggactggctgagccctcacttgggatcagatctccagttgcagagtgtgaggggctcctccctcactgaccccaagcctgctcctctcagctttcaggaccccaccttccttatcaccaggtcttctccactggcccctgagattgccatcacctccagctcctcctctcctgaagttggcagcccctcctgggttccagcctcctgagatgccagacccactggggcagtacccacaggccctgagcctacatcaaccaccccagtgacaccccaagcctgcagcattttccacccccagccccctggtcccaccttgccttccgcccaccttcccacctgctgcagggagggccctcggctgagccttcagacacacttgcaccccatccgctcccctcctgaatttcttctgaccctcccttggcttcacagcacctgaaggccaggctgaggccccctgctctcatggccagccctggaaagcctggggctgatgaggcccaggaggaggagggggaactcgaggggggctctgcagggccgcgggctgcaatactggagcaggctgaggagctgtttctgctgtgtgacaaggaggctaagggcttcatcaccaagcacgacctgcagggtctccagagcgacctgcccctcacgccagagcagctggaggctgtgtttgaaagtctggaccgggctcacactggcttcctcaccgccagggagttctgcctgggcctgggtgagcctgtggcctgcctatcccccactgcccagagctggaggcctgatcaggaggcctggcacttgtggcgccctgagggctgccggtgcctctcgtcctcctccctccagggcccgtgctttgtctgcacgcactcgcgcctgggggctcctagctgcggtgggattgtgtggagctgaccttcctggcccccagctcctctcctgtgctaaactccgggaagtttgtggggtggcgtcagcccaggga

SEQ ID NO: 179937 - DNA, 255 bp, Homo Sapiens
acaatttaaaaaaacactattttcaggaggtatgggggaatcccaggatgagatgtaaaatgtgataaaataatatgcctagtacaaaagtataatgcagccttacttaagggattggaagaaaacgtggcaacctaagtaattttgtaaatgagtagaggctgtgaaactaaaggcagaagtaactgtacatagacattataattttgttgataaagttgttcctatgggggtatgggttaatgatttttgtat

SEQ ID NO: 179938 - DNA, 1936 bp, Homo Sapiens
cccccacagcatgctaggttaccatttgccctctaccccccattccacaggccaagggctcaggatcaccttgacccagcaagatcagcctcacccacttaccccacacagcccatggttggcagaacccctctacacatgaactctgacacagagaggcagccctggcccaatgtcaccagcacccattcctctcgctgccaatgacagtgacaagccaagcagcatgtgactagcacctgactcttgacatctgcaaggagcagtagcagagctgaccagccccctgggaatcaacatcaggcttctctacttttgtgccctctccctgccccacatggcccctagctcctgaaacagtcccagcaactgggctataaaggcccagaatcaaatctgagtatctagatgaggcttagaaatctaggtgctactcagcaggcaagaacaggaaatgggagtgttgctgcaggagcagctctgcctgccaaagctcctttggaaggcaggggacccttctaaagcccctctgccaggcactttcttgaacactgacactgcacacttgtagctgcagctgtgtctcaggagctggggaggggcaccagaagggaagttatgaggacactcaacaggtgtcagggaaacttaagccacatcacagcagagaagtccctgcacttcacgcttggcctctatgcaaggccttcagagggaagcaattgctgaagccaggaccagctgagtgaaaccccagaagactagagcttaaaatagccaaacagcaagaactggaccttttaagaaaggtcaaccctacgggttggagctgttcagccaagagtgggaggctggagccctctgctgagggcatctgcacagagcttgtgtcctggttctctgggctgcccacgcccatctgctgctcctcagtgcatgggcactgcctgtttgctcccctcttccaggaaacccttgctgccctgtggacagggacaaggagcatactccctaactaggagagtgaaggacattaactcaatgtcctgggccaaggaagggatcccaagttggaggcccagcataggccacacagtcctcagcctggctgccaggccccacagaatgtcagccaagatagcacagcaacctctcctgagctggaacccaatttgtctttagggctcaaaaacagcagggactagtgtgccaaatggaggcacagtaaacagcatttaaataaattcatttcccaactgaaatttttaaagagcacatagtaactggaataagcaaaagtggttatcttttacaattttagaggactaaattttcaatatcaaataaccatttgtagtcagcctgtgcactgttatgtaataaatctccagcataaatttgcttttgatccaaatgttctgacattccttatgagtgctacctagagtcctttgggcccagggaaggggctctgctcaatccttccctgcaggcccaaggtggcaggcagaggggtcttaccttggctcagtgccacctgagcattgttcaatggactgctcccaggacccccaaggtgaggtaccactgagcagggcattccagggagccgctgccgcctcctacctgccagacttggtgaggacgattatggccccactgcagcacttgaaggaggcctccacggcacccacggcggtggcttctgtggggtcgctggtaatgggcgccaggcggcggagttcctcaaataattgcaagtggtagatggcagcctctgcctcacgggcaatctaggggagcaacatccgtccagagggacgagagggggacagagctttgtcagagctttgtcacaaaaggagagggaggggaagagtcaccggacagctggtgaggaacatgttcctgggaacaaaggccaagaggagcccaa

SEQ ID NO: 179939 - DNA, 1062 bp, Homo Sapiens
ttggcacagacttctccccattatccaacatagtgagatttttctatagttctatattttactctagtattaatgtggttttataaatgattatatgccttatattctggggggaaagaaatgtgaaaatgtgctaagtagacagaaacagaatatataagttgttttgaatgttatttcttttttaaaaaatttgcttggtgtcatatagccaaaactattcatggtgacagtttcattgcttactttttatatgatttcagcgaattgaaaacatgtatataatagaaaaaactggacttcatgctgagtatagatgatacatataaaagaagtcaaaatttggagaaaaaatttaaaaagataagtagaaaaatgaagtaactgtagaaaccatacttactctttgatctcaaatgcccaaaaactgaatgaaaatgtgaatttaggccgaccaggtagtcttgtcaataaactaaaagaaaaacaggaaaattgagaaatatgttacaactataacaacacaaaacagcatagttttgaaacacttgcagttcttaaatataaaagcttttattagttaattttttaaaaggatctcataggattgacactgaatcaggttgggaggtggaataagggtgatggcatattctttctgaattacttattataacatttctagaatcattaggtcagtgctactttgttgtcgtcaatgtacaataaaggaatcacaaattgatcttagtgataattttacagaggcagacattgcacataggtatgactgcaaaaatgggtggctaactctgggaagatacttgtgttaaactttatatgacatttaataacccttcatcataaggcaatgttttttacaaaaagattgaaaaaatcatgtaagtcatttactctgcaaaaatggcacattaggtgggggttccaaaatccataatgaaacaatgtgttttgcaactaagaaacattcattatgatatatggaaaacactgtctgtctacttgtcctttacaaaaaatgtaaactctgagatcataaaa

SEQ ID NO: 179940 - DNA, 1397 bp, Homo Sapiens
  misc_feature (1103)..(1146): n is a, c, g, or t
  misc_feature (1149)..(1279): n is a, c, g, or t
taaaaagcacgaacataggagtaggagtagggatgacaggtttcatcagttaatacttgagcagagagctgaatacagtaagataattgtaggatatcttgaggcagagtattctcagaacagaacatggtaagtacaaaggccccaaggcaggaacaagcttggtgaatgtgagaaatatgccagctggttaatgtggctgaagcacagtgaccaagggaaagttttacagagatcacggaggtgcttgagggctggattatgtaggcctctaaggagcatcacaggccactgcagagattttgtcttttaaatgagatagagtgctcttggagaatgtgactggagaggccgatggtagcagtggagatgcagagtagtagccgagatattttaaatgaaattgatttagtataggctgactgaaagagaaatcaaggattaattgtaggtttttacactgagcacttgaaaagagctgctatttgctgatatgagtaaggagtagtcttggaggaagaaaaccaagagtactgttttgaacaaaatgttgaagactcctggtaaatatcgaagtgtaaatatcaaataggaagtcagaaatatgagaatctggagtttaggaaagagaagggggttaggtttgtaagatctcatatcagtctgattcttatttttttgtagatatctaccctttctttctgtaaatgtttagaagcatgatgtctatgtgtgtatatatacacacacactcactcccccccgccaggactgcctcagttttcatctcagtatttgactaaaaccttctattcaacttcagtttcagccttagaataaccagatgtctaagtcaatgtcatttggggcatctctagacttgtgcaatcacaaaagtcaccattaccgctacatagtacgtattatgaccaatggatatcattcagagttctagtttacatatgctattatcaaacatatgtaagccttttaatgtaacttgggagtgaaattagtaaaattctatcaatttacataaattaattttactgtaaaaataaaatacattatgaaagtttctgtactaatgtctttgattacannnnnnnnnnnnnnnnnnnnnnnnnnnnnnnnnnnnnnnnnnnncgnnnnnnnnnnnnnnnnnnnnnnnnnnnnnnnnnnnnnnnnnnnnnnnnnnnnnnnnnnnnnnnnnnnnnnnnnnnnnnnnnnnnnnnnnnnnnnnnnnnnnnnnnnnnnnnnnnnnnnnnnnnnnnnnnnntgaaaataaactgcaaatatgttggcacttctccctaaatatggtggcatgtctcttaaaaataggatattctcctaaatagctacaatcacattattacacctaacaaatttaatgc

SEQ ID NO: 179941 - DNA, 1074 bp, Homo Sapiens
gaagaagctgggtgtgctggtgaactttcctctttgggggcctgcaggccatccgggatggtgtcattgaggccagcatcaaccacgagaagggctatgtccaatccaaggagatgattgacatctattccacccgagagccccagctagccttccaccagcgcatctccttctgcctagatatccacaacatgtctgtcaaggtgagaagcccgtggctgcagagtcacgcctggcagcagcacacccctccctccacactcatggattcctcagagaagactggcttaatttgtggcccacgtcccagccaatctctgtaaaatcactgagctgcagcacagggggcccagaatggggaggggacttggccatagttccatagccagttgccctctcctattgcgtttaagggatgatgtggtcaccagggaggaccaggcagggattcagagggcggggttctacatttggttccaaatttgaggcatttaacttctcaaagctctgtttctccatctctgaagctgatagggaggtgttacctgtcttgcttgcttcacagggttggtaagattaaaagaagtccctgtattgaggcacttagcgaagtctaaattgtaaaaaagatggcgctggtatctagctccacaaaagggtgagcccttatcctcagttaagcactgagtttggcgctgttactatttgcttgccatgtttttttctggtctcctccgaggaaactaggatattgctgccttgcttaaaatctggctaagccctactccacgtgacatgcaaggccctttgtgacctggtcccttaggtcaagcctcccctcccactcctgccccaccacccagcagccagcccactgggtgcaggccaggcccctcccacatggaatcctccaccgggaaggcctctccccgttgccacatccactgtgttcctccttttcctcctccctgcccagtcaagagagttggtcgtttattcctcttttttcagcattttccacagggcactgtaataattcctttgatgcctaagccccccactagactaactgga

SEQ ID NO: 179942 - DNA, 1911 bp, Homo Sapiens
ttggggcataccgtgggaaagtttcccacaggctgattttctgtccatctcaagaacctgtatgttctcttctttccctttccccaggtgccccctgctgaatttagaaaagtaacaatatatcaatcaatttaaaaagggtagaatattttggaatgacgggttgtattgttttctaaagtgctttagttttgacattttatcagtattttccagaggtaaataaattttggaaggattattacttctctgttggggccctagaacaatttagtcttttatggaaaagctgactatctgggatcatatgctcagtttgtatatttgagatctgagagatcacgttctgaagtcttctcatatttagtacacctctgattctcactagttgaatgcaagaacttgaaaggttcaggtaagtgttttgaaaaattttgactttccaaacttttgccacttgctatctgaaactcaggaatcaaaaaataccgacaggcactgttactttcaaaattctttctataagttgagaatgggacagatttgcagagcaagggaaacttgaacagttacttctagtggtaggaaatgaggtggctaggatattacccagctggtgggtgacttgggcagtgtgttcctgctttcagtggttagcctttaacaaatctgctttagagtgagagtagagggcaggctgttgtattacagtgctcttgtttttgtaaaatttaattcactctactgttattttgtctccttgggtaaagtgttatttaatttttcttcattttttagtaatatataacagtcagtgagagaatttggttttcagagatgtcatccaaagcagattttacagttgtttcctggttataaattgtctcaacaattctcttttagtcatttagattgtttaatatgggaaaaccggggtgtagaacatgttgtaaaattaaattttatttacttttttcttatttccaggtccaagcatctcattttgaaggcctaatcacaaccatagttgggtatatacttttagcaataacactgataatttgtcatggcttggcaactcttgtgaaatttcatagatctcgtcgcttactgggagtctgctatattgttgttaaggtctctttgttaatggtggtagaaattggagtattccctctcatttgtggttggtggctggatatctgttccttggaaatgtttgatgctactctgaaagatcgagaactgagctttcagtcggctccaggtactaccatgtttctgcattggctagtgggaatggtatatgtcttctactttgcctccttcattctactactgagagaggtacttcgacctggtgtcctgtggtttctaaggaatttgaatgatccagatttcaatccagtacaggaaatgatccatttgccaatatatatgcatctccgaagatttattttgtcagtgattgtctttggctccattgtcctcctgatgctttggcttcctatactgtataattaagagtgtgctgcctaattttcttccatacaatgtcatgctctacagtgatgctccagtgagtgaactgtccctcgagctgcttctgcttcctgttgtcttgccagcattactcgaacagggacacaagaggcagtggctgaatgggctggtgcgagcgtggactgtgaccgccggatacttgctggatcttcattcttatttattggagagactacgaagaatatgaacacagtgcaaatcaacaagttaacaataatcagcatgctcgaaataacaccactattcctgtgatgtgagaaggacttcatgcaccccaccaagtcatactccatacatggtagggcctgattgcttttcaaccataaccgccgaacttttaaattttcc

SEQ ID NO: 179943 - DNA, 888 bp, Homo Sapiens
  misc_feature (508)..(563): n is a, c, g, or t
ttggctcagtgtctgctcttggggctgacaatgggggcaggttatgttggtctgaaccccaggacttcctctgtcccagggtgtgacttgcagctgccatctcttccttctcgctgacatctccatttcattcacagggtcccaccggccccgctggtcctcctggcttccctggtgctgttggtgctaaggtgagaccccccactctcctctaagcatgaccctcatgggccaaggggttcatgtctccctgttccccaaaccaaagggacccagagtggcaagagagcagcccgttcactaacacctttgtcctggggtctccgtctctgatcttagagtcctgatcattgctctcctgtccctgtctccccttcctcctgccatcccgagaggcaaggttgggtttcccagggtggcttctgatatgtcctttcttctgattcagggtgaagctggtccccaagggccccgaggctctgaaggtccccagggtgtgcgtggtgannnnnnnnnnnnnnnnnnnnnnnnnnnnnnnnnnnnnnnnnnnnnnnnnnnnnnnnatggacagcctggtgctaaaggtgccaatggtgctcctggtattgctggtgctcctggcttccctggtgcccgaggcccctctggaccccagggccccggcggccctcctggtcccaagggtaacagcgtgagtaccaaactctcccttctgcccaccccatgcactggctccagtgcggctctcatctggggagcaggaagacgcacgccaactgagcgcccccgactctcagctcatcctcttctccccccttgcagggtgaacctggtgctcctggcagcaaaggagacactggtgctaagggagagcctgtaagtctcccc

SEQ ID NO: 179944 - DNA, 1587 bp, Homo Sapiens
  misc_feature (1012)..(1030): n is a, c, g, or t
cgacaacgataaaaaaaacaaagttctgcgggaagaagacaactagagacatgctgttggccacacatagtgctcttggggctgcttaagtctgtggagttctggggaagaaggtaagagcgatggctttgcaggagctctagtgattgtcgctacttcagttgatgacatgagattgttctttatttttcttcagctggttttcccatgggctatgcagcagcagctcctgcctattctcctaacatgtatcctggagcgaatcctaccttccaaacaggttacactcctggcacaccttacaaagtgtcctgttcccccaccagcggggctgtgccaccgtactcctcctccccgaacccctaccagactgccgtgtaccctgtgcgaagtgcctacccccagcagagcccgtatgcacagcaaggcacgtactacacacagccgctgtatgcagcacctcctcacgtcatccaccacaccacggtggtgcagcccaacggcatgcctgcaacggtgtaccctgctcccatcccccctcctagaggcaacggggtcaccatgggcatggtggctgggaccaccatggccatgtcagcaggtaccctgctgactgctcactccccaactcctgtcgccccccacccggtcactgtgcccacgtaccgggccccaggaacgcccacttacagctatgtgccccctcagtggtgatcacctgcaaatgtttgaggacggagctgtgcagtcacattattggggattccacagctggtgctgcaggccttgcgcctccaaccaggactttcttcttaatgctctcgacacttagctaaacacgactatatcccggcccagcaggccccagcgccgttagtctccagctgactctgtgggttggtcttaaagcaaattctgttttgtggactgcctggcaattttttagctaactgtaatgataaaaagggagtattaatctattctgaatcatatctagttgaatgcatgtttnnnnnnnnnnnnnnnnnnngcttgctcaatctacctgcagtgactgatgcaaaaccatcatatgcaaaatccaaaggaatggaaacgtattttacaacttgtatcactaatgcactgttgtaatgtatgcaaagtcttacagttataagtgttaaagtgaatttcttcatagagcatctgaaatatcttagatgattcttcaaccttttggggttgatgtgggttgccagttagggatgtggacattttagttttcagcgacctgtttctttggcactgactgtcctgggagggagttgcgaggtttgggagagagtagggaagccacagctgcttgggtgcagctggttcatggacatccctttgagtttaggcttggtggagtcagtggaacagggacatgcttaaagctcatcatgaaagattatggtagtgtggccagtgaaatttggggcgaggggggtggtttatgtgtcaacaaagcagtttctctgctatctaaattttcattacagttctcttagagagatgatgtttttaatgtcctttattggagaagtccctatgtaaaactaa

SEQ ID NO: 179945 - DNA, 1094 bp, Homo Sapiens
  misc_feature (872)..(933): n is a, c, g, or t
ggggtgttgaaggtctcaaacataatctgagaagggacaaggggcggcttagtcagggacagagacccacggccaccccatgctcacacgccacaacatgctgcatgccagtgtgatgtgtggagaaaagaaaagaacgcaggcagaaaccaaatgagaaacctggaggcttcagggaggaaatgccgggagaggaacagagcctggaacagcgaaagaaacacttaaatgtcagaaatcaagccgggcagaaaatgactggggaaaggacgggaggagcacgggcgtcggccgagcctcacctgagtcatcttctctctgttggccttggggttcaggggggcctcggtcagcagcactgggtgctcctccggggccacgcgcagctcgttgtagaaggtgtggtgccagatcttctccatgtcgtcccagttggtgacgatgccatgctcaatggggtacttcagggtcaggatgccacgcttgctctgggcctcgtcgcccacgtaggagtccttctggcccatgcccaccatgacgccctggtgtctggggcgcccgacgatggaaggaaacacggctcggggagcgtcgtccccagcaaaaccagctttgcacatgccggagccattgtcaatgaccagcgcggcgatctcttcttccattgcgacctgcccggaaaaggatggactcaggcgggcgcgtctgtaacacggtcccctccccacagccacctaatgccctcccgcggggcagcctcggccctgccccaaccccagcggccgtggcctccaagatcgcaaccgcctggaaccgaaggccgggccttttacgtaacgtccacggctcggaagtctgcactgcggccgggnnnnnnnnnnnnnnnnnnnnnnnnnnnnnnnnnnnnnnnnnnnnnnnnnnnnnnnnnnnnnnttgttcccggggaaggcgcgacgaggcctcggcagctggaagcggggccagccggggtcggggggcgcaggcctgcgacgtccagctcaggccccggggcggggcgctcaccggcagagaaacgcgacggcggagcggcggaagaacagagtgcgagccaa

SEQ ID NO: 179946 - DNA, 1599 bp, Homo Sapiens
  misc_feature (596)..(610): n is a, c, g, or t
  misc_feature (862)..(897): n is a, c, g, or t
ttggcatttgcatggcagattttctccatccccttattttgggccagtggctgtcattacatatgaggtgagtctcttgaagactgcagatggtgagccttgcatttttatccagtttgccattgtatgtcatttaagtgggggtgtttagcctatttacatttatggttaatgttgatacatgagattttgatcctatcatcacgtttgtagctggtttttaggtagacttgattgtgtagatactttatagtgcctgtgagctatgtacttaagtgggtttttgtggtagcaggtgtcattctttttactcaatgtatagcactcccttaaggacctttcataaggctggtcaagttgaaattgattccctcagtatttgcttatctgaggagaaatttgtttcttcttcacttaggaagtttagtttagtgaaatataaaattattgcctggaatttattttcattaatgatgttggacataggcccttaatctcttctggcttgtaaggtttttgctgagatatttactactagcctagtggagttcttgctttatgaaaacatgacctttctctctagctgcctttaagannnnnnnnnnnnnnngtatttactttggtgaatatgatgactgtgtgccttagggatagtcaccttttgtagtgcctagctgggtttgctgtattttttggatttacatgtcactctctctagcgaggttaggaagattttcatagactctattctcaaatctattttccaagttgccttttctctttgtttctcttctaggaatgacaatgagtcgtagatttggtctctttatataattccatatttcttaaagctttggttcannnnnnnnnnnnnnnnnnnnnnnnnnnnnnnnnnnngactcagttgattcaacgaaccagtctttgagctctgagattctttccttagcttggcctaccttctgttaatatttcttattgtattataaaattcttatactgaattttttctgctctagaaattcagtgtggctgttgtttaaaatggcaatttcatctttcagcacttacttagattgctttactggattacttggctagggtttcaactttctccttaatgttcatgagcttccctgccatcgaggttctgtattctatgtctgttgcaattattttagactgattaagaaccattgcttggtagctagtgggctaattttgaggtaagaggacactctagctttttgaattgccagagttcttgcactgattttttctcttctggtagggttagtgttcctttaactgtagtgtatgttgagtataggcaattggttttgtttctggatgctttcaaagggtcagggctttctctgtccaggatttttatgtatgagtaattctggtgtttggtttcacaggtgtatatgtagcacgataaattttgatgttgtagtttgggatgtgatccaatgcatagtgcttaagagtgatggccagtggctagcctaatacccagtggcatggctgttttatacttccttttgtttgcagtgtgctctatagtggggggtggggagagatgcctccatcacc

SEQ ID NO: 179947 - DNA, 1742 bp, Homo Sapiens
  misc_feature (148)..(163): n is a, c, g, or t
  misc_feature (274)..(282): n is a, c, g, or t
  misc_feature (1353)..(1414): n is a, c, g, or t
ttggctaatattatcagcttagataatactttaatttttaacttatatattgagtattaaattgatcagttttatttgtaattatctatcttccgcttggctgaatataacttcttaagcttataacttcttgttctttccatgttannnnnnnnnnnnnnnnaatgtattgaatttcttctgacactcattctagtaacttttttctcggtgtgcaacgtaagttataatttgtttctcagatttgagatctgccataagtttgaggctttannnnnnnnnatttgctttatggcaagtcggacaacctgcatggatttggcatcaatgtagtcacccatatctaagagcagcacttgcttcttagcatgatgagttgtttctggattgtttctttattttacttatattcctggtagattcttatattttcccttcaactctattcagcattttaggaattcttaggactttctgagaattttagctttctgtattaaatgtttttaatgagtattgcattttctcaaaaagcacaaatatcaatagtgtacacatgaggaaaactatatatatattctgttgcagatgacagcatctcataacaaaatcctagttacttcatttaaaagacagctctcctccaatatactatgaggtaacaaaaatttgtagtgtgtaatttttttaatattagaaaactcatcttacattgtgcacaaatttctgaagtgataatacttcactgtttttctatagaagtaacttaatattggcaaaattacttatttgaatttaggttttggctttcatcatatacttcctcattaacatttccctcaatccataaatgcaatctcagtttgaatcttccatttaacccagaagttaatttttaaaaccttaataaaatttgaatgtagctagatattatttgttggttacatattagtcaataatttatattacttacaatgatcagaaaatatgatctgaatttctgctgtcataaattcaataacgtattttaggcctaaacctttccatttcaaatccttgggtctggtaattgaaaataatcattatcttttgttttctggccaaaaatgctgcccatttatttctatccctaattagtcaaactttctaataaatgtatttaacgttaatgatgtttatttgcttgttgtatactaaaaccattagtttctataatttaaatgtcacctaatatgagtgaaaatgtgtcagaggctggggaagaatgtggatggagaaagggaaggtgttgatcaaaaagtacccaagtttcagttacacaggaggcatgagattgatctagtgcaaaaaatnnnnnnnnnnnnnnnnnnnnnnnnnnnnnnnnnnnnnnnnnnnnnnnnnnnnnnnnnnnnnntgatttacataatattttacatatttataaagcacatgcaatatgttgttacatgtatagaatgtgcaacgatcaagtcagggtatctgtggtatccaccactttgagcatttatcgattctatatgtcaggaacatttcaagttatctgttctagcaaggaaatataaaatacattatagttaactatggcctatctacagtgcaactaaacactagattttattcctttccaactgtgggtttgtattcatttaccaccctcttttcattccctttctcacccacacactgtgccgggcctcaggcatatactattctactgtctg

SEQ ID NO: 179948 - DNA, 1160 bp, Homo Sapiens
ttggattcctcctcatttaaggaaccgagaagctactaaaggtttctacgataaagacagttcagggtggagttctagcaaagataaggatgcgtatagcagttttggatctcgtagtgattcaagagggaagtctagcttcttcagtgatcgtggaagtggatcaaggggaaggtaagtgatttcttaatcaccttacgtgtatgtataataacagtttaataagtcgttatcctgaccacctgtttggatgttaagcattatgtctgtttggtcattgtattttcttagccgtaagaggcttttactaaattgaacctgttacttagaaattagatgaaaataggaatatgctcattggcataatgaaatgagttattctatttctcgagttttatatgttctacttaaaagagtaagttcatctagtgaatggcctaatttggttgggatttttgtggactctataacaatttctaaacaccttgtatttttgattacacaagtgtggtgaactgaccccacgtgcctaatagctgtggttagtcctgtgtcctgatttttcgcaaacaggcctaaaactcttaaaaacatcttagttcaggtaaggattattttctaccttttatccaaagtctgtcacacaggtgaattgtcctttaagtgacatcctagtataactaggacgattgatatttggtgtgctattttcttgttttccctaccattaaatatatttggatgagcactttaaatgaaggttgtgagctgtgtgccgatttcaaataaaatccttattcttaattttggcatctgtgaggccttttaggctatacaactttatagaaatgtaaagattactgattttagaaaacgaggttatgtaaatgatgctggttagagagccttatttgtcaagtaactcagaattggattgttgacatccttatggttagccataacttaagtctccagatacagttctagagtagggataagaatctgataatggttaaatgatatgattctgattaattgcttgtgctgttcaagtttgatgatcgtggacggagtgattacgatggcattggcagccgtggtgacagaagtggctttggcaaatttgaacgtggtggaaacagtcgctggtgtgacaaatc

SEQ ID NO: 179949 - DNA, 926 bp, Homo Sapiens
ttgggttgagacaggggcaggagactgcctgtgagagagggatgacaaagcaagacgctgttccaaaattaaaagttaaaaaatgagataaatacttgaaatattacaattattaaaatagttgttttccccatgggaaaaaaaagttgagcagagctgtgtctttgcactcagaaaaaactcttactctgttgaaggctagtgactcttctaaacaccaaccccttcacctttttactttcctaagactttctttggaaaatcaaggagttagcactttttccccctggaagaattaaatgcctctccagaactgcagcacaggaggttaacttctaccacctttggaggcctgcaagctaccagattaaatacttaaagctaagcattcatcatttcttaacctgccctctacagtcatgcacttcctgctttttactttgtcagggctcgtactcaaactattcatagcttcatgaaacaggaactaaatgctgtctgagcctttccccttgtaactctcagggttctacttatccttcatagacagaagatgatgatatgtcctgactgttgaagagaaattagacttaatgtgatcctgtacagttaaaccaaaggccagatagggattttttatttcaatcaactttctattgtaggcctaggtttggaaaaccttagcaccccctaatttgtaagacttgaactgttttaaagataagggatacacagccaaagctttctttgtaattctgagatttttggtgtttttacagatacttagtctaaatcttttatcagacagttatcatgattattattctgacttcaacaactgcattttctaaagggaagtgagaattaggaaacattttcctgtacatctgtttatctatcccaggtgtgttggtttggattttttc

SEQ ID NO: 179950 - DNA, 2121 bp, Homo Sapiens
  misc_feature (88)..(96): n is a, c, g, or t
  misc_feature (1289)..(1297): n is a, c, g, or t
  misc_feature (1482)..(1492): n is a, c, g, or t
ttggcctgtttttacttcctcaccctgaattcgttttgtaaatgtagagtttggatgtgtaactgaggcgggggggagttttcagtannnnnnnnngtgggggtgggggcaaaatatgttttcagttctttttcccttaggtctgtctagaatcctaaaggcaaatgactcaaggtgtaacagaaaacaagaaaatccaatatcagggtaatcagaccaccacaggtttacagtttatagaaactagagcagttctcacgttgaggtctgtggaagagatgtccattggagaaatggctggtagttactcttttttccccccacccccttaatcagactttaaaagtgcttaaccccttaaacttgttattttttacttgaagcattttgggatggtcttaacagggaagagagagggtgggggagaaaatgtttttttctaagattttccacagatgctatagtactattgacaaactgggttagagaaggagtgtaccgctgtgctgttggcacgaacaccttcagggactggagctgcttttatccttggaagagtattcccagttgaagctgaaaagtacagcacagtgcagctttggttcatattcagtcatctcaggagaacttcagaagagcttgagtaggccaaatgttgaagttaagttttccaataatgtgacttcttaaaagttttattaaaggggaggggcaaatattggcaattagttggcagtggcctgttacggttgggattggtggggtgggtttaggtaattgtttagtttatgattgcagataaactcatgccagagaacttaaagtcttagaatggaaaaagtaaagaaatatcaacttccaagttggcaagtaactcccaatgatttagtttttttccccccagtttgaattgggaagctgggggaagttaaatatgagccactgggtgtaccagtgcattaatttgggcaaggaaagtgtcataatttgatactgtatctgttttccttcaaagtatagagcttttggggaaggaaagtattgaactgggggttggtctggcctactgggctgacattaactacaattatgggaaatgcaaaagttgtttggatatggtagtgtgtggttctcttttggaatttttttcaggtgatttaataataatttaaaactactatagaaactgcagagcaaggaagtggcttaatgatcctgaagggatttcttctgatggtagcttttgtattatcaagtaagattctattttcagttgtgtgtaagcaagnnnnnnnnnagtgtaggagaaatacttttccattgtttaactgcaaaacaagatgttaaggtatgcttcaaaaattttgtaaattgtttattttaaacttatctgtttgtaaattgtaactgattaagaattgtgatagttcagcttgaatgtctcttagagggtgggcttttgttgatgagggaggggaaacnnnnnnnnnnnctatagacttttttcagataacatcttctgagtcataaccagcctggcagtatgatggcctagatgcagagaaaacagctccttggtgaattgataagtaaaggcagaaaagattatatgtcatacctccattggggaataagcataaccctgagattcttactactgatgagaacattatctgcatatgccaaaaaattttaagcaaatgaaagctaccaatttaaagttacggaatctaccattttaaagttaattgcttgtcaagctataaccacaaaaataatgaattgatgagaaatacaatgaagaggcaatgtccatctcaaaatactgcttttacaaaagcagaataaaagcgaaaagaaatgaaaatgttacactacattaatcctggaataaaagaagccgaaataaatgagagatgagttgggatcaagtggattgaggaggctgtgctgtgtgccaatgtttcgtttgcctcagacaggtatctcttcgttatcagaagagttgcttcatttcatctgggagcagaaaacagcagcagctgttaacagataagtttaacttgcatctgcagtattgcatgttagggataagtgcttatttttagagctgtggagttc

SEQ ID NO: 179951 - DNA, 4294 bp, Homo Sapiens
  misc_feature (1957)..(1968): n is a, c, g, or t
  misc_feature (2173)..(2181): n is a, c, g, or t
  misc_feature (3375)..(3383): n is a, c, g, or t
  misc_feature (3568)..(3577): n is a, c, g, or t
ttggagccagcgcaggggcttctgctgagggggcaggcggagcttgaggaaaccgcagataagtttttttctctttgaaagatagagattaatacaactacttaaaaaatatagtcaataggttactaagatattgcttagcgttaagtttttaacgtaattttaatagcttaagattttaagagaaaatatgaagacttagaagagtagcatgaggaaggaaaagataaaaggtttctaaaacatgacggaggttgagatgaagcttcttcatggagtaaaaaatgtatttaaaagaaaattgagagaaaggactacagagccccgaattaataccaatagaagggcaatgcttttagattaaaatgaaggtgacttaaacagcttaaagtttagtttaaaagttgtaggtgattaaaataatttgaaggcgatcttttaaaaagagattaaaccgaaggtgattaaaagaccttgaaatccatgacgcagggagaattgcgtcatttaaagcctagttaacgcatttactaaacgcagacgaaaatggaaagattaattgggagtggtaggatgaaacaatttggagaagatagaagtttgaagtggaaaactggaagacagaagtacgggaaggcgaagaaaagaatagagaagatagggaaattagaagataaaaacatacttttagaagaaaaaagataaatttaaacctgaaaagtaggaagcagaagaaaaaagacaagctaggaaacaaaaagctaagggcaaaatgtacaaacttagaagaaaattggaagatagaaacaagatagaaaatgaaaatattgtcaagagtttcagatagaaaatgaaaaacaagctaagacaagtattggagaagtatagaagatagaaaaatataaagccaaaaattggataaaatagcactgaaaaaatgaggaaattattggtaaccaatttattttaaaagcccatcaatttaatttctggtggtgcagaagttagaaggtaaagcttgagaagatgagggtgtttacgtagaccagaaccaatttagaagaatacttgaagctagaaggggaagttggttaaaaatcacatcaaaaagctactaaaaggactggtgtaatttaaaaaaaactaaggcagaaggcttttggaagagttagaagaatttggaaggccttaaatatagtagcttagtttgaaaaatgtgaaggactttcgtaacggaagtaattcaagatcaagagtaattaccaacttaatgtttttgcattggactttgagttaagattattttttaaatcctgaggactagcattaattgacagctgacccaggtgctacacagaagtggattcagtgaatctaggaagacagcagcagacaggattccaggaaccagtgtttgatgaagctaggactgaggagcaagcgagcaagcagcagttcgtggtgaagataggaaaagagtccaggagccagtgcgatttggtgaaggaagctaggaagaaggaaggagcgctaacgatttggtggtgaagctaggaaaaaggattccaggaaggagcgagtgcaatttggtgatgaaggtagcaggcggcttggcttggcaaccacacggaggaggcgagcaggcgttgtgcgtagaggatcctagaccagcatgccagtgtgccaaggccacagggaaagcgagtggttggtaaaaatccgtgaggtcggcaatatgttgtttttctggaacttacttatggtaaccttttatttattttctaatataatgggggagtttcgtactgaggtgtaaagggatttatatggggacgtaggccgatttccgggtgttgtaggtttctctttttcaggcttatactcatgaatcttgtctgaagcttttgagggcagactgccaagtcctggagaaataatagatggcaagtttgtgggnnnnnnnnnnnnacacgaatttgaggaaaaccaaatgaatttgatagccaaattgagacaatttcagcaaatctgtaagcagtttgtatgtttagttggggtaatgaagtatttcagttttgtgaatagatgacctgtttttacttcctcaccctgaattcgttttgtaaatgtagagtttggatgtgtaactgaggcgggggggagttttcagtannnnnnnnngtgggggtgggggcaaaatatgttttcagttctttttcccttaggtctgtctagaatcctaaaggcaaatgactcaaggtgtaacaaaaaacaagaaaatccaatatcaggataatcaaaccaccacaggtttacagtttatagaaactagagcagttctcacgttgaggtctgtggaagaaatgtccattggagaaatggctggtagttactcttttttccccccacccccttaatcaaactttaaaagtgcttaaccccttaaacttgttattttttacttgaagcattttgggatggtcttaacagggaagagagagggtgggggagaaaatgtttttttctaagattttccacagatgctatagtactattgacaaactgggttagagaaggagtgtaccgctgtgctgttggcacgaacaccttcagggactggagctgcttttatccttggaagagtattcccagttgaagctgaaaagtacagcacagtgcagctttggttcatattcagtcatctcacgagaacttcagaagagcttgagtaggccaaatgttgaagttaagttttccaataatgtgacttcttaaaagttttattaaaggggaggggcaaatattggcaattagttggcagtggcctgttacggttgggattggtggggtgggtttaggtaattgtttagtttatgattgcagataaactcatgccagagaacttaaagtcttagaatggaaaaagtaaagaaatatcaacttccaagttggcaagtaactcccaatgatttagtttttttccccccagtttgaattgggaagctgggggaagttaaatatgagccactgggtgtaccagtgcattaatttgggcaaggaaagtgtcataatttgatactgtatctgttttccttcaaagtatagagcttttggggaaggaaagtattgaactgggggttggtctggcctactgggctgacattaactacaattatgggaaatgcaaaagttgtttggatatggtagtgtgtggttctcttttggaatttttttcaggtgatttaataataatttaaaactactatagaaactgcagagcaaaggaagtggcttaatgatcctgaagggatttcttctgatggtagcttttgtattatcaagtaagattctattttcagttgtgtgtaagcaagnnnnnnnnnagtgtaggagaaatacttttccattgtttaactgcaaaacaagatgttaaggtatgcttcaaaaattttgtaaattgtttattttaaacttatctgtttgtaaattgtaactgattaagaattgtgatagttcagcttgaatgtctcttagagggtgggcttttgttgatgagggaggggaaacnnnnnnnnnnctatagacttttttcagataacatcttctgagtcataaccagcctggcagtatgatggcctagatgcagagaaaacagctccttggtgaattgataagtaaaggcagaaaagattatatgtcatacctccattggggaataagcataaccctgagattcttactactgatgagaacattatctgcatatgccaaaaaattttaagcaaatgaaagctaccaatttaaagttacggaatctaccattttaaagttaattgcttgtcaagctataaccacaaaaataatgaattgatgagaaatacaatgaagaggcaatgtccatctcaaaatactgcttttacaaaagcagaataaaagcgaaaagaaatgaaaatgttacactacattaatcctggaataaaagaagccgaaataaatgagagatgagttgggatcaagtggattgaggaggctgtgctgtgtgccaatgtttcgtttgcctcagacaggtatctcttcgttatcagaagagttgcttcatttcatctgggagcagaaaacagcacgcagctgttaacagataagtttaacttgcatctgcagtattgcatgttagggataagtgcttatttttaagagctgtggagttcttaaatatcaaccatggcactttctcctgacccctttccctagggatttcagattgagaaatttttccatcgagcctttttaaaat

SEQ ID NO: 179952 - DNA, 1295 bp, Homo Sapiens
ttggcatagggtgatatttagtcatccaaacttttggaatttgtatctttgactgtaatcaggttttcagtttggtcaagtttcaagataagaaaaaaggctagtttgtggtccccaattcaggagaggtatggacaccttaacatttttgggtcctgtttcaggacttccagttccaataaggatgggcagaaacttttcccactcctatctagtgcctccaaggccagggcccagatgatcacctgagctcatataacttttctctctggcttgtaggtaccatgtctaccctacctgtaggaacacatccgggattctaggattttctgtcactgtggggactcaggcaaccaaatacaattctgaagttgttgataagaagatagaagagtttctttctagctttgaggagaagattgagaacctcactgaagaggcattcaacacccaggtgactgtgccagcctggtcttttggcctttggcccacacaagcccccagatacaaatcttaacagggcttcgccggccagtttttgagctttgcagccccaccttcctcttacaatagtgtctccctagcttcatccgtgcctcttatactggcatgtccatcacaagccgggctggacagggcccagtgtgttctgtgggaagtggtatgttgcctcacctgagcatctttctttttggtgggaacaggtcacagctctcatcaagctgaaggagtgtgaggatacccaccttggggaggaggtggataggaactggaatgaagtggttacacagcagtacctctttgaccgccttgcccacgaggtaacatggttttcagagtaagacagctcaaactggtcaaggttcctgattctacaggcatcacaggtctgtgcacaccagcattgtgtggaagagaaactcgaaacactagtcctggcctgattactcgctcacttcctgagttttcagactggcctctctagcaccttaggtggccacgtgagctgggtgctaatccttaccacaccaccaccaatttcaatcagagcagctctatttttatgctatatattgaggtctacaagattttgtggagaaaaagagttttgccgtttaaagaaaattgaggactctttgtctttacggagttcattattccaagtgcatgtgttttgacaacttctattccaaagtagtaaaacctatgaaaaagatctggatcttgtactccagtgtgactttggttatacatagcccctacatggtgaattaccataggacatcattgctctg

SEQ ID NO: 179953 - DNA, 1562 bp, Homo Sapiens
ttggggcagagaagcgttctgtttttatcatcgtccctgtcttggtcctgtccgtgctccccatgtgctcccaatcagttgtcttcgttcctcaacatcagggaaagaaaaaacagcaacacttctccctgtcatcagctctgctgtctccttgtcaggccttgggacgttctctgggctcagtctagggtcgtgcctcatgcctcatgcctctctgggaaggttcccaggggcgccgcctccatggttggctggtgggttttaaaggggaaggttgggaggaggcctgtggaaggaggagggccgtccacacccgtggggcaaagcgtgttccatgaaaccagtgctgtgcgtgctgggatgaaagcctcccagcctctcgtgctgaagggaaaggtggaccgaactggcttagctgctgtggcaatggggtggggggtgagtcctaatcagaaggtgggagaagagaataacaaaatggaactccgccccctgccgccacatttccttaagttttaggagttggggcctatgagtagaatttgaaagaactaccaaaaaagcttatttttggaaattaagtcagctttgcctgtggtttggctaggaataaatatttacctgtgtgcccctacagagatgacacagacccaaagtgggacattgagcaaggcacaggctggttcccctcctgtcctctgtcctcattctgtgagtgccaccatcaccaggtactgtggcctgcagaaataaacgaggcaccaaccctgccctcagggaccccgtgtcttcttagggacagaggactcagaaacatctgtgtccccgcatgttaagtgcatgcacacagtgctgaggctttgcagagaagggccatggctccctgaggagaccaagaaaggcacatagaagtgacttctcagctggcccttgcaggatccctgggtgcctgtacctctccagtccagctgagcaaggaggctcaggaattaatgaagatggggcttgtgtagcacgatggttctaggccatcccttttccatggctcaagtccattgaaggcagcctccaaaatcagggggttgcctgatcctcctagtgccacaatcccagtcctagctagaacttgccatggttcttctccctaaaagttcccaggggacaggagacaggtgttgcttttctaatggagcgggacctcgcatggacggggccctccaagcctgctaacaccctgttcgcactgactcagccctggaagagaggccggcagtgatgacctcgcccctgtacctggagatcatcatctattgcacaggggccttcctcatctcctgcatggtggggtcggtcatcgtctacaagatgaagagtggtaccaagaagagtgacttccacagccagatggctgtgcacaagctggccaagagcatccctctgcgcagacaggtaacagaaagtagatgggggatttgcacacttcagcaccacctctctctctgggactctaatgccctgccctctccattgtccctaattttatagcttttgggactttattt

SEQ ID NO: 179954 - DNA, 1710 bp, Homo Sapiens
  misc_feature (272)..(604): n is a, c, g, or t
  misc_feature (1067)..(1114): n is a, c, g, or t
ttgggtttaaatgtttaattcctcccaggcgtttttcctccaattttatatttgatttttcattcaattcacagttggtatcattaaaaaaaattctaatacaattagctagaccttctgagaaaaatgttagaattaaactcaagcagtcagtatagtatatttcttaaccgactggttttagcttatcagaaagtaattattttatgtatttaaatacatttacaaagaaaatgaggcttttaaacagacctcactatttaacattgtannnnnnnnnnnnnnnnnnnnnnnnnnnnnnnnnnnnnnnnnnnnnnnnnnnnnnnnnnnnnnnnnnnnnnnnnnnnnnnnnnnnnnnnnnnnnnnnnnnnnnnnnnnnnnnnnnnnnnnnnnnnnnnnnnnnnnnnnnnnnnnnnnnnnnnnnnnnnnnnnnnnnnnnnnnnnnnnnnnnnnnnnnnnnnnnnnnnnnnnnnnnnnnnnnnnnnnnnnnnnnnnnnnnnnnnnnnnnnnnnnnnnnnnnnnnnnnnnnnnnnnnnnnnnnnnnnnnnnnnnnnnnnnnnnnnnnnnnnnnnnnnnnnnnnnnnnnnnnnnnnnnnnnnnnnnnctctatacaattatttgaagaatgtcttcttttaaatgtacatggaatgatagatttggaaaaattaccattttacaacccttaatgtaattaaatctggcaaaaatcgatggtaaaacccattaagtggaaaaaattttaaggaactttgtttacaagtgtcagaacatcacagatatctattgcaaaagaattgcctttacagtgagatttggctatcaaactgcatttcactacttctggaataagccagcattatgtggctcttgatgggatgcggtatgaagcatgtgtgatcatccttgatgtactgccgaaaatgtttacctcaaatttaattaaatctttcttttgtctagacttatcttcctgtttaaagaaatacaggaatagaggaacaagttgaattacacagtatggaaataaatagacaagtccagagttggtataggacaactggacnnnnnnnnnnnnnnnnnnnnnnnnnnnnnnnnnnnnnnnnnnnnnnnnttaaacataacacgaggaagctgttaaaactggtgtaatagctcaaaagaattaagtattccagatttcgggagggatgaagagggagatattcagaaaccttcaccagattcctcccaacttgatcatagtggattaatgacgtgctttgtggatgtggttagtcaatgacaccagcttgacggatctttctttctgcaccaaaccccattgagttatctggtccccttggctgacgaagagccattaggcgaggatcactggcatcatccagggtgatgttcttcaagcgactgaccaaccgatcaggtcgaggagctgcaacagccttggggccctcacagactcgccaaacattccaggcactgcacttgccagtgcgctgatgaagaatcacggagaactccacctcatctcctgcctggagctcaaggccatcctcaacttctttcatatggaaaaagagcttcttgctatcccctacttcatagttaatgaagccaaactgatcttgcacacattccactggccctatgcagggtgtgatgttgtaagccatagtttgtgcatttggccctggtctggacttttcaaaa

SEQ ID NO: 179955 - DNA, 2187 bp, Homo Sapiens
gccaactttgtacaaaaaagttggctttgttcccattcagcttcacagggacaagggttgggggtggtatcagaggacagccccttagtctcccaagagcactttgatgcttgatcccattctctacattcccccagcccagtcatctaaggccagagctcttttctctgctcaggcattattgacaggataagtcctggcattcagacaggtctggtgaagtgaccaggtactctggcccagaagttctctgtcggctccccccgcaggctccaattcaggtactgtatgttattctcttgttcctcttgccactggctttttccttagtcttaagttccaaggaattgttcccctgtgtttttttattttcctgacttattcaagcagagctagctcagagtacaggtctgtaacaagggcttattaggagatagatgaaaaagtgcaggtttgtatatgtaagttgtccattactatagatagatactattccaggcattggactttaactgcactgcctaaaagagcccaaagataaacttcacaataggctgatatgtggaatgggaggaggagataaagaacggggtttctgttttattcataagctcagtcttagcttcagtcttttctgagcatttgtttatttgtaagatggaagtcaaagtaagtgggaagtctgtaggtcagctctattttccatgcctgcccttgacttctcctcagctgttctctgcctgtgcaggtgaggcaggggaggtggttggtccagagagaactaaaagaagttgttttcttggactataggtccagctgcaaggcagggtgcctttcctatgtgttcctcttttcactaaaagactcaaaatgctttagcagctagatctggaactaactcttctggatggggtaggaacttccctgcccttcccttagggaagctcatgtttccaagtcagacagcagggggcattgggtgcctttcggacagaaggaagctgcctaagctagaaggcctgcctgctgtagtttatttcttttgccttgttcagtgaatttacccagagggtggctgagattgaggctttgggagccccaagaagctgcttggttttaatgtgctgccttatagctgagcctgttgtgctcagggcaagtagtaggatgttccccctgggatgtgcaaggttctctcaagcagacatgagcctccatcactcccaccactccctgcaactcagcctcctcttctcagcctgtgccttcctccagttctagtaaacactgccaaatgaatatagttctccgactcttctctgggggttcattggcagctgctgctttcttcattttttaaaatttatttgccacttggtgaaagccactgagatggttttttccagccttgggcaagttggagctttggaatctggagtgaatgaggtcatctggatttcattgtcttcttacgaagccagcagtaagcttgggcagtccactcacccacccctagggccatatctggggatgaagccacccccgacctatacataggaaatgattgatgtgcctggtcttatacccagtctgtgtctggtttctctaccctcagtgccctttggcttaggctcaggatgggtgggcctcccttccccagcagctgcctcagccctgatcaagggcagttatttggctcaaggtgagtagtggtttttaaaccctactcccacacactgctgagtctgtgttttcctttcttcctgaccaggtaaactgtcttgagccccaccctcacctgcctgtgctggcaaccagtggcctagaccatgatgtgaagatctgggcacccacagctgaagcttccactgagctgacagggttaaaagatgtgattaagaagaacaagcgggagcgggatgaagatagcttgcaccaaactgacctgtttgatagtcacatgctgtggttccttatgcatcacctgagacagagacgccatcaccggcgctggcgagaacctggggttggggccacagacgcggactctgatgagtctcccagctcctcagacacatcggacgaggaggagggccctgaccgggtgcagtgcatgccatcttgaggcctcatacctaggtggggcaggctggggctgccaacctgatcctgcctgggcaacccttt

SEQ ID NO: 179956 - DNA, 1397 bp, Homo Sapiens
ttaaagtccaatgcctggaatagtatctatctatagtaatggacaacttacatatacaaacgtgcactttttcatctatctctaataagcccttgttacagacctgtactctgagctagctctgcttgaataagtcaggaaaataaaaaaacacaggggaacaattccttggaacttaagactaaggaaaaagccagtggcaagaggaacaagagaataacatacagtacctgaattggagcctgcggggggagccgacagagaacttctgggccagagtacctggtcacttcaccagacctgtctgaatgccaggacttatcctgtcaataatgcctgagcagagaaaagagctctggccttagatgactgggctgggggaatgtagagaatgggatcaagcatcaaagtgctcttgggagactaaggggctgtcctctgataccacccccaacccttgtccctgtgaagctgaatgggaacaaagaaaagatcctcaaatcagtcaggagatctgggcaaggcagaaaataacttctaagatctttggttctaacattctacgttacaattacattctactctacatttacaatttgcatgatatagaactgctgagtctactacattgaaagtagtgcctggtaacccccactgctggaaaattaggaccaaaaaacagagcagagggagccaagtaaaagaccacatcgatcattcagcttacacagagacaagaatatgtaaggaaatttgcttcaggggtagcctctatatctcttattctactcatttactcttaggaccactaaaacttaggcctggggcccacccatcccaagtagatgccttcctcacctgggcaaatgggttaatcatcaaaccctggcattggctgagctaaaagcaaactggcctgcagaatgcttttggagaatggacaaatgctggcctgggagagggcattcagccctgcatctctctggaacagaatgcaaggcaatagcttatgtcaagaaaaaattcactggccccttctgacttcctttctctaaatgcctattgcataattcccattaagactcaagtgttttgggtttgttcactgcagatgacacagggggacctatggaagagttggaaatgaagcagggaagagtgagacacaccttgaacttctagactcctctccatttgtattcaaaccataaaaaccctagatctatgcaggtcccaggtccctgaaatttagaggaaaccagaagaaaatttgaaataccctttcaccagggcaagaaaaacataaggaatgggatcctgattgcaaagaaccattctaaattctaaaaccactctctgaaaaaacctcatcaagagatggctaggctctttgccaa

SEQ ID NO: 179957 - DNA, 992 bp, Homo Sapiens
ctttgtacaaaaaagttgggaatgtaattgtaccatctgtaaaatgttagaaccaaagatcttagaagttattttctgccttgcccagatctcctgactgatttgaggatcttttctttgttcccattcagcttcacagggacaagggttgggggtggtatcagaggacagccccttagtctcccaagagcactttgatgcttgatcccattctctacattcccccagcccagtcatctaaggccagagctcttttctctgctcaggcattattgacaggataagtcctggcattcagacaggtctggtgaagtgaccaggtactctggcccagaagttctctgtcggctccccccgcaggctccaattcaggtactgtatgttattctcttgttcctcttgccactggctttttccttagtcttaagttccaaggaattgttcccctgtgtttttttattttcctgacttattcaagcagagctagctcagagtacaggtctgtaacaagggcttattaggagatagatgaaaaagtgcaggtttgtatatgtaagttgtccattactatagatagatactattccaggcattggactttaactgcactgcctaaaagagcccaaagataaacttcacaataggctgatatgtggaatgggaggaggagataaagaacggggtttctgttttattcataagctcagtcttagcttcagtcttttctgagcatttgtttatttgtaagatggaagtcaaagtaagtgggaagtctgtaggtcagctctattttccatgcctgcccttgacttctcctcagctgttctctgcctgtgcaggtgaggcagcggaggtggttggtccagagagaactaaaagaagttgttttcttggactataggtccagctgcaaggcagggtgcctttcctatgtgttcctcttttcactaaaagactcaaaatgctttagcagctagatctggaactaactc

SEQ ID NO: 179958 - DNA, 360 bp, Homo Sapiens
ttgggtcccctacccctttcccatccccacaagctaaattggaggactggggagtcataattcccgttacgtgttcttgttgctgattggggaaattttttacttcaccccccttggtatcattagctcaggaaaaagttaaatttgtttcttctatatttgcctataggaagaggaatatttgtctcttctgtcgacttgaggaacgacacattaatcaaaggaagaataatttgatataactatatgcatctagttatccagcttggaccttgtatgataggggtataatagttggaaattttgaaaaaggatgtagtcctgccatatgagggacagctgcatcagaccttctctctc

SEQ ID NO: 179959 - DNA, 2076 bp, Homo Sapiens
  misc_feature (229)..(239): n is a, c, g, or t
  misc_feature (810)..(860): n is a, c, g, or t
  misc_feature (896)..(910): n is a, c, g, or t
ttggaacagaatttcaaaatagatgtcaaatatgaagtaattcagacttccaaagaaggaaagagttctgcccagggcagtatgagcaaatccacagggatgttaagatttggtccaactcaaaggtttatgggcagtgagcctagagtctcttgagagtaaacccttgcatttgggacaaggagaatatgtgaagttcaggagtgctcacactagagcaagatccagnnnnnnnnnnntccaatggcattttaaactagattgcattatcactcaatgctgttactttgagcagacaaatcagttgaatgggagggcaaatggcagaaatgaacaaaagctattaggtgaaagcatccccaatgtatcagttgtgagatgatttttgtttaatgatgatcaggtttacattgaagtggcttggaagacgtatttcagagggactgggtttgtactgcaaaactctgaacactagagcaggttctactagcacttgggcagtaaggtagcgggtgtgtattatgctattgccatagttctcgtctttgtggattcacataccctttcccatgaggagcttgctactaacagcctcctgtttctgttgtttttatatgggagaagagaaagagcttggaatttcaattgtctaaacaattggtatgatttacaagaaggcaaaccattcaggagatgttcaacagtgtatcattcttagcattcaatacaatgtttattataaaatatacacctgagtttatgtttttctgccaggctgaagggcaataatgtcttgctatgcaaacactnnnnnnnnnnnnnnnnnnnnnnnnnnnnnnnnnnnnnnnnnnnnnnnnnnnaactaaactctatcatcattttctatgttgacatcnnnnnnnnnnnnnnnaatctgtttccaactctgagtctgtgaactatctcttctgactggatgctggcctaaaatcctattagtgcttaaacagacctcaaaacactctgaacctgtaggccaatacagagatgttgttctttgatatatcttgggtccttgatggcttcaacaaacaaggtcataatttgtttaaattcagtgttttctgtagataccttcttctcagtttcattaagaagagtaaccatctttggttttccaaagaatggaaactcctaccctagactttagacttagagcgtctgcctttcacgatgagtaagagatccagaatgtttaggggatgtgcgtcagcccacctggtacagtggcaaagctgaatgcgaacttgaggcctcctgaggcctgaccttctatgcccccagccctccaccccaagcaccttttggtgtggctggaaacacatgacattggatgtgatttttctcaagcccttcactgtggaaggcatgggagactgcccagcattgggcatgtggctgttaacgtttccatttcaagtccctgattcttactggagaagttaaggagccacttaatgttttcacagacctctgattctgttgtgaatgtggcattccagtgagtacaacctgcttgctataaagaaagcagcatattttgacaattttatttcttccttgggtacttacatttttattacaaaaatggccgttataaaaaaagacagaagggctgggcagtggcttgctccctagaaactgagattccgaagcaggtgtttcctctcccctagactcagaggtacatttaatccatcttctccatttcctccttcaggaccagctatgagattcagtgcatttctagcccagcggatgttcattctccactaaacttcatcttttactaagcaaagggggattattccatgaggcagccaggagcaaggggccatgatattcatgactttgtctgctgggcatttttcaaagtgtccttgaattcactcagcaaacaaagctttctggagaatctctcaaaacttggccctgctccatttggccaaaaatgatggctgctccaaaactctgaacttcttaaaactccatctgctacattatttctggagtttaaacatgactttttctgtcttt

SEQ ID NO: 179960 - DNA, 1599 bp, Homo Sapiens
  misc_feature (314)..(328): n is a, c, g, or t
  misc_feature (1274)..(1292): n is a, c, g, or t
tcacttgctttatgttattaggtgtaaagaaaagtgtatgctgtgcctgttttggtactgcgagcagttcttcccaattcgatgaatataatcctctgaggagttagggtagtcataattgatgacaaatttcacatcttccacatctgtaaggtgttgcagtgtggcaaaatagcaatgtacggagttttgcacaccacaacagccagaccaaaaataaaaagttagacaattgtattcccaagaaggtacgggctgcaaaaaatacagttaaaatggttatccatttcctgtaggaataccattgaggttgnnnnnnnnnnnnnnngcacatgtcatctgtataattcatcacccacccagtgacagaccctgtcaaaaggaatgtgtgttccctaagcacattcccaaatcagcaagttcccttacagatcatcaagtgacatctgaatgcttctgcgcagtagggccacttaaagtttcacagcaacctcttcatgtgctcattttgaggaccttgaaacaaaaaaatgtacaaggtcctttgcattacacattcatcagaagttcaaaattctggccacactgcttgtcttgccaagaccttacaaccgcagctgcaagaaaacatacctgtcccccaaaagttgtttttatgcactgtgtctcgtctaggcaagcgcttccaagaagccaggattcacttgagaatgtgtctctctctggcaggtctcgacatgacgactactgtgtaggtgagggaggaactttcaaagcactttcttttcccacttactatgtgtgagaagttgctcctgctctagatctcatgtgccagtactcaccaatttgtaaaaggcttagtaccttttaaagctgctctctccatttcaaacttgaacaaaaatttcattgaacattgaagtttggaactacttcttcgacatttcagcaaactcactgaaactcaaagacccacagatcacagtgaacagtttgaaacaaggctgtaccatggcagtcatgcaaagcatgggacagaagaaataccacggcagtgaactgtgaggataacttccattttttccctcggagagaacagtttacggggcagaggtgatatgttctgccttttgaagattactggcacacgttcagctttttcacctctctaatcgactggaagcagccagccgatcactagtcctccatccccctcgagtcctccgattgtcatgcctaggccttgccacaaagacagcacctttatgtgnnnnnnnnnnnnnnnnnnntgcaggttaaagaaagcaataaactttctttaaaaaagttaaatggagatcttctgggaaaccaagccatgaatgcgagtttgtactaacctagccctctggaggccacatctgtagcaatcagaataggagcttttccatgtttgaattctacaaaggaaggcatatacatgatcaattatctgagcagaattctagctaggttaagtaagggggaaaaatacttcatttgaaatatttaccatttagaacccagtcacgctcttgttgactcttgtcccaacttttttgtacaaagttggctttt

SEQ ID NO: 179961 - DNA, 1245 bp, Homo Sapiens
  misc_feature (92)..(147): n is a, c, g, or t
  misc_feature (1093)..(1107): n is a, c, g, or t
ttggctgattgctacagatgtggcctccagagggctaggttagtacaaactcgcattcatggcttggtttcccagaagatctccatttaacnnnnnnnnnnnnnnnnnnnnnnnnnnnnnnnnnnnnnnnnnnnnnnnnnnnnnnnncacataaaggtgctgtctttgtggcaaggcctaggcatgacaatcggaggactcgagggggatggaggactagtgatcggctggctgcttccagtcgattagagaggtgaaaaagctgaacgtgtgccagtaatcttcaaaaggcagaacatatcacctctgccccgtaaactgttctctccgagggaaaaaatggaagttatcctcacagttcactgccgtggtatttcttctgtcccatgctttgcatgactgccatggtacagccttgtttcaaactgttcactgtgatctgtgggtctttgagtttcagtgagtttgctgaaatgtcgaagaagtagttccaaacttcaatgttcaatgaaatttttgttcaagtttgaaatggagagagcagctttaaaaggtactaagccttttacaaattggtgagtactggcacatgagatctagagcaggagcaacttctcacacatagtaagtgggaaaagaaagtgctttgaaagttcctccctcacctacacagtagtcgtcatgtcgagacctgccagagagagacacattctcaagtgaatcctggcttcttggaagcgcttgcctagacgagacacagtgcataaaaacaacttttgggggacaggtatgttttcttgcagctgcggttgtaaggtcttggcaagacaagcagtgtggccagaattttgaacttctgatgaatgtgtaatgcaaaggaccttgtacatttttttgtttcaaggtcctcaaaatgagcacatgaagaggttgctgtgaaactttaagtggccctactgcgcagaagcattcagatgtcacttgatgatctgtaagggaacttgctgatttgggaatgtgcttagggaacacacattccttttgacagggtctgtcactgggtgggtgatgaattatacagatgacatgtgcnnnnnnnnnnnnnnncaacctcaatggtattcctacaggaaatggataaccattttaactgtattttttgcagcccgtaccttcttgggaatacaattgtctaactttttatttttggtctggctgttgtggtgtgcaaaactccgtacattg

SEQ ID NO: 179962 - DNA, 1235 bp, Homo Sapiens
  misc_feature (128)..(143): n is a, c, g, or t
  misc_feature (1089)..(1145): n is a, c, g, or t
agttttgcacaccacaacagccagaccaaaaataaaaagttagacaatgtattcccaagaaggtacgggctgcaaaaaatacagttaaaatggttatccatttcctgtaggaataccattgaggttgnnnnnnnnnnnnnnnngcacatgtcatctgtataattcatcacccacccagtgacagaccctgtcaaaaggaatgtgtgttccctaagcacattcccaaatcagcaagttcccttacagatcatcaagtgacatctgaatgcttctgcgcagtagggccacttaaagtttcacagcaacctcttcatgtgctcattttgaggaccttgaaacaaaaaaatgtacaaggtcctttgcattacacattcatcagaagttcaaaattctggccacactgcttgtcttgccaagaccttacaaccgcagctgcaagaaaacatacctgtcccccaaaagttgtttttatgcactgtgtctcgtctaggcaagcgcttccaagaagccaggattcacttgagaatgtgtctctctctggcaggtctcgacatgacgactactgtgtaggtgagggaggaactttcaaagcactttcttttcccacttactatgtgtgagaagttgctcctgctctagatctcatgtgccagtactcaccaatttgtaaaaggcttagtaccttttaaagctgctctctccatttcaaacttgaacaaaaatttcattgaacattgaagtttggaactacttcttcgacatttcagcaaactcactgaaactcaaagacccacagatcacagtgaacagtttgaaacaaggctgtaccatggcagtcatgcaaagcatgggacagaagaaataccacggcagtgaactgtgaggataacttccattttttccctcggagagaacagtttacggggcagaggtgatatgttctgccttttgaagattactggcacacgttcagctttttcacctctctaatcgactggaagcagccagccgatcactagtcctccatccccctcgagtcctccgattgtcatgcctaggccttgccacaaagacagcacctttatgtgnnnnnnnnnnnnnnnnnnnnnnnnnnnnnnnnnnnnnnnnnnnnnnnnnnnnnnnnnttaaatggagatcttctgggaaaccaagccatgaatgcgagtttgtactaacctagccctctggaggccacatctgtagcaatcagccaa

SEQ ID NO: 179963 - DNA, 2020 bp, Homo Sapiens
  misc_feature (289)..(303): n is a, c, g, or t
  misc_feature (1249)..(1267): n is a, c, g, or t
aaagaaaagtgtatgctgtgcctgttttggtactgcgagcagctcttccaattcgatgaaatataatcctctgaggagttagggtagtcataattgatgacaaatttcacatcttccacatctgtaaggtgttgcagtgtggcaaaatagcaatgtacggagttttgcacaccacaacagccagaccaaaaataaaaagttagacaattgtattcccaagaaggtacgggctgcaaaaaatacagttaaaatggttatccatttcctgtaggaataccattgaggttgnnnnnnnnnnnnnnngcacatgtcatctgtataattcatcacccacccagtgacagaccctgtcaaaaggaatgtgtgttccctaagcacattcccaaatcagcaagttcccttacagatcatcaagtgacatctgaatgcttctgcgcagtagggccacttaaagtttcacagcaacctcttcatgtgctcattttgaggaccttgaaacaaaaaaatgtacaaggtcctttgcattacacattcatcagaagttcaaaattctggccacactgcttgtcttgccaagaccttacaaccgcagctgcaagaaaacatacctgtcccccaaaagttgtttttatgcactgtgtctcgtctaggcaagcgcttccaagaagccaggattcacttgagaatgtgtctctctctggcaggtctcgacatgacgactactgtgtaggtgagggaggaactttcaaagcactttcttttcccacttactatgtgtgagaagttgctcctgctctagatctcatgtgccagtactcaccaatttgtaaaaggcttagtaccttttaaagctgctctctccatttcaaacttgaacaaaaatttcattgaacattgaagtttggaactacttcttcgacatttcagcaaactcactgaaactcaaagacccacagatcacagtgaacagtttgaaacaaggctgtaccatggcagtcatgcaaagcatgggacagaagaaataccacggcagtgaactgtgaggataacttccattttttccctcggagagaacagtttacggggcagaggtgatatgttctgccttttgaagattactggcacacgttcagctttttcacctctctaatcgactggaagcagccagccgatcactagtcctccatccccctcgagtcctccgattgtcatgcctaggccttgccacaaagacagcacctttatgtgnnnnnnnnnnnnnnnnnnntgcaggttaaagaaagcaataaactttctttaaaaaagttaaatggagatcttctgggaaaccaagccatgaatgcgagtttgtactaacctagccctctggaggccacatctgtagcaatcagaataggagcttttccatgtttgaattctacaaaggaaggcatatacatgatcaattatctgagcagaattctagctaggttaagtaagggggaaaaatacttcatttgaaatatttaccatttagaacccagtcacgctcttgttgactcttgtcaccatggatacccatggcaggccacctaagttaaaagacaagttgtgttattaaactcacattgaaaacctcagactccagtgcttgaccacttttggtcacagatctctttaatttcgccagaaatgaaaaagttaaattcactatcagatatgaaaaaaatccactgctcgtgatccaagtttgccctttcctaagctgttttaatcaatctgcttcaatggaggagctcacacatacccatctctcctcatttttctggtaagctcatcacatcttcttttggtttccacaaaaacaatggttttattctccttctcactcatgatctcttccattagacgaataagtttttcatccttttctacgtcatgacacacatccacaatctgaagaatgttgtggtttgcactcagttcaagtgcaccaatgtttatatgaatatagtctttcagccaacttttttgtacaaag

SEQ ID NO: 179964 - DNA, 1403 bp, Homo Sapiens
  misc_feature (1147)..(1208): n is a, c, g, or t
ttggcattagcctgataggcaaactctaatgtggagtgcgacttggccaaaagaagtaagacagcttgctgaagatttcctgaaagactatattcatataaacattggtgcacttgaactgagtgcaaaccacaacattcttcagattgtggatgtgtgtcatgacgtagaaaaggatgaaaagtaagttttattaactctgttatatttgcttcctaacaactttgctgtaaaattgagggatcattgtttggtgagttgttttaggttatttcagttggtgtgatttcatttagttagcctactaatcctgaaaatttcttgaatccttcaaataatggctgtcaccatttatagctttcctatagaaggaattcatgtgtcccctggttgacttaaggaccaagggtcgaactgctcgataagtggattagcaggcgtttcctctttgacttccagccatgtaaattgaacttaatgttttgctgaccataaatgtgtggccctagcaatggtcttttaaaactcaggatttttcctttctctctcctattattagacttattcgtctaatggaagagatcatgagtgagaaggagaataaaaccattgtttttgtggaaaccaaaagaagatgtgatgagcttaccagaaaaatgaggagagatgggtatgtgtgagctcctccattgaagcagattgattaaaacagcttaggaaagggcaaacttggatcacgagcagtggatttttttcatatctgatagtgaatttaactttttcatttctggcgaaattaaagagatctgtgaccaaaagtggtcaagcactggagtctgaggttttcaatgtgagtttaataacacaacttgtcttttaacttaggtggcctgccatgggtatccatggtgacaagagtcaacaagagcgtgactgggttctaaatggtaaatatttcaaatgaagtatttttcccccttacttaacctagctagaattctgctcagataattgatcatgtatatgccttcctttgtagaattcaaacatggaaaagctcctattctgattgctacagatgtggcctccagagggctaggttagtacaaactcgcattcatggcttggtttcccagaagatctccannnnnnnnnnnnnnnnnnnnnnnnnnnnnnnnnnnnnnnnnnnnnnnnnnnnnnnnnnnnnncacataaaggtgctgtctttgtggcaaggcctacgcatgacaatcggaggactcgagggggatggaggactagtgatcggctggctgcttccagtcgattagagaggtgaaaaagctgaacgtgtgccagtaatcttcaaaaggcagaacatatcatctctgccccgtaaactgttctctccgagggaaaaatgg

SEQ ID NO: 179965 - DNA, 2345 bp, Homo Sapiens
  misc_feature (303)..(321): n is a, c, g, or t
  misc_feature (1266)..(1280): n is a, c, g, or t
  misc_feature (2255)..(2270): n is a, c, g, or t
ttggatgagtgagaaggagaataaaaccattgtttttgtggaaaccaaaagaagatgtgatgagcttaccagaaaaatgaggagagatgggtggcctgccatgggtatccatggtgacaagagtcaacaagagcgtgactgggttctaaatgaattcaaacatggaaaagctcctattctgattgctacagatgtggcctccagagggctaggttagtacaaactcgcattcatggcttggtttcccagaagatctccatttaacttttttaaagaaagtttattgctttctttaacctgcannnnnnnnnnnnnnnnnnncacataaaggtgctgtctttgtggcaaggcctaggcatgacaatcggaggactcgagggggatggaggactagtgatcggctggctgcttccagtcgattagagaggtgaaaaagctgaacgtgtgccagtaatcttcaaaaggcagaacatatcacctctgccccgtaaactgttctctccgagggaaaaaatggaagttatcctcacagttcactgccgtggtatttcttctgtcccatgctttgcatgactgccatggtacagccttgtttcaaactgttcactgtgatctgtgggtctttgagtttcagtgagtttgctgaaatgtcgaagaagtagttccaaacttcaatgttcaatgaaatttttgttcaagtttgaaatggagagagcagctttaaaaagtactaagccttttacaaattggtgagtactggcacatgagatctagagcagagcaacttctcacacatagtaagtgggaaaagaaagtgctttgaaagttcctccctcacctacacagtagtcgtcatgtcgagacctgccagagagagacacattctcaagtgaatcctggcttcttggaagcgcttgcctagacgagacacagtgcataaaaacaacttttgggggacaggtatgttttcttgcagctgcggttgtaaggtcttggcaagacaagcagtgtggccagaattttgaacttctgatgaatgtgtaatgcaaaggaccttgtacatttttttgtttcaaggtcctcaaaatgagcacatgaagaggttgctgtgaaactttaagtggccctactgcgcagaagcattcagatgtcacttgatgatctgtaagggaacttgctgatttgggaatgtgcttagggaacacacattccttttgacagggtctgtcactgggtgggtgatgaattatacagatgacatgtgcnnnnnnnnnnnnnnncaacctcaatggtattcctacaggaaatggataaccattttaactgtattttttgcagcccgtaccttcttgggaatacaattgtctaactttttatttttggtctggctgttgtggtgtgcaaaactccgtacattgctattttgccacactgcaacaccttacagatgtggaagatgtgaaatttgtcatcaattatgactaccctaactcctcagaggattatattcatcgaattggaagaactgctcgcagtaccaaaacaggcacagcatacactttctttacacctaataacataaagcaagtgagcgaccttatctctgtgcttcgtgaagctaatcaagcaattaatcccaagttgcttcagttggtcgaagacagaggttcaggtcgttccaggggtagaggaggcatgaaggatgaccgtcgggacagatactctgcgggcaaaaggggtggatttaatacctttagagacagggaaaattatgacagaggttactctagcctgcttaaaagagattttggggcaaaaactcagaatggtgtttacagtgctgcaaattacaccaatgggagctttggaagtaattttgtgtctgctggtatacagaccagttttaggactggtaatccaacagggacttaccagaatggttatgatagcactcagcaatacggaagtaatgttccaaatatgcacaatggtatgaaccaacaggcatatgcatatcctgctactgcagctgcacctatgattggttatccaatgccaacaggatattcccaataagactttagaagtatatgtaaatgtctgtttttcataattgctctttatattgtgtgttatctgacaagatagttatttaagaaacatgggaattgcaaaaatgactgcagtgcagcagtaattatggtgcactttttcgctatttaagttggatatttctctacatttcctgaaacaannnnnnnnnnnnnnnngtactagaaaatgcagcagtgttttcacaaaagtaaatgtacagtgatttgaaatacataatgaagcaatgcatg

SEQ ID NO: 179966 - DNA, 1192 bp, Homo Sapiens
ctatactatcttcaaagaatgaggatgaattaatgaacatttgaggttctctgaactgagaaataaagcctgtttaaggggttgtggtaagattttaaaagtaatcctccaaaattgtcacctagtgagcagaatacaaaaatggagcttaagttccactacaagaccaaaactgtcacgtagagcctaagggtaagactgtattggatattagggaccacaaagcactttcatgtttacctcatttgattttcacagcaactgtgtggggagaatcatccccatttgagaactgagaacactcaggctcagcgagctggtgtcccgcttggtgtcagaatactctcaagcccaggctttccctgactgtcaacccattcctgcttctcttgtccgctagtgtgaccccccagccaagggctgccagggcctctttcactatggactttgtgttctgccattcaggcacctgcggaactcgagtcatgcaggagcttttgtgatcgtgacggaagaagccattgccaagggtatccggaggattgtggctgtcacaggtgccgaggcccagaaggccctcaggaaagcagagagcttgaagaaatgtctctctgtcatggaagccaaagtgaaggctcagactgctccaaacaaggatgtgcagagggagatcgctgaccttggagaggccctggccactgcagtcatcccccagtggcagaaggatgaattgcgggagactctcaaatccctaaagaaggtcatggatgacttggaccgagccagcaaagccgatgtccagaaacgagtgttagagaagacgaagcagttcatcgacagcaaccccaaccagcctcttgtcatcctggagatggagagcggcgcctcagccaaggcaacccaggggccagggtcccctcccctagggctcatcagctctctggtggctgacatgtggcctctgtggctctgagcgaagtggttgcctaagggcccacggtctgggattgagattgggaggagcagcagctccctgcatgtgggaggcatacctgggccagggtaggggcagggcgcggcgctggggtcctccccacaggccctgggcacagcccctgctctgggaaggagtaggagtgggtggcaggccctcctgtggctgcaaatgctcacactagtgagggtccctgct

SEQ ID NO: 179967 - DNA, 917 bp, Homo Sapiens
ctttgtacaaaaaagttggcacttaggagctgcctggattgacaagtgccgccccaacctgctcatcacagagtccacgtacgccacgaccatccgtgactccaagcgctgccgggagcgagacttcctgaagaaagtccacgagaccgtggagcgtggtgggaaggtagctgcagcaggggtggggacatgggccctcggccatgctgggctggtctttctggcaggcttggctgcccttggcatgggtcagggtctcagggtggggggtactgcattttcaggcagggagggaagaagatttgctcaacattgaggaggaaaactcagagaccctttcctagggagccccttttccctcctacctcaggtgcggacgaagccctggccaggctccttctgtctctcatgcagctcccttctgtctctcatgcggctccctcctgtctctcatacggctcccttctgtctctggagagcggctgggacgggactgggagcagatgagaggctaaggtccctatgaggccgcagctcttgggcacctggccgtgccctcactggacgctgcctgctgtgtcgaggggccatgtgcccagggctcctgccttgtgtccccctcaggtgctgatacctgtgttcgcgctgggccgcgcccaggagctctgcatcctcctggagaccttctggtaggtgccgccaggacggctctttaaggagcccctggcccggcctgaacacagtccagttggtgggcagccctgtccagcgtagcggtggcatcttggccctgcttgctgctgtcctggggggccgctcgtgtgctgtgtgaccccaagaaacctgtgacatcccgtcagcgccaccgtgtgcggctctttgtaagggttcctggttctcccctgaacccggctgct

SEQ ID NO: 179968 - DNA, 1273 bp, Homo Sapiens
  misc_feature (379)..(437): n is a, c, g, or t
ctttgtacaaaaaagttggttttattgttgcctactagttactattacttattattattatattaatacttatgatggtgatgatgatgatgataatgacactgatgatttttaaccggattaaaatcgagtttttctgaatgtttctaagaatttctccggcctcctgattgactttggagttttgcatcttgggagagaaagcgaaggcattagtatttttaagtggtttgatcacgtaaaccttttctctcccaaccccacccttgccctcatccccttccccacactgaaaagaattttactggctgttaagtctatgaccttatttttcctgatctttaacttaactgttttagagcatctctggacgtctgtnnnnnnnnnnnnnnnnnnnnnnnnnnnnnnnnnnnnnnnnnnnnnnnnnnnnnnnnnnnaaactgtgctgcaataaaatgtgtgtggtactacttaacacttatgatcgtgatggcattttccctgaaagccatcttcctcctgtttcccttgaaatcccatcctgcttttcctgtacactacccctcacaaaccacaagctgcagcaacatggatgcccagcctggagcagcagcagccaggatgacctggagccaggggggccttcggaacagatgcacacccttcctgggtgatggtaagagttttcggctttgtgagaaaccttaccatcaaacacgatggccagcaacgttaccaacaagacagatcctcgctccatgaactcccgtgtattcattgggaatctcaacactcttgtggtcaagaaatctgatgtggaggcaatcttttcgaagtatggcaaaattgtgggctgctctgttcataagggctttgccttcgttcagtatgttaatgagagaaatgcccgggctgctgtagcaggagaggatggcagaatgattgctggccaggttttagatattaacctggctgcagagccaaaagtgaaccgaggaaaagcaggtgtgaaacgatctgcagcggagatgtacgggtcagtaacagaacacccttctccgtcccctctactcagctcctcttttgacttggactatgactttcaacgggactattatgataggatgtacagttacccagcacgtgtacctcctcctcctcctattgctcgggctgtagtgccctcgaaacgtcagcgtgtatcatgaaacacttcacgaagggcaaaagtggcttcaattctaagagtgacagcggggatcttccaagtctg

SEQ ID NO: 179969 - DNA, 1009 bp, Homo Sapiens
  misc_feature (757)..(766): n is a, c, g, or t
ttggtttcgttttgtcagtgagtggaataatgtgctccttatttaaaacatcttttcccctaacagtagaacctattaggtcttgtggtttgatcactcactggttttgagaatagatgagtcatctctagtatagatcttcatggtaggccattcaccttcagtctattactcatagcaaaaactccacggacttttttaagtttaaaacccatgaatctgcttaggttttataatctcagtatttgacatttgctcactatttcatctctatttgttggcccggtttttctgtattttctttgcccaaactgctcattatcaagatgaacatttgggatatactctttttgagaccctcaagggcatattgacatgaatttagttaattttagtcatctattgatgttgaagaattgtgaagacagtcactggtagaggtgattctatggaggctatcccatcccagtggaatgttaatgctttaccaaaatgtgttagctgcagtagacagatgtttctgtcttgggggtttagggcacaacatttctgaggaactctgactcaatctgtcccttctcctttcacagggcagcaaggcgaaccccatccctactcactggagctcagctttgatttttaacctcccttccccacccttccagaacacacacattccattccaaaactgattttataaagacattttaaacataatgatgcaacttggtgtgcactacagcaaatgtacaggtgnnnnnnnnnnaattgtttccaaaaccgggacctggatttaagatgtaatttttaaaatttctatttctattttttctgcagcagttgggttagaggaggaggagccttttagcctctcataaactgacctctctacttcctcgtgtatttttaagattgattgatgatgtggaaagggctttgcttgtctgctactgaaaactttatccttgcggttttgtgaaactgcttttggaaagaagaaaagaaatga

SEQ ID NO: 179970 - DNA, 1930 bp, Homo Sapiens
  misc_feature (904)..(913): n is a, c, g, or t
caaattgatgagcaatgctttcctataaaaggccactttgtacaaaaaagttggctaatgtgaacatggagtctgaggggggtgcagatgactctgctgaggagggggacctactggatgatgatgataatgaagatcggggggatgaccagctggagttgatcaaggatgatgaaaaagaggctgaggaaggagaggatgacagagacagcgccaatggcgaggatgactcttaagcacatagtggggtttagaaatcttatcccattatttctttacctaggcgcttgtctaagatcaaatttttcaccagatcctctcccctagtatcttcagcacatgctcactgttctccccatccttggccttcccatgttcattaattcatattgccccgcgcctagtcccattttcacttcctttgacgctcctagtagttttgttaagtcttaccctgtaatttttgcttttaattttgatacctctttatgacttaacaataaaaaggatgtatggtttttatcaactgtctccaaaataatctcttgttatgcagggagtacagttcttttcattcatacataagttcagtagttgcttccctaactgcaaaggcaatctcatttagttgagtagctcttgaaagcagctttgagttagaagtatgtgtgttacaccctcacattagtgtgctgtgtggggcagttcaacacaaatgtaacaatgtatttttgtgaatgagagttggcatgtcaaatgcatcctctagaaaaataattagtgttatagtcttaagatttgttttctaaagttgatactgtgggttatttttgtgaacagcctgatgtttgggaccttttttcctcaaaataaacaagtccttattaaaccaggaatttggagnnnnnnnnnnccctggttttttatttttgtattttattattgtttacttcaaactttgttttacagcgtcctccacaaaacctctagaatgcactagatatatttttcttggagtcataatcatgatgcataccaacacaacactactcaaattatatttcattgagatgcatgttgcattgaggagtcaacttgacatagagtggagactttttcaaaatggcttttacatcctaatgaaagtttgggaagtatatcctctctgccttttcatcagtgctttgtggtccagctggcaccctttctgaggtttgtgttttgtgctaaatggttttgtccttaaataggagaggctcaaaaacatcaagatttcaggaaaatggcgacagctgcataatggaacccccctgcttctattttgttcttttaattactatttatagccccagttaccttctgaattctgaagtgtatatacctccatgttcctgaaaacaagaaaactcttacttcctgatattccatagactgccttcccaggtgattgagaacatagagaatgttacacatttattttactctaaatgatcttttacccctgttagctaatctttgtgttttcctcaactttattaattacagtgattgcatttttagcatccagttgtaagatgaatatattaaacagctaccagtgttggtgatacctcatccttgaaaggcttagttcatttgtgttttatacttcagtttttccagcatagcagaaaatgccgcttataatttttgtgcacacaaaccttggattcccctgtaaagttgctattgtttcatagcatgcggcactggccttttttcatcctactcattacaggcaaaactcatgtcttatttatgaggattttatagatcattttctgtacaggtgacaaaaccagaaaagaatgaaaggctgaagtatgaactacccttggagctcatatacatgatatgggcattttcttttgtatgttatttcggtccaaaa

SEQ ID NO: 179971 - DNA, 1959 bp, Homo Sapiens
  misc_feature (300)..(320): n is a, c, g, or t
ttggctcccattagcacacaagtatattccctattttaaaagattgtaatattactttttcaataactgctcttttgttctcaattccagttcagtagctgctgctttaaacataagttgatttcttccaaagacctgaggcagcagcagtgggctatcactgggccactagctttcttcagcagcgaatggtatcaatggcagtgcagcactgtaaatactgctactttacccagttgggttgcaattgagtgagaaagtattgcaaacctctaagtgggctttgactgtcagacttgnnnnnnnnnnnnnnnnnnnnngttacaaaaaaacgtagttggtttagtgatgaaaatgtacaactctgggtgtgataaatagaccaaaggataaaaataactgtttcaaaagtatcagctatggtgtcagcctgctgtgttagatggaaggcattggagcttagcttctcatgttttcttgtacaaattggctttattcagatttgtaagagtgtcaatgtaaaactctttcttactggaatatcctttacagaaggttgagatagtcatctgagcctttttaaaagaaaaaactgcaggtgaaaaaggagttagttgatgtgaaagttttagtgaaattctgggttgtataaataagttgctaggaattggcaaggtagtgaagtggtgactcacacaggtaatgtaattgttagattttttagcaaatcaggaatatgtcaatataagtacaatgttgaattcaaacaatctgttgaattaaattctgttgattagaataactctaatttaagaaaaattccaaactgtagatttatttttctctgatcagtaaaaagaaaatgagttccagcttgactttagctgttcaagtgagaagtctgaggaagtgcatgttaatgagccagtgacccataggtagctgggttaaagacactttggatttggataatccgggaagcaattaatccctaattgttgaacaggcagtcctgggtaaagaggacctaaaatgctgcactattaacagcattagacggccaggtttgtacttcatagttttaggctgtcttcttcacaagttttagaaaaagaatttaggagctagagccctggtgcaggatcaacagcagctcatactcctattttaaaataatttggtcgtggcctcccttcagttttaatgtggcactggtaaatctacctggttctggcatgcttcactttgatttcctgctatcctctactgcttgcctctaaatcaaggtaaagagcagagcaggtatgtattaatgtcacattgtcttgattattttaaatacttaaaatatacatgttaaaccttggtattagtttcacaggcagtttacttttcagtacataatttaacaggagtgacttggtgggagtggggctttaaactgaaaattggaacaacagcatgatgtggagaaaagttgtgcagcattaagaagtacatgcaaaaattaagtaaccaagttttgtctacatagcagatatgtttacattggatgtcaaaagtaacacagtatttgatataattacagataattgtgatctacattttaaaatatcaagagatcgtctcagtgcttcttcccttacaatggagagttttgcttttctttgggctggaggaagagcatcctatggtgtgtcaaaaggcaaagtgtgttttgagatgaaggttacagagaagatcccagtaaggcatttatatacaaaagatattgacatacatgaagttcgtattggctggtcactaactacaagtggaatgttacttggtgaagaagaattttcttatgggtattctctaaaaggaataaaaacatgcaactgtgagactgaagattatggagaaaagtttgatgaaaatgatgtgattacatgttttgctaactttgaaagtgatgaa

SEQ ID NO: 179972 - DNA, 1114 bp, Homo Sapiens
  misc_feature (202)..(212): n is a, c, g, or t
gacacttgtttacagtatgagagctgaaataagggaacgtcgccttgttcaacctcagctgggaatgtgcacgtgggtgactcagattttttgccattctatgcatgtccacaaatgactgcaagacactgcaagttttttgtttatttttccagatggagttgcactccaatctggggaacaagagcaaaactctgtctgnnnnnnnnnnngcgacaccacatgggaggatgtttcttgggggaggtgtgctatgcccgagcaggctccagcaccaggggcgctggtgtgtcaggagcgcgcctccaggccggtgtgaactctgcaacttcacattgtgcctcctgccgccgctgctgcttccccgagccccaagctcaacctggagcatgagctcccaccctgaggaggaggctgtcaatactgtgtttctttccagggaggcaacgggtgggtgcgatgttgtcacttaagttgccacctctgcataagagctctctgatcagaaagcagtttctttgttgaccccagccagccttggctctcgggttgggaaatacagtcacggtatccatggagacctcttgaggtggagacgggcgttaaacccttctcaggcagtctgaggtggccagagtctgaagcaagcagcctctatggagcgaggggagcaggtgggcccagcctgagcggggcctctgcacagccagctttcccccacacctgtctccagccagggcacccacaggccctttctctcccaggatgaagcctgctgggagcgtgaatgacatggccctggatgccttcgacttggaccggatgaagcaggagatcctagaggaggtggtgagagagctccacaaggtgaaggaagagatcatcgacgccatcaggcaggagctgagtgggatcagcaccacgtaaggggccggcctcgctgcgctgattcgtcgagcccatccggcgacagaggacagccagaagcccagccagccccagactccagtgcaccagagcacgcacaggagcctgggcgcgctgctgtgaaacgtcctgacctgtgatcacacatgacagtgaggaaaccaagtgcaactcctgggttttttta

SEQ ID NO: 179973 - DNA, 1118 bp, Homo Sapiens
  misc_feature (899)..(976): n is a, c, g, or t
ttggcacaatgcaaacttctaactccgcgctcccccacaccctcttcctcacccttcccgttcccctgccccatggcctgtctgcttccaggtggaggtgcgggggagcttggcgggtggctgcaggctcagggccctggcacttacccttccttcagcttgggaggctgtccccatgatctccgcagagcagactcctcctcgtccgggtcaacgaaaatgccagctcccgacagaggcttgccccaccccactccgcaaagcaccctgtcccttccaccatgtggccctgcaccctgtccagagcacccctcaggaccacagtggccttgttcacacggtgctctttgcaggcagggactgtccccagcacacggcctggctgaccacaagccttggacaaaccccagctgactgctaagacttcctcatctctgtccacctgcactgctctgctctcaccacctgttcagctctgcaaggccagtttcaatgcctcctgctctgtgataagggtggtttcccttcaatttgtggtggcgatggagacattcttgacgcaggttctagaggccttccaattcaggccacatgtacctccagatactatgtggctggctgcctctgcctttttgggcaatctcagttccaaatattctatcatgttgtcatgccagcttttggcttgggaaatatggtcagtatgtctgtggggaaactgattctgtgtgccggccgcagaggaaggactctgggctggaggaaaggggtagggctcagcgccagtgctaggactggttgaactgtagggtgcagccctggctagtgaccacaccccatgtccagctgttgctcacagctgtccccaccaccaccctgtgcagcaggggttaacagannnnnnnnnnnnnnnnnnnnnnnnnnnnnnnnnnnnnnnnnnnnnnnnnnnnnnnnnnnnnnnnnnnnnnnnnnnnnntgggactccatgttggcccccccctgcactacctctgtggacaggtcactgccctccttgcccttggtctctctctcagagggaaaagacggagcagctgactgacaggaccccgaggtcctgggtctgaaagaacagccaa

SEQ ID NO: 179974 - DNA, 1878 bp, Homo Sapiens
tgggttgtagcttttagcgggagctaaagggttctgggatggaggtgggaagtaggatttggccggctgagtcttctagaggcaatattggggtgttggtcttccccaaggggaagggtggtgaggctgagggagaagcagttatgttttcagctgggcaaacatggacggttgcccgtagaaactttgccactgtacttcagaacgttgccctagtcgttggaggagaacaatgtgttccctttctagccaccctggtccacggagggaggagggagagagagaatgtttcctcttcggctgttgtggcttgagagtttctcttctttcggaggttttgtggtagtggctggcagttattagtatgcctcatggcttttaaatttccagatctttttgatttagaagtggaaatttcctaattacttgaagtcttgtagaattccataatgttgtgattcttgcccactatcttaagtgagactttgcatgagacctatggaaattatggcagcattccccttagaatctggcttgaatcagcttttgtgtaggaaactgctagccttctaaatatattgtaaccttgtttcatcctcaaatctaaatgtgtaatgagttttcttttggtggggaggggcggtgggtttgagttaagaccacagctaggatgaaaggcaaagagaaaaacaaactgtggaagccaagcctgttctgtggctggattttacttatattggaagaagttctatgttttgtaaatttgtgtattggttttgatttgtttcctctgatagtttagtatttggatagtttagtgttaacctcagctacactgaaggaatagaccttagtcctcacaagtataagttctagcttggaagcctgggttctgcagtagctgtggaacttaagcctctgagctcagggatgcagaggcattgagttactaccaagggcctgatcttttctttagcaggcatctgtgttaattgtttcaaaaggtggtgatcagttttacagcctattataaaggagatttttgcctactataaaactaatccccctgaaagagtgagtaaacataactttttgtgtgttgacttccacaagggaaggagttggcacttacactctgacttttgattcagtcgtccttcttgagccatttttgcaggggatcagtttggagtgggcgttaacaatgttattctttttttcttctccagaacaccttccaccatgaccacctcagcaagttcccacttaaataaaggcatcaagcaggtgtacatgtccctgcctcagggtgagaaagtccaggccatgtatatctggatcgatggtactggagaaggactgcgctgcaagacccggaccctggacagtgagcccaagtgtgtggaagagttgcctgagtggaatttcgatggctctagtactttacagtctgagggttccaacagtgacatgtatctcgtgcctgctgccatgtttcgggaccccttccgtaaggaccctaacaagctggtgttatgtgaagttttcaagtacaatcgaaggcctgcagagaccaatttgaggcacacctgtaaacggataatggacatggtgagcaaccagcacccctggtttggcatggagcaggagtataccctcatggggacagatgggcacccctttggttggccttccaacggcttcccagggccccagggtccatattactgtggtgtgggagcagacagagcctatggcagggacatcgtggaggcccattaccgggcctgcttgtatgctggagtcaagattgcggggactaatgccgaggtcatgcctgcccagtgggaatttcagattggaccttgtgaaagaatc

SEQ ID NO: 179975 - DNA, 1902 bp, Homo Sapiens
  misc_feature (1492)..(1565): n is a, c, g, or t
ttgggtctttcagagtcttcctacagatgtacaattaacagcttctctcatttttctgactcggtgatcccaagaaggcctatactgggtcagttcataccatagtgcacacctcagttgtatagaatccaaggactattctcccatcagcatcggtattcagcatctatgtctttagatccctgatggcgtattattgactcttttttctagagaccaatttgaggcacacctgtaaacggataatggacatggtgagcaaccagcacccctggtttggcatggagcaggagtataccctcatggggacagatgggcacccctttggttggccttccaacggcttcccagggccccagggtaagtctccttgggttagaggtgaaattcccagaagtgtctaactgtgcaggaatgccccttcccagggatgggaatgactttcagaatcaagaagcaaaataatacagtaaaggcgaaacagccctcacatcaccaaagtccaaaaatggatatgaatatataaagtaaggttttagggggaacgtttggccccactgaagctgtggtgaagaggaactcccctattgcccctcccctgccccgcacctgcagatgaaggcaaggatagtgattcaagagggcaaggcttaagggccttctgatctctgactttgggattctctggatttcttgactcttagtgttttgtcctgatgcttctgtaggtccatattactgtggtgtgggagcagacagagcctatggcagggacatcgtggaggcccattaccgggcctgcttgtatgctggagtcaagattgcggggactaatgccgaggtcatgcctgcccaggtaagtatagctccaatccatcaatgaagaagggtaggtaggtgtacataggacttttgctagtaagggctgctgatacaccactcactaacccaaaacctaagaacgggttggagtacaggtgagaagagaacaggtttaggagattctgagttggagtgagcagttagctttgttttaatggccaagcttctcgtt[450 bp omitted]nnnnnnnnnnnnnnnnnnnnnnnnnnnnnnnnnnnnnnnnnnnnnnnnnnnnnnnnnnnnnttgtgacatgtcatggtgacagggaaaagttgacaaattcatgcatttgaaaatcttttagaactaaattagtaacaatacaggcatgtggataagcttaatgcttatgagggggagaaagtttcaaatgattagtcttttcaacaaacagtaactttgtactgcttgtcgggcactgttctcaccactgagacacacaggtaagaagatgcagccactgctctcatgaagtatttgttctactggtatcatattttggtgcacttcattcttggctccatacctggagacaaggttggactgccatcttttctgtttactctaggtacatcgagga

SEQ ID NO: 179976 - DNA, 954 bp, Homo Sapiens
ggaatgttgtaacttacaaaaagaaatttcttaaaaaactgtgtttataaaagatggtataatagttgtacacaatacagccaagtttaaaagcaattaagacatattaaaatgtgcagcaggtacattttaaatttatgtgcaagggaagatttcatgatgactacaataaattgcaactatttctttcctggcatagggaggtaataagaaactaaatgatcgtatggcacatgcttgtattatatagatgggtttaggaatctataaagtatggaggtaggaagacaccatatgtccaggatcaaaacattcctcatattgaggtagtctagtgaagctgtttcatgtagctgctttaggaagtggtttaaggaagcttactcccacttcaaattaagcaccaaagcaaatcactaattctggagcacaggaagactgctatctcaacttcacatccaggagccaaataattagttggctgtgtgtactgctggaagaagaagcctattctttttttagtaggcatgaatgaaacctgaacctctcaaattagccagctgtatctgagattcagattcactgattttaaaatatatcaactcctgtctgagattaccctattttttccttaaaagataccaacctgtccatctctagtttcaaccgtcttaatcagaagtgtcctttttgagtgggtatcaaccagagggagtgaatccagattagtttctaaataaacaaacaggccaaaaatgagtaaaaacgagttttttcttggaaaaaccaagtaaccattttactgaaacaattatgatttgtgggggagaggcaattgtgtaaagtactactccccaaataattttagggtagtctctgtttggaaacccaggccctgacactcttgagcatcaggatgagatagtacttgcagcaggaagaaggaaaaaccaa

SEQ ID NO: 179977 - DNA, 2919 bp, Homo Sapiens
  misc_feature (409)..(418): n is a, c, g, or t
  misc_feature (794)..(833): n is a, c, g, or t
  misc_feature (845)..(871): n is a, c, g, or t
ttggcattcatggacccctgcaaccagtgcaagaaaggaagtaaaattgccgggcaagggcaaatccaccatgaagaagtctttcagagtgaaaaagtaaattttataggaaaaaagggtatcatgatgaaattcaaaatcttattttctaaggtcagtgtgcatttgtttagttttgatgcttttcaaattacattattttcctcccctatgaacattgtggggagggactctaaataaaccagtttaggcatttgctagctttaggtgcttttattggtgcctgcccttttccttgttcattttaatttctgcaataatcctggactttcctaaactatgtaatgtatacttgtcctttttctctgcctcccccaaccccctgttgtttttatggtcagctttgccnnnnnnnnnncttccaattttatctaaacagttgcagagatttttatatttgtagaaagcatcaagaacggtatgccagtcaggtcctggaagtaaaatggaggcacaatatagcactgactgagttgtaaagcctcctgcctggagacttcagttatagctgtaataattaatcttatttataaaagccactccactaaccttttctctccaactgtaaacacagagacagctttgggaataagccaaaaacagggtgatctcattagattttgaagatatatgactcctttgggctacatttcatattgatcaatttctaggtatttttcactggcccaaagtattgcattcccttaacagcaagcacaagttctctatatcannnnnnnnnnnnnnnnnnnnnnnnnnnnnnnnnnnnnnnnagactctgtctnnnnnnnnnnnnnnnnnnnnnnnnnnntttacatagtagacaggccgccaactgatagtgctatgcagtttagtttagcacttggactgacttaatttttaggatatattaaagaacaggcacagtcctatcctattggagatttttgttaatgaaaaatacaaaacagataaatctgtgttcaacaaaagtgaattctaaagtgttgaggggaaagattatgtgggcagttggggaatatgtgtgatgggtctgagctcatccagtaaaactctcaaaagatgaatagatgcccttttccttgaggagccttctgcctgatttctttgtcactgagtttgggtccctggttggagtggcaggaggaaggggtccaccacgtcttctgactgtctcttcctgatccctggcccacctcaccagaatcacccaggacattttccagcagttgctgaaacgaggttttgtgctgcaagatactgtggagcaactgcgatgtgagcactgtgctcgcttcctggctgaccgcttcgtggagggcgtgtgtcccttctgtggctatgaggaggctcggggtgaccagtgtgacaagtgtggcaagctcatcaatgctgtcgagcttaagaagcctcagtgtaaagtctgccgatcatgccctgtggtgcagtcgagccagcacctgtttctggacctgcctaagctggagaagcgactggaggagtggttggggaggacattgcctggcagtgactggacacccaatgcccagtttatcacccgttcttggcttcgggatggcctcaagccacgctgcataacccgagacctcaaatggggaacccctgtacccttagaaggttttgaagacaaggtattctatgtctggtttgatgccactattggctatctgtccatcacagccaactacacagaccagtgggagagatggtggaagaacccagagcaagtgagcagttcttggttaggctgtgcatggggagggtaggcggtagggtgtgggtgttagggttgggtgtctggtcttccttgggcctttgaaggaggtctcaggaaatctctcctaaccacattcccctaggtggacctgtatcagttcatggccaaagacaatgttcctttccatagcttagtctttccttgctcagccctaggagctgaggataactataccttggtcagccacctcattgctacaggtaagtaccctggaagactactgatggggtgttcataggaaatgaggggtgaggcagtacttggaaaaagatcttggagagctgctatcttgagttaggagttgagctgaaataggaaataattaaaatgagaactcaacctagagaaacgaacaagaacctgaagaaagcaaaagtctaaagctaaaactctttagtagatataagcaaagagaaaaaagggccagaatggataggaagggactcccaaaatctgagcataccagccccttaaggagaaatgttgctagacacccatagttgaggttagaaagaggaaagaaggaagagttagtgggctagagaggggaaggatgtgatgtgagcagatggttctcactcattctcctctgtccagagtacctgaactatgaggatgggaaattctctaagagccgcggtgtgggagtgtttggggacatggcccaggacacggggatccctgctgacatctggcgcttctatctgctgtacattcggcctgagggccaggacagtgctttctcctggacggacctgctgctgaagaataattctgagctgcttaacaacctgggcaacttcatcaacagagctgggatgtttgtgtctaagttctttgggggctatgtgcctgagatggtgctcacccctgatgatcagcgcctgctggcccatgtcaccctggagctccagcactatcaccagctacttgagaaggttcggatccgggatgccttgcgcagtatccctcaccatatctcgacatggcaaccaatatattcaggtgaatgagccctggaagcggattaaaggcagtgaggctgacaggcaacgggc

SEQ ID NO: 179978 - DNA, 3555 bp, Homo Sapiens
  misc_feature (997)..(1006): n is a, c, g, or t
  misc_feature (1382)..(1421): n is a, c, g, or t
  misc_feature (1446)..(1535): n is a, c, g, or t
  misc_feature (2006)..(2014): n is a, c, g, or t
acaaattgatgagcaatgcttttcttataaagagggcaactttgtacaaaaaagttggtgcaatcttgtctgccattgctgccatgaatgagccgaagacctgctctaccactgctctgaagaagtatgtcctagagaatcacccaggaaccaattctaactatcaaatgcatttgctgaaaaaaaccctgcagaaatgcgaaaagaatgggtggatggaacagatctctgggaaagggttcagtggcaccttccagctctgttttccctattatcccagcccaggagttctgtttccgaagaaagagccagatgattctagagatgaggatgaagatgaagatgagtcatcagaagaagactctgaggatgaagagccgccacctaagagaaggttgcagaagaaaaccccagccaagtccccagggaaggccgcatctgtgaagcagagagggtccaaacctgcacctaaagtctcagctgcccagcgggggaaagctaggcccttgcctaagaaagcacctcctaaggccaaaacgcctgccaagaagaccagaccctcatccacagtcatcaagaaacctagtggtggctcctcaaagaagcctgcaaccagtgcaagaaaggaagtaaaattgccgggcaagggcaaatccaccatgaagaagtctttcagagtgaaaaagtaaattttataggaaaaaagggtatcatgatgaaattcaaaatcttattttctaaggtcagtgtgcatttgtttagttttgatgcttttcaattacattattttcctcccctatgaacattgtggggagggactctaaataaaccagtttaggcatttgctagctttaggtgcttttattggtgcctgcccttttccttgttcattttaatttctgcaataatcctggactttcctaaactatgtaatgtatacttgtcctttttctctgcctcccccaaccccctgttgtttttatggtcagctttgccnnnnnnnnnncttccaattttatctaaacagttgcagagatttttatatttgtagaaagcatcaagaacggtatgccagtcaggtcctggaagtaaaatggaggcacaatatagcactgactgagttgtaaagcctcctgcctggagacttcagttatagctgtaataattaatcttatttataaaagccactccactaaccttttctctccaactgtaaacacagagacagctttgggaataagccaaaaacagggtgatctcattagattttgaagatatatgactcctttgggctacatttcatattgatcaatttctaggtatttttcactggcccaaagtattgcattcccttaacagcaagcacaagttctctatatcannnnnnnnnnnnnnnnnnnnnnnnnnnnnnnnnnnnnnnnagacggagtcttgctcaggtgcccnnnnnnnnnnnnnnnnnnnnnnnnnnnnnnnnnnnnnnnnnnnnnnnnnnnnnnnnnnnnnnnnnnnnnnnnnnnnnnnnnnnnnnnnnngtctatacctactctgatgccattatcttgagatgtcttagatatgaataaaaagtcattccactcattatgagaactgtctttagaagaaaattatactgaattataccataggaatatctctaggttttgaaaatcatatacccagagatgattccataaataaggaatcaggcaaaaaaccaaaggaattcattggtgagaggagagtgttagggatctcattcccctgcaactactggctgaccccaaccctgcattgcaaaacacttggccccctctgacctcaaaaagcatttggtgcttcctcattaagctctatttattgtctttactattcacccatctgcctcagtctgggccaaatctattgcccaatcttcaattggttgcgacttttttgtctcttcccgattctggcattccagagggtcaataggttccttctccacgtgcttttgagggaaatgnnnnnnnnnaaaaaaacttttcacaccaccttgaacagactctaaacttaggcactacagttactaagcagcctttggattctttgtttttgaagttagatcttttcagctattagtggaaaatgtgcctcactctactccaggattaccaatagaaatgaaaggacagaaatggcattagtgtttagagaagattatgtatatatggctgtgtgaacactgaaaattatgagggtcaacataaaatcagcattacaggtactaaaacataaatcctgatggctttcaccgttttcttaagagcaaaattgcaaaaagtgatattaacagtcatcctagacgaatatgagcaaatgatttgtttttccttaaaagagcctccaagtgtattggatcattttcacactgatcaaagagagcacccttctgtcaacaggtatctgcagttttcaggacctggcagaaattcttctatgttctgcctttaaaggtcaggtacaaaagcagagacagctgccaggcccctctgcccagagctaagtgtctgggaccatgagtgggaaggactgaggcttgagcctccttggtcctccagacagcatggggcgccacttgccccttctgcagctgcgcgcggcaaagctgtggcctggccgtggcctcctgccccatgcaacagttggtggacagaccgtacctggcacacggcgccttgtgcactttccaacattttgatgctaaccgtcgctagtcactgagccctgacatttgatctctggccttgaccgcagatttcggaaacttctggcagcccagtgtctactggaaggcccaagccgcttgccagaaagctgcgccccgcccaaaagcactgggttctgcagtccaggcccttcctcagctcccaggtccaggagaactgcaaggtcacctacttccacaggaagcactgggtccgcatccggcccctccgcaccactcctcccagctgggactacacccgcatctgcatccagagagagatggtccccgcccgcatccgcgtcctgagagagatggtccccgaggcctggaggtgctttcccaacaggctgccgctgctgagcaacatcaggcctgatttctccaaggctcccctggcctacgtgaagcggtggctttggaccgcccgccacccccacagcctgtccgcagcctggtgaccgtgaaaatcgccccgccagagagcagaggaagcccgacgcccaggccatctgccttcaggtctgtgatgagaaacggagtggcctgttccgttgtgcccaggtctaggccgctgagcagagccctcactcccaggcagagttgtctgaatccttcctggcggccgcctgctgccctgacgcctcaggcttgcctgcacctggaaggagcttcgccaggtgggccatgagcctctgagcacacccagcctgctgcccggctccaagagtcaggcccctgccaccacatcctgagcctccagccctcagcaccttcaccctactgaccgcggttctacccccacacca

SEQ ID NO: 179979 - DNA, 1404 bp, Homo Sapiens
ctttgtacaaaaaaagttgggtaaatagtatgctatcatttgcatacaaaagggtgggagaagaatatccatagagtagctgcgaagagccaggggaacggggtaaccagaaggggaaagggaaacctttccatgtattccagtttgtatcttttacatggacatgagttacctaagggggagaggaaatcaacactggataaataaaagccctgctctgatagcaaaggacaatagtcagtgattttcacactgactctgatggttgatagagctaggaaatagatttcaaaaagcaaaacctgtagctgctgcaggatctgcccagcctgcccgggattgcccacctgttcccagccagaccctctcacctgctctggtctctacagagccctggctgcccagttgccagtcctaccacggtcggaggtaaccttcctggctccagtcacacgaccagataaggtggtgtgtgtgggcatgaattatgtggaccactgcaaagaacagaacgtgcccgtgcccaaggagcccatcatcttcagcaagtttgccagctccatcgtggggccctatgatgaggtggtcctcccaccacagagccaggaggtagattgggaagtggagctggccgtggtcattggaaagaaaggcaagcacatcaaggtgaggtggaaagggtgggctcccagtccagagtgcagcagaggccccagctcctgcctctcctagttctgacctcgctcaccaacacatggtgccagctgtccctgacactaggaagcagtcagcctccttgctccctgacactgcctttcccttcacccacctttggctggctctggctactaacatgggataacagctttgagatcccttgccacaggtgttggtgtcacccatgatctatcctcctgtatggccaaatcccctgcccccataggccacagatgccatggcccacgtggccggcttcactgtggctcatgacgtgagtgctcgtgactggctaacaagatgcaatgggaaacagtggctgctgggaaaaaccttcgacaccttctgccctctgggccctgccttggtgaccaaggacagtgtagcagatccacacaacttaaagatctgctgtcgagtgaatggggaagtggtccagagcagcaacaccaaccagatggtattcaagacagaggacctgatagcctgggtgtcccagtttgttaccttttacccaggggatgtcatcctgactgggacccccccacctccacccaggagtcggtgtattcaggaaacctcctgtctttctcaaggtctctgaaggtccagacagcactgatggcgagctttgggtccgcacactctggaaaagaaagagagaagtgaaggctctatggtagggga

SEQ ID NO: 179980 - DNA, 1820 bp, Homo Sapiens
  misc_feature (255)..(295): n is a, c, g, or t
atgagccaccacacccagccggccatgtatttttataaccaagctgccctcagaattatgaatagtatttctgacatgtagtgtcttttctcatttatcttagaatatatggttaccactctataaacagtttgtctattattctggtactgtgcttagtttaagacacctaaccattaactagttttcagaatggttttgctttttagtgatagttgtgtgagccactgtacccagccagaacttttatttaannnnnnnnnnnnnnnnnnnnnnnnnnnnnnnnnnnnnnnnnacactgactatattagtatcttatgtatataattatatatagtaacatatagtacattagtattctacataaaacatatctgagatatgttttatggctataaaatactatcaaaaatgtttttgtttttgttcaataaatattctcttcttccttccgctttcccctttcgcccttggcagagaagcaaataattgagttaaaaccttgatttgtggcaatgtgaataaattatagctaattccaggaacttagctgcatcctaccttgacccattttttctactggactcttatattgctctatatgttttagctacacaggtttattaaacatggatacagatgaaaaacagacttgttatgttagaagttataagttgctcatgcattaagattttgacacacaggaagtttgaatgaatgagtgaaaaaggttccaagttattaaaatgttctggtacctgatttattcatttgccataccagtaattctaaggtgggtgaagctcctttacttcctgaagaaacaagttagtttcttaaactaagcattaaaagaaagctggaattatttgtttccagaagtgttagtagtcatgctaagttgcccttctttggctagattgtccaattttttttaggcctgttttgtctatttttgtcaagatataaatgtttaattgctttaaaaaaactgtgtggttgcagaaaaaaattgtactgttatattgttgagatcaatgagacttttctgtatttactttttcagacattattttgaactcaggctcagtctcagagatttcttcaacatgtaattttctaatgtttcctttcctgcaaggaatgagacaatatattcttggaatattaaagtacttttgaagtaactcatacgttttctcccctcttccatttgtttagctattgagggtttgctttaaaacaaatttatgtagaaatatcagtactataatagtattgtgatactgtgtatttcttaagcatatgccaggaaggagagcattagttaggtgtccaaaaaacagccaacaaaacaaatcagctctgaaaatcgtgaagcagtgaatattttagaattatttttgaaacctctttcagaactgtttttagaccccgtggtaatttgctatgtaatttaatactagtttaggcactccatgtacagttggtatgtttccttttgaaagataataatctatttataataaaagtctgaatatttcaatctcggaattcctctttaaaacttgaatcagttttactattgctttttaaaatgttacctatttatatttgctttgtatatcaatgctacacttcttgttttgttttaggtatttaaaccatgtcagagctgcctcaccacaggaccttgctggaggctatacttcttctcttgcttgtcacagagcactacaggatgcattcagtgggcttttctggcagcccagttaaccatttataaagatttggaccttgggagctgaaccaggggagct

SEQ ID NO: 179981 - DNA, 809 bp, Homo Sapiens
  misc_feature (404)..(415): n is a, c, g, or t
aattgatgagcaatgctttctttaaaaagccaactttgtacaaaaaagttggctaagttaaaattcaagtgaatttagacccagcagaagacatggatggacctgatttggtccactgactaccagtttgttaacctgtgctttataagatttgaaggaaaggcattcatggtaattacagacggtgccaccagaaaatgctcttgctaaatgcagccagtagttagattgcttctttctccagtctcccccgcaaagaaatttgacgtgattctgaatgcactggacatgtcttgattgcgtctttacatttcacagtgtcttaaaagaaaggcaagccagttgttaatttcagaatcagatttatgctctctcaatttaaaaaatgctgggaacaatttcannnnnnnnnnnngagatggagtctaacctgggcaacaagagcgaaactccgtctcaacaacaacaacaaaaagtttggtatgtttctctcaagaaaaaaagcatggtgagtccagacagcagcaaaagcttttgtgaaaaccaattgtgttcatctaaatagtaagtaactcctatttttactgttaattttttaaaagagaatttttccctgtggaaactccctgttagtacgtcctaggggagaaagcctgtggaatatggtggttattgatggcgttgcctttgtttcatctttgagtttgccctttgtggggatctagtgggataatgaccactgacagaactcttaacagcgtgctgtatttttgacattgaaaatgttaatgacttgatttgtacattaa

SEQ ID NO: 179982 - DNA, 1756 bp, Homo Sapiens
cattcttaaggtgtggcagagacagggtatttgggatatacttttcagactcccccggtcttattaattctcgaaccttcttgatattaaaacaagatgagccatagtcatggtctagctcttttcccttaacaggtcctgtttttagcacttttgttcctgctgctttagggtttggtgctggaaggcaaatgcactcaggctcagagctagttgctggttgcatttatttccacaatatacagagtctatacacttgtctcactcttggccatcagagtgtcatggtcaggatgtctagactatctagtgctctgtgtttggtgtctaaatggtgaaaggggatcaatctggagaccttgtggcttaaaatgattcatccatttggcgggttgggttttcatgtgcactgtgtgcagcttgaacatagaatgtggttttttaaaaagccagcatttccccttaatgcatcattttaaatggtcctgccgctgaaaaatctggtgtggttttatttctaacacatttggctttctgttagtttatgggcatggtagttccccctctagaaaaaagcatagcttagttcctacctagagtgacctgaaaagacacattctagaacagaccaggtgtccttggagatgtggaaggtgctggggagtctccctcgtggtggccctggatggagactctgtttgatgttccttaggagctttgtgtggtctcctccccgagatgtaactggcacatatgcactgcttcagacacgagccctttaacatggaaactggaatctgccccgttgtgggagggggagagggaggtagccttgacctgggcccagggtgctgtccagctccctgtcctctggctggattgggactgaggagcagtgggcgtaggcttgctgctgactggttgttctgtgctctcttcagcaacccaaggagatctgtgcgctggttgggttctgtgatgaggtgaaagagatgcccatgcagactctggtccccgccaaagtggcctccaagaatgtcatccctgccctggaactggtggagcccattaagaagcacgaggtcccagcaaagtctgatgtttactgtgaggtgtgtgaattcctggtgaaggaggtgaccaagctgattgacaacaacaagactgagaaagaaatactcgacgcttttgacaaaatgtgctcgaagctgccgaagtccctgtcggaagagtgccaggaggtggtggacacgtacggcagctccatcctgtccatcctgctggaggaggtcagccctgagctggtgtgcagcatgctgcacctctgctctggcacgcggctgcctgcactgaccgttcacgtgactcagccaaaggacggtggcttctgcgaagtgtgcaagaagctggtgggttatttggatcgcaacctggagaaaaacagcaccaagcaggagatcctggctgctcttgagaaaggctgcagcttcctgccagacccttaccagaagcaatacgccccgggctgggctgcggtaggccagcatggcagaacctgatgaagtatgccaaggctggggtacattttgatggaaaaccagctgtttctgcctccgggcatggagtccaatgaagttttacttggacgtgatttgttggcttaagatgagccactgggggaagcaacctgaagtagagaggccaaatgtagataggtgtctggaaaggagccccaggacccagtgggctgggaatg

SEQ ID NO: 179983 - DNA, 928 bp, Homo Sapiens
ttaaaggcttggcatttttcttcttctttgcacttgtttgaatattagtatcaaaaacagtcccatcttgtagtgttcctgtataccagcagtgaacaacatctccctttttgggaaagttggttttatctccctttttcagaacagatttagtatattttggtggaccctcatccagggtctcttcagacttggtttctttgggtttatcttcattaagcttcacattttttacttgctcagacactttacttatactttcagtacccttaaaacgcttagtttcaaaaagatggttataggctgtaaccaagtggtccttgttagctgtcttggccacatttttaatgtttcctaataatttatgttctgcaagaaactataaggaaaaaagctgggtaatcaagataacttctcccgagtaagaagtgtctaaaattagaaaacgatccttttatgttagcagttgtgttttcagtagtactagtactgaagaagaaataaagcctatagtttatactctttgttacaaaaaaagtaagagattttttaaaaattcggtatttacaagaattagtgacaagactgcaactgtagtgttatgtactgaacacagtgtttcatcctaaactttttcctgtcaacactcacaaaaaataacatttatacagcaagcacactgtggtgacttgagtcagctgctcactgcaggaggatacttgggtgcagcccttgagagcctccagccaggttggacatagctatcctgaggcatttgtaacccattcttagccgactaggaagagtcactgttacacaagcatgtaacatacatatgttgagattgctatgcttaacattatatatataattgctaagtatatgggctgtggagtcatattatctagccaacttttttgtacaaagt

SEQ ID NO: 179984 - DNA, 1231 bp, Homo Sapiens
  misc_feature (62)..(72): n is a, c, g, or t
  misc_feature (1037)..(1049): n is a, c, g, or t
ttggggcaatctgctgctcagttaataattactaaaattcttggatccctgaatagaaattnnnnnnnnnnntacaagaggcagtagagtcaatacaagcttaatacaagcttagagtaaatacaagcttagagtcacttgatgactgttttactgttctccatattgtttttatttttaattaggccctaccatagtatttcacactaaaaacaaaggaattatattggctaatatagtctttgactcatttcggtatctcagtaaaagtaaactgtcttttcattgtttcaccagttggtggtgaaaatagcagtatgcatgcattatcactggtgtcacaaactgtaagctttgtaagttagcactttactcctatagctgatgtaatcaaactttaaaataaacatttcactaaaccttttaaaaataatacatttgttttggattgtatagcacgaccatgtggtaccaatttggatgaattcttgatagatttaaatagtgtatgtaattttgtaatgcttagactcttgaagagctactttctgttttaatgttaagattcttgtgtcttagttttttttaacatggatgtaattccatgtaaacaggtatggaagtaggaaatgtttaggctggacttggtggattattaattgactttcttgggttcttgggagtcaacattactaaagcagtgtgaatccctgtttgcttcagggcgagatgtgtgacagaggtggcatcaagctcttacagtcccaaccctccaacggaaatgggcgaagatctcaggaatggcatcggtcacaggaaatcgatagtggctggctgctagcatggccacttggggcttaggcagaaatagagccatggtactgaccaaagggaccatagcacatggaataaaactcaaaacaggacttcatgttttatggaaattatatttaaccacttcaacattgtaaatctggataacttttaatatctaaactatataagaaagtaaaatttaacatgttaatatggaaaannnnnnnnnnnnngtatcttgatgacttaaatgtaagcaacaaagtggttaaacacatacccatctaaatttttttatagccttccatgttaaactataagtaaataattagttttaaaattgttttgtattttcttattcctgttccctttaccctttgacaacttgaaatgttaccacttcgtcctcatgatg

SEQ ID NO: 179985 - DNA, 3843 bp, Homo Sapiens
  misc_feature (181)..(189): n is a, c, g, or t
  misc_feature (1589)..(1598): n is a, c, g, or t
  misc_feature (3378)..(3396): n is a, c, g, or t
ttggctgccagtttgataggccctttctaaaataggttagagtccttatctttatgaaaaccatgctttatttttcactttgtcacaaatgatatgacaaatcatttttgaaattatgattgggttggtagacaaaatagcatggatttctgatatctatacattttttcccattttaggnnnnnnnnngacaaattctgttattatttaaagtttattgacactgttcacatggtcctatcttcaagttccttcagtatacaccagttacatttcttcagctccctgagatgccaattttgagcacctaggacccaggtattttatcccaatataacttgggctgcagatccctgtacatttttgcccatgttgcaagaaacccatatatgtggtaataaagtgttgcagttgaatcaaattttaatgaaaatcaggttactgaatcaaaattttgatgtcatatatttctataaaaagaacttcaagagagcattatagcactgtggcagacttactgttcagacttgctactgtttcactctgtagcagctttcagatggcgtccactgtagaaatctaacgattatatgagaaaatatattggtcacatccctcttatttttaatactgattagatgttttcattttcctaaacttcatagcttttaagaaaactccagagatttttatttctgccttgctaaatttttacactaggccaggaaatcaataatcaagttgccccattatgggctagatttgacaagttaaatctttgaaaagtccttaaaaaaataatatatgcatactgttggaatggtgtatttcccaatggtgatgttcttcctaaattgggaaatcatggaaactgttacagctttttgatgtgcagtatttacaattttataatatccttttaaagtgttaagtactatggccactaaaaatataaatacttgcatttcccaagtacttggaattgaattctcaagatcagggtttttcactcattttctgaccggtgtgcttccctttccccatttcccattattcccagctgtatagtagtgtagtgaaaatcacttgagatgtggaagagtagtctagtctaggaagagagagggaaaagtaagtttcccaggataagagggggaaaaaaggccccaaagccttctcaatgaggaatggggaaggaggttttgctgccaggttttactaagtgcatttgaatgaaccctgctattgtagtcctcttttattaatgctttcctgacatttaccctgttagttgaggctcttcattgttcctgcactgagctgtagaattctcttttgttatagatttgcaaacaagactttcccagcagactgaaggtgagttgaagtgttcatattttttatttttgtctttgaaatagaattaaatgtagtaagacagttttctatatttattgtcatatttttataccagtaatttggaccaaattttgacacagtgacacatagtggtatattcatagtaatctgtctgtatttcagaagacctaacccaaattaatggacttaaaaaaaatcaaaataacaannnnnnnnnngctttagtttgcttaaaattttcaaccttgtttttgttttatgcctacctgtgtgttctaagtgttgataagttgcatatagaagtcaggaaatgaagtattctcttattaacgagtaggcaagtattttagaacctggaatctggaagttgtcttagtataaagttgtgaatcatgctataaaactcacctttttttgcttaagacatagtactcagtgatttatttaagccagtaccaagcaataagaggtttatacatacttaaattacatgcacatttcagagaaaccattcattaagtaggctatgatttcttgtttttagttatcactaaatctctgttgcttgacatgagcattttgctgttaatgtaagttctatatcttttgtaggagtatgcttaatgtttagggaaatgattatgagaaagatatgtcatgttccatcacagtcaagaattaaattttttcacaaacaagatgcttctaatcagtgctgttttgttaagagatttttaaaagattttcctagatttactgtgttctgcattgatctagcttgaacgtgaatgtttgtatagtacgttttcttaatattttttagtattcatagtatataatcatactaaacttgagaaactggaagaatcaagtcttcctcagttctgtttagactttctagttttttttaaggatacttccatatcttctgtaagctacacagtgagcttcatttttgcacagttataatacactctcgaatctttaacttttttccagcagaatttgacatgttatattaaaattttgttttatttaaaataaaactttatgaaagaaaaaacttatatgttacagagaagctaaagcacctgtaatgctaccagaaagttatcatttatgatatatttcatgcacagccctaatttctcggtgtaatatttctgatactttaagtgatcgtttattttaattaccataatttctaatgcactgttttatccttagctttgtttgttattatgttttggaatgaaatttggtcagataatatgattacggtgagttctgtaacagctactggtaatatttttgtaaatcacgtgaaagcattggagcaactgtcttggaaaatgctctttaaacttcaaaccccagtatgttttggtagtagtggatattacacatatatgctgctcttttcagtgttcttttattgtgcgaaaacatttttaaaacatttgatttattaataggatttatttttaataggattgttaataggatttatttttctaggacattgtctttaaacacttggatgattttatatgtcttaattctttaataatttgtagatttaaaaaacttcgtgggcagaaagcgaagaaataggaaaggatatagatttatttggcatttcaaaggattttgttttattatcccctcttatttgggtataaactcaaatctattttatccttcatctgtttggattgatgtgtattgagattttgtctaattgaactgattttgataacacataaagtttaatttccctgttaaaataggactcccaaatttctgaatgtctgtttcaagtattaggttacctcagttttctggcacctaaaagctactgataacatacattagtagcaatattaaataagttaaaataactccagtgacatcctagttacatgcttggggtgggtttttggtttcgttttaaagtatttatgagggatactttcatgcattttccatgaaactaannnnnnnnnnnnnnnnnnnagcttcagctttagctgcagctgcctctgttcagccacttgcaacacaatgtttccaactctctaacatgtttaaccctcaaacagaagaagaagttggatgggataccgagattaaggatgatgtgattgaagaatgtaaataaacatggaggagttattcatatttatgttgacaaaaattcagctcagggcaatgtgtatgtgaagtgcccatcaattgctgcagctattgctgctgtcaatgcattgcatggcaggtggtttgctggtaaaatgataacagcagcatatgtaccctcttccaacttaccacaacctggtttcctgattctatgacagcaacacagctactgggttccaagtagacgatgaaagaagatatagtcccttatgtatatagcatttttttctttcttgaaaattcatctttgagttatcttttatt

SEQ ID NO: 179986 - DNA, 1638 bp, Homo Sapiens
ggctggtctagagctgagtggagcccggctgcggatctgggaagcgcctcttcacggcactgggatccgcatctgcctgggatcatcaagccctagaagctgggtttctttaaattagggctgccgttttctgtttctccctgggctgcggaaagccagaagattttatctagcttatacaaggctgctggtgttccctctttttttccacgagggtgtttttggctgcaattgcatgaaatcccaatggtgtagaccagtggcgatggatctaggagtttaccaactgagacatttttcaatttctttcttgtcatccttgctggggactgaaaacgcttctgtgagacttgataataggtaaatgtcggctaagatagtttctttaaatttattcgtgggatacttataataatacaggtgaaagatagccaggcgaattcctttgtccattgctgagagattatggtgacatggatgttgtttttcgaaatgttaaaaaaccttatttttgcaagtctggccagagaacaggctttccccacattatgtaatttagtcctttgtggcttactaaaatagggagatgcctggatattcgttagtaagagaggggctggcattttctggagggtgatacattacatagtgttaaataacattcaaaatatgatgctagcaatatcacaaaattgggagatcctttttatcttggacgcttaagataaattccatttatcgatgacctttttccctcctctttttcagctcctctggtgcaagtgtggtagctattgacaacaaaatcgagcaagctatggtatgtactgatgaaaaatcatttatactaaatgtgggcacagcacaaaaataagatgttttgtggaaccagtgcatccctaagttcagatgatgatgattgctcttgatgcgcgtagaaatgccggcgctgtctccattcggccagcgtggagccacctaccacggcagccgtggagggagaaaggggccctgcgggtattaaatggtcttcttccccggactggtttcacacgacgggattttctcacggtgaccctttttgctggggatttattagggaagcgctggccaactatctccttcggctggtcgtgagcacacctttagcgatgtggctttactaggaatcctaatattttactagggagccgggaggtggggagggccccagaagtcgggatcctggataagggtcttctagacggtgcacaaacgggtccccggtggcgcgggctccttcacaatgaagaagaatcagagaaaaagttttgttttcttagcctgcgcctggatttctcctattttttatttccgccttggccgttctttgttattggagcagcgcctgtggctcttctcacgggattctctgcccactgttgctaggcaaactctgaacctttaattcggagctataaataactcgggctcccattggctgcgacgtctgcccaggtttctgtgatgtcagcttaatcacgaaaagaggggggcggggtggagagaagaaaatgcggcaacatgttctgtaggaaactggctgcagccggtgctgaagaggcggctcctgggcgagcgcggggcggggcctggggg

SEQ ID NO: 179987 - DNA, 1207 bp, Homo Sapiens
  misc_feature (1043)..(1071): n is a, c, g, or t
gccaactttgtacaaaaaagttggcttaaaataaaaacagaaaaatatatcgtcctaacagttaaattaacaatcaatccataaagtcctatatcttcattcagcaacccaaatattacatacatttccagaattttcttgattgttactttcagtgatattctttatattgggtacaggagaagtttggtgtttggtaggtttttcaacattagtttttgagactagtttacctcttcacatttatgctcacaaccctcttgttagaaaagtctgtgtttatatacaggctgtaagtttgtgattgataaaaagaagatgagtgttaattagcctccagtgaaaatatactgaaagcctgttttcatttgattccaatgtttcttccaaagaattctgtataaacatatgccaattccctatgatggtctagagttaggaatgagtgtttatggtgttgcttatagaacaactcaggtaatctccatttctggttttatattttctgtacaaactgcctgggttttatttttctaatcagcaaggtgcttcactgccttcttgagacgcctctcaaagctcttaaatggctcctgtgctatgtgtggtgttggcagtctaatttgcttctgttaaatgttgtagaacctttttcactaggaaataagattcatttctttcggcagtagatgtagattcatcttttaacgtttcttcaaatttgtttctgtcaggctttgtgttattttaaatggttttttaaaattttcttctatgttttcaattacctaaagacataggataatagttttttttaagttagaattttacctcataaaattttttgaggtttgatgtatgtctctgtcttatcaataatgaggcttaaaaaatactggatttgaatggctgccgttttttcaaagcaatatgaatttgatgagtttgttttatgccattaggtggcgccagaggtcagaacatgtctattttgaattggatcgttacaaatgagcatatttgatgcggaaatttctgggagnnnnnnnnnnnnnnnnnnnnnnnnnnnnnttgacattcattgagccaaaagagatgtggagaaacatttttcacctttctgtttggcctgattaacatttaaattcttgccaaaattaaggtaacttttaaaaaacaccttttataggtggatccagcagtctgg

SEQ ID NO: 179988 - DNA, 945 bp, Homo Sapiens
ttggcattaataaaaaatgacttagtcattattaattcttaactcactggaatatctctcagaacttcttccttgacatggtcctttggaaagttgtgttcaaccgagacaaacaaggagagtatcggttcagcaccacacagccaccgcaggttggaactcagcacttcctgtcaattcttgctgcctctctaggctctctgcttgtgtactctgtattctctagcgtgttcttgttctgttatgtgttattctctagcgtgttcttgttctattacgtgttccttcagcctttttctctgtgcttggcatttcatttcttataagaagtcctagaaaattcatggcaaacatttgttagaggcttttcaagatcagaaatttcataagtctcctttccattccaatcctgatcttctatttgtgtaaaagtcttgtcctcaaaggtgagagttaatttttccatttcaatctactataaattttatgtttttgtttttcatgagtccccttagaagctaaatgagatttatataaacaaagtttgcaatgaaaactgtttcttcttggatcagagtccaaaggcccaaattctgaagaattatttctgatttcttgtcagttactgtcccttaatttggagtggctttttggctttctccagcgttgtataccttagtattcagaagatgatgtccttttttcatacaaaccgtggtttagacatttgactttttgggtctgttaaacagcctgtcatttgaaaggtattgcaagttctgtggtaaagagagaagagaaacagaggaataaaacccatttcctagtgttaggatgttaaagtatagctcttgatacagatacagattggacttattttttaaacccatcctatgaatcagagctctttgaggcagctttttagcatagagaatttgataaaat

SEQ ID NO: 179989 - DNA, 2286 bp, Homo Sapiens
  misc_feature (316)..(352): n is a, c, g, or t
  misc_feature (1935)..(1965): n is a, c, g, or t
ttggatatctggggcccttctcttctccgttttgtctcagattatcatctgcattggatttcaatctttgggttttttttgggtcaaacagcaaccttggtatgaagtgtggcatccaaaatcagatgcttgtaatacaacaggaagcgggttttggaattcttcacacgtagacaatgaaaccgaacttgatgaacataatatacaaaattatgaaaataccacagtgttttttatttccagttttcagtacctcatagtggcaattgccttttcaaaaggaaaacccttcaggcaaccttgctacaaaaattannnnnnnnnnnnnnnnnnnnnnnnnnnnnnnnnnnnnatattattcatcatgttgtatccagttgcctctgttgaccaggttcttcagatagtgtgtgtaccatatcagtggcgtgtaactatgctcatcattgttcttgtcaatgcctttgtgtctatcacagtggtagaacttcttccttgacatggtcctttggaaagttgtgttcaaccgagacaaacaaggagagtatcggttcagcaccacacagccaccgcaggagtcagtggatcggtggggaaaatgctgcttaccctgggccctgggctgtagaaagaagacaccaaaggcaaagtacatgtatctggcgcaggagctcttggttgatccagaatggccaccaaaacctcagacaaccacagaagctaaagctttagttaaggagaatggatcatgtcaaatcatcaccataacatagcagtgaatcagtctcagtggtattgctgatagcagtattcaggaatatgtgattttaggagtttctgatcctgtgtgtcagaatggcactagttcagtttatgtcccttctgatatagtagcttatttgacagctttgctcttccttaaaataaaaacagaaaaatatatcgtcctaacagttaaattaacaatcaatccataaagtcctatatcttcattcagcaacccaaatattacatacatttccagaattttcttgattgttactttcagtgatattctttatattgggtacaggagaagtttggtgtttggtaggtttttcaacattagtttttgagactagtttacctcttcacatttatgctcacaaccctcttgttagaaaagtctgtgtttatatacaggctgtaagtttgtgattgataaaaagaagatgagtgttaattagcctccagtgaaaatatactgaaagcctgttttcatttgattccaatgtttcttccaaagaattctgtataaacatatgccaattccctatgatggtctagagttaggaatgagtgtttatggtgttgcttatagaacaactcaggtaatctccatttctggttttatattttctgtacaaactgcctgggttttatttttctaatcagcaaggtgcttcactgccttcttgagacgcctctcaaagctcttaaatggctcctgtgctatgtgtggtgttggcagtctaatttgcttctgttaaatgttgtagaacctttttcactaggaaataagattcatttctttcggcagtagatgtagattcatcttttaacgtttcttcaaatttgtttctgtcaggctttgtgttattttaaatggttttttaaaattttcttctatgttttcaattacctaaagacataggataatagttttttttaagttagaattttacctcataaaattttttgaggtttgatgtatgtctctgtcttatcaataatgaggcttaaaaaatactggatttgaatggctgccgttttttcaaagcaatatgaatttgatgagtttgttttatgccattaggtggcgccagaggtcagaacatgtctattttgaattggatcgttacaaatgagcatatttgatgcggaaatttctgggannnnnnnnnnnnnnnnnnnnnnnnnnnnnnnttgacattcattgagccaaaagagatgtggagaaacatttttcacctttctgtttggcctgattaacatttaaattcttgccaaaattaaggtaacttttaaaaaacaccttttataggtggatccagcagtctggcaacgcccacagttaccacaacacagaaaactgatcgtgctataaaatggacgctaaactatgaaaacagtgtgacattgttctctgttcttcagagccagtaacatgcttgctcgtgctttctacttctagctgatcattcttttcccacctatatttacaatttaccaatttacctagaattt

SEQ ID NO: 179990 - DNA, 1469 bp, Homo Sapiens
  misc_feature (103)..(133): n is a, c, g, or t
  misc_feature (934)..(943): n is a, c, g, or t
ttgggtttgttttatgccattaggtggcgccagaggtcagaacatgtctattttgaattggatcattacaaatgagcatatttgatgcggaaatttctgggannnnnnnnnnnnnnnnnnnnnnnnnnnnnnnttgacattcattgagccaaaagagatgtggagaaacatttttcacctttctgtttggcctgattaacatttaaattcttgccaaaattaaggtaacttttaaaaaacaccttttataggtggatccagcagtctggcaacgcccacagttaccacaacacagaaaactgatcgtgctataaaatggacgctaaactatgaaaacagtgtgacattgttctctgttcttccagagccagtaacatgcttgctcgtgctttctacttctagctgatcattcttttcccaacatatatttacaaatttaccaaattttacctagaattttaggaccaaatggttctcactctttatgctgcaaagacctggatgatgtttggtaactatagaaaaatagaaattacactcaggatcactgttactgctattgccactgatgattcctgcaaaaatataatcgaagttttccatcaaatgtataatatgctattaatacacattagatgataacagttgttccatgaatgattctatgaagctatgcatcttagacctcttgagctgtgaattagcactattttctatagttacttattctctggatcatttttataatttccatattaatttcaaatatgctcgtgttattcttcagtgatttccacaattgtgcattttattctttggtttaagtactgaagcatataatgaaagtaattgctaagtagcagcttaaaaattcaattatccgattgtatttaacatctttaagagcatgatcataaagagctatttttgacannnnnnnnnnacttttttaacatttagagttagtaagggttttatatctcttctgtccatattgttttcaaaggaatgaggtgtttaggtggctggaaaagcatttgtaggaagttagatttgaatatagacaaggtgggttattcacgttgagaatgttatttgaagaatgcctgtgaagccaggtgtgggttctactcagtgccatagatagactgagtcttctctcgtaggttaccattacatagtaattttgattctgaatttcacattaaattatttgagtttatacagacctaaattttaaaatctgtacatatattattttgatgtattaagatgaatattgctgatttaaattttatttatgcacatacttaaaggacagaaatgtctgggaaagtaattgttaaataatgatatgtaactttttaactttttaaataaataacaagatttttaatgtgtgtctccctcagggttgtttaaagttttttttctccctcaagtataaatagtggtaactatatgttttg

SEQ ID NO: 179991 - DNA, 1828 bp, Homo Sapiens
  misc_feature (109)..(139): n is a, c, g, or t
  misc_feature (940)..(949): n is a, c, g, or t
ttggtgatgagtttgttttatgccattaggtggcgccagaggtcagaacatgtctattttgaattggatcgttacaaatgagcatatttgatgcggaaatttctgggannnnnnnnnnnnnnnnnnnnnnnnnnnnnnnttgacattcattgagccaaaagagatgtggagaaacatttttcacctttctgtttggcctgattaacatttaaattcttgccaaaattaaggtaacttttaaaaaacaccttttataggtggatccagcagtctggcaacgcccacagttaccacaacacagaaaactgatcgtgctataaaatggacgctaaactatgaaaacagtgtgacattgttctctgttcttccagagccagtaacatgcttgctcgtgctttctacttctagctgatcattcttttcccaacatatatttacaaatttaccaaattttacctagaattttaggaccaaatggttctcactctttatgctgcaaagacctggatgatgtttggtaactatagaaaaatagaaattacactcaggatcactgttactgctattgccactgatgattcctgcaaaaatataatcgaagttttccatcaaatgtataatatgctattaatacacattagatgataacagttgttccatgaatgattctatgaagctatgcatcttagacctcttgagctgtgaattagcactattttctatagttacttattctctggatcattttataatttccatattaatttcaaatatgctcgtgttattcttcagtgatttccacaattgtgcattttattctttggtttaagtactgaagcatataatgaaagtaattgctaagtagcagcttaaaaatttcaattatccgattgtatttaacatctttaagagcatgatcataaagagctatttttgacannnnnnnnnnacttttttaacatttagagttagtaagggttttatatctcttctgtccatattgttttcaaaggaatgaggtgtttaggtggctggaaaagcatttgtaggaagttagatttgaatatagacaaggtgggttattcacgttgagaatgttatttgaagaatgcctgtgaagccaggtgtgggttctactcagtgccatagatagactgagtcttctctcgtaggttaccattacatagtaattttgattctgaatttcacattaaattatttgagtttatacagacctaaattttaaaatctgtacatatattattttgatgtattaagatgaatattgctgatttaaattttatttatgcacatacttaaaggacagaaatgtctgggaaagtaattgttaaataatgatatgtaactttttaactttttaaataaataacaagatttttaatgtgtgtctccctcagggttgtttaaagttttttttctccctcaagtataaatagtggtaactatatgttttgtatcttctagcaccaactgctgtaaagcaatgctgcaaataatgcttgaatacaagtggctaagccaacaacagaataaatacttttatagtagttttataatcctgaaattcgaaagctttcccattgcacttgcatctaaacaaaactgttgcagtttttactctatttattttgttccccatgtttatgaaagtcctgcacagtttcaaaggcatggtaaataatatatcaatgtttatgtagtctgttacagaaacagctatagataacattatccagtgaagagcaaaatccagctttagaaatattcatgcatggcatttttgacatattctaaaaataagtttttg

SEQ ID NO: 179992 - DNA, 1026 bp, Homo Sapiens
ttgtacaaaaaagttggattacatagtaacctttgattctgaatttcacattaaattatttgagtttatacagacctaaattttaaaatctgtacatatattattttgatgtattaagatgaatattgctgatttaaattttatttatgcacatacttaaaggacagaaatgtctgggaaagtaattgttaaataatgatatgtaactttttaactttttaaataaataacaagatttttaatgtgtgtctccctcagggttgtttaaagttttttttctccctcaagtataaatagtggtaactatatgttttgtatcttctagcaccaactgctgtaaagcaatgctgcaaataatgcttgaatacaagtggctaagccaacaacagaataaatacttttatagtagttttataatcctgaaattcgaaagctttcccaattgcacttgcatctaaacaaaactgttgcagtttttactctatttattttgttccccatgtttatgaaagtcctgcacagtttcaaaggcatggtaaataatatatcaatgtttatgtagtctgttacagaaacagctatagataacattatccagtgaagagcaaaattcaagctttagaaaatattcatgcatgcaattttgacatatctaaaaataggtttttgtatatttatggtgggaggtggttgggaacttttaacaaaatggggtgttaatttttgtacagtctgtgggcatttacacatttttaatgtattaaaatttggtaattatgtgtacattaaattaataaaagttacttctagttatgatttgtgaattccctaagaccttggatttttttaagtaactttatatcagaaatgatactgcatctttatatttttaaaattgtattgctgctcaagaatggtaccctcttgtcaaaaaggcatacattcataattgtacattcagcattgtaaataatcttatgaaaccttttttgattgaagctattcaaataaaaattttaatgaatg

SEQ ID NO: 179993 - DNA, 1486 bp, Homo Sapiens
  misc_feature (109)..(139): n is a, c, g, or t
  misc_feature (938)..(946): n is a, c, g, or t
ttggtgatgagtttgttttatgccattaggtggcgccagaggtcagaacatgcctattttgaattggatcgttacaaatgagcatatttgatgcggaaatttctgggannnnnnnnnnnnnnnnnnnnnnnnnnnnnnnttgacattcattgagccaaaagagatgtggagaaacatttttcacctttctgtttggcctgattaacatttaaattcttgccaaaattaaggtaacttttaaaaaacaccttttataggtggatccagcagtctggcaacgcccacagttaccacaacacagaaaactgatcgtgctataaaatggacgctaaactatgaaaacagtgtgacattgttctctgttcttccagagccagtaacatgcttgctcgtgctttctacttctagctgatcattcttttcccaacatatatttacaaatttaccaaattttacctagaattttaggaccaaatggttctcactctttatgctgcaaagacctggatgatgtttggtaactatagaaaaatagaaattacactcaggatcactgttactgctattgccactgatgattcctgcaaaaatataatcgaagttttccatcaaatgtataatatgctattaatacacattagatgataacagttgttccatgaatgattctatgaagctatgcatcttagacctcttgagctgtgaattagcactattttctatagttacttattctctggatcattttataatttccatattaatttcaaatatgctcgtgttattcttcagtgatttccacaattgtgcattttattctttggtttaagtactgaagcatataatgaaagtaattgctaagtagcagcttaaaaattcaattatccgattgtatttaacatctttaagagcatgatcataagagctatttttgacannnnnnnnnacttttttaacatttagagttaataagggttttatatctcttctgtccatattgttttcaaaggaatgaggtgtttaggtggctggaaaagcatttgtaggaagttagatttgaatatagacaaggtgggttattcacgttgagaatgttatttgaagaatgcctgtgaagccaggtgtgggttctactcagtgccatagatagactgagtcttctctcgtaggtcaccattacatagtaattttgattctgaatttcacattaaattatttgagtttatacagacctaaattttaaaatctgtacatatattattttgatgtattaagatgaatattgctgatttaaattttatttatgcacatacttaaaggacagaaatgtctggggaaagtaattgttaaataatgatatgtaactttttaactttttaaataaataacaaagatttttaatgtgtgtctccctcagggttgtttaaagttttttttctccctcaggtataaatagtgggtaactatatgttttgtatcttctagc

SEQ ID NO: 179994 - DNA, 1271 bp, Homo Sapiens
  misc_feature (823)..(832): n is a, c, g, or t
atgctttgcctataaagccaactttgtacaaaaaagttggcaaaagagatgtggagaaacatttttcacctttctgtttggctgattaacatttaaattcttgccaaaattaaggtaacttttaaaaaacaccttttataggtggatccagcagtctggcaacgcccacagttaccacaacacagaaaactgatcgtgctataaaatggacgctaaactatgaaaacagtgtgacattgttctctgttcttccagagccagtaacatgcttgctcgtgctttctacttctagctgatcattcttttcccaacatatatttacaaatttaccaaattttacctagaattttaggaccaaatggttctcactctttatgctgcaaagacctggatgatgtttggtaactatagaaaaatagaaattacactcaggatcactgttactgctattgccactgatgattcctgcaaaaatataatcgaagttttccatcaaatgtataatatgctattaatacacattagatgataacagttgttccatgaatgattctatgaagctatgcatcttagacctcttgagctgtgaattagcactattttctatagttacttattctctggatcattttataatttccatattaatttcaaatatgctcgtgttattcttcagtgatttccacaattgtgcattttattctttggtttaagtactgaagcatataatgaaagtaattgctaagtagcagcttaaaaattcaattatccgattgtatttaacatctttaagagcatgatcataaagagctatttttgacannnnnnnnnnacttttttaacatttagagttagtaagggttttatatctcttctgtccatattgttttcaaaggaatgaggtgtttaggtggctggaaaagcatttgtaggaagttagatttgaatatagacaaggtgggttattcacgttgagaatgttatttgaagaatgcctgtgaagccaggtgtgggttctactcagtgccatagatagactgagtcttctctcgtaggttaccattacatagtaattttgattctgaatttcacattaaattatttgagtttatacagacctaaattttaaaatctgtacatatattattttgatgtattaagatgaatattgctgatttaaattttatttatgcacatacttaaaaggacagaaatgtcttgggaaagtaattgttaaataagatatgtaactttttaactttttaaataaa

SEQ ID NO: 179995 - DNA, 1514 bp, Homo Sapiens
tttgtacaaaaaagttggcttcagctatacttccgtaaaaaaagcataaaatattaaaacttcttcctcttttttctctgtatagatccgtatgtttttgcttgtaacatcaactctgtggggtgaatttagtggttaagtcctctgatacacaattctgctttcctcaagtttagatattttgtggtgcttgaataaatactgttttgaattttaaaatttgtatgttttcagtaagaatatggtctttactgtgagctattttcgtattatggagcgccatagagtagaaaatgtttttgcttattctctgtgcctgttaatagccattaaaccatgtgatttctcatgttgttgaaatctttttatagtaaaagcattaaaactgtttctttcctttgatgaaaattactgaaattcctgattttaagttcaccattcattagcaaattctagagtttgtagatgcaaatagaattgcctcttcctttgatttataaaaagtaactgaatatataaagtgcatatttatttcagcttccagaactcttggaaataatcaagccaaaacttgaaatgattggctttaagaatttttcttctatctcaggtaaaaatgaatcttgactaagcaaatctttgaataagaaatgatttaaaataaaatctcagagactgtagggtatatttaacattttcttctgtagttgtaaatccttggttgtttctctattctgtattataacttacctaaataagatgttttatttaattcatttgatctgatttattatagtacacaatgtaaatgctgtgacagtatttcaaatgaagttcatgtctgggcctgagcatgatgattaaatccagtctttaatctcaacagcagccctggaggactcccagagctctttttcagcctgtgtgccctccttgagtagcaagatcatccaggatttaagtgactcttgcttcggtttcctaaaaagcgccctggaggttcccaggctttaccgaagaaccaataaggaggtcccaaccacagcttcctcctatgtggacagtgctctgaagcccttattccagcttcagagcggacacaaggataagctcaaacaagcaataattcagcagtggctagaaggcactctcagtgaaagcactcataagtactatgaaaccgtgtcagatgtattaaactctgtgaagaagatggaagagagcctgaaaaggctgaaacaagccagaaaaaccactcccgccaaccccgtcggtcccagtggtggcatgagcgacgacgacaaaatcaggctgcagttggccctagatgttgagtacttgggagagcaagtaacccatcagccgccggcagctccagcgagcctgaaaccaaattctgagagccgggcagttacttggtggctcgcgtgatcccagagatgctgtcgcagtggctagggaattgcttcctgtgttaagactaggagtcggggctcccaaattactttgcccct

SEQ ID NO: 179996 - DNA, 1393 bp, Homo Sapiens
ttgggataaagttaatagtttaagtctagtataattttgctttactcattcaatgaacctgacaattcaaataggtgccaggaacactgctgctgaagaaaaagaggtataagatataatttctgtctacaagaaagccacagtctaaaaagtagaaacatacgaacaaatcgtaacaataaataggctaaattcaaaatcagaggagtttgtttctattttaaacagctctagtcaggaagtgttagagagttctaaacaggaaatattccaacacatcatctaagcatgaagcaggagacacccataattgagtttgctgccaccaaccccaacagcaagaattccagtcctgctgctgcaaagtaagtgtcactctgattttattgctgctgtgtaacccagttttagactctctggttctcacttaatgttctaaaaaagtattaaagagaaaattttattctggtgatgagcccatccactgcagccatctcaacatcataccaattataagcctatcatttaaaaagaaagctgttagtttaacttatttatccaaatatcagtattacgtaaacatatttgtcatcagactttggacttatgggttaaatagcatataaatatgattagagccttaaagtttacacttctctggttcgctcaaatttttttcaaaatagcatatgcctttctaaacaatggttagtatatttttcaaaatgaacattaaaatgtatattttccaaaaacaaaatacagctcccattggtaaatgatgctattgagacacaacagacaacttctcttgggaaccatttaatcagtgctcacttttgcactctttccagaaatgtcaatggctttgaaatatagaagtatattatacaaataaacttatacttattcagtattgtgcaatatttagtatttcttctagccatctcttgctgaatagtaagccattccaaaacttacggaattatttattgtttaatattgtttattgttattatttgtttagtaattttaataacgttatttctcatggttttgtgggttgatgggcactacaaaagttctcttttggagtctttcttgcagttgcggttggttggctgctgctgaagtcacctgaaagctcaattaggctaaagagtctaaacgggtcacttacatggctggcagtgcatattggctgctgagtgtgatgcctatctgacctctccatgttacctggagtgctcacaacgtggtagtttgtcccaagacacacaggcaaatactacaaagcttcttagacctagccttggagtcctagaatacgacttctgctgcatcctattggaaaagcaagtcattgtgaccagcacagattcaagaaatggga

SEQ ID NO: 179997 - DNA, 1129 bp, Homo Sapiens
  misc_feature (234)..(269): n is a, c, g, or t
  misc_feature (332)..(448): n is a, c, g, or t
  misc_feature (922)..(937): n is a, c, g, or t
aaaatacaaagaaaattttatttgtatatcaaagactctaagaaatgatgacataaggttaacagagttgatgtcaagacaaataggtttgaagttatagatgataaatcactttgtcttactgaaccttcccttgattacgttagagagcatccctggtatgctcccagttgaatcttaagcatgatgtgtgtccgggtgatataatcgtaattcctttctgttaatcctcgnnnnnnnnnnnnnnnnnnnnnnnnnnnnnnnnnnnnggactagcaattgctgtgctggtacatggttcttcctcaaaaagtggttcttccttaatgtgnnnnnnnnnnnnnnnnnnnnnnnnnnnnnnnnnnnnnnnnnnnnnnnnnnnnnnnnnnnnnnnnnnnnnnnnnnnnnnnnnnnnnnnnnnnnnnnnnnnnnnnnnnnnnnnnnnnnnagtaatttcatcctctttatctacctgttctattttgcgttttttagaacaggttggaagtgtggagtcaccagaaggatcgtaagtcttcacttcactgaaagacccaaaaagttttagaaaatctctaacaagtatctggaattgaaataattctcaagagataaagaaaatgccattagataatacttacataagcacacaatgttgtttcattttagtggctttggggtagtttatgaagactaatagtttccaaaagttaaaggtattaatatttttcaagtaggtcaatcacattcaagagatgtggtgagctaaatgaatttctgatttagtaatcaatgtagttactatggtacaggaaaacactcaatcagcatggggggaaatgaaaggagaaaacgtcttcacacctaactagaaagtgaaaactgaaccatccaactttcagaacactgctcaatggggggnnnnnnnnnnnnnnnngcagaacaaaaaatctaaaccaagcttagtatagaagtcttcatcacaagatcacaagaacaagaaaggatacaaatacatgcacatggaaaagattccatagaacccaacatttgcttttgttctaatgtaagcagaaagaaaatactgaaatgagtgcctaaaatgtgaatggatgctttaagtgcccaa

SEQ ID NO: 179998 - DNA, 1249 bp, Homo Sapiens
  misc_feature (856)..(870): n is a, c, g, or t
  misc_feature (1084)..(1132): n is a, c, g, or t
ttggcttttaaatttggccaagcatgcagcttctaccgttcagattcttggagctgaaaaggcacttttcagagccctcaaatctagacgggatacccctaagtatggtctcatttatcatgcttcactcgtgggccagacaagtcccaaacacaaaggaaagatttctcgaatgctggcagccaaaaccgttttggctatccgttatgatgcttttggtgaggattcaagttctgcaatgggattacaggcgtgagccacagcacccggcctccttcaagaattttaatagtaaaatcttataagtggatgaggagagtaattaatatatagaacattaccaattataaatacatatttaagtataatttagtgttttctggaaagaaatcaaatgtgtttctgtgggcattcacattttcttttttgtgaattttccaagctttctacaatagccatacattctgcaatatttatagtctataacttattatctctagttgacaaacatggttctttgtttcttaaattataaatgtctttaacctaaaaaaattaaatagtcattcagcttacaggtctgcttaaaaaacagaacattttttagcttgttttgaaccaatttttttaatgttcctgtgcaattagtactttttactttaaacatgcacttaaagcatccattcacattttaggcactcatttcagtattttctttctgcttacattagaacaaaagcaaatgttgggttctatggaatcttttccatgtgcatgtatttgtatcctttcttgttcttgtgatcttgtgatgaagacttctatactaagcttggtttagattttttgttctgcnnnnnnnnnnnnnnnccccccattgagcagtgttctgaaagttggatggttcagttttcactttctagttaggtgtgaagacgttttctcctttcatttcccccatgctgattgagtgttttcctgtaccatagtaactacattgattactaaatcagaattcatttagctcaccacatctcttgaatgtgattgacctacttgaaaaatattaatacctttaactttnnnnnnnnnnnnnnnnnnnnnnnnnnnnnnnnnnnnnnnnnnnnnnnnnacattgtgtgcttattgaagtgaagacttacgatccttctggtgactccacacttccaacctgttctaaaaaacgcaaaatagaacaggtagataaagaggatgaaattactgaaaa

SEQ ID NO: 179999 - DNA, 634 bp, Homo Sapiens
catgtgtgagccaccatgcccagccatattttttaaaaatctaactttgtttatgcagaaagtactctttttcagacacagaagattttttcaccacatataattttcaaaaataattacaagctcttttgtgagtattgatcaatggataactcattgttattaattgggtatattaaataccatatattatagtagatagttgagtgagaagtagagggagatttagagtagaatttctatctgttctttgcttttcccccagctccttcaaaagcagagaggataaattattgcttcagtcttttagttatatatataccaaagcaagagaacctattcacagaggagagctttttatactgcatatagatgatttatagaaatcctactttccattcttaggtagagtccagggttgacatagagattattttttggaggacaagagtggcacgattcttagatataagtgttaagaagtcttagttgaaaacctatacttttgtagagagtaaaattagcagatgcatctgagaaggcaaatatttttacattgttagtcatttagctacttgacacttagttctcattgcgattttataaactcagtggcttttttagcatttgagta

SEQ ID NO: 180000 - DNA, 1608 bp, Homo Sapiens
ggaggtgatcagaggggcccctatctctgatccagaacttctcaactcatgccactactaagagaagttctgtgcccattgcaaaccagcaacttgagtcagcaattaggtggtaatcccctgagcaccattcttggcacttggaggacagtattcttaaacggggttatacaaatgaacagttaaatgaatacactgatggaccctgactctcatccacccacacctaacaggatcccactgtgagcccctaactgacccagcctggggagcagatccttcttagctccacccctggacccccagctctctagcccccaaacttacttgactctaaagtcatcagcagcaagacgggcattgtcaatctgcagaacgatgcgggcattgtccacagtatttgcgaagatctggagggattgtagagagaggttgttccatgaatagaaagccagggatgggtggggtgagtgtgtaaaaagtgttatgtatcctagtgaaaacttcctggtcccaggaatagccagaggctctccctggacacctatcccttttcatctagccccaccccattccctcctttcctggattcccagatcccagcactctgcccctcttgggaagcctcagcaggctggctagctggctggcctgcctgcccagaagtgagtcgctactaacaagtcctcttcctggccctctcctggcattttttccctagtgcacctggtcactctgggccccctacaccctggattggctcctcccaaaggaaggcctcttgtttactcctagatgactcagccttagccacatccgcttaaccctccaatagtccccattccgccagagccagtgtctcctcctctttacaggcctttccttacctccctccatgctgtccacttcctctgtaaagctctcaaccctgtccccttccccctctctcctgggaaagagccctcccatgcctagctgctgctcttagggaccctgtggctaggtgcgcggatggaaatccaggtatgcccaaccccctcccggtggagtaggggttgggtggttatggaatgacggaaagaggcaaaggagtgtataattggagggtcagacaaggctgggagttgaggtccctcctaccccttacctgagccctcaggtcctcgatgatcttgaagtaatggctccagtctctgacctggggtcccttcttctccaagtgctcccggattttgctctccagcctccggttctcggtctccaggctcctcactctgtccaggtaagaggccaggcggtcgttcaggctttgcatggtctccttctcgttctggatgcctcccattcctgccagacccccggctatcccggtggccaggcccccggaccccatgccgcccctgaagctggtggagcgggacacggagatccgggaaccagagcccccagcgcctgcatagacgctggccgcgctgctgaccggccgggcgccgtagctgggcgcctggacagagcccagggaccggtagttggtggagaaggtggagcgagtggtgaagctcatgctgtccggggagagagaaaggacccaacttttttgtacaaagt

SEQ ID NO: 180001 - DNA, 1411 bp, Homo Sapiens
caaattgatgagcaatgctttcttttaaaagccaactttgtacaaaaaagttggctctgtaagccttactccactttgcagtgagttctagtataacttctattccagtaagatcaaatggttaaggactccagaaaagaaatttggtgaacacaaagggtttgtcatactttaacttttgtccctttcccaggtggcccatgcttctaggccagcctcccaattcctagcttgcttcatgctcctggcctttgcctactcaaaacaatctgtcctccccaccctgtcatctctgttcagagtaaatacctccctccctctgcttttgccctaagttattttttcaactcacctaacatctaacttggctttgcagctctgtttctccaaaaccctctctgcctgtttcctcccaagctatctatgaccagtgccagaaaccagaaaatcttcttggaagttgcactctttgcttctcttccctctcctttatccttccacttggaatctctctccttctacctgtctctatctgctgcaatcctgttcatctttccaggtacattcctcactttttcatctttaagaagtcctctcagaaactgcataggattttttcatgatatatgccatattccactgtgtaatgtagattacaccacagggtttttaatttcctaaaggcaagagctataacctagtcatcttcctctcctaagtggggagtatcaccatgatttgaccaagtagctatgatatgggtgctatctccataaatgaatgagcagtgaggaaaaaggagatgattatgagtgaatgaagaatcttaataaggaaagtttattccacagtgaagcagtgttggtggctccaaaacctctctttaggaaggatttaggacagcatcctaatcaaaagggcctggaagcactttataaaagagagagacaagatcgcatgtcaaactagaaggaaggaggtgagaggagatagggctccagagtggagcaagccccttctgtccccttgaacttcctgccggtgcatgggttacctctcattaaatttaatagtacttgttgctttggtgtagtgaaatgaatgccttgatgaaattgcattgcaccatttttgaaagagagaatactcaaacgtgtcacttctgtttcttgcaagcaactgtgatcctgagctgtgcacacttctggttgggattatttctggtttctacttcctgtttgaagatgtggcatggagagtgctctgcttttgacctgaagtattttatctatcctcagtctcaggacactgtttgatgggaattaagggcaaaaattttgcatccagacatgcactctagcatcctaagtccatggctgctggtggcagtggctccttttcaccacaaaaa

SEQ ID NO: 180002 - DNA, 1194 bp, Homo Sapiens
  misc_feature (227)..(235): n is a, c, g, or t
  misc_feature (784)..(924): n is a, c, g, or t
gaaatgcccagggtggtgcttggtccacagaaggtggaattgttcaagctgtacttctgaagacacatgtgggataattaacaaggtatatttcttttaaaaagcactgttgattttacaacactaagatattatttaaaatagattatgactcatatgtatcccataaacatgtaaaatatcatgtatcaataaaaatagatttcacttagaactgtagttgctgnnnnnnnnntgaactttgaactctcctgttgaaaatacaaagcccctcccaaatgaacagaggttatatggagatctggaagtattgctgtgttgctggtcttcaaaactaagatctgtaaatataacacacattataactaattttaaaggtgtgtctcagaaagtttcctactgccctgatttttacagatgaattgagatctggaatcctaaaatcattctaaggcaatctactgacctcttaggtgttatatgcctaggaacccactgcagtaaattacaggaaagtgaggctcaggtgggtgaaattcttgatacgttaggacacaagctggtgagagctgaagacagaattagaggcttatcttatcgtaaggccattgagctgtgcagcactgctctggggttaaattacaaagaatattaatgaaagacactcatgaacctggggatcaggattagagaatgcattagcttcagccatgttactaatcatacacaccacagagcccgaggaccagccattcataaatgtggtgacagactacaaaaatgnnnnnnnnnnnnnnnnnnnnnnnnnnnnnnnnnnnnnnnnnnnnnnnnnnnnnnnnnnnnnnnnnnnnnnnnnnnnnnnnnnnnnnnnnnnnnnnnnnnnnnnnnnnnnnnnnnnnnnnnnnnnnnnnnnnnnnnnnnnnnggagtaaccagtgtgacataagatctgtttgtgttcccccattttacaaaagaaaatttaagtctgcaacttcccctaggcatctgcagcagagagtggatttgtcaacatgcaaagctgctgatctgcccctgcatgctgctccctgccctaagtgtgaggaggatgaactgccctcttttcacctgcacctccctggatggaacagagcatctccataatactttatgcagaagtatcacttctatttaacaccagaaaccccaccaa

SEQ ID NO: 180003 - DNA, 3732 bp, Homo Sapiens
ttggattttcatagtgtttattaaaggtaatataatattcttccagtaaagcctccttcctttatctgatattgagttatttcctttacaagacctctctagtaatgtgtattgtcacattattaaatttaccaggcatgtctgtaacattatagtcacagatgtgttatgaagtacagtctctcaaatatgggaaaacatgtttgtccgaaaatggtgaaggctttaagtatcatattatcattggtaataaaatgtccagtatgtgcagtacacaatttcagaccttgttggcatacggggagagaatacctcttatacaaaagatgtaaagaggaacactccagatggaaacacttgcaatggagcttgaaataatcccacacatttcataattaagtagaaaactataattaaataattcttaaaactgatactaatttctgaaaagacatcaaagttacaactatgcagctacgtgatactttccttctttctaattctagaaagttatgaatcaagctaacattgaaaactggttctacctatatttatccttttttcaatcaaattttctgaaatctatgtgtttatataaagaaatatcaatcataatgtagatcacatgatatttttacttattctcttgccagtccaattttctcatgatattatgtgagtaccactttcttcgtgtgtgtatttaaggttctgtgctgaaaagttgataacatagaacatacattgaaatgtaaattttctgaaggaggagaatggaaagttaatttaaggaaaaacctattgaagtgaaaaaactgaactttaataaaggacagagttttgctaagaattagaaagaaatgcattcattgcaaaatacgaattaaattctctaacctttgtagtagtaagagaaaaactcatagaccaatattatttgtaattttttctcaggtttaacagcactacacgtgtatagtctctattatctaaatctaaaataagtaagaattttaggttatttatgtgattgtgtttttctatttaagcaattctcatgttaggtatagtctctgaaagtactaaagggcacaattctgtaagtgagacatcattttcaggatagtttctcttcttaaaattaaacattatagataatatttgacttatttaaaatgcagcaggagtggcagaaaataccactagaacaggagaaaggtacattgcaaaatttattaattcaattcagatttattaattggtttctaaaataaacggtaaataggaaatggctatttacagtttcattaattgataagtacatcagttggctattgtttgtttaatagatagtatgctaattatttttgtacacatatttaatgaaagatataaacacatactcataattaagagtatatttatgcctcattaatttgtcatgttccatatatttagaaaagtctcaagtagtcggcatatctgtttttggctctaactctctgccatccctgtggaacttttagcctacacactgcagttgttttgagaaaacaaaggcatcattctcttctcaaggttatggtagtgatttaaggccaacagacccaagactcatcttgtaatgcatagccaaacagtcatagttcataagcagtcacgtgactggtgacattttaaatctccagtctttgactttgtcattggttgacttttgtcttcaggaaatattctacatttcttggaatacaataaaaatgcccaagtcaatttggttgttgtcaaattattcagctttttcttaccacttactagtactccacctctttgctctagcatccagccaactagactacatagaatttcacagtgatcttcctcagctccagctcttggcatttgctcctcccttctatctgacatatgtttttgttgtccttctggtatcaacctgcatatctcatccaccaaaaagtctacaatattgacccaaaacctggatgtcctatctgtgtgttccagtagtgccctattttaaatgtgtcatgatatctattactttgtgtgaaaattacctgtttgttttttcaggttatataatagtataacactgccaaggagcggattatctcatcttcatcctgtaattccagtgtttgtcacgtggttgttgaataaatgaataaagaatgagaaaaccagaagctctgatacataatcataatgataattatttcaatgcacaactacgggtggtgctgaactagaatctatattttctgaaactggctcctctaggatctactaatgatttaaatctaaaagatgaagttagtaaagcatcagaaaaaaaagtgggtattcctacaagtcaggacattctacgtgactacaatataatctcacagaaatttaacattaatacattctaagatttaattcttagattcttggtaaacaaattgctcctgtggagatgattggcatcacatggtgttttgagctgatacacccaacacttgagctcactgcaacagtaccagtatgttcttgttactgattgtcagaaagctggttttgagactgcagcttggactaaattcagtcatctggctgtctggggaagcatgctgaccagtctggtgttctttggcatctactcagccatctggtccaccattctcattgccccaaatatgagaggacagagggggaagtgaggcacagagaagttaattaacctctgaagtgttgcagtctaaggcacagaggcacagttccaggcaaggttcatctgaatcttaagtcctcactctttgccaccatcctccactgctgagaccatccctgtgagtcctgccgctctcctcccctggtccatattcactgctactcaatgaggccaaggaagccaatggtcgtgtccccaagaggatatctctcccctcctgagaatctttctcatacatctcaattctgagatacagattgagaagcacctcagcaaatccactgcatggaaggcaaaacaaccttgatccacagcaatgaccacaagcaagggaagcctggctatgagcacagtcataatgtcgttcaagtttggagattcaaagcatagcatgtctacctgaacatcctcagatcctgctgacatcaccagtggaggtcctctgctgattgatataaatcattttcaaatccagcaatgcattgatgactgttaattccatgctcctcaaacttgcccagaaatgcctctaataggtaagagaaagagaagacacctcagtatgtatcctatggcaatgcatctcaaaaatgatacttatttaaagactctgtttttaggtaaaaagaaattattcaaatgtattctgaaaatgttattggttttaatataaaatgatatgttctccaaatctttaagtgggattgaagatccaggaagatgtatcttgatattcttgatcatttggtttaatgcagctacgcacaggcagtactctaatttaggatccatgaatcttcaggtcacactggcctttcaaaggatgctctgaatgccccaataagtgattgatacgaacttttcagtgagataaaatagctcttattcacgatatgttcatgtgtatatacattctgtgtcttctattctctacattttcattaattccatgtagaaaagtagaggctagggacgctgtctctcccagggtcactgccatt

SEQ ID NO: 180004 - DNA, 1626 bp, Homo Sapiens
  misc_feature (193)..(207): n is a, c, g, or t
ttgggctaaagaaaggatggaggctctgaagctgtgacttcattatcccttaatactgctatgtcctctgtagtaccttagatttctatgggacatcgtttaaaaactattgtttatgcgagagccttgctaatttcctaaaaattgtggatacattttttctcccatgtataattttctcaccttctatttnnnnnnnnnnnnnnngtcagtgtagtatttacatattttaccctataaggagctaacataacttttgatttagtgttattcataaaattaggttagcagtttattaaccttttgtatttgctctggcaatgtttaatatctcataagctatacacacctcgaagccatcaatgacaaccttttcttgctgaatagaacagtgattgatgtcatgaagacaattttatctccttttgccttccataatttgtaccaggttatataatagtataacactgccaaggagcggattatctcatcttcatcctgtaattccagtgtttgtcacgtggttgttgaataaatgaataaagaatgagaaaaccagaagctctgatacataatcataatgataattatttcaatgcacaactacgggtggtgctgaactagaatctatattttctgaaactggctcctctaggatctactaatgatttaaatctaaaagatgaagttagtaaagcatcagaaaaaaaagtgggtattcctacaagtcaggacattctacgtgactacaatataatctcacagaaatttaacattaatacattctaagatttaattcttagattcttggtaaacaaattgctcctgtggagatgattggcatcacatggtgttttgagctgatacacccaacacttgagctcactgcaacagtaccagattttcaccgctatgcctcctttcactctgggagtcttccagaggtcttgcactcgggagagcatgctcaggtttccccagctctacaaaatcacccagaatgccaaagacttcaacacaagggtaaataaggttgatctcagaattgtcacctcaaaaaggccctgccttccactgttcagttctggtcatctgcctatgagatatctgaagcttgaaagagaacacttgaaaatcactgagaccgtgactcccatcccagcacacacagcaagccaaatactgtgttgaccagtggtcatgccactgcctgttgatttgttgaaaatattgtttacacgtatgttcttgttactgattgtcagaaagctggttttgagactgcagcttggactaaattcagtcatctggctgtctggggaagcatgctgaccagtctggtgttctttggcatctactcagccatctggtccaccattctcattgccccaaatatgagaggacagcaactgtgatcctgagctgtgcacacttctggttgggattatttctggtttctacttcctgtttgaagatgtggcatggagagtgtaagttgaagagatgagtgcggggctcatctatccctggaattgtctttcccacaatcgctgacacagaatatgagccatacaggaatttctgaagaatgggtctcttgccacctcccagtaaagattatttttt

SEQ ID NO: 180005 - DNA, 1265 bp, Homo Sapiens
  misc_feature (411)..(552): n is a, c, g, or t
  misc_feature (1101)..(1109): n is a, c, g, or t
ttgggcaggttttgttttattttgttgtgttaatgctgagagtggagaatagattggaatatttgcctcttgtgtttctttttgctttgtaacattgcaagtggtccacattttcctttatttaaaatttaaagttggtgcctggggtttctggtgttaaatagaagtgatacttctgcataaagtattatggagatgctctgttccatccagggaggtgcaggtgaaaagagggcagttcatcctcctcacacttagggcagggagcagcatgcaggggcagatcagcagctttgcatgttgacaaatccactctctgctgcagatgcctaggggaagttgcagacttaaattttcttttgtaaaatgggggaacacaaacagatcttatgtcacactggttactccagnnnnnnnnnnnnnnnnnnnnnnnnnnnnnnnnnnnnnnnnnnnnnnnnnnnnnnnnnnnnnnnnnnnnnnnnnnnnnnnnnnnnnnnnnnnnnnnnnnnnnnnnnnnnnnnnnnnnnnnnnnnnnnnnnnnnnnnnnnnnnncatttttgtagtctgtcaccacatttatgaatggctggtcctcgggctctgtggtgtgtatgattagtaacatggctgaagctaatgcattctctaatcctgatccccaggttcatgagtgtctttcattaatattctttgtaatttaaccccagagcagtgctgcacagctcaatggccttacgataagataagcctctaattctgtcttcagctctcaccagcttgtgtcctaacgtatcaagaatttcacccacctgagcctcactttcctgtaatttactgcagtgggttcctaggcatataacacctaagaggtcagtagattgccttagaatgattttaggattccagatctcaattcatctgtaaaaatcagggcagtaggaaactttctgagacacacctttaaaattagttataatgtgtgttatatttacagatcttagttttgaagaccagcaacacagcaatacttccagatctccatataacctctgttcatttgggaggggctttgtattttcaacaggagagttcaaagttcannnnnnnnncagcaactacagttctaagtgaaatctatttttattgatacatgatattttacatgtttatgggatacatatgagtcataatctattttaaataatatcttagtgttgtaaaatcaacagtgctttttaaaagaaatataccttgttaattatccc

SEQ ID NO: 180006 - DNA, 1014 bp, Homo Sapiens
  misc_feature (900)..(914): n is a, c, g, or t
ttggcaagaggttagatagaagtatgctagatggcaaagagaaatatgttttgtgtcttcaattttgctaaaaataacccagaacatggataattcatttattaattgattttggtaagccaagtcctatttggagaaaattaatagtttttctaaaaaagaattttctcaatatcacctggcttgataacatttttctccttcgagttcctttttctggagtttaacaaacttgttctttacaaatagattatattgactacctctcactgatgttatgatattagtttctattgcttactttgtatttctaattttaggattcacaatttagctggagaactattttttaacctgttgcacctaaacatgattgagctagaagacagttttaccatatgcatgcattttctctgagttatattttaaaatctatacatttctcctaaatatggaggaaatcactggcatcaaatgccagtctcagacggaagacctaaagcccatttctggcctggagctacttggctttgtgacctatggtgaggcataagtgctctgagtttgtgttgcctcttttgtaaaatgagggtttgacttaatcagtgattttcatagcttaaaatttttttgaagaacagaactttttttaaaaacagttagatgcaaccatattatataaaacagaacagatacaagtagagctaacttgctaaagaaaggatggaggctctgaagctgtgacttcattatcccttaatactgctatgtcctctgtagtaccttagatttctatgggacatcgtttaaaaactattgtttatgcgagagccttgctaatttcctaaaaattgtggatacattttttctcccatgtataattttctcaccttctatttnnnnnnnnnnnnnnngtcagtgtagtatttacatattttaccctataaggagctaacataacttttgatttagtgttattcataaaattgattagcagtttattaaccttttgta

SEQ ID NO: 180007 - DNA, 889 bp, Homo Sapiens
gccaactttgtacaaaaaagttggcacgtggttgttgaataaatgaataaagaatgagaaaaccagaagctctgatacataatcataatgataattatttcaatgcacaactacgggtggtgctgaactagaatctatattttctgaaactggctcctctaggatctactaatgatttaaatctaaaagatgaagttagtaaagcatcagaaaaaaaaggtaaacaaattgctcctgtggagatgattggcatcacatggtgttttgagctgatacacccaacacttgagctcactgcaacagtaccagattttcaccgctatgcctcctttcactctgggagtcttccagaggtcttgcactcgggagagcatgctcaggtttccccagctctacaaaatcacccagaatgccaaagacttcaacacaagggtaaataaggttgatctcagaattgtcacctcaaaaaggccctgccttccactgttcagttctggtcatctgcctatgagatatctgaagcttgaaagagaacacttgaaaatcactgagaccgtgactcccatcccagcacacacagcaagccaagtaggttacagagatttcttcttgggtgatgagttcacgccacatggggtatgttctccagttccagtgtgttgactccttcctgcttccccccatcagcccctgaggtcaatgtgggcagcagcccccatggtccaagttcaagatccgctgtggaagacttttttagcaatcacacagccctgcatggagtcctgatgagagcttgcctaattgttgctaggtttgtcattttaaatacagtgtttctttaactagtgagtaaattggctatataggaacttcagggatcacgagtcac

SEQ ID NO: 180008 - DNA, 1000 bp, Homo Sapiens
  misc_feature (644)..(729): n is a, c, g, or t
  misc_feature (760)..(780): n is a, c, g, or t
tgttcgttgcacaaattgatgagcaatgcttttcctaataaaaacaactttgtacaaaaaagttgggcccagagcagagtcagccagcatgaccgagcgccgcgtccccttctcgctcctgcggggccccagctgggaccccttccgcgactggtacccgcatagccgcctcttcgaccaggccttcgggctgccccggctgccggaggagtggtcgcagtggttaggcggcagcagctggccaggctacgtgcgccccctgccccccgccgccatcgagagccccgcagtggccgcgcccgcctacagccgcgcgctcagccggcaactcagcagcggggtctcggagatccggcacactgcggaccgctggcgcgtgtccctggatgtcaaccacttcgccccggacgagctgacggtcaagaccaaggatggcgtggtggagatcaccggtgagcccccctgctcctgcaggggagaggaggaggctagcagggcgggcagggccgggggcgtgcggttgaaacgggggtcccgggggcctggggagttaaacgttggcccagcaccgggaaaaacaggactcctgattcccttgctcaggaattgggagtgcgggtcgcttctaagggcgctttctgctnnnnnnnnnnnnnnnnnnnnnnnnnnnnnnnnnnnnnnnnnnnnnnnnnnnnnnnnnnnnnnnnnnnnnnnnnnnnnnnnnnnnnngcgcccccccgccccgaccccgcgccattannnnnnnnnnnnnnnnnnnnntttttttaaagatcatcgatgaagagagaaaatgcgcttttctacagagtccccttcccacccacagccccatccccagataagcggggagttccctggcgcggtgccagtttctagccgctgagtgggcgtgtgcgcggctccaagtgcgcctgcgtactgctcactccccagctccgcgccctgctccgttcctcccaaactctgaatcaagaacttt

SEQ ID NO: 180009 - DNA, 2894 bp, Homo Sapiens
  misc_feature (573)..(581): n is a, c, g, or t
gccaactttgtacaaaaaagttggcatttttgtagtctgtcaccacatttatgaatggctggtcctcgggctctgtggtgtgtatgattagtaacatggctgaagctaatgcattctctaatcctgatccccaggttcatgagtgtctttcattaatattctttgtaatttaaccccagagcagtgctgcacagctcaatggccttacgataagataagcctctaattctgtcttcagctctcaccagcttgtgtcctaacgtatcaagaatttcacccacctgagcctcactttcctgtaatttactgcagtgggttcctaggcatataacacctaagaggtcagtagattgccttagaatgattttaggattccagatctcaattcatctgtaaaaatcagggcagtaggaaactttctgagacacacctttaaaattagttataatgtgtgttatatttacagatcttagttttgaagaccagcaacacagcaatacttccagatctccatataacctctgttcatttgggaggggctttgtattttcaacaggagagttcaaagttcannnnnnnnncagcaactacagttctaagtgaaatctatttttattgatacatgatattttacatgtttatgggatacatatgagtcataatctattttaaataatatcttagtgttgtaaaatcaacagtgctttttaaaagaaatataccttgttaattatcccacatgtgtcttcagaagtacagcttgaacaaatccaccttctgtggaccaagcaccaccctgggcatttctagcatgagcaaaatccaaggtcctggctggactccagagatgctatttacctcagaagcatgacaataggaggcagaaggagcaggcaaatccaagtcctttcttgtagtttccttgtttggggaggaaaagttgagttttactattatggaaaagaaacaggaaatagagacagacaaagagatatgacaatacagtcctgccacccagatactcatttccacctaccattccatgcatttgttttgaatatataagtatgtacataaaggtaggtactctcaagtccatcagggcttggctgtccactgtttttgaagttccagaatgtttttgctaagttgaggaaataccaaatcaggactatgaaaattatggtatatattgatgtgtcacagaacacagatgtgacataataaagatgtgtaagattatatatataacttgtgtgtacacctacctcatctggggataacacctcaagtttaattttgaggcttgggtcaatcgtgcttcccttccctttcataggtcctctatgagatattgtcatagattccatgttatgcaatagccatagaatatgacatctctctatgataattctatattactttaattgctgcacagaagttcattgtatgtaagtgccacagtatattatagatcttcttgtgggacatctatttctagtttatgtgatagtatagcactttcatgaatgttcttgtacttgatctttacacattttcttttttccttaggatgaattctgagagatgtaattgatggggcaaaatgtactcactgtttgaggtttgaaatttttccatcaaaagctggtactcttggttttttaagacaaagagcaaatcctcccctgccaggattgacttttggctcttttttttcaaacctcactgctttttggtttagttgtcataaaatgccaagcaccatgaacagggctccatgaaggggctcagaggtaggagggctgtgattaggagaaggcttggactgatgggcaatttgagtgctcagaattagagtgagggggtgggggtgctgcagggacagatgctggggaaagacaccctgaagggcaaagggagcaacaatggctgcagtacatgtggcctttcagctagcgcagaggatggaaaccagagtgggctgatgattggatgccaggcctgagccaggtgagtcctgttctcattatactgtaaagtgagctgctccaagcctccctgattcttagcactcccagtccctgcaggggtccctgagaaggttaatcttgcattaggccctctgctgttttccctctgtaagccttactccactttgcagtgagttctagtataacttctattccagtaagatcaaatggttaaggactccagaaaagaaatttggtgaacacaaagggtttgtcatactttaacttttgtccctttcccaggtggcccatgcttctaggccagcctcccaattcctagcttgcttcatgctcctggcctttgcctactcaaaacaatctgtcctccccaccctgtcatctctgttcagagtaaatacctccctccctctgcttttgccctaagttattttttcaactcacctaacatctaacttggctttgcagctctgtttctccaaaaccctctctgcctgtttcctcccaagctatctatgaccagtgccagaaaccagaaaatcttcttggaagttgcactctttgcttctcttccctctcctttatccttccacttggaatctctctccttctacctgtctctatctgctgcaatcctgttcatctttccaggtacattcctcactttttcatctttaagaagtcctctcagaaactgcataggattttttcatgatatatgccatattccactgtgtaatgtagattacaccacagggtttttaatttcctaaaggcaagagctataacctagtcatcttcctctcctaagtggggagtatcaccatgatttgaccaagtagctatgatatggtgctatctccataatgaatgaagcagtgaggaaaaaggagatgattatga

SEQ ID NO: 180010 - DNA, 910 bp, Homo Sapiens
ttggctattctgaaataccatcttctcacaatatactttgatgttatgaatcaatgtctgttcttgaacattatttattgtctttctctattaaacaattccaaaataaaatttccagcacaactaaatattgttgatgataagaggatttttaaaaaagttcttttaaaacagaagcttatatacaacttagaatctaaaaccaatagatttatggtaaaccttaaaactgaaccaaaacaaacaaaaaccaaagttttaatcatttaaaaatcatgtttattgaggtacaacttatagtaaaacctgcccttttcagcgtatagcactgagtcttgacaaatgcacagttatgtaccaccaccgaccaaggcctggcacatttttacctcctcaaagttctccctggctgcttctcccactccttggcaaccactaacctgttttctgtccttatagtactgcttttttcagtgtcatataagtagaatcacactgtacatagtattttgagtctgacctctgtcaactggcataatgcatttgagaattatccatgttgctgtactggcagtgcattcttttttattgctgagcagtattcaattgcatggctgtaccagtttgtttattcatttgccagttgaaggataactgagatcttcctcgtttttagcaattttaaagaaagtttctatgaataattgtgtacaggtttttaattaaatgttttggagatataattcatataccacataattcacctttttaaagtgcataagtcactgggttttaatatattcacaaggtttgtgcataggtttttgtgtgaatactggttttcattcctcttggataaagatttaatttggtattacccttccagacacctttctgtgttttcatacgt

SEQ ID NO: 180011 - DNA, 1272 bp, Homo Sapiens
acaaaaaagttggggctgcaggatcccgtcaagctgacggcggagctgatcgagcaggcggcgcagtacaccaacgcggtgcgcgaccgggagctggacctccgggggtataaaattcccgtcattgaaaatctaggtgctacgttagaccagtttgatgctattgatttttctgacaatgagatcaggaaactggatggttttcctttgttgagaagactgaaaacattgttagtgaacaacaacagaatatgccgtataggtgagggacttgatcaggctctgccctgtctgacagaactcattctcaccaataatagtctcgtggaactgggtgatctggaccctctggcatctctcaaatcgctgacttacctaagtatcctaagaaatccggtaaccaataagaagcattacagattgtatgtgatttataaagttccgcaagtcagagtactggatttccagaaagtgaaactaaaagtaagtagtaatctgttgcttgtgagccattatagagttgtgtgtttttctttatatttttgttactgattattaaaattgtctaaatgagtaaattttaccattagtttgtaataaaagtgggagggaaaatgttacatcacatttttttctaatagcagagtttatgatagaacttttaagttggagctcttttatgtaatgctggctattccgaagttcgcaaagtgctgaggccacggtgagcagtcttaacagtggattgtctgcctagatacgttcccagcggagaacttaatgtaacctactttcgtgcagctccgtgtgttaggatgatttttccctttattaggaattcattattttattattcatttaattgccttcttagttccctgggatcccctccttggagctaggagaatgaactttcttcagggagctctaccaaagaaagaagaccactgtgtcttctcttaatttgaaattgctttttggtattttcaccagcccggagtactgtaggagagttcgcttccatgtcttctgaggaatgcatctaaatgcatgtggtattcctatttccattaactctgtgtgtggtgtcgctgtaggagcgtcaggaagcagagaaaatgttcaagggcaaacggggtgcacagcttgcaaaggatattgccaggagaagcaaaacgtaatacacggatatccaacttaaactctacttcacccttcagaaacatgatctgatctgtctggcagttcgtctcctacaaaattaaaccaaaa

SEQ ID NO: 180012 - DNA, 748 bp, Homo Sapiens
gaaacccgttaacccacttgtcagaatctgctctcctcgtctcacctggtgcacttttttgggttcctttcttattatatgaggttataacgatcacctcctaaacttagttgaacatatggagactgtatttgaaggccctttccaggaagctttagaaactgacccatccttacggtcaggattacatcattctctgtcttttcatgaagaactgcccaagaatttgtcttttgtgttttctcctctccaggtacaactaattaagatcatttccctctttcctcagtttctcagttggaaaacagaatctgtgaacagtagccttcctgaaaattcaaaatccatgtgatgataactaacagtttcttttctaggaaatgaactgagtgcatggaatgtatctgttatggatacaacgctgtcttttctcattcttctaagtggagaatgtagtatccaagggttaaatggaactacttcaactcttaaaaccaaaaacataaaaactctgccaggagattaggaactttgcccacatagatcagatagaattttgctcgcgatcccaggaccccattgccggctctgttctctgagctcacctatgcacacccagggaaggggtggcacatattctccttacagtcacgaggcctatgttcaaggcctggctttgcttcctcctggctgcaactgtggacaaatcgtgtcccttcttcaagccttgggtttcctcagccacaaa

SEQ ID NO: 180013 - DNA, 1587 bp, Homo Sapiens
ctttgtacaaaaaagttgggtgttggttctctatatagatagagatgtgtctcggtcattccctgtttcacacagctctgataagttcaccttgtaggactaggtcacacttaggtgatgaaaaattttcatcctgtgttatgttttctcaatgactcagagaagggaaacccaggctgattcttcttccttctaacccatctcctgaaaactgctcagagcctaactattgctctgtttcatttcagggccaagattaacacccctcctgcaggaggaagacagccaccagcggctgctcatggggctgatggtgtctgagctaaaagaccattttttgagacacctacagggtgtagaaaagaagaaaattgaacagatggttctggactacatttcaaaactgctggatctcatttgccacatcgtagaaaccaattggaggaaacataatcttcattcctgggttctccacttcaatagtcgtggcagtgctgctgaatttgcagtttttcacatcatgaccaggattctggaagctacaaacagtttgtttttacctctgcctcctggttttcatactctgcacaccatcctcggggtccagtgtctccctttgcataacctgctgcattgcattgacagtggagtgttgcttctcactgaaacagctgtcataaggctcatgaaagatctggataatacagagaaaaatgaaaaactgaaattcagtatcattgtgcggcttcctccgcttattgggcagaagatttgtagactttgggatcatcctatgagttctaacatcatttcgcggaaccacgtgacgcgactgcttcagaactataagaaacagcctcggaattctatgattaacaagtcatcgttcagtgtagaatttctgcctctgaactacttcattgaaattctgacagatatagagtcctccaatcaagccctgtatccttttgaaggacatgacaatgtggatgcagaatttgtagaggaagcagctctgaaacacaccgcgatgcttttaggcttatgaaaaagaaaacgcaattggatctgctgctgccattttaatcttgctcattaaccttactcctttgagaattctttaacaatatttaaaattggtaacaaaaatagtttagccataattgtttagccatgtgagtttcaggttggtacacgttcagacagaactgctgtatcacattccaattttgaatagccagtgagcaatcaagtgtagagaaatgataaatggcctaagaaggcatacagtggcataaacgatgctcttcctagtagcttaataggccacaagctagtttctgttgcactctgaaataaaatatgctttaaaaatgtagggaacagtgcttagaaaagcaaaaactaggtgtgtcattgaaataataggcataaaaattaaatgttacataagaacactatttggaaagagggtccttttaaaaactgaatttgtactaaatcagatttgccatgtccagtacagaataatttgtacttagtatttgcagcaaggtttgtctttgtgaattcagatgaacatattta

SEQ ID NO: 180014 - DNA, 3374 bp, Homo Sapiens
  misc_feature (441)..(505): n is a, c, g, or t
ttggcgaggaacccgcgctgaggcggcagcagagcatcctggccagaacaagccaaggagccaagacgagagggacacacggacaaacaacagacagaagacgtactggccgctggactccgctgcctcccccatctccccgccatctgcgcccggaggatgagcccagccttcagggccatggatgtggagccccgcgccaaaggcgtccttctggagccctttgtccaccaggtcggggggcactcatgcgtgctccgcttcaatgagacaaccctgtgcaagcccctggtcccaagggaacatcagttctacgagaccctccctgctgagatgcgcaaattcactccccagtacaaaggtaagtcccagctgctggaggggttgccacactggcgaggagatgtgagagatcgtggccatggaaggccctggcagccnnnnnnnnnnnnnnnnnnnnnnnnnnnnnnnnnnnnnnnnnnnnnnnnnnnnnnnnnnnnnnnnnggccctcagcccagcatctcacaccctcagttttcaatccctggtaagattgctcaattctgttttgttgtgtggatttgagtttgattttggtagaagtgtagttgtgttttatgttcaggtgtctcttgatcacagtaacccatagtcccccactggggggacggtgggggaagactttgggaggattttacccagaatacttgccgcctgctttttgtcctccaggaaaccagaagctcgggtaattagtaggccggggagcagcgttgagtcagatggaatgcaggagtgggaggcctgtgctgattagcccaagccctttgctgttacagaatgtccccaaaattgctatatgaaagcaacccttcgattcacatatgataattttttatttctttttataatgtattttataggggacatcagcagccaccagcatggtggggtctttgttggggagtgggggagtcttttgtaaatcaagtaagaatccattaaagaaattaattttaaatgtgcattacctggttacataaaggactctagaacaacttaggttcttttgggactgttgaaacattgtctttaaggacagaatgtactgggtgcctttctctgtactctgaatatgcatgtgtattgcggtggggatgggggagttgggggccctcacttggtccttctctgttgtttttttccaggacaaagccaaaggccccttgttagctggccatccctgccccattttttcccctggtcctttcccctgtggccacagggaagtgtggcctgaataccccaccccggctcctctgcacccagagctgggggccacctcagaagtgtcatctctctctgagcacgcattcccctgcagcagtcgaggactgagcagattgagtgatgctggggcagagaggcctgggaggaaaggtgttcagccagtcgtttgtaaggcgctcgtcggcacctgctgaaacgcccccacctgacagccccatcctcaaagactgtcttaattactcatggcaggttctagagacttaaggggaaaagctgctttcaaggccaccacatgtctgtgctccccaaccagctctatctgccttgtgttcattttgttattttgtgacgtgagactgcaaagaccaataaaaacatattttataagaacaaaaggcctgggtgcctacccgtgtgggggcactgtgggaagcctttgctagggtgtcttgtgctgtgtggtttgttttgtttgcccctttattttgctttgcttacccagtcttcccttactcttggatgcttcttaaccctcaggcaaacctgtgttccccctgtattcaggctctgctttaaagcaagccatgaggctgttggagtttctgtttagggcattaaaaattcccgcaaactataaagagcaatgttttcagtcttttaggattagaagaattacataaaaattaataaacattttcaatgatggaaaaatgtgtcttgtaattctttggctcttgcctcgttgagtacatcagagaggaagactctcagccatgtttgctccctaattgcttgtcttgtatggtgtcatcttttctagctgttttgatatttgttaagtttgcagatgagtttggggcctctggcaacatagagactaaggaactgggtaagaaaaaaacaaatgttacaatcatgttacttacaacgcttcttcctgctaaattaaaagttctttctgctcctcacccccttccaggtgtggtatctgtgcgctttgaagaagatgaagacaggaacttgtgtctaatagcatatccattgaaaggggaccatggaattgtggacattgtagataattcagactgtgaaccaaaaagtaagctcctaaggtggacaacaaacaaaaaacatcatgtcttagaaacagaaaagacccctaaggactgggtgcgtcagcaccgtaaagaggagaaaatgaagagccataagttagaagaagaatttgagtggctaaagaaatctgaagtcttgtactacactgtagagaagaaggggaatataagttcccagcttaaacactataacccttggagcatgaaatgtcaccagcaacagttacagagaatgaaggagaatgcaaagcatcggaaccagtacaaatttatcttactggaaaacctgacttcccgctatgaggtgccttgtgtccttgacctcaagatgggcacacgacaacatggtgatgatgcttcagaggagaaggcagccaaccagatccgaaaatgtcagcagagcacatctgcagtcattggtgtgcgtgtgtgtggcatgcaggtgtaccaagcaggcagtgggcagctcatgttcatgaacaagtaccatggacggaagctatcggtgcagggcttcaaggaggcacttttccagttcttccacaatgggcggtacctgcgccgtgaactcctgggccctgtgctcaagaagctgactgagctcaaggcagtgttggagcgacaggagtcctaccgcttctactcaagctccctgctggtcatttatgatggcaaggagcggcccgaagtggtcctggactcagatgctgaggatttggaggacctgtcagaggaatcagctgatgagtctgctggtgcctatgcctacaaacccatcggcgccagctctgtagatgtgcgcatgatcgactttgcacacaccacctgcaggctgtatggcgaggacaccgtggtgcatgagggccaggatgctggctatatcttcgggctccagagcctgatagacattgtcacagagataagtgaggagagtggggagtgagcttgctagctgctccagtacttga

SEQ ID NO: 180015 - DNA, 958 bp, Homo Sapiens
  misc_feature (708)..(758): n is a, c, g, or t
ttgcaacaaattgatgagcaatgctttacataaagaaaaatttgtacaaaaaagttggctaatttggaccgcccggcccggagcggccatgtcccacggccccaagcagcccggcgcggccgccgcgccggcgggcggcaaggctccgggccagcatgggggcttcgtggtgactgtcaagcaagagcgcggcgagggtccacgcgcgggcgagaaggggtcccacgaggaggaggtgagagtccctgcgctgagctgggggaggccccgggctcccgccccagcctcgaagccccgccccaggctggatttgaattgcttgtggctccgcccacagcccattttcctctggaagctgagaccccgccccgtgccagctgccacgcccctgacaggtcctctgccactctaagtccaggccccgcccaccgcacaatgccagctctgcccactctaaggtcccgcccacttccactccttgggggcggcaccctccccttggtcctgtgggcccgttctccagcagaaaaccacgcccaccaagcagaggccacgcccacaaccgaagtcaacgccaaccctgtactcaaacctcggcccatagttcctcagatcccctcacccctggccagggatccctctaacccaccgtgtcccgactgctgaccgggccctacctccatcttttccgggttcttcctcccagcnnnnnnnnnnnnnnnnnnnnnnnnnnnnnnnnnnnnnnnnnnnnnnnnnnntctgagccctgccccagtacgccaggcccccctcccaacgacgcagcccgggttctgcagccggtgaagaaacgcggctggcccaagggcaagaagcggaagaagattctgccgaatgggcccaaggcaccggtcacgggctacgtgcgcttcctgaacgagcggcgcgagcagatccgcacgcgccacccggatctgcc

SEQ ID NO: 180016 - DNA, 1279 bp, Homo Sapiens
ttggatatacagttattttggatatattattgtaagttgtacaaatgtattttgaagaatatttaagaaaagcacttttgttattccatcaataaatgctctattttactcttgtgtggtttaggaaataatcacatttaaagtaatcatttaaaaacatcctaagataatggaattttaaaggccttgctttttagcattggaaaaatacaccacttgaagttcatgtttgttaagcctaactgtaattacatgttacataatctgcattgcctttttactatatgttcgtagtttttgttggccatgccaacatactcccatttctgcctagattatgggaatgactttgtatggggcagatagacagatactttaaaagctatttaaaaagcaaacaactttggatattattggtttccttacttcaacaccttttcctttatcactaggattgtggatggcacgaagctgaagctgttagggagtggtaggtttggagtacagtacatgctctgaaatatctagcctttagcagcttcatgccatgcttgcaaaagcccacaacaaattggaggcctccttgttctgctctgctgttctcacacttaaactctgttttatttataagctaaatggaaaggaaacacctttaagatgactttgctcattttgcatcccccctgagtttcacaggataaggaaaaccacgctattcattctccaccctcaattcaacatggcctagagtatccgtactgaggaagcaatcttatggcctgactcactcaccattcatgatcactgctgtgccttttagtggtttggggggtaagcagtagaaaagaaggtcaaaatagatttggattaagagtaggcaaaataaacttataacatttaaaaactgaagtatttttaggtttataatattgaaaatcacatacccttagctttttacactttatcagacatttttttaaatttcaagggtatagcaaaatgaaattataactttatgaagaaaagcattgatgaaagtggagaacatgcatttagtctaggggatttgaaactctcccaatactgaagacaaaccctgtcaagaaaaagaagaatttaatattatatagtattttcatatgcagttctttaagctttgtttacttctatacaaatacttttaagtaatgcaagataacatttaatagatggaatttgttaacgtaattgcctgtagtcacattgctaaattcattgagagttaacacaaaatccagaa

SEQ ID NO: 180017 - DNA, 1712 bp, Homo Sapiens
tccccacaagtcattgcttacagaaactggagttggtgctggtgtcgtgacaggagcaggagaatccaaatctaaaaggatatctgcatcactgcctccatggttagatttcggaatgggtggtggggtgacatgattgctgatggcaactgaggaggatggtgggggaatagtgactttgcctcctggcgggggtgggagtaagctcagacccccaccccttgcagtcctgggcttagaagcacctcctttcttgtttgtaatgttctacaaaagaaaaaaagaagagcaagagaaagatgtcataggcttatggaagcacaggaaaacaaaatttttaaaaaccatactcaccccgatacacaacttgatggtttgtccttccttgaagcccagatccaacttaggacgagcatccatttcttgagattccttggaaatctcagattcctgctttacccacttgaagtgatcctgcaaggagacattaaagtcgaaggcatctccccgatctgtgaagccaatgccaatgaaagcactgcgcccagtaccatcctggatccggattacaaagtagcggctagaatctgtcaccgtctccacagcaataccaggatattgttctactggtgcctgagcaaagagctcccctgaaactttatcctcgagtttgatataggcagtcttcccttttgaagtgattcggaggcgaccagtccaatcaggctggtctaatttccagtcagaggccctgtaaccgcggttggaggcccggggcggaatccggtagacgctgacgtctggcttcacacacagcacagactcgtactccaactcggtcgccatcttgggtccgctgtcggcgctgccgggggcgaaacgtaagaccggaggcggagcacgggaggcggagatgcaaagcgcgacaacttctgttgcgtcacttccgcgcgagttcaagttagtttctgagattaaccttttcggtgacgcggggagccatattgaaacctggaaacgatgaggctgcacggctcaccgtcttggataatggcaaagatggcctgcaagtgcgtgactctcgttatggaaatctctgtcctggagaggtgcttacgaaaagcgccatcttactctaggcaggtgcctggagtgtcctacgaggacgaggaccatattgaatcgtgacggattttcttacaggagtcacttcctaactgtagtctcctggcagaaaagaggcaacctccagccggtagtcccagacgaggtactttccattgacacatgaacatgtccttccggaagatcctattcagaacccagctggagagaaggtagaggagacatagtccataggtttctaatagataataaggaagggtgtgggcggcttgagtatcgatagatgatatctgacacagtccctgtgccatttagttgtgttgggctcacctcccccttaatatgtgctcatgcttttcccttgaaatgccctctcagcttcaatctccctctttctgtggcggcgagtcctctgaaaatctggtggggagagtggatgaagcttctgccctcagagaaatgagaatatgtaaagttgaagttttgcatatcattttaggtggtgatggaacttcctaaaaccctttcgtgacctcaggttggagacctccagtccagatatttttgtgtgtttacttatttgtaca

SEQ ID NO: 180018 - DNA, 959 bp, Homo Sapiens
cctttaaagccaactttgtacaaaaaagttgggtagttttttcatgttgacacattattactgctgttagcagtcgttttcaccaggtacttacagagcagatttcatacatcattcattcaagggctaaatttatattttttggaaatcatggcaactacacaggatgttgcttaccaggacggagttttggtatcttagtactgaagttagcactatgtttacatgcaaaagattaaggaaaaaacccttaaagtggacaggtatccaaagttcattttctgtgactcatcaaagtgacaaaagacttgtaacaactttgcctggacttttttcattttacaacagttcatccattcacaatgattttgttctctgctccatattttttaatcccttaagcatttgatgaaacactctttagtgctatatgcattttcttacttttgttaaaaatgtgacaattgtcaaaaaatgcactaaaatgtaaatggagattgaacaagttcactttccagcttataggcaactttatacagacttgaacattttctccagttgtttagtaaaagtgaaagagaaagggtttttcctgccacaggatataacttttttttatataacaagcataacacaccactgcttttggtggaaaagtgcagaatagtatgtaccttttatgaagaaaaatgtaatttacaatattcagtgagaatgttactgctgattttcttttccaaggtgtagaatattctttgatttatagaattcatttttgacccagatgatggttcctttacagaacaataaaatggctgaacattttcacaaatagagtgtaacgaagtctggatttctgataccttgtcatttgggggattttattttactttgttgctttaaattccaatgcagagaaattgttgactgtaggggaaataaagttaattcaaatttgt

SEQ ID NO: 180019 - DNA, 1784 bp, Homo Sapiens
tcccctccccaccatcccacaccctctcctacccaagacatttctctagagagtagaggccttgcccggcccttcctcttaaggcagatggtgtggaggtaacatcaaacgcaaggcactggcccagagcgcagagggtgtgggcagggcaggaggctgggctggctcctagtcattggaagtgaagcaggtgggcagtttgggctggttccagccttccagtgcaatgcccgaggacgagagtggtcccagaaagaaactggcagccccactggccaactgcagccctagcctatgccccaccatccttctccaggggccagtcggcctcagcagggaccagaaaaagccacagcccagggagcaggtatggccttcctaagccacaatctcaaaagtctctgtccttcatgattccttaaagggaggcagggattctccccgaccccccagaaggttctccacgggctccattctcccatgtgccaaactcgtgctctcggggaatgcagagcccactaggtagaccctgcagctccagtgccgtggtttggaccgtcacagcctggagcgcgggctcagtggcctggtcttctgggccccgccgcacctcccccagccctgtgctcacctccctaaacagactctggagttcaagatccagtgtccaatgcaccatgggtgaattcacagcagtggtggaggcagcagcagcaacagaaaaacccccagccacaaaagcaccggggttattagtgcaagagaagtacaaggtctccaggtgacagaaagggtggcatcgactaaaaaggctaagggctattttccctgaaactgcccccctcttcagttcctcctgcccccactcctctccctgcctccaggggatatctcagggcaatgtcctcacctccccaaacctctcatcccgcccccttcttatcctgctccctgtccagggttttgcccccatacaccctttcctcttcttccactcaaggccgggtggccagggctctccctgcagaagggcaggtctgcagtggagctggactgtgaggctcacagcttccacttcccttttcgtccctttctgtccagcccccacccgcttcttgcctaaggaaattgacagatatgtccacatcctctttacctcttctccatgtcctctcgggaggccttacccacaggcacgccggtaagggaaagggcttctctcccctgccttcatcaccctgcctgttctgcaggcctcaatgtccagtgccagggagtggcaagccccctgcccgccagctccccacctcccaatgcccaagcaccagaaacagcccgttctgtgcttctggtctgacgtgagccatccggaggaagttaatgccctaatcagtggccagctgtttggtggctactgggagatgtgtgtctctggaaggcacgagcctggggtggagcagagatctgccccacgtgggaccagtcccgcggccagggacaacgcccaagggacataggagtgggcgggaggcctgcacgtggggacagtccctcagtgcacaacctcacccccgctctggacagcagtttcggttttctgtttttaaaatccccgccccccaataaaatatgtccactagaagagggtctggtggtcagcgcttggtgtgaggagcgcttgggggatgtgggcgtgcaccttcatggatgaggatggtgtcgctcagtcagatctctccttcctgacccgtccttctcaggagctcttcccgttctcgacccaa

SEQ ID NO: 180020 - DNA, 1400 bp, Homo Sapiens
  misc_feature (274)..(566): n is a, c, g, or t
  misc_feature (568)..(584): n is a, c, g, or t
  misc_feature (1183)..(1206): n is a, c, g, or t
ttggctatactccactccctcagtaaataagtgaaaattgttaacccatgtgcccattcctgagtagggcagactcttcacaagaggcccatgacaagaattctagggtccagattgaactttaatatagacctttgtctgtgtagaccagtttgtcttgtaaactgtcttacttatgtgtgtaaacattttacattcacatgaaaagttattttcctttatataattggattcagaatcataagggacaggactgaaattattctacagtaannnnnnnnnnnnnnnnnnnnnnnnnnnnnnnnnnnnnnnnnnnnnnnnnnnnnnnnnnnnnnnnnnnnnnnnnnnnnnnnnnnnnnnnnnnnnnnnnnnnnnnnnnnnnnnnnnnnnnnnnnnnnnnnnnnnnnnnnnnnnnnnnnnnnnnnnnnnnnnnnnnnnnnnnnnnnnnnnnnnnnnnnnnnnnnnnnnnnnnnnnnnnnnnnnnnnnnnnnnnnnnnnnnnnnnnnnnnnnnnnnnnnnnnnnnnnnnnnnnnnnnnnnnnnnnnnnnnnnnnnnnnnnnnnnnnntnnnnnnnnnnnnnnnnngagtaagattcatttttattagttactcaacttcagacacaattttgttaatttggatatatacatatatataataagaactcatggttagaatagaaatacagatactttaaaaatggtaatagaaattgtaccaatcaggttgctgtgagaaaactgacaaaatatgcaataaagaataccaagagagaaaggacaatcgccaattcagtttcccagaacagaatttttatgaactgcacaaatgtttaatgtaaatggtgatacctacagggaagaaatagaagagttgataatatatcactgggacggggtgggggaaagacttgaaatttttggtgcctaacactaatggtccatatgtagttaaacccatgagtatggtatatgaatgtcttttttaaatgttaaaatgtgttgtctatttaatgttaattaaaatgcagatcaaagcaccaccatttgctttttccacagatcattaacatttccttaaagtatgtaagtacctttgcaaatgcaaatgtactagtaattttcacttaagcttttgagaccgaattccattccaccagttatcacttagccactgtaatttnnnnnnnnnnnnnnnnnnnnnnnntgtcttggtagaggtcgttaattagactcaacatgtactgcctttttgcagtctattatgacagtgtcttttagcacaaataatagagctaaaaaatgtcctgtcacttccattataagaaatctggattcatatctaagtgtatattataatactgtacagttaaggagttcagaacaagtggtaatgttttc

SEQ ID NO: 180021 - DNA, 1852 bp, Homo Sapiens
  misc_feature (290)..(318): n is a, c, g, or t
  misc_feature (853)..(865): n is a, c, g, or t
  misc_feature (897)..(927): n is a, c, g, or t
ttggaggagattgtgatggagaaagggggtctgtgaaacgtcaggcacagcacaaaggctttgccacgtaattacaggctcctattaagtcgagatctgccctcccaggggtctccaattttcttgtattccctacaaagcctcctctgcatgccagtttgtgccttttgaagtgccagagagcttcttgatccaactgagaaggaaaaaggagcccagcaagaagagggggagagagagaagggaaaggggggaacccaccagcaccctccgtcggactcttgaagccnnnnnnnnnnnnnnnnnnnnnnnnnnnnnactctttacaaaaagtaaagtgagaatcctgctctctaatacatctgcaagacatcaccctctcctcctgaaactttagtcactcctgagaatccacaggagtgcagagaggggggaacacgttttcttgaagatgttttaaagctggaacaagctttcttctgttggtgcttgaactcttgcctgggaataacttttttaacctttaaaaaaaccattcactttgattcttctctcccaccccttcttctctcttcttctgtttgcctaactcccccgccctgctggcctccgctttcctctctcccccttgttattatttttagtctgtgcgtgtggacacttttggagagttggaagggatttttttctcctgacttgaacatagggtgactttttaatattgtattttagtgtggattatctctttggaccgcgccggacttggcctcaggaaagcaaccaaggctgcggaaggcggctggtgcagaacgctctgctctacagaagggggtcccccgccctcttttccaannnnnnnnnnnnnggccttcctctccttccctccctcttcctccnnnnnnnnnnnnnnnnnnnnnnnnnnnnnnncactacccccctctttcttccccactcggctcctctcccccctcgcgcccacagcgtttggtgttgattcgagcgggaagaggggggtgggtgggatcggtgggggagaccatgacctccagctacgggcacgttctggagcggcaaccggcgctgggcggccgcttggacagcccgggcaacctcgacaccctgcaggcgaaaaagaacttctccgtcagtcacctgctagacctggaggaagccggggacatggtggcggcacaggcggatgagaacgtgggcgaggctggccggagcctgctggagtcgccgggactcaccagcggcagcgacaccccgcagcaggacaatgaccagctgaactcagaagaaaaaaagaagagaaagcagcgaaggaataggacaaccttcaatagcagccagctgcaggctttggagcgtgtctttgagcggacacactatcctgatgcttttgtgcgagaagaccttgcccgccgggtgaacctcaccgaggcgagagtgcaggtgtggtttcagaaccgaagagccaagttccgcaggaatgagagagccatgctagccaataaaaacgcttccctcctcaaatcctactcaggagacgtgactgctgtggagcagcccatcgtacctcgtcctgctccgagacccaccgattatctctcctgggggacagcgtctccgtacagatcctcgtccctcccaagatgttgtttacacgaggggcttcataacggattctaacggaagacactgaaaagcgccatggctacttattctgccacatgtgccaacaatagccctgcacagggcatcaacatggccaacagcattgccaacctgagactgaaggccaacgaatatagtttacagaggaaccaggtgccaacaggtcaactggagg

SEQ ID NO: 180022 - DNA, 1304 bp, Homo Sapiens
  misc_feature (351)..(625): n is a, c, g, or t
  misc_feature (628)..(643): n is a, c, g, or t
  misc_feature (1002)..(1028): n is a, c, g, or t
aaaagagctgtatataccactttaatctgtccttgggcttcagacttaaatattctcttaaacagcaaaaatactaactaagttaaatttaaaagcaaggagaagcatcattgtaatacgacatccatgtgtattcaaactagaattttctgatggtcttcgtaagataaaggagataattgtcatttctatgacacagcttttataatttgaataaacttagttggagattggagtatttttattatttattttcatgtgagatgggtaatgtgctgacctcataacaaagtttgagggagacacattgtatgtgagaatttgaagtgcttatgaagtacaaaagcagannnnnnnnnnnnnnnnnnnnnnnnnnnnnnnnnnnnnnnnnnnnnnnnnnnnnnnnnnnnnnnnnnnnnnnnnnnnnnnnnnnnnnnnnnnnnnnnnnnnnnnnnnnnnnnnnnnnnnnnnnnnnnnnnnnnnnnnnnnnnnnnnnnnnnnnnnnnnnnnnnnnnnnnnnnnnnnnnnnnnnnnnnnnnnnnnnnnnnnnnnnnnnnnnnnnnnnnnnnnnnnnnnnnnnnnnnnnnnnnnnnnnnnnnnnnnnnnnnnnnnnnnnnnnnnnnnnacnnnnnnnnnnnnnnnngaagaaaagtattggattcacatattctaaaaatgctcgtcatttgtggctaattttatcaagtctagtttaatctcatatttacagagtttagttaattctaattagctttgttggaggtcataaaccacattattaaccttgaaccgactctgtgtttacttgagttcctctgcataatagcatgtcaccaccatcataaacatgttggtattgcattatgcttctagaggagacatccaccaatatttgaaaatctggctggtccgagtgcagtggtgtttacaactaattgatcacaaccagttacagactttgtttcttctccagtcctgctgcttcacttgactagccttttnnnnnnnnnnnnnnnnnnnnnnnnnnntcttaactaatatttacttactgtatgttgtgattagtttaatagaagggagtttaatccttaataattaagttagtcctcaacgtttattgacttagttctgatgtagtccttgtgtactattgtataatgtagactacttggccatacttgattttgtctaaaagttaatgcataaattaatattaaatatgggcaaatataaaagtttaatgagtcattttgagtcatttagcagaaaactgcatttatgttcctggtgaatttttttcaatg

SEQ ID NO: 180023 - DNA, 1426 bp, Homo Sapiens
  misc_feature (560)..(595): n is a, c, g, or t
  misc_feature (831)..(908): n is a, c, g, or t
gccttctctgaatagatattatagtgttttgctgatctgaatttggagatttataaacattttacatgagtatataattaaatctaaattttaagaggtgattctaaaaaaacaacatatcaaaagcaaaatgaaacaaatgatccaagttgatgatataaagttgatgatctaaagagagaaaatctgaatttaatcaagcttctagatctaactaccaactcacaggagataagaggacactggaacatgtgaaacaatattacataattcagactacaggaaattctagaagacaatctatttagtacaacaaattacaaggaatttaataaagaagaggtaaaagagaacctataaagggtacttaagttatcaaacattacagtacatgaattgaatcagattcaaataatctgtaaaaaaattaggagccaatctagaaaatctgaacaccgggtatatgaggataaaagaattactggtaatttgtttagctgtgataataatttttttaaaaagagaatatttacatttcagaaatatgtgtgtctgtatgnnnnnnnnnnnnnnnnnnnnnnnnnnnnnnnnnnnngtcagcctcctatgtccatgggttcaactgaccttggaatgaaaatattccacacacaaaaaaaattgcgtctgtactgaacatgtacatttttcttgttgttattccttaatacagtataacagttatttacatggcatttacattgtattacgtattataagtgatctagggatgatttaaataatacgggatgtacacaggttatatgcaaatagtccaccattttatatcannnnnnnnnnnnnnnnnnnnnnnnnnnnnnnnnnnnnnnnnnnnnnnnnnnnnnnnnnnnnnnnnnnnnnnnnnnnnntgcatgtgtgtaaagattggtcacaatttggtaattgttgaagctggtttatgggacactgaagtcaattataacattttattttcatatatatatttttgatttccacaataaaaaatgtagaagttagtaattacttctacaactaataatatctcttccctaaccaagaaaataaatagctaattattcctccataattcctatagcatttattgtctcatgtcatcatttggttgtcttatataacaatccttcccacatttgagatccccctcaaaaattattaaacatgctgacttgcttgggtggatcttttcttcaaccaggagatctgcctttctaacatatgagaattacaagtcactcctactggggataataaaagaaagggaatcaaaaaggaaaacaatagaacatgcaggagtttttataaagaaggcttaggaaagagtaaaggaagtaaaggaaaagaggctcagacctcagaaattttatataaggtacatccctcccaa

SEQ ID NO: 180024 - DNA, 2161 bp, Homo Sapiens
  misc_feature (558)..(598): n is a, c, g, or t
  misc_feature (667)..(667): n is a, c, g, or t
  misc_feature (837)..(914): n is a, c, g, or t
  misc_feature (2078)..(2094): n is a, c, g, or t
ccttctctgaatagattttattgtgttttgctgatctgaatttggaaatttataaacactttacacgattataaaattaaatcaaaattttaagaggtaattctataaaacaccatatcaaaagcacaatgagacacatgatccaagttgatgatctaaagttgatgatctaaagagagagaatatgaatttaatcaagcttctagatctaactaccaactcacaggaaataagaggacactcgaacatgtgaaacaatattacataattcagactacaggaaattttagaagacaatctatttagtacaacaaattacaaggaatttaataaagaagaggtaaaagagaacctataaagggtacttaagttatcaaacattacagtacatgaattgaatcagattcaaataatctgtaaaaaaattaggagccaatctagaaaatatgaacaccgggtatatgaggataaaagaattactggtaatttgtttagctgtgataataatttttttaaaaagagaatatttacatttcagaaatatgtgtgtctgtatgnnnnnnnnnnnnnnnnnnnnnnnnnnnnnnnnnnnnnnnnngcagtcagcctcctatgtccatgggttcaactgaccttggaatgaaaatattccacacacaaaaaaaanttgcgtctgtactgaacatgtacatttttcttgttgttattccttaatacagtataacagttatttacatggcatttacattgtattacgtattataagtgatctagggatgatttaaataatacgggatgtacacaggttatatgcaaatagccaccattttatatcannnnnnnnnnnnnnnnnnnnnnnnnnnnnnnnnnnnnnnnnnnnnnnnnnnnnnnnnnnnnnnnnnnnnnnnnnnnnntgcatgtgtgtaaagattggtcacaatttggtaattgttgaagctggtttatgggacactgaagtcaattataacattttattttcatatatatatttttgatttccacaataaaaaatgtagaagttagtaattacttctacaactaataatatctcttccctaaccaagaaaataaatagctaattattcctccataattcctatagcatttattgtctcatgtcatcatttggttgtcttatataacaatccttcccacatttgagatccccctcaaaaattattaaacatgctgacttgcttgggtggatcttttcttcaaccaggagatctgcctttctaacatatgagaattacaagtcactcctactggggataataaaagaaagggaatcaaaaaggaaaacaatagaacatgcatagtttttataaagaaggcttaggaaagagtaaaggaagtaaaggaaaagaggctcagacctcagaaataaactcctacatccctcagtagagagagctgaaagccatatgtaataggcactgaaagcctatgttttggcatgaatttactacaggcaaagccaccatcatatatctatatgtaccgaggaaggctagactgttaagtgtcacgtatatacggtctcaatggagcctcaggaagctattaaacaacctcaaatcacaaaatcagaaaagtgttgaacatttagaggaagaatagaaaggaaaaaaaagcctccaagttgtgtattatttgtcagtaaagcaaaacaaatgtgtaagcccacttatatttaataatgtctcactgaaattaaagtaataggggagagtctgaagtttccacagataaagagagtgctgtactcaaatttactacaaaattaataatagtaaatgtaaaatatgtatttatacagccttttgcagacttatgaactatctcaaattcacgaatcctattttttaaatacagttttaagtttcaaccacttgtatcaccagaattttgagacttaactcccatggttaagagatttccaagctgtgttcacacctgtagtcccagctacactgaaagctaaggcgggaggaccacatgagcccaggagttccagactagccttgctctatttaaagagcaagactccactgccnnnnnnnnnnnnnnnnncaaagaagagaattccataaattacttggcttcttatattccatctcttcagtgaaacagtacccaa

SEQ ID NO: 180025 - DNA, 1553 bp, Homo Sapiens
  misc_feature (514)..(529): n is a, c, g, or t
  misc_feature (1159)..(1277): n is a, c, g, or t
ttgggatggatacaaaagatgaacaagacagaaggtttgcccatgagtcaaggaagataaacaagtatatataaatacagcatgaatataaatacagcatgaaacagaccagctggaagatcataaatacccctcagatagggttctaaatgtggaggatgaggagaaactgcttcccaactgggagcatttggcagaggctctatggctgtaagatttcctctggcagaggttgggttaagggccttccaggtagagagaagaacttgaacaaagttaacagagcctgggaagtgcagagttcattttgaggaacagtaacatagtatatatgcttgggaataatgcctaaggttgcttgctggctcaaaacagatctcatgtttgcatattagttggaaattaataataaagaatattagaattaaacagtattgacatttgttttgtagtcttgtgcttttatacctctcataaacataggtcattagcccctgccctttgggaaaggacnnnnnnnnnnnnnnnnaatcacttgggttgttgcaagttaaatgaaaaatgtttatgtggaattgcatttgtgttctttttttatgtaatgggaatatttttgccatttatgtcaaatctcttgaagatcaggacttgttttacatgatctgctctacctagatcaatgacagtctttgattattctgaatatctaacttaaatttatcattgttatagattatgatgcatcattatcacagaagaaattcgtgtctatagcttttaaggacttgattacatcattttcaagcctgatagttttggaatcaccattagagcttaagacacacctgccttcatttcaaccacctgtcttcataccctgacgaagtgcaccttttaacactcctttgtccttggattacttaagagttcccagaaatacatttgccaccaacagagtaggtaagtgaatgttctctgcctagtccagtattaagacacattgtttttctgaagacggatgtcgagtacagtaaacctttcatactctttttttaaaggcagagaagtcagtaatcatttgagtataaaaaacatcatatttttcttttctatattttgactttaaataaatcagtaacttcaaattaaaatttcttannnnnnnnnnnnnnnnnnnnnnnnnnnnnnnnnnnnnnnnnnnnnnnnnnnnnnnnnnnnnnnnnnnnnnnnnnnnnnnnnnnnnnnnnnnnnnnnnnnnnnnnnnnnnnnnnnnnnnngtgtgagccatagcgcccagcctatcactgttttttaattatgcattttgtgtagtcattagtcagttgtttataagtaatggtaaaatgcaaaaaagttgtaagttcccatttatatttatataatctgatgagataagtgatttagaatatatgaaagaaaggaacagaatataagttcatctttttaaatcactgtatatgtttcaaaacatttataaaaataatttcgtagatacagtgacagactaatcagactttttaagtttgtgtact

SEQ ID NO: 180026 - DNA, 1366 bp, Homo Sapiens
ttgggttcatttggcagttcctctcagagtagtctttactcttccaattccatatgatcatatcctttggaaggggcaaaggctaaagtaattggaaggaagccatcaaggaaaactcatacatgagaacacatgtgtaaagtagttctcttacaatcatttggaaattggcagctttgttcatttctccctctttagtattcctgtatattctacttttgtgaatatttggttgtttttagtaatgtttcatttctgattactattttcttgtgttttgatgtaattttgtctagaaaaccactctataatacctataaggtaatcctaaagaaatattctttaagtgtttcttgtaattgccacttttttcctgtcaagtactttcagagaaactggatgaatctatatctgcttacgttttgctggcattgtatgaaggatacctgtacatatgatttagttaggtttgacaatttcatgaaaatagtgggttaaatgtattctctgttaattcacactattttaaatttatagcattcttttaaaagattctatacttaatataaaaataattatagattggttttttcttctgctgaggtcttgatttgcaacatgtttttcaaattgttaaaactgagctttttcttacctaggctaattgtgtaggcgtagttgtctcatcattgagtggagatggaagtatgccagtaatttgtgtcatttggaaagtgttggcttgagttaaagttagtgtcctataaatgtcatatataggtgaaggatactcagtgttgtggaatagctcaggaacaaaggtacatcagatgtggtctttggctaggtttctgtagctaccttttgattttgcagaaaaagccaccacgtgagaatggccataagcagataagtagcagttcaactggatgtctctcttctccaaatgctacagtacaaagccctaagcatgagtggaaaatcgttgcttcagaaaagacttcaagtaagtatatgacacttgccagattgttttcagcttacctatttttaagaaggagtgttgccaatttaatacctcttaaattgactactcgaggaaaaaactcagaagcaattaaatttggaaaacgagagcagattgttccagtctgggatgtggagactggagtccaattcagatcatatacacaaaccaaaagtaataattacatcttaaacatggaactcttgtgcttacagataacacttacttgtgcctggctgtgctggatggtatattctgtgtcatttttcttcatgggagaaacagcccacaggagctcaccaacaaggtactccaaaactaagtaagagtttaagcttt

SEQ ID NO: 180027 - DNA, 782 bp, Homo Sapiens
  misc_feature (357)..(384): n is a, c, g, or t
  misc_feature (608)..(651): n is a, c, g, or t
ttggctttaaagctgtgtgtttttcaatggtgttgttcatacatatagtcactcacttaacttgggctacttttaaaaaaaatacacaagataaaattgatggagaaatggtgggaattgaaaacacgcaggtggagcagtggagtaaccttgagtttctctctccacttaaacctttcggagttcctttatgagggcttaccaaatctgttaggcctgcagaaacactgtcatcattatggtctaaaagggctaacagattatctttaaattctatgattcccacttgaaagtcagatgcatttgccatgtatttgcatctgtctcaatggagatgactctacagcttgcttgaannnnnnnnnnnnnnnnnnnnnnnnnnnncttgacattgcttacaggaaggaaatatgtttatgcaaaccagaccacttatctgcaaaggtgtaaactatattcagtattttattgtaaatatgtatattctttaagagtatatattgtactagtgctttttttcttactgttatatgatagaagctatgaaaaaaatgaagatttctttcaagccaatcaagccaacgactcttcagccagtattggaagannnnnnnnnnnnnnnnnnnnnnnnnnnnnnnnnnnnnnnnnnnnaccaccatgacatgtatttttctttacctccggatcctgccagagtaatatgtcaagaagctcaagaagcacactggaggttaccttgaggcgtttgtgtaatctgcatactagtggagtagccatggtga

SEQ ID NO: 180028 - DNA, 1798 bp, Homo Sapiens
  misc_feature (676)..(703): n is a, c, g, or t
  misc_feature (927)..(970): n is a, c, g, or t
ttgggtttcttaagcttccaaggctaaagttggaggtaatgcttgaagataatgtttgcttgcccagcaatggcaaattatatacaaaggtaatcaactgggtgcagcgtagcatctgggagaatggagacagtctggaagagctgatggaagaggtttattaacaaaactaggatacccaagactgaagaaacaagaagaaacctcaagtgtattgacacgtaaagaagcagcagtcctgccccagttctcctaagaaaaatccgctgtgggcagagaacgatgatgatttaatggtgtttactcctttacaggattcttgtctttaaagctgtgtgtttttcaatggtgttgttcatacatatagtcactcacttaacttgggctacttttaaaaaaaatacacaagataaaattgatggagaaatggtgggaattgaaaacacgcaggtggagcagtggagtaaccttgagtttctctctccacttaaacctttcggagttcctttatgagggcttaccaaatctgttaggcctgcagaaacactgtcatcattatggtctaaaagggctaacagattatctttaaattctatgattcccacttgaaagtcagatgcatttgccatgtatttgcatctgtctcaatggagatgactctacagcttgcttgaannnnnnnnnnnnnnnnnnnnnnnnnnnncttgacattgcttacaggaaggaaatatgtttatgcaaaccagaccacttatctgcaaaggtgtaaactatattcagtattttattgtaaatatgtatattctttaagagtatatattgtactagtgctttttttcttactgttatatgatagaagctatgaaaaaaatgaagatttctttcaagccaatcaagccaacgactcttcagccagtattggaagannnnnnnnnnnnnnnnnnnnnnnnnnnnnnnnnnnnnnnnnnnnaccaccatgacatgtatttttctttacctccggatcctgccagagtaatatgtcaagaagctcaagaagcacactggaggttaccttgaggcgtttgtgtaatctgcatactagtggagtagccatggtgaccgtagccacatgggtgttctgttgctgttttgcaggttcaaaccttgtactactcagctgatcacaagctgcttgatgggaacctactagatggacaggctgaggtgtttggcagtgatgatgaccacattcagtttgtgcagaaaaagccaccacgtgagaatggccataagcagataagtagcagttcaactggatgtctctcttctccaaatgctacagtacaaagccctaagcatgagtggaaaatcgttgcttcagaaaagacttcaaataacacttacttgtgcctggctgtgctggatggtatattctgtgtcatttttcttcatgggagaaacagcccacagagctcaccaacaagtactccaaaactaagtaagagtttaagctttgagatgcaacaagatgagctaatcgaaaagcccatgtctcctatgcagtacgcacgatctggtctgggaacagcagagatgaatggcaaactcatagctgcaggtggctataacagagaggaatgtcttcgaacagtcgaatgctataatccacatacagatcactggtcctttcttgctcccatgagaacaccaagagcccgatttcaaatggctgtactcatgggccagctctatgtggtagtggatcaaatggccactcagatgacctgagttgtggagagatgtatgattcaaacat

SEQ ID NO: 180029 - DNA, 1676 bp, Homo Sapiens
  misc_feature (854)..(889): n is a, c, g, or t
ttgggtggatctcaaggatattgaggggccgggctcaggaattgaggctgctgcagtttctcctgaatctatgagaattcagatgggcacttttcagtaattaaaaccatatgtcctcctcctcctttctttttgaagagctctcattctgttgaccttgcactgctgctggattgttcctcgggctttgcatgttccctgcatttgttttgtaactgagcatggtgcatggcagacctctctatgcagtatgctggggcagtgagcaggtggcacagtagccacaccctggcaacagtgagtgagagctggtgggcaggcttggaaactagctcctttttgttctgctcatgtgtttttatgggggatttgtcttatgcctttattaatattgtttttcttttttccctttctctgataaattcctttaacttttcctcaccttccgttcgacaatagccatggagggtaagcacgtcgtgtctttgtgtgtctgtccagctctctctatcacacccggctctctgcatgtaactttggactggaaagcaggaagcccaagtgggagggcacttcggcctgctttgtcacctctcatgactgacagatgccaaaagcagtgtttatatatgcaaaagaatgagacatgtacatctttgcagtaaatgaattattcttgtgcttttctatctcatacccagacttttggaacaaccaagaattaatctgttccagattacttaggcaaaagcacccaagggttcagaaatgggaacttatatttagactgagcactggcatcaggttcatgattaaactatatgtactacaagttggtcttttttaaaaagtgnnnnnnnnnnnnnnnnnnnnnnnnnnnnnnnnnnnnccattttatgctggtgtaattctaaccagttggaatttttaaatactgctgaagatttcccaaaggccctcatgttattccaccatcagtactcaagttatcttagtaacatttgttgatgtctcttctgtgcccaggccctaggtagacattgttacatctttggcctcatcttccctgatcacagttgcccgggtgagagagctgaggctttataagcgtaggcccaggtgctttccagcagtcagcacagagctggctgaaaccggggtcttgagcagagaggctcctagcgacaccactgctgctttgacttcagtcacgacctgcaaacagatgctatccccttaaagtgcattcatatgtcagctttttataattgtacaaagaacatgtttccattaggcggctgagggcagctaagctgagccataccgttttcactgcagaattcaaactaagtggaaatccttatagtcttcatgtagaatgtttgactctttagccaaataggtaattttgtctaaaattcagtaaattcccagatggattattatcttgtggtaaatgattttggggtgaggggacattgaatcaggtctctgaaagaatctggggtttttagtataatatgtatgattccatctcatttcctttaactgagctcaaagttagaaagaaaatactgcctaatttgtcacttgggaggattactttactgtcattctcaatctgaactatatctcgcacacacaagaaaatcaatgaccttctgcaatctgctttg

SEQ ID NO: 180030 - DNA, 1734 bp, Homo Sapiens
  misc_feature (320)..(335): n is a, c, g, or t
  misc_feature (508)..(525): n is a, c, g, or t
ttggaaggtttcttggggttattaaccagtagtgtggaaatactagttttatgtggccaaggaaaagcaaaggcttttcttttcagtttgtgttatttggaagacagaaaaacatcttgtctacatcctttggctgtttgtaggatcacgttgtccttacgatactgaaactttacagctgctgtaaattttttataaatgaatttcaaaatgttataatgggactgtaggttgtttttctacatcttcattatttggacctaaaaccagtttttaataagaaagtttatctttactctttctgaaattatgactccagnnnnnnnnnnnnnnnntacaagtcatggaatcagcaatctggtaagaaatgctgccaagaatgtggcagtagctgtcctgacagactccaactgtctttactatctgaagaatcctaggctccacatgagaggcagaaatggatcagtcttattcttttctagaaatggttatctgtagtttggtagcnnnnnnnnnnnnnnnnnngaatccataattagcagatttcttattaactatttggatctaattgaaatggctttattcttaggattaagaaagatagatgtggatacccagccactcgttccatattggtatctttttaaatcagctctgcctcttaatcaagaacctaaatattccctctttctaatctttgttccttctccctacaccctcatcctctttcactcttccttcataattcctctaagaaaaatatctttgcatcagcagtaatatcttttagaatagcactatcagaatttagcagtaaaccaacatacaggcttcagatttacttctgagtccaaaacaatttgtgctatccagggtagttaactctgggttaaacaagtacagggtatagattccctcttcaggtctacacaggaatttttaccatagggaaaagtggggagagctcaaacgtagttaataaggaaggtaatttgtttttcttttacctaaaagaaaagaaaattccttctgtgactacaggtctctgagaaattatctttcaaaagagatttcattgctcataagagtgttgtggcctattgataaaaacaattttgttcagtttcttgtcttgaaaaaaaagtggccttagctttttgcaatacttgaataaagtgtgtactcgcaaaagaatttctgtagcacagcattagagactcataacttttctgcaagaaatacaaacttacatcttccttttactaccttaagaatactagtgaataaaacattaattcaaagagcaaattatagaaactacaatgacatttaatgcaaattgtaggaatttacatgtttacaaatcatcttcaactggttgtgcagcaattcaataaaatatctttgtattataaaaatgtgaagaaaaaatgtaaactgatgtaaaggaggtactgtcattttaattaacctatgtttaatagcttttccttctggactttgcaaagccttcttggcaaacacattgcaaagcattctctgggaggttcagcctccttgtgtgtactgtactgtgcagacatgaaaaaataaaacccgtttactgtgtgcgtgtaaatagcctggtcatcaggcattttcaggccatagtcccatccagtgcaattttgcaccgaacacttaagggtgtggtttgaagtacgatctgtaaaataactgggatgaattcccatg

SEQ ID NO: 180031 - DNA, 965 bp, Homo Sapiens
  misc_feature (767)..(775): n is a, c, g, or t
caactttgtacaaaaaagttggagatgcatatactgaagggcaaggactttgaccatgtgaattttcagccgagaatggtcagaaagatcagtacaaccccatggattaggctgaaacatatgaaattgctgcatttgtagtttaaaaactgtcagcagtttcatatggttccacctaatattattgaagacaattattttcttagctatcaataggcttaatagttttagttattttagcttttgaaagtgttttaaaagatttcctttatcggacaggaccatctttatgacctgctttctgtttttcaatatcatacattggtgtatgtcaaagaataaattagtaaaattagtaaatgaaaaagactcttccgtacatcattatttccatgctaatgtgtgtctgtgatccagaataacttctcccactcatatcttcagttcacctaatgaaatgaatggatagcaagagccctttgttcccaggactttaaggcaaaatattaaaaattattgccaaaattaagaatataatgtttgtataaatgtccttgaatttgccatttaaattaactcattttcttttcactttgatttgaaagctgataagtatttctgcagcagatagaatattaaaatcaggttgtgtgtacacactgcactatgaggtaccttggtgtcctggtgtgaatagacaagaagctgtactatatgttgctctctcagtggcaacaatgaagtttttgcaattctagaacttggannnnnnnnnaacaaaagtcccaaaacaccaaaaatgtaaacaagataagagattaatattgtagtgatgtaatttaattaaagttatattttgggttaattttaacaactgaagtcttattgttgaaacttattttcaacaaaactgtgcagttaaatttgtatacgtattcacatactgaaagatgaaccggttaaaa

SEQ ID NO: 180032 - DNA, 686 bp, Homo Sapiens
aagcccactttgtacaaaaaagttggattttgtcttattgtttctctactaagaactctttcttaaatgtggtttgttactgtagcactttttacactgaaactatacttgaacagttccaactgtacatacatactgtatgaagcttgtcctctgactaggtttctaatttctatgtggaatttcctatcttgcagcatcctgtaaataaacattcaagtccacccttttcttgacttcaccatgcctatgtgttgctttctaatttggggcctttaatgttgctagtgaaaggtaacctgtccaaactgatgggattaaccagaggtagtcctggctgcagtttttgcagaagaatgaataacattttctggaaaccctcagccagtgtctccttaagtctccttggccagggagatgggctaaataccgtaaatttaatcataaatctctgctggagctacaaatggaattctttcctcccaaacttcaaggccgaatggggttccaaggtaaatcacggctgcacatgggcctcatctgggaaagtacccagttctgtttcgttgatgaggggcatgagggtccaccatgtgtcttttttaaaaatgtaattcccaagggctcctgtacagtgtaggttgatagccactactctttgagatggtgtctcgctctgtcaccca

SEQ ID NO: 180033 - DNA, 2152 bp, Homo Sapiens
  misc_feature (364)..(376): n is a, c, g, or t
ttggctatggatgttgttaaatttctttccaacctccccctcccaatttgaaagggtgaagctgctgggctactttttaattgctgaagtgttttgccttctcttaacacgtcgggtcatgttgctctgttttcccagcttgctgctcctgttggtgcagctgccaacgccccagggctgcagggttggggtgcagggacgccgaggagctgaagagtagcatttaaaaagtttgaatttttcagcttccttccctccctgcacattcccaaactccacttgccagcccggctgccagcgctccccaacatttcttccttcttttctcgactctcccgctctttgatctatttctttctttggnnnnnnnnnnnnntcacgactttttaaatgaacctcattgttgggaaccagctctcgactgggttcctgtaatcctctcggtggggtggttgcagttacagattcccggtccccccctgctgatcctaagggaccaacattagaatttgcacaatgacacccacatgggctgggaactaactcctaggtccctgacctgcaccatttccaaatcttgggtacaatttgggcaggtgaccagggtcctattggaacagaaacctgccattggtggctctgcccccatccccaccacccccaatccgctattgactaggaggtgggtaggggggttggtgctttccttttcctttccatctgcagctttgcgttaaagattaaacactggagctcttatccaagcttgctcttgcagccaaaagactaattgcaaaggcatcttctcagtgaagggggcggggtgggctagggctgagtggaaatggtgagagagattattgtagaaaatatctcttccgggaacttagggcaaagagttttattttcaggaatcacatccctgtctcccccaacctcagaccaggcccccaatctcctccccacaagaaaaagcaaaggcagtctgaaaacctgttgccaaaggaagggaacacttctgaaggaggaagttgagagtcttaggccaggtcttgaaggagggggtatcaattaagcagagactgattggaaggggacctaacgtagcctatgatagactcctttctgaggtttacctgtttttgtcgcgggcggtggcgggggcggggtgcggtaatctagagaggtctgggttgtgtgagatattttgagttgaagaatctatttgactagtaaaaaagttgaactttaaagtggtagctttggggacagaggacatgggggttgcattgcaggagtcagcatggagcagggtgcttgtcacacagtttggatcttgtggtttcttacgcatggggccaaaataaacccaggtgaatggcctatgggagggagagagggaagggagcttgctagagccgaggtagagatgagttctttgagaaagagcgggcgtttgtgatgattgtgtagggggctgcccatagtggacatcctggtggatgtcctctgtccttaccatcctttctcttctctctccagggtaacaagatgctcaactatagtgctcccagtgcagggggttgcctgctggacagaaaggcagtgggcacccctgctggtgggggcttccctcggaggcactcagtcaccctgcccagctccaagttccaccagaaccagctcctcagcagcctcaagggtgagccagcccccgctctgagctcgcgagacagccgcttccgagaccgctccttctcggaagggggcgagcggctgctgcccacccagaagcagcccgggggcggccaggtcaactccagccgctacaagacggagctgtgccgcccctttgaggaaaacggtgcctgtaagtacggggacaagtgccagttcgcacacggcatccacgagctccgcagcctgacccgccaccccaagtacaagacggagctgtgccgcaccttccacaccatcggcttttgcccctacgggccccgctgccacttcatccacaacgctgaagagcgccgtgccctggccggggcccgggacctctccgctgaccgtccccgcctccagcatagctttagctttgctgggtttcccagtgccgctgccaccgccgctgccaccgggctgctggacagcc

SEQ ID NO: 180034 - DNA, 850 bp, Homo Sapiens
  misc_feature (313)..(344): n is a, c, g, or t
ttggatcagcacagttccctgccctggataaggaacagctacagtcgctgttaaatgtgcctgaaaagcaatttgcaatctttgcattaggcatttcggccgtggaaccccaggctcggaggactgggtgtgagcgctgcccgggagaggctgacctgccgggaccggagtgcccggggacgctgtgcccccacttgcccaacgtgcggaatcggctaagcgcgtcggcctgcgcggggcacaagggacgacgcccgcctttctctctccgagaaggatccccaaacctcactctcttcactcctccccgctnnnnnnnnnnnnnnnnnnnnnnnnnnnnnnnntccccctccccctcccggccgcggcagcctctgcttggcaggcgcgtgctccgaggtttcgccggggtactgcgcggctccgtgacccacccgccgacggcggttcgggccccgacccgggcgctgcggagtctcgaacgcccgtgacgtggatttttcgctcgtcaggaggccgccatcccttccttcgttccttgcgaggagcgactagaacccgagttctctgagcacaccgtgccgtcagctggcccgtcacgcactcgactccgccactcccctacttgtttttctgagacttgggaagccttcctgaaaggatttgtaaaaactggttcttggaaaggggctgcagaagacctcccgaggtggatgttactgagccgcccggcgagcaccagccgtgacaggtccgggcccggccgcgcggagccgcgggagaactgccctccgcagccggaagggggccgcggggagcgctcctggccggtggcggcgggggcggggga

SEQ ID NO: 180035 - DNA, 1389 bp, Homo Sapiens
  misc_feature (297)..(305): n is a, c, g, or t
  misc_feature (766)..(774): n is a, c, g, or t
ttggatcatgtgatttgcctgggaaaacttgtttagatattgagctacttatgccttctagcctttatattaattgtatgtaatgttattaaatatatatatagttcatctttacatttggaaatgcccaacatttttttcatataagtccttaaacaagcgttcattttattttaaatctatacagtgaactggccaagatattttaagagggaactttaatatcccatttattgtttttataaccctggacttataaaaatgggttgtttgaagggttattttgaaagtgggggnnnnnnnnncttagttgctaatgtatctaaacttcagcagagctttttggtgatctcctacctgcaccctcaactcttgacaaagaagcaagactatagattcattttctgaaggggatcatgtatggaattttttgatgagtttttacttttacctctctactcttgattttctattattgaatactcttttaaaacactgatttttaaggctttatatatgttttccaggctgatgttcacatctttttttcatgaactatcagaatatagtgaacacttttcaaatatttaaggacttaatgtttaaaaagccataaaatagagagtggtaatactaccaaataattacttaaaactgaaagctaagttatcaatagtttatataagagatgttttctgaggagatgtgcatccagtgagaccaaggtagaaagtttatataattgttttttttccagtaaatatgnnnnnnnnngctgtagcttgtttattacatgtccaaaatacagtggagccttactttaacacaatgtactgtaacttggaatttgttctgttatgagtctatcttgaattcccatccatgaaactgtagtcaccaaaagcaacaagtattttcacatgatgtaaaagaccatactatgatggccattgctagaaattgaatcacaaataatagctaataatttttcatttttcaaaaaagatcatttggatagcagctatgtataaaatggaaaataaaaaattattctattttgcatgaatagttcagactttcccataccacagccaagcagtaactaaaattaggatcttaattttcaatgataaaaggtctaaggttcatttaattatgctcctttaacactgtctttctagatttttcacccagtattttcaaaatttgggaatgtaaacaattgatatatttattgtatgttggctagcagttcatccttctgcaaaatatgcattcagagaaatgtgaagcttgttttaatgaagacttaaaccatttgtgtcatttgtgttttcatatttcaaatacaccaaattaaaattctgaacctatatttttcatcattaa

SEQ ID NO: 180036 - DNA, 736 bp, Homo Sapiens
ttgtacaaaaaagttggcggctgcctgaagctagtgagtcgcggcgccgcgaacttgtggttgggtcagtgccgcgcgccgctcggtcgttaccgcgaggcgctggtggccttcaggctggacggcgcgggtcagccctggtttgccggcttctgggtctttgaacagccgcgatgtcgatcttcacccccaccaaccagatccgcctaaccaatgtggccgtggtacggatgaagcgcgccaggaagcgcttcgaaatcgcctgctacagaaacaaggtcgtcggctggcggagcggcttgtgagtagccccctccctcgggcctgggcctgggcctgagccgtcacctccgaggcggcctgtctctgcccaagtcgagtgaatgggccaggctggggtgtttgttggcccgggaggaaatggaacattcctgctgtgagcatgagacgtcgctgtccgagcttggcgcctaagccaagggtttctttatttggttggttccgattgggttgttggtttggggttttgttttgttggtgtcataaaagctgcagccaagaaatctcataattgtggtccttttcctagaataatgatggctgagaaactagtgttccgaatactgtcatagatctcagtagccctagcagttttaagtgcgtagtgtcttccctgctgccatctagggactggcattccgtggcagcagctggtctgcaccccaccccttgtgtt

SEQ ID NO: 180037 - DNA, 926 bp, Homo Sapiens
ctttgtacaaaaaagttgggtccttcttgtcctggtcgttgttcccgtctgagtaccagctccccactgccctgagggcgggccggcctgcggcggagggaaaaaggaagaggagaaggaaattgtcccgaatccctgcaggtcagtacctggaagattccataaagtcggggtgcttgagggcgtagggccgagaccgtcgcgggtactgaggcgcctccgtcgtctctcccactcgccgcccgctttccaagacatatgtcccgcttgcagcccatttcgatgctgcgaaacggtgagctgcggggtgtttggggaagagctcagtttactgggaaatgggaatctgctgggagcctagggccgcaatccggaaagggagctgtggcctgggtgttggcccctagtccaccaggacagtgccggaggggaatggctggatatgggggcgggggtggtgagatgcaacgcgatatgtcagcagaaccccaagagaggtaataggggtgggaaacctctgacaaccaggcctccgaattagaaaagagttttgtgttctggggactagtccgtccaccaagcgctcagtggcggcagtttcccgtctttctgcctgtggctgtgtcttactgaccatggctctgtgtctagtgggtccaagcctctcccgggtggccagtctttctgtagttgcggcacaacgccaggcaaaagaagaggaaggaatttaatcctaatcggtggaggtcgatttgagggtctgctgtagcaggtggctccccttgaagcgagggaggaagtttcctccgatcagtagagattggaaagattgttgggagtggcacaccactagggaaagaagaaggggcgaactgcttgtcttgaggaggtcaacccccagaatcagctcttgtggccttgaagtg

SEQ ID NO: 180038 - DNA, 2544 bp, Homo Sapiens
  misc_feature (1561)..(1602): n is a, c, g, or t
  misc_feature (2066)..(2090): n is a, c, g, or t
ttggatcctttttcacgttttctccttgttaatattttttaagggataacagatgaaactaaaaatgtacctgttttaataagcagtataaatatcattccaggttatagggtataatgtaatcattttaggttataagaagttaaacagtttcatacagctttatcctgaagtgcagccctccatttcctaatgtcagaaatcttcagagcaggctttcttctgacccagatacataaaatatttttaacaggcattttttttattgctaaacacaagaatgtgcactcagccaagattaaatcaacaaatttgttgctgcagtgaatgttgttgttgtaacctctgcaatgatttttttggggagttgcagtcttccaaaaataatgtgaatttttctgtacagtttagtttgacctttaattttgtatagataattcttatgttatatattaacactgtaatggatactaattctggtcagaaaattcatcctaaaactacagttttcaaaagactgtatgatgtatgctatacatgcactgtattagtccattttcacactgctataaagaacgacctgagactgggtaatttatgaagaaaagaggtttagttgactcacagttttgccggcttaacaagaagcatgactgggaggccccaagaaacttacagtcatggcagaaggcgaaggggaagaaggggaagcaagcacatctcaccatgaccgaacaggagagagagcgaaaggggatgttccacacaactttcaaacaaccagatctcctgagaactcactcactatcatgagaacagccagaggggaagtccacccccatgattcagtcacctcccaccaggctccctcccccgacactccctgattaaaagttatgtatgggcttatacaatttcaaatgtaaaaacagcctatttacatatgttgaaacaataagattttgtggtatcactgtcccttaataattacaattcaaggtaagatttggatggggacacagagccaaaccatattatatacttttgtgatagcatagaagcatgcctttttaaatacacaaaagtctaaatttctgaaacatcaagttatccttggctgagtaaaataatttttcacttataagaggattcaccatagccttctctaaatagttatttcttcatttaaatattgttcaatttaccaaaaaagttaccaaaaccttcccaaaatagttattacaggaagtgaggtacatatatatcttttgcaccttgtatagaaatagaaaaaagtacaagtctttagatttcatagtctgcttattacagatactgacaatgaaatatatactccctgctcatacagtttgaaataaattattacataaagatgataaatgtttataagcaaatctagcatatgaagaacatatacatagatgagttgcacacaaagcctagtgtattatggaagacatatgtggcaggtaatctcaagagaatacaaaagatgtattttcacttttatttctaaaagtagtaaaaattaaaatatggnnnnnnnnnnnnnnnnnnnnnnnnnnnnnnnnnnnnnnnnnnagctgcctaaaacgttgaaggagaatcaattcttcaactcaagatgtctgatttactgtgaatttgcccaatctttgatgacattgaaaacgttttggggcatacacactcaaaaagcaggatccaatacccaaaagaaatggaacttaatgttgtgccaaagttaaactactgcagttggtggaagttctgcaatgtaaatagaacactaattaaaaaacaacttgtaaaaatgcaatttaaattttaatacagtacatttttcttctaatatgatggagacattctgaatcttagactttctgagggggtttaatgaccactagagcttgtcctcatattcagtccagtttaatactgtatgtctagtaagatgggctatatattgcctctattctttgagatgtgattaagcttagaactttgaccaaaaattttacagtaaaaattgttagaaatgggtnnnnnnnnnnnnnnnnnnnnnnnnnccctgatttattactatgtcttatttatcaaaccctgcactaaaattaaaagttgtgcatgggcttatacaatttcaaatgtaaaaacagcctatttatatatgttgaaacaataaaattttatggtttcactggcccttaataattggatccttcattaaacacatccatgaataccactgtttctactgttacttgttccattagaagctgatttgctttttattaaactgcaggaaattaattctgaagaaggaaaagaaactgacatggtaatttggataggggtgaagctttgaaataaatactgcaccaaaaatgtgaaaaagaatcacgtagtaaatgtatacttagtgtttttcttacaatcgtgcaaatcaagaaatgttatatacaggtgtcagatcagaatttttaagagttatcttttcagtgaaaatttttataacagttt

SEQ ID NO: 180039 - DNA, 2929 bp, Homo Sapiens
  misc_feature (1577)..(1628): n is a, c, g, or t
  misc_feature (1640)..(1817): n is a, c, g, or t
ttggactttctctgattctcccctgttctccaaggacttggccttcagtgagcaattctgtaccactggacagaaatcattgatgactcgtccccgatcacatctgccatcacctcagaggtgaaattgtcacaaaatgagtttagaatttaccagatgctctgctttcaactaaatgtgttttccgtaggtgtcctgtaaggagaattccttaccactcatcttattcttgagccagttttgaggccatctccaggcagaccccccttctttccagcaggttgggaaacctctgatctgttaaactaccaaaaccacatcacctccatccttctccagcgactccagcgtgcgccctctttcaggctcatggatagttctctgctcagaactacttggcacactgagctactctctcttactttctaatggggcagttttcttcatcaagggagggagtctcaccttttctttggcttggtttttgttcctgagtccaggaggggtcttacctcagcccctcactcagcctgatgcacatggagtattggacagatatcctgtgggctggttggggtctgttttgaccaggaaacccttacagctaacctaatcctcaattccttcttattagggacctcagggtggtacccacttctgacatctggaccacttcttgcagtcattgggggtcatcccccacactggtaacctgtcatcaaatgggccacagcaacattcagcttaagtatttctccttcccacatccaagggattgagtgggagtgagattggggggtggaaaaaacagtgaacagtcctggtgagttgcagatgtggtctcattccctagagatgcaggatgcagctgacctgaatcaggacagatccctgcaggagggactcctggtgccatgtcagtcccacctggcactgccctagctcccaggctccgcctctgcatctttccttgctacttcctctttcacttctcccccgttcccagacccaccagacagagcttccagagtgtcaggacatgtgtgacttagcccagattcagactttagtcacaagcaggatcagcatagacatctagctcccagcatggcaattctctgttgtgtctccctgtttgtattggctgcaggaaagctcagagccaagtctgcgataagctggtgtgtgtaggcccttacagcctgcatttttatgaccaaataatagaataaatgctcagtccttatcacatgctgtgaactgtaggcaccaacctcactcttgctttttcttatttttctacactgatttttccttttctccatttcttcacacatagtacctatttgatttattttatgctgttgcattgtgagtatgccttaaattctatgggggacaaggtaagaggacaagcaaatgaaagctcagagagacaaaaaaggctcttccagaaatctcccttgcttctagcacctgcttcccctccatcaggctgtcttcagtctttctccagaggcctctgcttacagtgtgttgttgttttctttttaagagacagggtctcactctgtcannnnnnnnnnnnnnnnnnnnnnnnnnnnnnnnnnnnnnnnnnnnnnnnnnnntgggcttaaggnnnnnnnnnnnnnnnnnnnnnnnnnnnnnnnnnnnnnnnnnnnnnnnnnnnnnnnnnnnnnnnnnnnnnnnnnnnnnnnnnnnnnnnnnnnnnnnnnnnnnnnnnnnnnnnnnnnnnnnnnnnnnnnnnnnnnnnnnnnnnnnnnnnnnnnnnnnnnnnnnnnnnnnnnnnnnnnnnnatgacccactgcccccagtccccattttctttaaaaggcctgaacatttccttcctcgtgtcagtcctgaacaattcacattttcagggctctgctcacaggcctgtgacttagcctgcctgcctatgaaaccattagcaaattggaaatacctcttgcaccagtcagaagggggattggtttctcttatatgcacatacattgggtctactgcacaaattacagggctccaagtgtcttatgagagcaggacttgggctgaccatgtctctctgccctcacccatgctctgctctgatttcagatcctaagtgtgaacgtgaagtccccagccctgctgctgagccagttgctgccctacatggagaacaggaggggtgctgtcatcctggtctcttccattgcagcttataatccagtagtggcgctgggtgtctacaatgtcagcaagacagcgctgctgggtctcactagaacactggcattggagctggcccccaaggacatccgggtaaactgcgtggttccaggaattatcaaaactgacttcagcaaagtgtttcatgggaatgagtctctctggaagaacttcaaggaacatcatcagctgcagaggattggggagtcagaggactgtgcaggaatcgtgtccttcctgtgctctccagatgccagctacgtcaacggggagaacattgcggtggcaggctactccactcggctctgagaggagtgggggcggctgcgtagctgtggtcccaggcccaggagcctgagggggtgtctaggtgatcatttggatctggaggcagagtctgccattctgccagactagcaatttgggggcttactcatgctaggcttgaggaagaagaaaaacgcttcggcattctccttaggacttatctgcttgtagatttggctgatccaattaacatgtggggttcttggtgtgggtctggggagctgaaggattttatggagctggtgctttggaggaatcttaagggaaaaggagtagaagctcaggcctttgaaggatttcagctcctcctctctgtaatttgtgctttaagcattttttttcctaaaataaactcaaatttatcctc

SEQ ID NO: 180040 - DNA, 1053 bp, Homo Sapiens
  misc_feature (324)..(370): n is a, c, g, or t
  misc_feature (970)..(991): n is a, c, g, or t
tacaaaaaagttggaggaaagcagggaaggaggctcaggctggctccgttttccacctcctggctctgtgcccatttccctgcagctcaccgtggccaccagccgctcccggtcctccgccttccccacatggcacacggtgcccgtcacgctcagcccctccccctgcagcgtggccaccgcctggtccacattctgctgcttccggctgctgacgaccacatgggccccgtcctgggccaaacgccgggcgatggcgaagccgatcctgtgagcagaaagagacaaagactgctaaggcctgtgcaggggaagaggtcgacnnnnnnnnnnnnnnnnnnnnnnnnnnnnnnnnnnnnnnnnnnnnnnnttctctatataacccctacgtgtgcctactatgtgtaaaacaggcttaatggcatggccatttttggcattcctttacttgtttttattatgacctggaccacagcctcagttcccaagaactgacatcactttctacagttcccaccatgggtgacaggcttcatcccctcttgggactgagaggtgccacttcggataaaccctttggactcctaactccaatcaggtgtctgctttgttgaggactcacagacacagtctcctttcttcaagatctttacaatgcaagacctcactaacacacagggatggtctcccagagggtctgtgctgttccttcactcagaacatcaagatgcactgaagtaaggatcctctattctacagttcctgctagctgagctattccatgggggcttcagcaggaaattccaaggttggctttgacaagctaaggccggctggtggagcacatcgagttctggaggttcatgtgtgttttcatgaagatctgtctgcccgtagcagataaagagttgttgccccactcctcctggggtcttctattttcctgggaggaatttctggattaactgannnnnnnnnnnnnnnnnnnnnnccttttgaagcatcaacagtaattctgagttcttagggacaatgcagattaaatccacaata

SEQ ID NO: 180041 - DNA, 1523 bp, Homo Sapiens
  misc_feature (42)..(55): n is a, c, g, or t
  misc_feature (363)..(531): n is a, c, g, or t
  misc_feature (658)..(829): n is a, c, g, or t
tttgtacaaaaaagttggcaagaagagcaaaactccatctcnnnnnnnnnnnnnngagtactattgatccagaggtgaccagactagcctcactggagataataggtgacattattatgcaaagtggtttcagttcccttgtcttgtttttggaatagtataagaggcctacaatacgaataaataaggcccatcacaagcctcaccaaaggacaaaactaatccacttctgaagaaggctctttgttgggccagatcaaatccttggacagaactgtactcttaatctctgtagtgaaagtggggggtagtttaagaatttattaaccttctaccttgagcaatccctcagaagtaagaggnnnnnnnnnnnnnnnnnnnnnnnnnnnnnnnnnnnnnnnnnnnnnnnnnnnnnnnnnnnnnnnnnnnnnnnnnnnnnnnnnnnnnnnnnnnnnnnnnnnnnnnnnnnnnnnnnnnnnnnnnnnnnnnnnnnnnnnnnnnnnnnnnnnnnnnnnnnnnnnnnnnnnnnnnttgtgacctgtccctgtcctaccttaactgatcaatcgaccttgtgacagtcttcttctggacaatgggtcttatcatctccccaccatgtaccttgtgaccccctcctctgctaacaatagataannnnnnnnnnnnnnnnnnnnnnnnnnnnnnnnnnnnnnnnnnnnnnnnnnnnnnnnnnnnnnnnnnnnnnnnnnnnnnnnnnnnnnnnnnnnnnnnnnnnnnnnnnnnnnnnnnnnnnnnnnnnnnnnnnnnnnnnnnnnnnnnnnnnnnnnnnnnnnnnnnnnnnnnnnnncaaaagggaagggtggatttgtccttctggttacatatgttctgctcactcattttgaatttaattaaacaaggattgcccttaccttttcatactttgtaagaaaccataaatacttatgcaccatgatttttttaaagaaacactttttattttgaagtaattatagtctcataggaagttgcaaaagtagtacatagagtccctgagtactcttcccccagtggtgacaactgtagtataatatcaattctgggaaattgacattggtacaataccaaatatactatgcctttttctctaaggcatgatgttgcagtagcatccttgtacatgtagctaggagaacttgtactaagcccagataaatagttgaagtacaagggcaaggagtgtgtctttgatattttaatagaaatcacctattgccctctagaaaagctgtacccttttccagtggcagagaaccttcctgaaaggcagtcctgtgtaatggtgtccatttcatcacacccttaaaacactcagctttaacaaacatgcagattttgctgatgtgggagaaaatattaattattaatgatattaaatgattatcttttcgtatgtttatagatatttgtatttctttttaatgaactgctcatgacctttgtctacttttatttgggtttacttctttctcatttattcc

SEQ ID NO: 180042 - DNA, 1808 bp, Homo Sapiens
  misc_feature (452)..(462): n is a, c, g, or t
  misc_feature (544)..(590): n is a, c, g, or t
  misc_feature (1602)..(1645): n is a, c, g, or t
ttggctatcgcaggacgcaaaagccaaatgagactgaccaaaaaggcaagggagagcgagggcccgctgggcagtcagctaggtgcatgtgtggccgcaggccagcctccctcggctgtggggggtggttgctccccggccgcaggccgcgccctggtctggcctctggggtgaagctgcctcttgttgcttcggtgcctttacactgtgcctgcttcttgtcctcagctacacacaacgagtaaaaacccttcctgctcaagatcgtccttccaatggctgtgtgtttaaagattgtgggagcttcgctgaacgttaatgtgtagtaaatgcacctccttgtattcccactttcgtagtcatttcggttctgatcttgtcaaacccagcctgaccgcttctgacgccgggatggcctcgttactagacttttctttttaaggaagtgctgnnnnnnnnnnngagggttttcaaaacattttgaaaagcatttacttttttgaccacgagccatgagttttcaaaaaaatcgggggttgtgtgnnnnnnnnnnnnnnnnnnnnnnnnnnnnnnnnnnnnnnnnnnnnnnnagtggggttggccccatgaagtgggtgccccactcacttctctgagatcgaacggactgtgaatccgctctttgtcggaagctgagcaaagctgtggctttttttccaactccgtgtgacgtttctgagtgtagtgtggtaggaccccggcgggtgtggcagcaactgccctggagccccagcccctgcgtccatctgtgctgtgcgccccacagtagacgtgcagacgtccctgagaggttcttgaagatgtttatttatattgtccttttttactggaagacgtacgcatactccatcgatgttgtatttgcagtggctgaggaattcttgtacgcagttttctttggctttacgaagccgattaaaagaccgtgtgaaatgaaccttgctctgacaattcccttgcattgcaccacacactccttgctgcgggctcctgcagccagacctgagcagagagagaaggtggagaagcagcgggtctgcaagccttccctggggcctgcagagctagaaagggaggcccagcagactggcgctggtcagggtaggggagccaggcgggggacgggagcgggcagctcaggcctcagggcagccctgggaggcttctggcagtggtggccagagggctggactgtgcgggcagcttagcagggacagtggacgtgcacctgacgctgacctggactgcctcagtctagaagcaggccagagagcagaggcacgtggcatcccagggcgacctcagacggccagccggttagctagttctgctgttgcttcacgagttctgagcattctctgctagcctatggaagctgcagccctcggaggacagaagtgttgtgcgcccaacagaaccctctgagacgcaagctgctcccttggctagctcatatgtggaaatagccctgtaattcgaggtaactccttccgctcgtgtccacatccctcttgttgagagctcactgaaagtcatgtgcccggggaatgttcctgtgactgnnnnnnnnnnnnnnnnnnnnnnnnnnnnnnnnnnnnnnnnnnnncaaattaagctggaactaaagtcaggcccagccattacgctccccacgtgcagccaggtgcagcctgggcccagtcatgccctggctcatagatgaaatcccttaagcaggattgaagaccagtgaacgcccccgccttttggattttttgctcaattgaccg

SEQ ID NO: 180043 - DNA, 1278 bp, Homo Sapiens
  misc_feature (251)..(589): n is a, c, g, or t
ttgtacaaaaaagttggctaggacacatagccacaaaaaagagcgactattttagacctgtaggtcaagaggtttgaagcagtatattcaccttttacacttcaaaccacttggagtatcttaaagaagtagtatactgtcaaatacttataaaacttccttcttctttgctcttaaagataagacgttgtttagatgaatatatattcttttcctgtgtattctactattcctgcaaaaatttgtttttnnnnnnnnnnnnnnnnnnnnnnnnnnnnnnnnnnnnnnnnnnnnnnnnnnnnnnnnnnnnnnnnnnnnnnnnnnnnnnnnnnnnnnnnnnnnnnnnnnnnnnnnnnnnnnnnnnnnnnnnnnnnnnnnnnnnnnnnnnnnnnnnnnnnnnnnnnnnnnnnnnnnnnnnnnnnnnnnnnnnnnnnnnnnnnnnnnnnnnnnnnnnnnnnnnnnnnnnnnnnnnnnnnnnnnnnnnnnnnnnnnnnnnnnnnnnnnnnnnnnnnnnnnnnnnnnnnnnnnnnnnnnnnnnnnnnnnnnnnnnnnnnnnnnnnnnnnnnnnnnnnnnnnnnnnnnnnnnnnnaccagcactgctagagtgggtatttggctcagttcaggcctgtgcctttttttgatgttcccagagcagagcactccttaaactaggatgagaaaagttaattttaatcctccaaaggcttatttgctagcacaaaaggtcatgaaacacacccaaaactatattgctaaaatctgaaggagagagatctcaacagcagagatggactctagtgtcccaacatagaattgtgtctctggctgaagaaatagtttgttttaggaacgccaatacaaaagctacagaatggaagagttttcccttaactgatctaagggaaaattctttttctcgtgttgttttaggaagctcagaattatttagaaatacttgtgaaatcatggtcacaggagttatttccaaggatgtttaagtagctgctctctgcccattattttgataattactacaccttaatctgttatctgtcaaaagggaaaaaactttctgttatctacctgatagacccatggaatacaaaaaaaatgtgatgacccaatcacatttaaagcttttaaagctcccttttgagatgatttcttagggtactaaaatatcacctgccccagagtttacaaatcagaaattgaatgaggcaggcttatagaggatcagaaaacacataccaaataagagcagccattgtaaaa

SEQ ID NO: 180044 - DNA, 960 bp, Homo Sapiens
ttgggtttttaacttggtatttcagttgttgagtataatactggataaacacttaacattctgagtttataatgttataaacattacatacatgtttaatgctaaaaagtgtagaagatctgaatgcaattttttagtaatgattaattatgaacatagaaattctgtaactttctcacatatcaaggtgtacagctgcctttttttcaccaaaatataaatttttaccctattttgatttcagacatttgacagtataagtttgtaatgacttgcagtgatttttaaatgtcctattaatttcaatggccaaaatttttatccatctagtttttaaataaatcatttttaccttgttgatattaaagaattgtcagcttcataagcctgactcttagctaaaaagaaatgcagctcgatgtaaatttatattccctatgaatacatggcagttctgagatctaaagttatcaacaatctgaaaaagcctttttctatattttaataatttctttataaaatattatttatcttgaatttggcaaattttagatgaaagcctatatgcttgtcgatgtttacatttctagtaaaagaacacttctgatcttttactgtaattctactctaaatgcctatattttaaaagttattattctcatatttaaggtaggtgaactttttttctagttgtaaatatttaagatatgatgaatttctcatggtacattattttccctcccatcccactacctgttttaaaatacagattaaatcggatttctttgaactattatctaatcatcacttggacagtcagtctcgatggagcaaagtaaagacaaagtagaaagtgatccacgttacaagcatagatagttcatcatgagagaagacctttcaaaccgtacattgaaaaaatagccaagaatgtagactcagaaaaagaaaaggagcttg

SEQ ID NO: 180045 - DNA, 1162 bp, Homo Sapiens
  misc_feature (214)..(224): n is a, c, g, or t
  misc_feature (917)..(947): n is a, c, g, or t
tatgtcagtgtgttttgggaacaggttgagagcatagcatgctcatattatatattcattttaccacttagatttgaattgaggcatctcttagaataggttttattttgtgcataccctcagaggacattgtccctctcatagaaacagatattcaaacatgtaatctgctattttattttaaggtaatagatttttatgattactgtttggnnnnnnnnnnnggcaactataggttagcagttgctccagaatctccaaaacaagcttaggagatttttattctttaccagaaatgagatggcttgggaggaaggtgtgtgcattacacacaggttgctctgtggtcactgctccttcatactgtgtttctgcctctgcctgaacccaaacccctcccagcctgacagaaatgttcgcttacgcagctagccctgcctcagtttgtacatctacctgtcggctgagacatcagaagtcgatgtccatgtcagcctctgggcaccccaagatgatgttacctccaatagacagtgaaggagataacttcaaggctatgtaagaaaaatgcacattctttgtgaaactaatgtgtacccactgcttcttaattttgtgctgtggattttatagtctgagattttgttacagttgtccacaaggcgtccttcctccatgtgattttagttaagcacatcttttgtcatgatgtcctcggttgtgtattgtgtgtcttcgtgccttcgcgtactacaaaatgtataagaagttcctgctcctcccaagttgctttcagcatgtggaattttatacatatatcatttgtttacttccaaaactttttagttgcctgttcttcagttacgccagcatatcctttatttctttcgtattggcacagttctctatgtaagcannnnnnnnnnnnnnnnnnnnnnnnnnnnnnnagttagctgttctctgtcctagaatttccctgcattaatcttgtccttgaaaatatatataatactggtcccttaaactccatgaggctttgtctcattatgtattgttcttttggtaccctttcccacttaacttaccttttgctcctaagtcctataaaataccccttggatctggattttttatacccgatttttctccactgtgtataaaa

SEQ ID NO: 180046 - DNA, 978 bp, Homo Sapiens
ttgggccaattatatgtttaaaaaattttgtgtgttacattataagcaatctgtaatttttaatttatttaaagttagatagtggagactttattttggcatgtttttgatatattagaacatacccaatgtcattattataaaacagaaataacagaccaggtagcattcagggatctttgcttgcttcattgtttggaggggaggtgtaggtgggtaataattcggtaaatattttttgtttaaagtatagttcctactttcttgctaaattgagcaagccattgcccttttatagacaactttccttctctcataacagaaagtacttcaggaattgggcgtgattatctttatgagtgcagaataagctctacctttgtatattaagtcagtatattcattactacctaaaggtagaaacaaatgacgccatctttagaatattgctcttatgtgttagttataaccttaaagattttgaactttctcagtttaggagaataaaaagtcgaattctctaagcattatctccaaataaggttgatatatttataaaattaattttgtattgcctgtgatgacatgtgaacattttaactgtttattaatttttttcagccttgataaattgcacactgcactttctgagttatgcttctctataaattatgtaccaaacatggtggtatgggaacatacctttaccccacgagaatatttgacttctcatctggaaatacgctttaccaagtcaattgttgggatgactatgtataatcaagccacacaggaaattgcaaaaccttcagaacttctaacaagtgtaagagcatacatgaccgtactccagtcaatagaaaactatgtgcagattgatattacaagagtatttaataatgtgcttcttcaacaaacacaacatttagacagtcatggagagccaaccattacagtctatacacaaattggtatttg

SEQ ID NO: 180047 - DNA, 2136 bp, Homo Sapiens
ttggccttgagaagaaacggcggagacctgagacccggaggctgaggctgtaggtgggctccgctgggtaaaagttgccgcagcagctgtcccttggccccatcgcgatttattttccccccttgctttccgggtcccgggatcccaagtttgtaactaacgggagcgaatccacacccgagcaaaatgtttgcgagtttcaggcgcccttagttgaaaggctgtaattaacaagtccgctgtttgccagccaggcgccgttgcaggcgctttctgtggattgtcatttatttctcacagcaaccctaggagatgaaattgaatcatggaagaatgcctttatctgaggagtcatcaccactagggagctatggaggctgttatccttgacatctgcagcagcccttccaagctgtggagaccaggtcatctggaatgcccatttatgtcaatggaagaaagaaaaaggggtctcctcccatcctcaccactgcattctcccaccaaccctgctcctgtcccacttcccacaactcagttgttgacaatttaacagtgggtttctggaaacagtgctgcctccttgatggtctaactaactaccagagttattctaacagcaggaatttcaagccaggtaaggggagctatgtcaggctgccagatggtggggaagacaggtgtgggtgagctggcttcagactaaaggaagaggagatcaagtgttggaatcacatttgagaaaaggagtcaagtgaacttcattacccattatagaggcctgttatatcctttagtgctatttggacttggattgaacctgtgacaaatccttttcttacgcttcttccatccctgcttccatgttatatcctttccccttctaaaatggtaataatgagaaataactattactaattaccctagaacataaatttcatttaaggtgtcacaatcagattatcatcttcagtttttcagagccgcaaacttcccatggttatatgcaggtagtactaaatggatggatctgggatcaaactcagggctttctgactttaaaagtcttgttctgctaccctccaagtggcctagggtgatttgccctaaacggttcacctctgtatgatgatgcatccatgcagtggggcttatggaaagtgaatgtggagcctcagggccttaatcttgaagcaggctctctagaagggagcttgcagaaggagtggggactcgatgagatgctgttttctcattgtgtttcagtgatgactgaaaatttgttgccagcgtctatctggaaacaatgttttgatgatccaccaccccatccctccaaaccactttcttgcacatactccagaataatagacagaagaatttaatacatgtgatgctttgccttccatttacactatcataaattacaaagtattgttcacttcacaaaataaaaccatttccagataattttttgacagtatcaagaagtacataaactacaacaaacaaatctgtacagttgggaggagggataatagcagggaagaggtcaaacctccctgtgccaatggagtccatctgcatagcccttgggactgtccaggtcaacagtcacacaatgatgctccacgtaaaatagtcattctcttctgctcactccaaagcaagactggtgagtttacacaaatcatctcaatcaaaggaaaagacattgcagttggattttttaaaaatctagatttacagtttttgatgttttaaatatttcacctatgttacaaaatatagaaatcttggtgtgaaaggctcatgctaagataaatataaccaagtgactggaactgtagtaataaaatcatattatccacacagagctacttttgtcaaggaggaacaaatatttggtaaaaaccaaccttattctcactttaaaaaataggtttgtaaaacaagaatgaaaaacgttggcagttattctgcagattcgcttttcaccaatacagaaatgtggcaaaaatacaatttgatattaacagatgaattcagagggcttggccaggaagaaaagagggtaagtgctaactttttacacagaccagatacatccagtgttctcgaaataatttcagccaa

SEQ ID NO: 180048 - DNA, 893 bp, Homo Sapiens
  misc_feature (194)..(202): n is a, c, g, or t
  misc_feature (343)..(464): n is a, c, g, or t
ttggcatttgtggtttttaaaaaccttatgaattaaaaatgctacaggtgaacaaacagaagcttatgtttagagagattgatgacttaacagtacaattggaagtaatacggatgagcaagaattagttctgcagcttttcaaaataattacgtagagactcttggtatattggattatctgttgtaaacaannnnnnnnncttccctgacacagggtctcactctgtcacccagactggagtgcagtggcacagttctctgcaacctcagcctttgggctcaaatgaccctcctacctcagtctcctgagtagctgggactacaggctcatgccactatannnnnnnnnnnnnnnnnnnnnnnnnnnnnnnnnnnnnnnnnnnnnnnnnnnnnnnnnnnnnnnnnnnnnnnnnnnnnnnnnnnnnnnnnnnnnnnnnnnnnnnnnnnnnnnnnnnnnnnnnnatgagccaccatccctggccaagaaacaaagttttaatttcaaaaaaatctacaaaaacaggataggcattgtctttcaaatgttcagaccccagtttattaaaggatacttcaaatagttggctaaattttatgatctctcccgttgaaaagtaggtgatgattttaatgtgacatgcacaaaaaatccttgccagtttacttctgcaatttaattttagcctttactaattacccacttctgtttaattccaatttttaacagcaggtacataaagcattatgtgcacaatggagttcttcagtgttcctttcagtgatggctttttcatagcttaacttttgttggatttagcaagttgaaggaaagaatgctatgtttttaatacctacatttgagagcatttagaaatcagaaattataataag

SEQ ID NO: 180049 - DNA, 682 bp, Homo Sapiens
  misc_feature (348)..(458): n is a, c, g, or t
cctagtagaaattagaggcagagaagtagatcagtgaaaagattggttataaatcaaaattacaaatgcacctaaaactttggttcacaattccacttctagaaattatcctacccatatagttacacatttgaagtaatttagatgcaaggttacttatagcagtgtgatttataatagcaagggaccattgtttataacagcaaaaccatgtaaatatgcatcaatatcaacaaggcactagttataccacatccacccaattaaatgctaactagttatagcacagaatgagaaaggtttttgtgtacagaaatggaataatggccaaactcagtgacttacacnnnnnnnnnnnnnnnnnnnnnnnnnnnnnnnnnnnnnnnnnnnnnnnnnnnnnnnnnnnnnnnnnnnnnnnnnnnnnnnnnnnnnnnnnnnnnnnnnnnnnnnnnnnnnnnttaggccgggcgcggtggctcatgcctgtaatcccagccaaagtcatgcttttctactcctactccttcccttccttgtcctctttccaagctctctcgggcccatccctgacttcactactggcagaatcctccagcggccggcggcgaggacttctttgtctcccagactccgccttgggctcggacgccgccagggttgcaggtacagactctctggccaa

SEQ ID NO: 180050 - DNA, 1495 bp, Homo Sapiens
ttggctaatacttaatatgtaatgtttttgatacaggaaagatgaatgggagggctgattttcgagagccgaatgcagaggttccaagaccaattccccgtaactatctattaagtatttataattagaagcacttcctatgtaaaggaattttcactgccttgagtaacagtggcaggtgggctggcttcatgggcatgtgcagacagcgccccatacttggtttcatgttctagtcttgttatcttgaaattcataatcatttggataaggagtcccacgtttttattttgcagtgggcccagcacattaggtagccagtcctgactagcagatagtagcattaattctatttgaagtcaaagtttgttgaaagtgctgggattatagttgtgagccattgtgcctggcctattttcagtatttttgtttaaattttgtaaaaaggtaaaataaatgatttttgaaaatagctggagttgttttcatagagtctgtggttataggactatttaactatatattgagtaaaatctatgctatgtcaagttttattcagttgtccctagtagaatatatttctcttttaattctgtatacagtatgagtaactccagtttaaaacactggtattttaatgagtttaaattgtactgttatatattatgatacatatttttcttctggctgtggtttagtttttaaaatttttgatgtccattttaatttttagaaataaaagcttaaaaatatgggtggaagtagatttcagtttgatgattatcttggtgaaagtatagtacctgtgaaatggtggtaataatttgattctttattctattttgattgtagctccttttgtaaggagcatttgtaaaatttagttgctttagagttatacaaatccttttattaccatttattaactgtttgttgttttaggacctgatcccaaccttgaagaaagtcctaaaagaaaaaatattacatatgaggaattaaggaataagaacagagagtcatatgaagtatctttaacacaaaagactgacccctcagtcaggcctatgcatgaaagagtgccaaaaaaagaagtcaaagtaaacaagtatggagatacttgggatgagtgaaaaattacatcattggacatgaaggagtttcaacatccagcttcatctaggtggtcatgattacctgcatgctttgagctcagcagcagtcttcataaacacatttaaaacaagatcctgggtttttgtggtttgacttctatggtgttttaaaaaaacacagatttttagtgttaatattgtgtaaatgtactcaccttaggggattcatttgaatgatggtattataccatgattgtatacagtttgtgaatttgttgcaagggcaaagataactcttaaaaaaccgtcgagattaacaatgctctaaaatcatcttataagaaaaataactgaatatctgcatagttgaattggggtgg

SEQ ID NO: 180051 - DNA, 2513 bp, Homo Sapiens
  misc_feature (134)..(155): n is a, c, g, or t
ttggcacttctcatttccaaggtcagagctctatgatgtctgcaaataacgaatacaaggctattgtcagtccttataaataagaaaatattatttgtccctaattctgtagttttcactctcaaatgcggggnnnnnnnnnnnnnnnnnnnnnngcattaacagtaaccccaagaaaggcatcagggttctggagtggttgtttgagtgacacagcacaaggccttgatttcatcatgcttttgctgtgtatgtagtgtagcttgctgaacaggtatggaagctgtctttgctgttaagtacttctcccgtttgtttatcaacctgcagctaacaggatgtctgcttttttacaggtttatttcacagagcagtgtacattcttgtcttccaggggaacttcaacatggagttacttttgatccctcagttttaattcagtgtctaaaggtttacaagttcaacttactctattttattcagctctttcacttactctgccatcacttcctacttgaatctgagttttagctactgtagaggtctcagacctttcctttttagtactattagccaggtaaaactttggttcttgtgagtggtagggatgagtttttaggacagtattcaaagcctttttaaaggaaccaactactcaaatgctctacaatgccaaaaatacaatactcctgcaggttttcccaagcaaggccaaaacaatcaaaatctgacagaaaaacacagctgttcagctctggaatctgatgataggctactttttaatgtcaggacatccttctaaacttccacttacagtgtcacatgtaagcatgaaggctggctcgttggtgagccattgctttgtttttaggaagacagttatgaatgccatggacaatctcagtacatgttgtttgttatgattttattcacgctaaaggaatgggtattaaaattaagtgcatataatatagaattcagtttcaagtctgaagttagcgtaaatttagattcttcagactaacataaaacatgattttgagaagttaaataggaagatgccttttttagaagtttagcatatttagtttatctcccaaatcttgcttagaaatcaaatgtatataagagaagttagttacagagctagattgattaactacttctttaatgaagatttgctatgaatttgtttactctttcataccaccttcagatagctagtcagttcagcaggagcagagaccaggttagcacgcggatggggtgtaattcagtgtttttgtgttgtacagcctgagaaatgccagtggcctgacagcagcagacattgcacaaacccagggtttccaagagtgtgcccagtttctcttgaacctccagaattgtcatctgaaccatttctataacaatggcatcttaaatgggggtcatcagaatgtatttcctaatcatattagtgtgggaacaaatcgaaagagatgcttggaagactcagaagactttggagtaaagaaagctagaactgaagctcaaagcttggattctgccgtgccactcacgaatggcgacacagaagacgatgctgacaaaatgcacgttgatagggagtttgctgttgtaacaggtgggagtggacagtttcctgttagctgcaacaacaatccaatggttgaagacaccaaacagcaggagagtggttctgttggaccaaaagaaatagaaatatatactgtgtcagcaatgcagaccccctgtcgttgcaggaatcagtatgcatattatttctaacataagtttttctcagatgttttgcactttgttgtccagtgtctttttaaaaatgttatactataatttgcatatcttgggcaagtttgtagatacaagaagtgttttgggtatattctgtggacatgaaaaatgtaagtgcaatctttattctgatttgaagctattgcttaatgtgccttgcttatttttaatgaggtttgcatttttaattttctgacatatggcctttgggtgaatataccgaacatgctacagttaatattttcaaaccaatataccacaaagaggacgactagcagtaaacactgagaaactagtaaatgtggttctgactcagcccagtcactccagcatggaatcttttacccaggacttggttgctctggtttctgtggtcttcattctgagtctgttaaaatggtaaacactgtgtttcacaacacacattttatacattaatgtttttagtatattaaaacagtattcctgtttccaatttttaagaagcagaagcagctcagttcttatagcatttagaatatctaaaatgatttgtccatttagctattgcttttttattcaggtgactacaaaaacatttttagccattctcttaacatgtatgaatatttagaagtagattttttttaagtttattatgtctttatgcaaattcttcactggggatgaaaaaagagagtatgtatattgtttcccaa

SEQ ID NO: 180052 - DNA, 1712 bp, Homo Sapiens
  misc_feature (1284)..(1293): n is a, c, g, or t
ttggctgattcatttgatcaaatatgacatcccaagattatttaagtctatcttcgtacttgtccagtctagctgtcaagggattttaaagatataaaattgctatttagttgttttatttcattggcatcattgtgggatggagaacatctggcccctacttaaatattaccttttctccttccacctccaatgatgagaataagaggttaggtaggtgaaaaaaaatgctgcatgtgctgagtctaggtctgagaaggaatatgtatttgacattttatagttaatactggtggttctcatatggtgccacttaatgtgggatatgcaattggttgttactagtctttgataagtaaaacggagtaaacatttagacctttataataatgtgttactaaaacagcatgtgattacattttttagtaatttgtgttctatggtatttttaaaagtattggcccatgacaaattagaaatgaaaaaaaatatttaaatcccatgtaatttaagaagtactcttccaagatatttccttttcaggctcaaggaccaaatagcaaatacaaatgttttatgtatgaagggattcatcattaaaatttgtctttgggactttcccactagtttaaatgtatttgtcaaaaagtctttggtcatgtcaaccccagaattgaaatgctactgccaaattgtttataatcactcatagtaagagatcaggactgcaatgctccactgattgggcatgccaaagaaataaactacaatgttgtggcatttatctttttatattgcacttaaccacggaagaaaaaaccttttgtatcattttaaggtaaaggccgaggggcaaagaaaaggaaagcatctggctctgaaaatgaaggcgattataaccctggcaggaaaacatccaaaacaacaagcaaggtaaccgggaacatcattgcatattagtgcatggctttttaaaaaaagatctgtaagtgacttagtttgcttatgactatagtcctggaacagctttccacctagcatctcgtatcaatatggggcttgtatttggttaagaaattattcaagtataaatttatataatcaggactatttcctaaataactgtgctataaattaacctacttagaaccttccatttcatccactgaactgtagtagtgttatgctacctaaatattagactctttcagactaaaatattatttttcagactaaagactgtttccttttaacttggatttatttgaccagggctaatttgannnnnnnnnnaattgaattcatttgactgtggctgatttttccaattagtctgacccttttccagaagtacactatttcttttaggtaaatgaatgacatcagctcccccgcatccctttttatgttgatttccacattgacctcttccattcagtcatcttctatgtctcaggtccacctcggtgatgctttgcatttttttaaacacttacagtgcacacatactacacacggtgcaggagtcttgtttcctcccatgaattcttgatatgtacttaccagtagacagcttgaatttttactaatctgggcattgtgcatactttttgggtaatatatatttcagaaataaacgtgttacatttttcagctagaacttggtaaatatgaaaccaccaaggtggtgaattactgtatgtaatcttttt

SEQ ID NO: 180053 - DNA, 873 bp, Homo Sapiens
ccatcctctgcaaaagccaattctcagtattcctaaaaccttgctgttttttgctggttttacaaatctgactcaatgaataaatctttattttacaaagaagaggtgatatttctgatagatgtttctgacaggccattttgttactccctccccagactgacttgtgagttatattgttagattctgctgccatttttcttgatgtgttgcttaactagattatattttcaggcatccgtgtacaagatttgcagagaaatgtatgacgatggagtgggtttaccctttcaaagtcagcctgatcttattggagacaagtatgtgataagtatttggatttgagagtagacctttcatagtgaggcttatcaggttgaggggaggtgatgactggaaatatatttatttattttaaatcccactttggctttagtaaaatctgaatatgtgtgcatttctagtttcttacaccaaatgtaggttccgtaagttcatgcaagtacagtgggtcttggatcactgaagtctgaattttatattagcaactgaaaagtttactgtggcctctttccttctgagcaggttagtaggagggctgctttccctcagcctggattactgctttgtcctagaagatgaagatggcatatgtggttatgccttgggcactgtagatgtgaccccctttattaaaaaatgtaaaatttcctggatctccttcatgcacgagaagtataccaagccaaatggtgacaaggaactctctgaggctgagaaaataatgttgagttttcatgaagaacaggaagtactgccagaactttccttgctaatttctcttctctgataaagatggacattcacaaaaaa

SEQ ID NO: 180054 - DNA, 2908 bp, Homo Sapiens
  misc_feature (1586)..(1594): n is a, c, g, or t
  misc_feature (1618)..(1645): n is a, c, g, or t
  misc_feature (1873)..(1881): n is a, c, g, or t
ttggctccaaacatttgcctttatgtcttactgttagctagcgttattgcctattaagttagttaactggtgaccttaaatagagacttctgtattccatgtgtatgttcagtgtattgcaaagattattataatggctggtcagaggaaccagatactgtcatacttttaagaaaagtatatttagctctgggcaaaataacatcaattggctctccttagttctcagaatctgtcagactggtattattagccaagtctgattttgaattgtttttgtccaaaaaaatttttctcattatgtttcattttgtcaacttaatttcttgtattttattctactgaccttagttttctgacaagattaatccttctcccccgcccttttcccttacctgtacccttcctcaaaatgtaaaatgtgacttcagacaggttgaattccttcatgggctgtgataataaagtgtctaattatcagtcattttagttaatagttactataattttatgacagagcaagcagctagcttgatttgtataatatctagggaatatataaagttgactcagacaaacttgggacttactttccttccagtaattaaagagtagaactgataatactgattattcattaattggaggaaggaacattagtattgaaatgccgttaacattttaaaaaataataattattatcatagccttgccctgaaaccctgattattgttagagagttatttccacgaagtgtttgtcagtttgttggacatttgagaccccaggaaatcccctttctcgtaacgttctccgcttggatctgatctcaacagggtgtcgtagtcattcttcagcacaattcttaattggagaccaagaaccctgggcctttagaggtggtctagcaggagagttccaggtatcaatatgaattcacaactgaattgacattttctttgttttatgagaaaccttatgttgcgcatcagatggctggaaggattggtctgccgaaggctttctagtcccaaattcaatttagttacatagctggatttttaaatcaaattttcctcctctttcacagtaatttctgaaggagatgctgccaatcccccccgcgcctgcgaagcgcagcggctctaggtatacacttcacattgtttctttgcaggtcgcacagcattttaatctgcgcccgcaatgcacaatgcgcgcatgcttgtctgccagtggaagctccatgaacaaaagatagtaattatgccaataaatggtgaaagagcttttggatatttatccaattattttataaatataatgtgcttgaaagaattgtccattgctgaaaatatgaacaaaataggaagtttttttgctgctggaatttgttcatggactttctaggtgctctacttttctccccccaacaggtgctctgctgcgcacagcaaactgaagcgcattgctttggggataaagcgtctcctggacagataaccctcttcagaccaaacctctcctcctgacattctgttctgccatcttatcgtagggagatggtctatctaagataggttttnnnnnnnnntagatttgtcataattggaatagnnnnnnnnnnnnnnnnnnnnnnnnnnnnactgtaaatttaaatccccattaatatgccactaaagctgtaactcagagtgggtaatttctattcagaagcactcctctcctctagcaaagaggtatttctattagtaaagcatagtacacctctcttctttggtctgcctgcagtagccagttaatataagttggtaatctgcagtgcacacccatttaaaaaaatggataccttccccaaactaatccatctccnnnnnnnnncttcccacagcgtttgctgccaattgatggggcgaatgatctcttttttcagccacctccactgactcctacctccaaagtttatactatcagaccttattttcctaaggatgaggcatccgtgtacaagatttgcagagaaatgtatgacgatggagtgggtttaccctttcaaagtcagcctgatcttattggagacaagttagtaggagggctgctttccctcagcctggattactgctttgtcctagaagatgaagatggcatatgtggttatgccttgggcactgtagatgtgaccccctttattaaaaaatgtaaaatttcctggatccccttcatgcaggagaagtataccaagccaaatggtgacaaggaactctctgaggctgagaaaataatgttgagtttccatgaagaacaggaagtactgccagaaactttccttgctaatttcccttctctgataaagatggacattcacaaaaaagtaactgacccaagtgtggccaaaagcatgatggcttgcctcctgtcttcactgaaggctaatggctcccggggagctttctgtgaagtgagaccagatgataaaagaattctggaattttacagcaagttaggatgttttgaaattgcaaaaatggaaggatttccaaaggatgtggttatacttggtcggagcctgtgacatttgttgacactgtgaactgtccaaaagtctcttaactgcaccttgtgaatggtagttgaggtcttcatacagttcagcctctagaatggtaacaaatcagccaattggattcgaaacaaagaagactatgtaaaactcacccatcacactttgagactactcactggttggaagaatatagtattgcagcaaatcctgtatgaaagagagatgtgggcttcctttttgagtcttgtgttagtgctgagaccttttacatgggcttatacaggggagagagtcttcaataaatgtagtcagcactattttctgcatccagtgtggttgcgtttc

SEQ ID NO: 180055 - DNA, 1014 bp, Homo Sapiens
  misc_feature (736)..(763): n is a, c, g, or t
ttggctttattttacaaagaagaggtgatatttctgatagatgtttctgacaggccattttgttactccctccccagactgacttgtgagttatattgttagattctgctgccatttttcttgatgtgttgcttaactagattatattttcaggcatccgtgtacaagatttgcagagaaatgtatgacgatggagtgggtttaccctttcaaagtcagcctgatcttattggagacaagtatgtgataagtatttggatttgagagtagacctttcatagtgaggcttatcaggttgaggggaggtgatgactggaaatatatttatttattttaaatcccactttggctttagtaaaatctgaatatgtgtgcatttctagtttcttacaccaaatgtaggttccgtaagttcatgcaagtacagtgggtcttggatcactgaagtctgaattttatattagcaactgaaaagtttactgtggcctctttccttctgagcaggttagtaggagggctgctttccctcagcctggattactgctttgtcctagaagatgaagatggcatatgtggttatgccttgggcactgtagatgtgaccccctttattaaaaaatgtaaaatttcctggatccccttcatgcaggagaagtataccaagccaaatggtgacaaggaactctctgaggctgaggtaatacaaaggttaagaattatactatggtaatggtcnnnnnnnnnnnnnnnnnnnnnnnnnnnnttaaagtacttactaaaatggaaaagtacatagatacatcataaaatcttagtgctttctaaattaattttcttgcagaaagaattcttatggcttattcttagcatgacatttttcactgtttccccaatattgggacagttttttatttgggagtactattgtaatatttcctcaggtgaaaacacaataaagacaaagaacatttttttcctctgttttaaagtttcatacttaaagatgttatggtc

SEQ ID NO: 180056 - DNA, 871 bp, Homo Sapiens
  misc_feature (616)..(724): n is a, c, g, or t
ttggaggggattcgccagtttggtatgtatggactcacattggtgaccattagtgatcctgacaccatggcctccatttctgccggcagtacaagtgtgaagcttcctcctggtggagtctgtatggaatataattttattcatctttactgtaatcagtacaaaaaatgctgaaaaaaatccaggagggcttgtctctttgtgggtggtcactgtgatgttgggccagctcctgttcaggtccagagctgctaacgtgggttctactcaatcccagtgacttggccagaatagagctttgccaggtaactgccctgtgctaggtgaaaggggaaaagcagtagctggatatatttcaaatgaggttttgaacaagttcagaaagtggaacttgattgaaaagtgaacaagtgtagtagtgtgtgagaaaattcagatgggtcggatgcagaagttaatattccacttaatgttatctgagcattaaaaatcatcagcatttaactgagaccccactatagagtttccttatcaagactttttggttttaaagttgtttttaatgcattgcaagttacaatagctattttgcttttagatttttcccagctagttnnnnnnnnnnnnnnnnnnnnnnnnnnnnnnnnnnnnnnnnnnnnnnnnnnnnnnnnnnnnnnnnnnnnnnnnnnnnnnnnnnnnnnnnnnnnnnnnnnnnnnnnnnnnngtgtgaaccaccatgcctggctttgttgtagtttatttctaagttcaaattaatgttggtgcctgagagcaaatggagaaaacgaacatttcctcctttttcttggcagatggtttactaggtgagtgtgtcctcgattattcaaat

SEQ ID NO: 180057 - DNA, 1046 bp, Homo Sapiens
cagtatttgatgtattagcctgttcccccaccttttctcatttccccttttacaggaagctttcccttctcctgaatgccatggtatagctgaaatcgatattgctttctgaaagatttggtggaactcacatgtgggagttcccacaggtgagcaaaagggcttttattgggaaaataactgacttaagcaaataaacaagaggtgatctctgaatggtgtaaatcactttctttaaacattttctgaaatattttaaaattttcacaataaacattcattacttttataattagatttaaaagaatgtcattttcagctgggaactgaaaaggtaaaaagaaaaggggacatattatttctaaaaaagagaaaagccataacaagagaaaaaaatcattcgatcaaggaagtttcatcagagatgagccttacaggataaatcagaatctgtcctccaactctccccaaaagaagtcttaactgactttttatcttcagtaccttgcctgcgacctattaagtgcttactgaagttaaatgaagtcagccatcaattccatgcaaatagacagcataaataaagaaccaaggaatgaagtaacatggaaaataaactattctgagtgactacaaaataatacacagttgactgttaataggttcaaaagataatctggggtcaaagggcaaagaataatttatggaaagccaaagaatttggactttattccactggttgctagaagtagaatgatcagatctgctttaaagagacctctgggcaacaacgtgtataataaagcagagtatggaataaaaaataccagtcaggaggctatcttccaaagttcaaatgtgagacgacaggtctgaattaaaaggagttacaggcatgatggagctacatataaagaatttgagagctgaagtagagtcagtggaaaactaatatggatccgccactgattggctgaaaaggggaaggatgttatctaaatctgaattatgttgaacggagaagaaaagccaacttttttgtacaa

SEQ ID NO: 180058 - DNA, 2587 bp, Homo Sapiens
ttggcttttctctcattgtttcctgaattattcgcattggtagaaatatattagggaaagaaagtagccttctttttatagcaagagtaaaaaagtctcaaagtcatcaaataagagcaagagttgatagagcttttacaatcaatactcacctaattctgataaaaggaatactgcaatgttagcaataagtttttttcttctgtaatgactctacgttatcctgtttccctgtgcctaccaaacactgtcaatgtttattacaaaattttaaagaagaatatgtaacatgcagtactgatattataattctcattttactttcattatttctaataagagattatgtgacttctttttcttttagttctattctacattcttaatattgtatattacctgaataattcaatttttttctaattgaatttcctattagttgactaaaagaagtgtcatgtttactcatatatgtagaacatgactgcctatcagtagattgatctgtatttaatattcgttaattaaatctgcagttttatttttgaaggaagccataactatttaatttccaaataattgcttcataaagaatcccatactctcagtttgcacaaaagaacaaaaaatatatatgtctctttaaatttaaatcttcatttagatggtaattacatatccttatatttactttaaaaaatcggcttatttgtttattttataaaaaatttagcaaagaaatattaatatagtgctgcatagtttggccaagcatactcatcatttctttgttcagctccacatttcctgtgaaactaacatcttattgagatttgaaactggtggtagtttcccaggaaggcacaggtggagttatttgtgagaagcaaagtgtttactaatgacaaagtagtaaaccattttcaagatgaaaactgatttctatttattttgcttcaaaggtcctgaaaaaataagcaattatcataacaatttgttattgatactggaggtttcattgacatgtctctcaaattaaagctcacactgcctccataaaagtcttcaacatctaatttataagctttacaagtatttattttataaggcttagacagaattattggagttttaaattaagtgtattggaaaagaaaggatggtatgtgtatgaaatgttaagatcctacgcaacactgctatttttttcctttaatatttgtgctgcataacaaaagccactagactgttactgtcttgtctgtccatgtgttaacagcatttcttaatgatgtatatatggagtggtcttcaatcatagtgaagaatttaaagagaaagtcaattgtattggcatttttaataagaacaaaattagttcgtctaaggggactggctggccacatatttgttccttgcccatatgctttctacttcttgttcttattatgaaattatgaatttgaagcctctgaaatggtgatcagttttcaacatctttcaaaaacaaaattactatttcctccatattgccttttttagataactttaaagttaggattttaaaatatttgtaactggctaaattttaaagtcgtgacaaataattacttaggttcagaaatatacacacacttactctttagccagtttctttcaaggtttactgtcccatcagatatctagccattttcctttgcaaattacataccttcttaagagtgtatttttaagattattacttatgctttatgatgatatagtttttcaaaattatttatagcttcatatgatgttttgtaattttttctattgatacctgttttaaaaatattttccaaggaagttgattaaaattatatttgttaccttttagaaaaagcattgaaatgagtttctcttgctttttcattttccctctgctttatatgctcttcgcaatacatcatgtccaacgggatacctattgttctcatgacacccaaaattgatgagagcaaaggggtcgcaccatatggaaatgttgaaaactattgtaaagtagtattatgaagtagcttttgtgtcattcatgtcgatgacatgaaagtgaagtaaatttattctatgtaaattcacactaaaaccagtacagtaccataagtagaatacatgtaagaatcacctagtcttcactatattgagtaaatataacatgctaattttacaattaatgaaactaaacttttaaacatctccattatatctacatccttttgaaggtatttatcatagttgccaattttaattttaggattgactttctctttctgaatgacttcataaagtttggtgtgaattttgaagacttgggttactaatgattgtatctttgctagtcaacaacttatgaaatatactcaatgcgtctgatgtgtcattaagtgcagaaataactaagacacaaataacctttgcaaaccttcaagctgtgtaatattccaatgttgtttttttctttgtatatatacttatatcacgtaggatgtaaaaccagtatgaccttgtctagtctccaaaacttaaataaacttttgaaaagctgggg

SEQ ID NO: 180059 - DNA, 1170 bp, Homo Sapiens
  misc_feature (959)..(970): n is a, c, g, or t
ctttgtacaaaaaagttgggctttgataggccataatattttgaaatgttggtcccataatgattgtgctagttcataagctttgttgttatgagtgtaatcataaaaatatttccaagcagtttttgacctttattctacatttctgggcatttgtaatatggtattctactggtatatatttttaaagtttgcgtttagattatggtaaagaaatttcaagcatatttcttctaataaagtattaagacagtgtttcagaatatcaaggcacacctccttagttgttttagattagaactctagaaacaattttgtgaacattgaaagtattttgagttaagcctaagctgattaatcacacaatacatacttttcctgcattttctttcagtgacatttgagaattgggtgacattttaaaatgtgttttataccatttagcttttgcaaacaagttctaaagttttggagaaaaagtgatgtggtcaagagttgaagtctcatatatctttagtagcactcccatgaattatttccgtgacagtaacaagtgtgtgttccatgtctgatttggggcactggttagactgcattaatagctacttgattagaattcgaacttttaaaattttgaaatgtttaagaatgtattagaaaatgcatgctttatgttgaaaaaatacattgctttaatattcctcattcttgagttaagaaatttatgttaattttgcatgggcacaaacttaatcagaaacattttgtggagttacatttcctcttattatttatcaaggttcagtattgatctttgaaaccttggtcccgttaacttactagtcccatttgaccaatggttttatagaaatgcctagaattttgagactaatagtagttatccattaacattccaaaagttttgtgctttttaaaatttgttttggtaattatcacannnnnnnnnnnncccttcctttaaatggccccagggtgtactgctggaatgttccatccaaaaagatgtagcttcagaagcccagtgattgccccagggtccctgagatattgttttttttatgaagttggagggctgtttacggaaattatacttttaaataaatatgtatgtagggggtaatattttttaataaattcttttgataaact

SEQ ID NO: 180060 - DNA, 1095 bp, Homo Sapiens
ttggcaaagagctacgattacaggtgtgagccatcacccccagccaaaagttctttaaatttatcttcatttttctcattgtgcggcagtgctctaaacttcacagcctggcccccttaaaggatggcagcccttcggtgaagccctttaactccgctgcaggccgcagtcctgtgtgctctctgcctgactcccctctagcctgtgttgacatgggggtgcactcaggatgcccactggtggggcctcggcctgagactgcttacgctggggaagtagggtagtgcgagtgactccgtttctttggacctgcggttgagctggcagcagaatggaggggtccgagaaacgggtgagtgtgaatcccttgcagaaatgctctctgggggtctgcccttgaatgttaggcggcatgacaagtcaaatgcagtccaccagggtcttcacctggaaattgactacttgtactttattctggaaacttagggcagagatttttgttagaaaacccagaatgagcatctcatactggacttaaatgcttaactgtgtattttattttgctatactgtatttgtacacagtcttctaagccatgaccgatctgcccgtgtttcacttaagagagaattaaggaaaatcatccagaattcccactccaaaagcccaagctctgcagccctgcagtgtggttttgctccatctggagagaacctcacacagactcccctgccaaaatgatgtaacatgatgactcagggatgtgagcgtgagaggaaccaacatttagttcttatacccacatatgctgtgtgttgtgtgattaggtttatttaatgaacttaatgcaagctgagaggcttgacaaaacgtcccctttgtggactgaagtagctatctttcagagaaagcatgcagatttagttggtgttaggttgtttatgttgaataaaaatctatttaaagacctggctgactgcattcagcctttcactgtctgcacttacaataaaaaagaaagattttattatgcatgacagagatccagattcttagagattgcctctttccctctggtctgtgaatctgccagaa

SEQ ID NO: 180061 - DNA, 2412 bp, Homo Sapiens
  misc_feature (1650)..(1683): n is a, c, g, or t
  misc_feature (2121)..(2133): n is a, c, g, or t
ctttgtacaaaaaagttgacaaaaaatttgggcacttctttgaccagacttatcttaaaaagtccacttttgttaaaatgtagtcacacctctgatataatccaacaagaagtgttcaaaatattttaaatatttgtgcattttataatcactaaattaatctctctctcttctctttgaacagcttagcagtgtctgcaaaaacgaatcttttcctacaacctgttaactgactggactgttggtaacaaagtaattgtgagaaccatgtcggtcaaaaatttggcatctgctgaaaaaaatgaatgccattttcaagttcccaaattacttctatactgatttcactttccagaaatggagatatgaaaagattctctggaatccttgaaagacttaatagagatacatgagactaagttaatcttggaacaaaattatactttttttgtctttcatgggagtgatactcagttattgcatatctttacaaaattgtaacctttggagaattacagtatttcatcaagaaattagagtttttacataatcaagagcatattctatggaattaacatttagtggactagaattacataagcaggccatcagtgatcacaaggcatatgagtttgtatttatttcctggaacatgagagctaatttggagtacagacagacaccctgctgagtagaatataaaagttaatgtaaagttctgaactataaagagtagtccttttaaatagatgcattgatttgtatatctttgaaaaagttgattatgattaaatgtgtgggtagttaattacaatttagggtaacaaccaggatgtatggattcttgaggttttggcttcttgagctttctcttgagtacttgatactgttttctgaatattttgaggtttctaattaatggtatgctagtttctactgttttatataaaaatttatctagtgttgtataaggactttagtattgtggatgatgggagtggctttttgtggcatatggttgttttaattgaaatattttttcagtttattacaagtgtgaaaaaacactcaaaactctggattgttttatttcatttttgttggattatgttaatacattccttcacgtggtttagattgagtcattttatctcacttacttggaaatgtgcagctgatagaagagggattgggtaggagattggcttttacttcataataaatatacagttggttattgtattattcaaaacttattaaatccattcagtttcttaccattttaagtgtattcagtgcctgtgaagccaggcagcagagtattcccactggcttaaaacttaggcgctgatgctcctacagtacagctagttataattccagaaccaaaggcaccaacattatttggtgaccttaactactactttgatagaacagactgggtaattcactgataatgagtcattacctttttaatatgtgattatctagttcagcattttgaatgtgtagtttaaggtctgatttagtaaaattttaaagctaaataatctgatgactcttgaaagtttaattggtagtatgacatttatgtttttttcccccagactcacagccaatacaaagttttgagactcctaaatgttaatnnnnnnnnnnnnnnnnnnnnnnnnnnnnnnnnnnacttaccacctaagctgcggatcaaaaagggaattcttccattagaaatttgtagtgttgtgtggccagcacagtatttttcagatttgaatttcagtacctctgtgtagcctcagtactctcaacaccagtcactctttattgtcttaaaatattccatactttttgttgacccaaaattgttgaaaatattttgctcagttttcacaatgaactaattgaaaagtgtagttactgtgttgtaaacatttgtgtagttctgttaatacactgatttgaattttatttatctcaacttcctttagcgtctgcctccaaattttgtctttgctgtatacccactgagatcaattccctagacccctctggctcttagtgtactataatttgggctttataaaatatattgtcttaatttaaatagaatgtgagccctcnnnnnnnnnnnnnaagccaaataactacacaaagtaaattataaaagatttaaatagtttgtctacagtgactagactgaaatataaaaattgattgagggtagtttacttcaggtgctagctacaaatgactaaatgtccttaaataatgcagatatctgccctctgaacaaaaattttggcaaagtaaatttgtagcaacagacttaacatgatttatcgcttatgttgcccatttctgctaatggaaaagattatttaaaaatatgtggcagaggacagatattagaaa

SEQ ID NO: 180062 - DNA, 1435 bp, Homo Sapiens
ctagttttggtgacttagtgattttgtcattttttacatcaacttcatggtcttgtttttacatggtaattgcatgtacttaggatctatctaataggggctttaaataaatttggtcatatttatgtgtaagcacattttactgtaaatgtttgggtttctgaatttaaacagatctgtttatttcagtatgtagtaaacaatatcttaaagtgtccgattcactacttgttaattaaaaaagttatgattaatgtgaaactgttgtcttactatttttagaaaattgtgttctggatgattagcacatggataaaggagatttctggaatataaaatggattgtttttgaaatttctaggtttggctctatttactgtaatggttgaaaacaatttagtatttgggtgacccttttgtttttcttctaaatgtgcctctggtaaaatacagaactagactaaagatgtagctttttaatatttgtcttttgatggtggcaggagttcatacattaattgaactaacacatcatattttgacctactatttctatcatattgacttactgtttctgcacttctttgaccagacttatcttaaaaagtccacttttgttaaaatgtagtcacacctctgatataatccaacaagaagtgttcaaaatattttaaatatttgtgcattttataatcactaaattaatctctctctcttctctttgaacagcttagcagtgtctgcaaaaacgaatcttttcctacaacctgttaactgactggactgttggtaacaaagtaattgtgagaaccatgtcggtcaaaaatttggcatctgctgaaaaaaatgaatgccattttcaagttcccaaattacttctatactgatttcactttccagaaatggagatatgaaaagattctctggaatccttgaaagacttaatagagatacatgagactaagttaatcttggaacaaaattatactttttttgtctttcatgggagtgatactcagttattgcatatctttacaaaattgtaacctttggagaattacagtatttcatcaagaaattagagtttttacataatcaagagcatattctatggaattaacatttagtggactagaattacataagcaggccatcagtgatcacaaggcatatgagtttgtatttatttcctggaacatgagagctaatttggagtacagacagacaccctgctgagtagaatataaaagttaatgtaaagttctgaactataaagagtagtccttttaaatagatgcattgatttgtatatctttgaaaaagttgattatgattaaatgtgtgggtagttaattacaatttagggtaacaaccaggatgtatggattcttggaggttttggcttcttgagctttctcttgagtacttgatactg

SEQ ID NO: 180063 - DNA, 1245 bp, Homo Sapiens
  misc_feature (762)..(817): n is a, c, g, or t
  misc_feature (874)..(910): n is a, c, g, or t
caactttgtacaaaaaagttggctctcacttttctcccccgccccccatagtctttcgtcattcacccactgagtgtttggggtagagacttgtcccaaagatgtcttctggtctttggcagagcccctaaggcttgagccctggttggagaggaaacagtaagactctgctggagctccctgcggtggctggaaagtctaaggatctccttggggacaatctgcccttcataaaaaccttcctttatcaaagacacctttgagttctttttgctagcacttggctcaagagcctcatctccagtgggtctggtgctgcccttttccacagtgtggtgggggtctgggcagtcttgacatgacagtctgctgtccaagcatctcaaagccattgtcagtgggcatcagtctggccattgaagaaaggagggttaccttgttgaagttgccatccaaagttggttttccttgtttcctcgagttagcaaggaaggacctgggaggactagatgacccagtttggttggcagtttgtttggcttggtgtcctctcgactcagacggtgaaagagggggtatgaccaacatctttagggggctgagaggctactgaactcctcttccagcttatttctggttaagctaatacacaggtgtgatacggagtagatgacttttccctgctctgatgtttagttttatttttttctctaacttgcattgattctgcttcgtttttgccgtttgccgcttctgttttgnnnnnnnnnnnnnnnnnnnnnnnnnnnnnnnnnnnnnnnnnnnnnnnnnnnnnnnnttggaggctaagctaagactgccccatctaacctccttcccccctctctgtggggtnnnnnnnnnnnnnnnnnnnnnnnnnnnnnnnnnnnnnatacagagctcgctgcccaaatcattcaagaggaagatctccgttgtctcagctaccaagggggtgccagctggaaacagtgacacagaggggggccagcctggtcggaaacgacgctggggagccagcacagccaccacacagaagaaaccttccatcagtatcaccactgaatcactaaagagcctcatccccgacatcaaacccctggcggggcaggaggctgttgtggatcttcatgctgatgactctcgcatctctgaggatgagacagagcgtaatggcgatgatgggacccatgacaaggggctgaaaatatgctcggacagtcactc

SEQ ID NO: 180064 - DNA, 1291 bp, Homo Sapiens
actttgtacaaaaaagttgggtgcagagatacgtctggtagctccaaggcgtcaggggacccaggccccttctgtctcattgtgctgttccagtgcattgcttttctccaaaatggggcaattggccaaatgctgtctacccagcaaaagggagggcacaccacttccctagggtccagccagggtgtggcacttaccgcttctgttcctgtaccattggccaaaatttagttccagggctgcgcctgctgcagggaaggctggaaaaggtgatctatattgtcggtggcccagataaaagttgggggttctattgggagaaagggagaatggccacagggatgctagtagcagtgcctgctttgcttcctcactagaccgtactggctgggaatagctgcccatcactgtgtgccctgggtctagaactgtaggttcttgatacatccttgtaggactaagtccctgcatgttgctgggactcaacaaactgagacccagttgcttttcaaccaccaagactctctgatagctgcatctcttcatttcctcagttgggaggagggtccagaggctgaggaatgccttgtcattggaatctctttgtccctgagtttcagaagcaaatagtgaagctttgggcagaagaggattcatgggaaaatacatccaaatcactttggttccttcctttggatagaaggaatttggatcatgagggcccctgggtgtcctcaagtggccactttggaaggctgggtgggtggtggctgtggcattgtggatgatggacaagcttgtggccttggtgaggagtgatggggctctcggtgtttgcagaggaagctgcctgaacaggacatcgcacaaggatcctacattgccctgccattgacgctgctggttctgctggccggttacaaccatgacaaggtaggaaatccagaggcctcaggagatggcgggcatgtcagggagagcgagtcctcacagctgcaggagtgatagcagagggatgtccagggtcacagaaatcacatttccgggtcgggagggcccgtgaaggcctcaagtccagacttaggtctcctttcaaggctgtaaacttctgtaacatctcctaatccttaaacctggaacacctctagggacatattaagcccggagagaggccagcccatccctgggggactcatttataagagggcctgcctcgtttgaactgaaaccacccaatacacgtggcagctgctgatcatgtctgaagaagtgtgttgagaattgaggctcc

SEQ ID NO: 180065 - DNA, 1836 bp, Homo Sapiens
  misc_feature (456)..(467): n is a, c, g, or t
actgcacctggcctgcatctttatattattaattgggattacatcatatgttttcctgactttgtaacacagacgttttcctatgtcattaaacactcttcaaagacatcattttgatagttgcctggtaatctattatttggatacaccatcattaacttgatcatttcttcataatgaattttgtattatatcttatatacagtatattataataaattttcttatgtttacatccttaaacatatctattattatttccttgggatgagtttcaggatgtggaattactgaataaaagagtttggtctatttttaaggttactaacatataattccaattcctagatcttgccaatttctacttggtggtatcatcactaatcaacaattttttcttcctatggttttgttccttaggagaaaagggactacacacaatatagtctgcaagannnnnnnnnnnncagaagattatattctttcttgatagctgaaaatagtacccatgctatgggaacattagagcaagtgtttcaatgcttgggggtggggggctctccagagggacaatccctgaagagatgcattattttttatttgtgcctggacagctgaaggcattcactctccatattcttttactggtttgaatcaaatgagcatgggagatatattttgccagatatgttaatgtacttttaagtggaattgtatggagattactaaggagccctgaggtctagttacacctctgagctttaatttctcatttgtaaactgaaaagtttggactagataatttctaaagcccatcactgctaatagtgtatgatgtccctggtgacttctccttcctcttctttctggacacctatcatatctctctaggtatttttgtttttgtgtttatttccttagatcatcttcttgagggaaagaagctgaagtgctacataagatgcttgtgcttcataactctcagaagctgcagattctgtataaatccttagaaaagagcatccctgaatccataaaggtatatggcgccattttcaacataaaagataaaaaccctttcaacatggaggtgctggtagatgcctggccagattaccagatcgtcattacccggcctcagaaacaggagatgaaagatgaccaggatcattataccaacacttaccacatcttcaccaaagctcctgacaaattagaggaagtcctgtcatactccaatgtaatcagctgggagcaaactttgcagatccaaggttgccaagagggcttggatgaagcaataagaaaggttgcaacttcaaaatcagtgcaggtagattacatgaaaaccatcctctttataccggaattaccaaagaaacacaagacctcaagtaatgacaagatggagttatttgaagtggatgatgataacaaggaaggaaacttttcaaacatgttcttagatgcttcacatgcaggtcttgtgaatgaacactgggcctttgggaaaaatgagaggagcttgaaatatattgaacgctgcctccaggattttctaggatttggtgtgctgggtccagagggccagcttgtctcttggattgtgatggaacagtcctgtgagttgagaatgggttatactgtccccaaatacagacaccaaggcaacatgttgcaaattggttatcatcttgaaaagtatctttctcagaaagaaatcccattttatttccatgtggcagataataatgaaaaagcctacaggcactgaacaatttggggttttaagatttgtccttgtgctggcatcaatggaaatgcacccccaagaaa

SEQ ID NO: 180066 - DNA, 1123 bp, Homo Sapiens
ttgggacacaataatattccagtttatagatctatcacgttttatgtatccattgataaattgatggatatttgggtagtttctactttttggctattatatgtaatgatgccataaaaaattctgtacaagttattgtatggacataagatttaatttctcttggatatatacctagaagtaaattgctgggtcatttgataactgtgtttagcattttgagcaactaccaaactgttttccaaagtggctgccccttttacattcccattagcaatgtatgagggctccagtttcttcacatccttaccaacacctgttattgtccatccttcagtaggtgtgtttgggtaacttttcaaaacttaagcagtaagcagaatttttttcttataaaatattagcattatgtagctcagactaaagaccccatgacttccaccatagtcagttcctataccttacctggaaagaacgttgttttgtttggtatggttttttaaagaattttttgaagttctcaatgtaggtggctttcaatatagcctccttacattaatccaactgttttcatataagcattataataaatttgattagttttttccttcccaacctctaacagtagaatgtgacatttaaaaaaaattacaatatccattaataaagatgatactaagcaagaaaatgaactaaatgccttcagtaaaggtttattgtcctatatattaaatattatggctttaaaaataacagctattagtctccatgtaatgaaacattatcaataaaactaatattcctcttattcttagtgcctggctctctggctatgaaaatcctgtggtgtctcgaattaatatgagaatacaagatctaacaggactagatgtttccacagcagaggaattacaggtagcaaattatggagttggaggacagtatgaaccccattttgacttttgcacggaaagatgagccagatgctttcaaagagctggggacaggaaatagaattgctacatggctgttttatatgagtgatgtgtctgcaggaggagccactgtttttcctgaagttggagctagtgtttggcccaaaaaggaactgctgtttctggta

SEQ ID NO: 180067 - DNA, 2651 bp, Homo Sapiens
  misc_feature (108)..(141): n is a, c, g, or t
  misc_feature (1830)..(1838): n is a, c, g, or t
ttgggttatttttatccaaaacattatagagtttatctcagatatactgagtactgtcactcagtctgtaaattacccccagagggtggtttgtttcctcattccttnnnnnnnnnnnnnnnnnnnnnnnnnnnnnnnnnngaagtttactaaatttaaacactgacatcctgtgaagatgccagtctttacaggcgtttgtaaaagtagactgtggggagtatgttacactaatacaaagttttacaaatgaatacaagtgaaatatataaattacaatgaaatagaggaagattgtggctctgtcctgggttggttcttttagcagtcatattgctgtagagaaaataaaataccattaggctataatcaggataaataatgatgacattttagtcctttaagttcctattttaagcaaacataaacagactgatcttagcttcagcaaagcttaggccaaccatacttagggcttggacaatgctcacaaaatgtttcctaaacaaacccagatcccttgtcttccatgagtaaaggctgcagaaagggcccatagaaactgcaggatactgatattgggttgctttgagtgcatttgtgtggggttttaatcttagggatttaaaagataatgccatggaagtttcacactggtatgagctcaatgtgggtaacctttcaaattaaatgctaccgagttatggacctgactcttctacatgaaaaggcctgccctttgaaagtgtcttttgtcttataaacaaaggtaacagatcttccctgtagtatctgggaagaagccatccctacagtgactcagctgggaaacctggtgtatttactaccccaaatcagaggagagtatcattccctgccaaatcacttcagccattttggtcactggctctttatgcctgtccccaaaacgtactaagtgagtacatttagtacaagtaatcacttactttgaactctgccttgtatgaaattcaaggctaaaggtaagctgcatgacagcaatccctagaggatacttctctgcccttccccaaccgtactgcttgaaagaagctccatattgaaggtttcccattcccttattttcttggaaatttgccaaagaaattattaatcttgctatacttgcctgataaggaaaactagattttcattttaaccttcccccaaaattacagaaagtttccttttattttcagcaaagtttttcatggtagcaatgggctttcagttttcattaggtttttgtcttatttttaaaagaaagttaacagatctggcaccagaggagtaaatggtttgaaaaatataagacataaaataaccctctcaaagataggatcaaagctggactttcattaattcaataatatatatattttaggaggatatagaaacaagaactttcactgctacaaacaaatgcatttttttctcctaaatcatatccccaggaaacaagtgcttcctggttttctttcacaacgaaaggcttttcatgagctgctgttcaaagattgctagtgattctccatacttactgcttagccatttttatgactcttattaggaaggaattgcagaaaatccaaccaaacagcaagtgtggaatacaggttaaaagtaggagcttttgcacagagcgactcaaggtttgaagcctgttatttcctgagtaggtgatcttaagcctattgcttaatatttgagtcatatgggtttagcatagtgcctgatgcattgaatggttggctattacttatgtatactagttgggaatataacagcaaacaaagagcagacatcacnnnnnnnnnctgtctctgcagcgagagcagaggcagtgaattagatcctgaagggagcgctgtgtctatgggcagcatgttcttgtgtacatagagccaactgcaaagaactaagacaatcctgtgactgtgagactcgaggaagcttgttactgacagctaaagtgaatgctataattgtgttgctacaaagatgatatcagaataaatgctggtaggtcgagcatgtttggttttgcctttttctttatgatgaaaacaatggtatattaacaccagggccagactacgacattttcatgcaggttcttacctgttggtgagagcagcaaaagccacatatgcctccaagcactccatttattacttgaataagacacaagatgaattcaattccaccaagagccaagaggatagaaaacagagatacattccattccacaatgtgcttgggttcagtgcactcggaccatgtggaggtatccagaaggtacctgtgggtaaaaagagaaacttctgacacacggtcatacttgaggggatacttcataaactacttttgtttggtggtttttcattcagaaaaaaggaatgaattattcaatatcctgtgtaagtttcttccactgcatgtcattccacaaaatggaggaatttagcccagatcctactgtaatgataaacataaaattataatttataatttttgaccccaatctaggattacatggtcagaaattctcaccttataatgatatttatattccctaacaggcatctgaattcttataaacaaaaataaaaatgcagaactgtatccaa

SEQ ID NO: 180068 - DNA, 1020 bp, Homo Sapiens
ttggctcagcttctttactgctctttagagagagtaaatagttcaaaattcacctcaacaattttctagaggtcaatttggaaccaaaaatgaaataagacatgtagctaaagtaagttaaaagattatgataaactcagaaaataaacacagagaaggaatctcatttttcagtcttacagaagattgtgtgaaggctgactatacctaaagtgactggaattttaacaggtgaacctgcatatgtatatgcaggtagttgtcaccatggattgagtccagtcgtagtaattaatatgtttaatcagaatattttggaatttctcttttggtattctttttgtttcttttattgtttttaattgacaatgtttatggggtttggtgtgatatttcaatacatgtgtgctaagagtaatgatcaaatcagggtaattagcatatccatctcaatcatttatcatttctttgtgtttagaaacattcacagtctgcttttctagctatttgaaaatataaaatgtattattgccaattgtactcattctgcagtgccacagaacactacaacttattcaaatggaatcttacttgctgtaattttgtatttgttaaccaatctctatctgcctctctgctgtccttcccagcctctggttaccaccattctcaaccttttatgcttgcatatgagtagaaacatggagtatttctctttctgtgtctagcttatttcacttaatgtctttcaagctcattcatgttgctgtgaatgacaggtttatttttcatggctgagtagtattccattgtgtatatatgccatgttttctttcttcattcatctgataatggacacttagactgatttcttagctattatgaatagtgcttcaataaacataggagtgtacatctctctttgacgtatagatatatttgtttatgcatatatgcacagtagtggtatacatcattaccagtggatcatatggtagtcgtatttttaacttttgttta

SEQ ID NO: 180069 - DNA, 1329 bp, Homo Sapiens
acaaattgatgagcaatgctttctttatgaaaggccaactttgtacaaaaaagttggcctactgtgtgcaattttattttgcctcagtgacagtcactttacagccatattggtgcaacatgcattagcaaaagaagtgcatgccgcgtgcacgtgtgtgggtgcggcagcagctctccgcagcaagaggtaaacaagacaagcactacggtggttcaagttgaagctggaggtcattttttgcccctgtaagctgagccctgaagaagaaagtcaccatgtatccatcttgttacctttttggatttgacgctgatccagatcctcctgggaccttcaatccgctgcttttacaaggatgaaaaggattctgatgactttttttgaactgtttgggcaggaatgctacagagagaatcaatttctgtgaactgagagtccccaggtgataatttggtgtttcacacacaggcagttttctttttaatgtgtggtgcttgtttagtcatctggctcttgcaaaccctagtgtttgaaaaacagggatgtagttcagcagtgtctgaataaggctgatgactcagaatcatgcagtgcctggcttctcaggccgccgccagccgggactgctttaggcgcgaacccacgcttctgacctgtgctctgtctttgcagttctgcacggagctaaaccagccgaccctgcccaacatccgcaagtggaaggggccccggggatgctggaaggctgttgttgctgagaagccctcgaatcagctccagaagggagctgggtatgcaggattcctatgggacgcggctgccggcatggagctgagagacgcgggttcacaggagagctcgccaagcaacgggcacgggaagctggcgggccccagcccatacctcgggaggttcaaggtgggaagtcacgacctgacccttgttaaccttcacctggcagccctgaccctcctggggagcgagaatcccagcaagaatcacagtgatggccaccggttggcgagctttgcacagaccctacaggaaaccctgaaaggagaaaaggatgtcattatcttattggattttggccaagggccagacagcaatgactatgatatcctgaggaaagaaaagttccaccacctgatccccgcgcacaccttcaccaacatcagcaccaagaaccctcaaggctcgaagtctctggacaacatctgggatcagtaaaagcttaaagaagggtttcacaggtcactgggctgtggtgaagagaaaggcctcacaaacccttggattccggataactgggtcttgggggcgggg

SEQ ID NO: 180070 - DNA, 1737 bp, Homo Sapiens
  misc_feature (220)..(283): n is a, c, g, or t
  misc_feature (525)..(533): n is a, c, g, or t
caatttaactacacaagtgatgcagcaacatatatatataaatgtacttgtaactctacagtaaagtttctttttggtgcttttatagcacatcagtgtaaacagtttaacttggctttgttttatattttaaaacattccttgtattttcaagatttaaagcaattttctagttcttccttttcacagaaaacgaagattctggatgtggtttaatcannnnnnnnnnnnnnnnnnnnnnnnnnnnnnnnnnnnnnnnnnnnnnnnnnnnnnnnnnnnnnnntagatatttattgagagggaaaggagaaccatttcccacattagagctctggtgttgagtattcagtgcgatttgatatattttaattgctattgcactataacaccctttcctttgaaaattctttgggtgtgcttccctgttctacctaaattagctgataaatcacacaaaccaataaccgagggccttggttgttgtaggaatgaagcctttaaaaatggtatcattcttctgatacnnnnnnnnnatacttaaggaaaaagaaagtcattatgtatgtgccttgcacgtttatgtaaatacagttcacattgctggtctcatttgtccttgtttagaaggaaaaaaataaagagattattataacttcagctcactttgaaagtatctgtccactttttttcaaaatacttcctcatattgtggccagctctgcctatatcagaatcatcttcattaaatgtttcacagttgtcaaaaacaagcctgacatctagagcaaaggtttcaaggtttggatacctgaaagaaaacacataattagagattgcgttcatagagtggatttgttttgtaaacaaatgaagagttaataaagggtaaaaatgaaagaaaaatgattaggataactgcatttaaattgatataaaatacatgatatcctcttacaaatggaacatttaaacatttttgtatgttctggaacatactggatttaaagaacaggttaaatgaaaaaataggtttctccaaagatcaaaacatatttcaactggcattttccccataacccaactcctgtttgacctgtatcacacaattctgtcacaggacctatcccacttgactagtttattaagttctctgaccaaatgtatcacttgcagaatcctattatccatattaaaaaatgctcagctgcagtagaaattatgtcaatgctccccatgcaatgataaaaattacacttgtcctgtagcttctatatacaccccaagatatggtgctctgcgttgtcttccccatttcccatttctcttctcttcatatgtgctcttctgcccaagcaatagagtatgatgaacccaaacaagcaaaacaagcatatgctatctttctactagaggtaacattatgagggtctgtctttcaacaagaagcactgtggcttctgtgcttttctggcgggataagcccaattctctttctctgtagaaaaacagaaaagagaaaagaaaggtgaatgaatctgcataagcttattagtaagaagggaatggtcatttcaaaccaactcaagccagttcaatacattttaaaagatagcttttagaaatgcaaattttaagttaattctaacctatgacaatctgtatactaaaataatgtaaccattaaaaatatctcatgagtgtaaattagtacaaccactatggagaacagtttgccaa

SEQ ID NO: 180071 - DNA, 2217 bp, Homo Sapiens
  misc_feature (318)..(381): n is a, c, g, or t
ttgggttagcaagtattgtttactaaaggtttgcacacactcttgcctaattctaaatgtttttagaaacaaattaagatgaaactttaagatttgttagagaaagaataagaaacagcaataaactttattctccttaaaatgtaagatcctgctatgattcttcactggggggaaagaagatacatttagaaaattggttatctcagattcttagtatggttttagttagttagttttaccacttggtagagttaatgatttgacaaatgacatttgcttcttattatcagccagttggttgctagctttaaagannnnnnnnnnnnnnnnnnnnnnnnnnnnnnnnnnnnnnnnnnnnnnnnnnnnnnnnnnnnnnnnttattatgaaaaaaagggaattatttcattcttttttaaaaaagtctagaattagaggctaatatttccttatagaattgtcaggaaacaaactgttgtaataagttgtttttgtgttccaagagatgtgactttgtcagaatacatccaaattcatatttcttagcagatctttaacataacaccatttataattctttctgttttcattcttccttttttctcctggcctattgtaaagcagatctggcagccagaggttgtatcaggaaccacagaaagaccccactgcttaaatatcttcaaagcagtctttcactttgaatagatgaatggatattgctaccatgtaaggatatttaggtgaagctcatgaacaaatcttgttgtacagaagttatccctttgttctgcaatgccaaagtaaatttgggctcattattttatggaattataaagtaaagctaataaaatacacttatagcaacaaatgtttaattcccagtactagaaaaataaaatttaaattgtagaactaaactacttttaaaagcttttgaatatattggttaaatcccattaatacatacaaagttaggcacagagtttcttggtggatggaagaaagactgatttcacactattttaatcctctgtcaagacgcaacttattaattatatacagatagtttgtagccgatggatgtgatttttgttactgattttgcttaatgcagttacattaatgccagaatagtagaatcgtggaatagttatcaagttagaattttaagttcttggagataatagagcacattacactgcatatagaagatgatccataaattattagtgaaatagtaaatgatttagtgtgtccacagatgagtaaattaaggtcaaagaggtttaataaaaattacaggcatgagccactgcgcctggccggggaatgtatttaaagatataacacaagtatataactgaataccattgtgaaacattaattatcaatgttttattgtgtcttttaggtgttgaaattccgtaaacttaacttcaatggggagggtgaacccgaagaactgatggtggacaactggcgcccagctcagccactgaagaacaggcaaatcaaagcttccttcaaataagatggtcccatagtctgtatccaaataatgaatcttcgggtgtttccctttagctaagcacagatctaccttggtgatttggaccctggttgctttgtgtctagttttctagacccttcatctcttacttgatagacttactaataaaatgtgaagactagaccaattgtcatgcttgacacaactgctgtggctggttggtgctttgtttatggtagtagtttttctgtaacacagaatataggataagaaataagaataaagtaccttgactttgttcacagcatgtagggtgatgagcactcacaattgttgactaaaatgctgcttttaaaacataggaaagtagaatggttgagtgcaaatccatagcacaagataaattgagctagttaaggcaaatcaggtaaaatagtcatgattctatgtaatgtaaaccagaaaaaataaatgttcatgatttcaagatgttatattaaagaaaaactttaaaaattattatatatttatagcaaagttatcttaaatatgaattctgttgtaatttaatgacttttgaattacagagatataaatgaagtattatctgtaaaaattgttataattagagttgtgatacagagtatatttccattcagacaatatatcataacttaataaatattgtattttagatatattc

SEQ ID NO: 180072 - DNA, 843 bp, Homo Sapiens
  misc_feature (67)..(97): n is a, c, g, or t
acttattccgttataaaatatggctggtaaccattgtgtatgttattaaagatacaaaatgttgggnnnnnnnnnnnnnnnnnnnnnnnnnnnnnnnttttaaaaccaccaccctccctgcactatcaccccattccccagaccttcttgcccccgccctcctggtctgtggacttccctctgctctgagcccagggagggggaagaagccagggggtagggtggccctgggaacctggctctgggtccccacttcctctcccagtgccgggctgggtggggtgtcaggtttatttatgtacctcttgcacactcatcaacctatgcaagtcccccaccccggccctccatgtttctgtgcctttgctcatcccctcaatctcccagggcttctccagtccccctcccactagctgcaggaagtgggatggatgggccacctcgtttggaatcagcagggtgtccctctcatgggaccctcccctctccccagcctgtcctgtcttgttcactctccatcagggtgagctgactgtgcctggcactgggaggtggtgagggacaccgtctcacacacacagggaggcaagagctgccccccaccccacctgacagcagagtgtgcaggacgcaggcggccccactctgatgggcaggaccctgaccctctcccgctccagccccctccccaggccctcctccatgatttcaccctccctaccacttctgtccccggccccactggcagaatcaactttgagtaaactgtacagtttttctcactgttgggagaagacttattttgttggagtttcacttgtttaatggtctggggcttatttt

SEQ ID NO: 180073 - DNA, 1312 bp, Homo Sapiens
  misc_feature (1125)..(1139): n is a, c, g, or t
ttggagtatgtttccctattccttatttccttattatcagatgtattttttcttttaagtttcaatgttgttataattctcaaccagaaatttaatactttctaaaatattttttaaatttagcttgtgcttttgaattacaggagaagggaatcataatttaataaaacgcttactagaaagaccattacagatcccaaacacttgggtttggtgaccctgtctttcttatatgaccctacaataaacatttgaaggcagcataggatggcagacagtaggaacattgtttcacttggcggcatgtttttgaaacctgctttatagtaactgggtgattgccattgtggtagagcttccactgctgtttataatctgagagagttaatctcagaggatgcttttttccttttaatctgctatgaatcagtacccagatgtttaattactgtacttattaaatcatgagggcaaaagagtgtagaatggaaaaaagtctcttgtatctagatactttaaatatgggaggccctttaacttaattgcctttagtcaaccactggatttgaatttgcatcaagtattttaaataatattgaatttaaaaaaatgtattgcagtagtgtgtcagtaccttattgttaaagtgagtcagataaatcttcaattcctggctatttgggcaattgaatcatcatggactgtataatgcaatcagattattttgtttctagacatccttgaattacaccaaagaacatgaaatttagttgtggttaaattatttatttatttcatgcattcattttatttcccttaaggtctggatgagacttctttggggagcctctaaaaaatttttcactgggggccacgtgggtcattagaagccagagctctcctccaggctccttcccagtgcctagaggtgctataggaaacatagatccagccaggggcttccctaaagcagtgcagcaccggcccagggcatcactagacaggccctaattaagttttttttaaaaagcctgtgtatttattttagaatcatgtttttctgtatattaacttgggggatatcgttaatatttaggatataagatttgaggtcagccatcttcnnnnnnnnnnnnnnnttgactcaagaaagtacaagtaaactatacacctttttttcataagttttaggaactgtagtaatgtggcttagaaagtataatggcctaaatgttttcaaaatgtaagttcctgtggagaagaattgtttatattgcaaacggggggactgaggggaacctgtagtttaaac

SEQ ID NO: 180074 - DNA, 1035 bp, Homo Sapiens
ttggcacttgacttcactccctgccccctgcgccttcatggatctagagttcttagccccgtcctcccttaaacctgacttccgcccacagcaaccagctccctgaccacagggctgctcctcagcctcctggtcttattggtcctggtgatgcttggtgccagctactggtaccgtgcccgcctgcaccagcgactctgccagctcaagggacccacctgccagtacagggcagcccaatctggtccctctgaacggccaggacctccgcagagggccctgctggcacgaggcactaaggtgagtcccggatgccagaggaaggggactccaccttggccgggcatccagcttgggccctggggggtgcgcattaaaggctccagactcagagaaaggctagcactgcccaagagtcagtcgaaggagtcagggccagccctgccctcccctcccctggctacaggcagggaagctgagtccagaagagtggggagggcagccagctggagcaggagctgctgggctccgtccgctggccaagaggtggctttgagaggtgggtctatccatgcccccagcagtgaccccaggagggcacaagggcagtggtgctcagaatggccttccgtaggcccaggtcaccatgttagaagggctggtgagcatccccaccctgagccctctgcttggatgatgggagtgtgtgcacacctcctccccactcgctccccacctgcatgcacctgcataactgcatgcacagcacccactgccctgggcccctgctggccccccctgggcactgacccttccctgcccactctgtctctctgcttcctcttccccctctgtgcctatctgcccctcctgccctctcagcaggctagtgctctcagcttcccggcccccccttccaggccgctgccgcctgaccctgtgtccaagagactccaagtaaatctgggccagggcccgccctgagccaggcaggtgggaggcttggtacccactgcagttctcatccctgctccc

SEQ ID NO: 180075 - DNA, 2200 bp, Homo Sapiens
  misc_feature (1995)..(2009): n is a, c, g, or t
ttgggttgggtttctggcttgagatgaatccaagcagcagaatgagccaggagtagcaggagatgggcaaagaaaactggggtgcactcagctctcacaggggtaatcatctcaagtggtatttgtagccaagtgggagctattttcttttttgtgcatatagatatttcttaaatgaagctgctttcttgtcttttatttctaaaagcccccttataccccactttgtgcagcaaagatccccgtgcaggtcacagcctgatttgtggccaggctggacaaattcctgaggcacaacttggcttcagttcagatttcaagctgtgttggtgttgggaccagcagaaggcaaacgtccagccaacacacaggactgtaagaggactctgagctacgtgccctgtgaagacccccaggctttgtcataggaggtcgttcagcttccccaaagtcagaggtgatttgatttggggaagactgaatattcacacctaagtcgtgagcatatcctgagttttacttccttatggcttgccctccaagttctctctctcatacacacacacacccttgctccagaatcaccagacacctccatggctccagctatgggaacagctgcattggggctgcctttctgtttggcttaggaacttctgtgcttcttgtggctccactcgcgaggcagctcggaggtgtggactccgattgggctgcaggcagctctgggacggcacagggcgggcgctctgatcagctcgtgtaaaacacaccgtcttcttggcctcctggccagtctttctgcgaatagtcctctccctggccagttgaatgggggaagctgctggcacaggaaggagaggcgatcccggctgaggcttaggaaattgctggagccggctccaagcagataattcactggggaggttttcagagtcaaacatcattctgcctgtgttgggggccaggtgtgtcacacaagcatctcaaagtcaaaagccatctggggctgctgcttctctttctcaggctctggggaaaggaatctccctctcctctcacttgattccaagtgtggttgaattgtctggagcactgggactttttttctcttttccttgatggaccaacagtgcaaatgcaatctcgccatttaactttcaggtcgatttcctttcctgatcagacatctttgtgccccctttaggaaggaaaagaatacacctacgatgtgccaggcactgtgttaggcgcttttatatagatcctcgttaggatgagactaagggatgaggacatctctttataaaaggcccctaagtaatggataaacagaaacacttagaggtgagaaggtctgtcttcaagatccaaggtaagattgccttcagtctgatgtttgttctcaagggcttatcccctacaatattctcccactccatacttctccttctaccccaccatgtgctcccgtgcactcctcagatggtcagaggggtaacccaagtccttagagaatttggggaccaatagaatatgtgatgtgtgaattttctttaaaaaacttaaggagtctttgctaccttctgcttgttgagttgttttggcattcatattaaaagccagcatctcactatttattgacaggttgggctgtgtgtgtgcgcatgtgtgtatacatttccaggcgtgcctgtgtcctgtagctttttaaaaggaaacccagtcatcccactatgaatctggcatcttcttatgcttctagtgttttggccatacatcaaccaaggggtttaatttatccaatgcttgacgacatgttcaggaggggctggatcaaattttgagagggttatgggaaagggagggggagaagaaattgacatttattttattatttattttaaatgtttacatcttctttatgttgtatcaagcctgaatagaaactgatagcattaaaatactccgttcctctctctcttctcgcttccnnnnnnnnnnnnnnnaaatttaggataacacatttttgtttctaaagtgatttgtgatttgtgctgtataaactgtataaaaggttctgtttttaaaggtggattttcattcctctggggacagtggtcgccaagacatctacattgtaagagaacacagtggaagatcctgtcctgattctcaaaaattattttctctgtatgat

SEQ ID NO: 180076 - DNA, 2090 bp, Homo Sapiens
  misc_feature (1665)..(1803): n is a, c, g, or t
ttgggaaatatgccccgctggagtgaggaaaaaaatcgtccagggagcattttcctccatcgcagtgttcaaggccatccttccctgtctgccagggccagtcttgacgagtgtgaagcttccttggcttttactgaagcctttcttttggaggtattcaatatcctttgcctcaaggacttcggcagatactgtctctttcatgagtttttcccagctacacctttctcctttgtactttgtgcttgtataggttttaaagacctgacacctttcataatctttgctttataaaagaacaatattgactttgtctagaagaactgagagtcttgagtcctgtgataggaggctgagctggctgaaagaagaatctcaggaactggttcagttgtactctttaagaacccctttctctctcctgtttgccatccattaagaaagccatatgatgcctttggagaaggcagacacacattccattcccagcctgctctgtgggtaggagaattttctacagtaggcaaatatgtgctaaagccaaagagttttataaggaaatatatgtgctcatgcagtcaatacagttctcaatcccacccaaagcaggtatgtcaataaatcacatattcctaggtgatacccaaatgctacagagtggaacactcagacctgagatttgcaaaaagcagatgtaaatatatgcattcaaacatcagggcttactatgaggtaggtggtatatacatgtcacaaataaaaatacagttacaactcagggtcacaaaaaatgcatcttccaatgcatatttttattatggtaaaatatacataaatataattcaccattttaacatttaattcatattaaatacgtacaaatcagtgacatttagtacattcacagtgttgtgccaccatcaccactatttagttccagaacatttgcatcatcaatacattgtctagagacaagactatcctgggtaggcagaaaccatagatcttttgtgtttacagctatggaaaccaactgtaccataaagatagttcactgagttttaaagccaagccacatcttatttttccaaggtttaatttagtgagagggcagcattagtgtggagtggcatgcttttgccctatcgtggaatttacacatcagaatgtgcaggatccaagtctgaaagtgttgccacccgtcacacaacatgggctttgtttgcttattccatgaagcagcagctatagaccttaccatggaaacatgaagagaccctgcacccctttccttaaggattgctgcaagagttacctgttgagcaggattgactggtgatgtttcattctgaccttgtcccaagctctccatctctagatctggggactgactgttgagctgatggggaaagaaaagctctcacacaaaccggaagccaaatgtcccctatctcttgaatgatcaagtcacttttgacaacatccaggtgaatataaaaacttaataaagctgtggaaaggaactcttaatcttcttttctgctacttaggttaaattcactagatcttgattaggaatcaaaattcgaattgggacatgttcaaattctttcttgtggtagttgcctatactgtcatcgctgctgttggttgagcatttgtggnnnnnnnnnnnnnnnnnnnnnnnnnnnnnnnnnnnnnnnnnnnnnnnnnnnnnnnnnnnnnnnnnnnnnnnnnnnnnnnnnnnnnnnnnnnnnnnnnnnnnnnnnnnnnnnnnnnnnnnnnnnnnnnnnnnnnnnnnnnatggctgagccaaagcctaccatgtacctaacctttattttctttcccgaacataccaggctgtctcctcataacttccaagcatgcacttaaaactccacatgaatacaaggttcatgggacttggtattcatagaaagggaggcagaaagctggtctgttcctgataggcttgtaatttaatatcattctgttcatgtgctttggatggaagcacatctggcatatgatgctaatcagtggttcccatacccctggcttcctaatttgtacaaagttggcaatta

SEQ ID NO: 180077 - DNA, 1046 bp, Homo Sapiens
ttggcaatttcattcttctgcatatgcatatccaatattcctagcaccatgtattcaggagggtatcctttcccctgtacatgttcttggtgcccttgttgaaaatcagttggttataaatgcacagattcatttctgggttctctattctgttccactggtctgtgtgtctggttttataccaacaccatactgttttggttatcatagccttgtaatatattttgaagtcaggtagtgtgatgccttcagctttgttgtttttgttcaggattgctttcctattggttttttggctacatcagatctaagagttttttgtggattctttagtttttcctagaaataagagcatatcattggtaaagagggacagtttgattttctcctttccaatttggatgtcttttatttatttatcttgcctgattaatctggctaggacttccagtactgtgctgaataggagtggtgaaagtgggcatgtttgtcttgttccaattcttagaggaaagccttttggcttttcctcattcagtatattagctgtgggtttgtcatatatggcccttactttgttgaggtttgttccttctatgcctagtttgatgagagtttttatcttgaaaggatgtttattttcatcaagtgctttgaaatctattgaggtgatcatatggcttttttccttcattctgttatgtgatgtatcacatttattgatttgaatatgttgaactatccttgcattcctgggataaatcccatttggtcatggtgtattacctttctgatgtgctgttggatttggctagtattttgttgagaatttttgcatctatgttcatcagggatattggcttctagttttttgtagttgttgcatccttgtctggttttggtctcaaggtaatgctggcctcttagaatgagctagggagaatcccttctcttcaatttttgggaatagtttgagaattggtgttagttcttcgaaagtttggtagaatttgcagtgaagcaccaagttctggacttttttcttt

SEQ ID NO: 180078 - DNA, 907 bp, Homo Sapiens
ttggaataaaataaatatatagataaataattcaggcaagatgctgggaagttataatacatggagctgtaggattatgggctcagctgcttctccgtcttcctcttaggcttggttagccctttttcatttcataacaatgcattcccaggacacaaacaatggagaagattagagtgtaggtcccattaatgtagaagccataggatggttttcctcggtacacattgaaggtacaaaattgtagtcatgcctctgaatccaaagtgttttagtttatttcagtaaaatcacatgtgctataaatagcacgaaaaagaaaagaaagaagcggatgtgaaataatacggtttctgtggcacgtcttcctggtctaggtcatttgaactttttggctatcatattcttagaaaattataggttgaaacagtcactgaattgccaagagacggatttgcttgtctgtctggtgcccagctccaactgggcttacatggctagggaaaagaagggaaatttcacgtagtctaggattttattttagtcagataaatactggatggagtatttagtcagataaatacagtggatggagatacattggaccaccccaccaaatctccgttttaagtgtaagttttctaagttttgtacatttgtcattccagagggtccagatatttcatagatgaagcccaggtgggctttgctttgcactgaaactagcaagaaaggacacaaaagactgcagagaatgttggggcagattgctggctgcgtatgccaggtcccttgaggagcaagaacatccagtgccaaataggacactagtttggtctttctccaaaccataaactcttggaaccaagagctggtctttggtgtgttgcaggagagtcctcatccc

SEQ ID NO: 180079 - DNA, 1344 bp, Homo Sapiens
  misc_feature (685)..(901): n is a, c, g, or t
  misc_feature (918)..(1001): n is a, c, g, or t
tcagaaacatggatcttgacgccagacttgggggtgaatcggggacctgcacagactgcaggaatgtggccacagcagctcggtcctgagagcctgtcagcccgtaggtctgggcaaacaggttggcagcagccatcacatagtccagatgcaggggattgttgacatcaaaggtgagcgggtgtggacagcgtttgggcccagaccagaacggcgctcctgagcttgtgagctggtcaggagggaagttgtgcagcagctgccggatgttgttcgagtactgggtgtgccagtggtggcaggcccaggtcacgcagtcagcccaggtctgtggtcgctgcagcaccaggctgcgctgcacagcctccagcacctccaagggctgagtgcctgccagccgcagtgttcgctccacaaacttggggtctgtgaggtactggttgacattttctgctggctgcttgaagaggccttcaaactcatcccgagcccactgcagacagagcaaacagattacatgtggccacagttgacaaaatgggtttccgcaggcattattagaaggaccatcagtgaataaagcaagtacaaggcgcacagctactctggaagtggggaagccctctagccttccccattcccccacctcaattgaaaaaccaggccaggcacagtagctcacacnnnnnnnnnnnnnnnnnnnnnnnnnnnnnnnnnnnnnnnnnnnnnnnnnnnnnnnnnnnnnnnnnnnnnnnnnnnnnnnnnnnnnnnnnnnnnnnnnnnnnnnnnnnnnnnnnnnnnnnnnnnnnnnnnnnnnnnnnnnnnnnnnnnnnnnnnnnnnnnnnnnnnnnnnnnnnnnnnnnnnnnnnnnnnnnnnnnnnnnnnnnnnnnnnnnnnnnnnggcacgcgtgcgtgcgnnnnnnnnnnnnnnnnnnnnnnnnnnnnnnnnnnnnnnnnnnnnnnnnnnnnnnnnnnnnnnnnnnnnnnnnnnnnnnnnnnnntcccaggagttggaaggttgcagtgagctatgattgtgccaatacacttcagcctgaatggcagaatgagacctgtctcaaaaaataaaatagcaaacaagacagaacttctggcctctgagaattcctaggacagttcgcagtcattagcgaggtggtttggagtgtacagatgttagaaattcaggttcagattccagctatgccacgtattacctagttttgtgacttcaggcacacaggataacatctttacctctgtgccttgtctctaaaacaggtgttacaacagtgatacctaccttcatggggttgctaggaagaaatgagcaaatacatccaa

SEQ ID NO: 180080 - DNA, 1737 bp, Homo Sapiens
  misc_feature (388)..(396): n is a, c, g, or t
  misc_feature (738)..(765): n is a, c, g, or t
  misc_feature (1067)..(1088): n is a, c, g, or t
  misc_feature (1091)..(1496): n is a, c, g, or t
tcaaaagtaatagaggcttagtactttcagatccaatttatacaggtattccacgcagcccaccatagattcaaatcttcaagctcatcagtaacaatgggtggctcagagctactatatcttcctagttttctccaatggaatctgttcttacaaatggcctgctcatgcctgatatgggccctataagaacaggcacaggtacattaactacaggtggtgtctcaggcttatctgagtctctgacaggggacacaatctgtaaaatttcctggaagcttttcagagcagccagagatacttcattgtttttgctgagtgctgctgactgtatatggtcaagaagaacatcccaagctcttgaaaaatctcctatattaggaagagnnnnnnnnnctattatcataaaagcgatcaaattttctcttcatattagacacttgaaagcatatttgcttaatttttctgcttaaaatcctacagaactggaaaatatatgactaggtactaaggtactaacaatgggaattaaaattatcacaacctagaaattcagtaaaaaaatttttcagatataggaacaaagggcaccaagaggaggatgatggatatatcaaataatgtttcaatcttaaaaacaaaactcaggtaggtgacgagtgcactaaaatctcagacttcaccactatacaattcatccatgtaaccaataaccacttgtaccccaaaagctactgnnnnnnnnnnnnnnnnnnnnnnnnnnnntatgtatgtacttatacatatttataccatttcccagaacttctgccaaaggataacagaaaattaaatcaacgaggttgaaacaaaagcatttcagtaacatctgcagtctacccacctttattaatgattaagtaagaagttctcgttcttaaccagagaatcattggaaaagtcgtaacttaggacagtataatacatgtttttattggcgtaaatatttaagataaactatgtcacattcataaatcttaactttatactttagttttcatatttaaattattttagagctgcagaannnnnnnnnnnnnnnnnnnnnnaannnnnnnnnnnnnnnnnnnnnnnnnnnnnnnnnnnnnnnnnnnnnnnnnnnnnnnnnnnnnnnnnnnnnnnnnnnnnnnnnnnnnnnnnnnnnnnnnnnnnnnnnnnnnnnnnnnnnnnnnnnnnnnnnnnnnnnnnnnnnnnnnnnnnnnnnnnnnnnnnnnnnnnnnnnnnnnnnnnnnnnnnnnnnnnnnnnnnnnnnnnnnnnnnnnnnnnnnnnnnnnnnnnnnnnnnnnnnnnnnnnnnnnnnnnnnnnnnnnnnnnnnnnnnnnnnnnnnnnnnnnnnnnnnnnnnnnnnnnnnnnnnnnnnnnnnnnnnnnnnnnnnnnnnnnnnnnnnnnnnnnnnnnnnnnnnnnnnnnnnnnnnnnnnnnnnnnnnnnnnnnnnnnnnnnnnnnnnnnnnnnnnntccctacagcaaacaagcctactggctttgttaataacatggattattatccacatacctacattaaaatgatgtaaaaaattaggaaagttgatattttccaaagcagtacaacataagtaggctatgaaacatgtaaaataaataatcaaggtttaaggactttcattttggaaagctgataaatgaccagatttttttaaaaaagggataaaccccaaattcctgggaaagcagccaa

SEQ ID NO: 180081 - DNA, 1482 bp, Homo Sapiens
  misc_feature (357)..(367): n is a, c, g, or t
  misc_feature (420)..(697): n is a, c, g, or t
tgagccaccgcacccggccttaagtatttaatttttaaatcctctgtattccgagccctgttctaggtactgggagctcataaaaataaaccctttctagtctccaggggtttcagagggagaagttgtattcctagaaaagtttagcttttctgtttatgattaaaaacactgtaaggaactattataaggtgtgaggccactgctgtagtggccctgcctcagagccagtgtaaaagcttaggaaacatcaccagctagagagaagcgcccttgggatttgggtgtgtggcctccaggcttttctccatattccacacagatgtggatgtaatgtgataggctctgtcttttggnnnnnnnnnnngtgggggtggggatcattccaccgtgcttgcttccatgttttgttttgtgtgnnnnnnnnnnnnnnnnnnnnnnnnnnnnnnnnnnnnnnnnnnnnnnnnnnnnnnnnnnnnnnnnnnnnnnnnnnnnnnnnnnnnnnnnnnnnnnnnnnnnnnnnnnnnnnnnnnnnnnnnnnnnnnnnnnnnnnnnnnnnnnnnnnnnnnnnnnnnnnnnnnnnnnnnnnnnnnnnnnnnnnnnnnnnnnnnnnnnnnnnnnnnnnnnnnnnnnnnnnnnnnnnnnnnnnnnnnnnnnnnnnnnnnnnnnnnnnnnnnnnnnnnnnnnnnnnnnnnnnagccttcagtgtatttttaaaccagcttttctgggccctttctggatgtgccaagtgcaggagtgcagtggtgggtaaggagtgggcacaagctctcggaactgggagccccagaaccagcacacaggatttcctcccttgtggcccactggacagtccccggccgggctgtgtttctgtgcagcaggctgaaatgaggcagtgaaggggatttggttctgtttggcttctcagggcttccgagtggacctgccaatcaagtcggcccgctaccgtggccagtacaacacctatcccatcaagctcttctatacgtccaacatccccatcatcctgcagtctgccctggtgtccaacctttatgtcatctcccaaatgctctcagctcgcttcagtggcaacttgctggtcagcctgctgggcacctggtcggacacgtcttctgggggcccagcacgtgcttatccagttggtggcctttgctattacctgtcccctccagaatcttttggctccgtgttagaagacccggtccatgcagttgtatacatagtgttcatgctgggctcctgtgcattcttctccaaaacgtggattgaggtctcaggttcctctgccaaagatgttgcaaagcagctgaaggagcagcagatggtgatgagaggccaccgagagacctccatggtccatgaactcaaccggtacatccccacagccgcggcctttggtgggctgtgcatcggggccctctcggtcctggctgacttcctaggcgccattgggtc

SEQ ID NO: 180082 - DNA, 1212 bp, Homo Sapiens
agcaatgctttttctataatagccaactttgtacaaaaaagttggcttctttctcttcagttggaagatgctggctcaagtagtttagataatctactaagtagatacatctcaggcagtcacctacccccacagcctacaagcaccatgaatccttctccaggtccctctgccctttctccgggatcatcaggtaaagcaaacgggtattaccttattttttaacaccttaaaaaaacagtgtcagtatctgtcttagtcagaattctccagaaaaacagaataagtaggaggtctacttgaagagagaaagggagattgagagagatttattttaaggaattggctcatgtgattgtgggtgttggcagggaggtgaggcaggctggagacccaggtaagagtattgttacagtcttgagacaaaatttcttctttggggcatgaggaggtaggggagagaacagggctccgtcttctcttctctcttaaaagggctttacctgattatatgaggcccacttgcattatggaatataatctacttttctcaaagtcaacttgttgaaatgttaattaatcccatctaaaaaaataccttcacagtaccatctatactgatgtttggccaaactgctgggtgtcatatcctagccaagttgacacaataacatatttttttcttgattgttctttgtaattatttttgttcaaatactattggtactctttcagtaactgaagccatattaatatatatctgtagtctacactatttggaactccaaattactcaacccttagtatattcacagtctttcatgggtttaatcttatattttacaatacagagtcagttgaagagttctttggttccaagtcaactttaaaacacttagtaaaataatgaaacattgaaaaattatttaaaaagtaagagctaaagaagggcaggttaattttcaaactgtaattttaaaataaacattttgctgaaaactattaaaatagccatgatatgtagctctcttccaaaatcccagcggttttattaaccctattactcagtgattcaattgggactcttgaatacatgattgaagcaactccaaacagggttaacagtctagaagtgttattgaatgtatttttctaacgtaaattaaatgttattttttcttactgaaacacaccacctacttctttctagag

SEQ ID NO: 180083 - DNA, 1426 bp, Homo Sapiens
  misc_feature (162)..(207): n is a, c, g, or t
  misc_feature (869)..(1018): n is a, c, g, or t
ttggattttatttaacccagtatatataaaaaagattttagcatgtaattaatataaaaattatgaggtattttacattcatttttggtagtaagtctttggagtctggcacgtattatttcacacagcacatcttgattcaggccagccatatttcaggtnnnnnnnnnnnnnnnnnnnnnnnnnnnnnnnnnnnnnnnnnnnnnntttctagaccccatgaaagccatggaccacatcagcaataggatttatatacatacacatgcacaactttgtatgcaaattaaagggtttacattctatgaagtccatgcaagatttggcccccaaccctgtcatggaccctggattaaaaacccttaaaatcctgccctatcacatctcttacatctacttctttccttcctccactgccatagttctctcatccatacagcccaatgttgtaagaatacatcaaaccagatctttctttggtttctatttttctgatttgtaggtcaacgttgagtaaaaagaaaggagatggggttatactgaaggatcttatgaaaactgcaggcactgccaaggtcagggaggcccttggagattacctgaaggcacttaagacgggtaaagaaggcatcccttgtgaatcagaggggtcccttttctatttacccaagttatactctacactgtggtcagaggctccagaagcaagtttatacttcagaataaattgtagtctggaagttgagagctagtcatcgttaagaccataattagtgataattagtattgtacacagcatgaaccattttgcctacagaactgttaattgtagttttctggaatgaaaatcagttgttcgtgtaattacnnnnnnnnnnnnnnnnnnnnnnnnnnnnnnnnnnnnnnnnnnnnnnnnnnnnnnnnnnnnnnnnnnnnnnnnnnnnnnnnnnnnnnnnnnnnnnnnnnnnnnnnnnnnnnnnnnnnnnnnnnnnnnnnnnnnnnnnnnnnnnnnnnnnnnggatgaaagtgactgcaggtattacaggtgtaattgagaaatacctagataatatccgcattgcatggaagtgaggttattgttgtcttccctaaattagagaagtgaggcaggcaagatggccagcagtgccttatctctgtacctcgttcttggaccctaccacctgagtatctagtgttggcatagatgggtttggggttgtcacttttcccgtgagagcgcacatatagctggctcacaggcttttgaatactgtgaagacaagctttgtgaggcagtggtcaccctcacgtgagaaattgtctgttttgacagtagttagagccacaaagctattagtagttaatcatataaaacttagctgtttggaaaagactttggaaaattttgctgctttagcaaaac

SEQ ID NO: 180084 - DNA, 1144 bp, Homo Sapiens
  misc_feature (530)..(613): n is a, c, g, or t
ttccccaaaccattcctgtcccctcctccacccaagattcctgtttctgaacattcatacctgtggggatgagtccatcaccagagcccccatagccaccagacacaatgctggtttcattgaggttgggtcctgacaccatcacgtgctggaggtcctgctccagcccatcatcttcaggaagctgcctggcttcgccgttcccgtggatagggatctccattgtggctgccttccctaggatcccgtccgtcatggctaggaaaggtattggagtaaaactctccaccccagcaccctgcaaagcccaacacagaagttctggacactggccagcactctagaagaaggaggcctcctctgtcatttctttaaaggctgtcccagggtttgagtgtcccagcgtttggccatcattcctttcttcagatatatgtatttctcccctccaaaacgcacatttgaaacaggcacaccaaagcacggtgtcttctcacaagcccccaacctcaccaggactctggtgattnnnnnnnnnnnnnnnnnnnnnnnnnnnnnnnnnnnnnnnnnnnnnnnnnnnnnnnnnnnnnnnnnnnnnnnnnnnnnnnnnnnngagggaaagtctgctctcttagaacttatctccatgcaggcgtgtttatgctgaggagatgaaccctttccagggctcaggtcttcacccccctattcaggtttgttctccattgcttggcctttcacattcctttagcgtttcttcccccttccttcagggggtctcccctcctccgtctcatacacctcgtcttcctcgggccctccccaccaggccttagttagatcagtgggtgtatgttcccagtctctggtaaaagcctctctctcccaggatatcggtgacccttccacagtcagttatgtctcccaggtgtgtgagtccccgcccccacccccatacacctggacatcaggtgtgtcctcatccttccccggggctcggggcatcttgccctctggacaggtttgtgcgttcaacttcccgtcgcccaagcatgttcctctcacctcgggccgggccgctcttcccctcagggcgccaggcccgggccgcgcggggacctcgggctccagttcccgtcgccaa

SEQ ID NO: 180085 - DNA, 1486 bp, Homo Sapiens
ttctccctgtgggctgcaggagggagagaggatgaggaatgactgcctggagagcccatgcccagttcccccaccctctttggtctgggtgaggcattgaagctctggggacttctggctgaggtcagcaaaggcatcacccagtgcatgctgggtctgcagcaggctgtagaggtgggctgtcagtgcccggcccagctgcaggacactctcatacttgcgcttcgtctcacgcagcaactcaatctgcagctctagctccaggtccacagtccgtgagcctcgaccaaatcgttctgataacagttgctttgtgcactgattgtgaaatgggggaataaatcagagaccctaacagcctccccacacaacaggtatctaccccagcaccccccaggctcctactctcagccacagatgggatattacgatcacgaggaaaagggaaaaaggtacccataaggagttttggggaagggagaggtgcttaaatcctaccttataggtgttgatgccccatttcttgacgatgtcaaacttttctccagcaatgccccgagccacctcatctccagggccagaaggagtggtgctgtgagatggatggcggccagaccctaaaggatcaagttctctgacaccagcctctctcagatacaccagacacctctgtggccccacccatacttctcttcgagcacatgaaattgacttccctgaaggagatgctagagacaactggatgctcctgcttactaggaggaactcggactttgcgcggtgagaaccaaatcctgatatacatatggcctccttgggggttagaggaggggtttgcggggagttgttggtgtacaggggcagaggaaacagaagaaaatacactgagtttgggggcagcaggagtcaaggatggtgggtcatgataacaagaaacctggttgcattcccatgtggaatcttagtgtgagattcagggctgtttgttcctctaaactttagaatctaaaaattctgagaagcttcacaaagttccaactcagcctcaagctgtagagggggggcattcctgtgaagcaggtcttaacttgactcaggtggtggcagggaaaggacaaatgagccatttcaggggctaagtggcaaaagggaaatggatggacaacgctgggagttgcttttgggctgaggagagtccatgaggttcctacaagcagaagttcccaagatctccagacataattcaagctttcctagacatatcctatgcttccccaaaccattcctgtcccctcctccacccaagattcctgtttctgaacattcatacctgtggggatgagtccatcaccagagcccccatagccaccagacacaatgctggtttcattgaggttgggtcctgacaccatcacctgctggaggtcctataggccagagaagaggggttgcttcaggaacataggggctgcagaagcatttccaa

SEQ ID NO: 180086 - DNA, 1392 bp, Homo Sapiens
  misc_feature (481)..(489): n is a, c, g, or t
ttggctttgaatattttccatagttttcaaaatccagactcaaatttgtcttaattccaaagaatctttgtttttgccttttaaactccaggacagctcctctggcaatgtatctgaaggggaaagccctcctgacagccaggaggactctttccagggaagacagaaatcaaaagacaaagctgccactccaagaaaagatggtcccaaacgttctgtactgtccaagtcagttcctgggtacaaggtagaagaaaaaagcccctgactcagcttctttactgaccagcctctccctgaaatattttaacttgactttcacgattgtggagcttctgcctgctgtacctcactagctgttcttctatggtgtgccctttgtccgctgctttcttttttgctttatttccttggtggcttttctgtcacttttggctatggtttaccttctgttttctgtatatgtacaatttataagtcnnnnnnnnnctttgaaagaataaccaggcaagtatgggtttttaaaacattatttcataggcagaagtttatattttctttccttggagtaaagatcataattatttggcattttaaatgccccagcatttagtgtagctaaagctgctgagctataaagtatgagtggatatactgttagactaagttgcattttttttagtgcctttcattaagaaagatctgggtttaatctaaggattatttgatccatatgctaaatttagctaactctgggatagaaaataataaaacctgttacttacattgtagtgatttttagcataaccttggtaaagagcctatatgattctatggcaagaattaaaacatacttgttaacttgttgatctgattatcctcagagtaaaggagtaggttgtcagcaactattattatattttgaacttttcctccctctgtctgcccctcccttttcttctgaagaaaaggtgaggtgagagatgagtagccttatttgcatatagggatttaagaatatcataaaaggaagaattagctgtacagtttcatatttgggatggtggtagtaaaatagactaccttttgattcttttggtctgaaatgtattagaacatgcttttattgcacttatgaaggtgtattgaaggaaaattttagagtaagctgatgagagttttgccaagtgaaattgttaaacaccttgtatgtcagaactgtgattgtggtaaataattcacaagaacaggctgaagtaagtcacctttccctcaaactaactagaacacgttctaacatgttcatttacctttcttcagtaaaaaagcgacattaagttagtgtatttcatattttattagaaatgcttttatgtaattaacttaaatttc

SEQ ID NO: 180087 - DNA, 1175 bp, Homo Sapiens
tttagaatgtgttagagaaatttaacaagtagaacaggtgatttctggttgatagactctatcttgcagtatatttatttcatgtatcagaccccaaagttgttgccttgttatttttttaatttctcacatttttgaaaaatagatgctatcctctatagtaaaatattgaatcactttatagtagacaatacatatgacatttaacaaatacttggtttgaaaaagtttggctttattcaacaattttagtttgcccactgattttcaaatgtctgtgggattgcttataactaagtagaaagtgaagattgatttttacttaagaatgggatagagatgagttttatggtttttaaaagtattttcagttcattatttaaatgttgggttgttgatatggtcttgtttctgataaggaaataggagcaacttgttttaaaataactacactaaaagactttcttcatctccgtatagagaaatccagatttcaattaattcatttattgggtgctaacaaaattcagggttagagtaaatttaggtctgttggtccatgtggcctggtttcctagcacccattaaacataatgctatcttttaagcctgaacatgtgggttttttaaatcaaattggaaaaaaattagacaactgatgtcatgctgtcttggtatccatactaaaaaagtatcaggaaaatagattatttttgtgctgtgaaacactattcagtggaaagtttagtggcaacttttccatatcattcatgacttaatacctgaaatgcacttttaaatgtttgccttatatccaagtgtttacttgtatccatgacctaaccgtctattgaaaagaatgtttgcagatgcagattgcaatgttgtttgtattcataggcaaaagtcctcttctctagtataattttttaaatctgagagaattgaaggtacagaaaaaaattctggagtgcctgaaccacagtttgagagcacaaaggtcacattctttcagtaaatttgggggaaataaatttcagctacctggttagcttcagtgactacttacacacagggctttggttccattacttgtttccaccacagccacatcctaaatacttggaatatccgaaaacaacttctaaaatcactcaataaaagtattcacttct

SEQ ID NO: 180088 - DNA, 2241 bp, Homo Sapiens
  misc_feature (1250)..(1261): n is a, c, g, or t
  misc_feature (1712)..(1791): n is a, c, g, or t
ttggcgagtctcgacgcagcagctgtcagctccattttgttgttggttggcgacgcagtcagctgcgtgattcccgtgattgcgttacaagctttgtctccttcgacttggagtctttgtccaggacgatgagacactcaaagagaacttactgtcctgattgggatgacaaggattgggattatggaaaatggaggagcagcagcagtcataaaagaaggaagagatcacatagcagtgcccaggagaacaagcgctgcaaatacaatcactctaaaatgtgtgatagccattatttggaaagcaggtctataaatgagaaagattatcatagtcgacgctacattgatgagtacagaaatgactacactcaaggatgtgaacctggacatcgccaaagagaccatgaaagccggtatcagaaccatagtagcaagtcttctggtagaagtggaagaagtagttataaaagcaaacacaggattcaccacagtacttcacatcgtcgttcacatggggtatgaacgtttttaaaacattttggaaattttatatcccatgtggaacagggaaacttgaatttttgtgtttgattatttgagaaagttttaagatgaaatcatctcagttttaacctgcaggattttttctgtgtttgtgcattggataggaaattccggaaataaagtacacatttagttctataatttaattattggttggctcctaattgacattccagtgaaatgatgggagttaattgatttaatttagattagttgaaaattattacaaaatattctaaaagggttttttgtggtacttcaagaaacctgattagttttgatctattgaaatcacaaaagtagaacagggcattttatttttgtataatttaggattaggtatgcttctttgttctaacaagtcatgttttctaacccttctttcactaagcaaaccagaacagatttgaactgttatgggttatatattagtatggagatcagctcagatgacattaaaaatgccgtagtgttattcttgtatgccaaatctttttttccccaaaattagcactttaattttatttactgttataatatttgttttcttagattaggtaggaaatcttaatttggccaccgcctactttgacaagtaaatattacatcatacgattttgcaacattaaattagaacactagaaactaaaaaattatgtttcagtgaatgctacaactaagcannnnnnnnnnnnaagaaaaacaattgtattatgttttgttgccttgccactttgagtatcttatctgaaaatctgttccttgccatgtttttctcctgttaacataaactatgtgccctgtgaatttctggggactgaatttgaaattgctcctgccaaccgtttgtggcctggcgtgtatctgaatgcctgaatatctccccgctgaatgaatttcgtattctgccctgaattcactcgggtatattgattggctggatgatcttggtgccgcccacttgacgtttccagaagagtcaccgaaggaaaagaaccaggagtgtagaggatgatgaggagggtcacctgatctgtcagagtggagacgtactaagtgcaagatgtatagaatatttttcaacacttattaacttttcagataacataatctatatatagattaagctttcagggatttggaaannnnnnnnnnnnnnnnnnnnnnnnnnnnnnnnnnnnnnnnnnnnnnnnnnnnnnnnnnnnnnnnnnnnnnnnnnnnnnnnagaaatgtaatgtttgttatatagaacttccagaacagtaatcaaattaatgaaattagacctaataattatgttttttgatggtgttgaccaataaaatatctagtgataaggaaatttgtagcatcaactagaataatctacattgatagcatttattgtgataagtacattgtttccacttcttgatatgactgagatttatttctctcttttagatgaaattgttgatactttaggtgaaggagcttttggaaaagttgtggagtgcatcgatcataaagcgggaggtagacatgtagcagtaaaaatagttaaaaatgtggatagatactgtgaagctgctcgctcagaaatacaagttctggaacatctgaatacaacagaccccaacagtactttccgctgtgtccagatgttggaatggtttgagcatcatggtcacatttg

SEQ ID NO: 180089 - DNA, 2494 bp, Homo Sapiens
tccgtctggttgcagacactgcgtgcacagtcacgctcaggtgcacacgtgtgctcaggacggtgggaggctcctgaaccacagtgacctttgtcccctcacagtctgagctgccctttctgccccgtttccatctttccccgcccccagttttgcttgtcctgtttctgcctggtcccagctacagcagccctggcccctgtctcttcagcttgagaggccccacagtaggctgctccttccgggggccgttgcctgttcccaccccccacggcccttctctgccgcgctcgttcacgcctcacgcccgtgctgcgctgtcccctgctgtgtggtgccttgtcacgcaccctgtgcctctggcgcgggcagcccatcttcagcccggtctcagctcttcccatgtccatctttgttctgtgaggtcttgggcagctgtctgccgggcacttccatctggggaggggctggtgccgcctgggccccgcctcgggaggacggtgtgctttgcggtgtcacgctccacctagccggggaggcctggagagcccggcgcactcctgcgcctagaggaggagacccgccccgttagccgggggccgcgcccaccccagacccactaaacttcgtttatactgccactcttgtgtttgggaaatgctaaattttttttgcctttaaaattttctgttttgatcccatggtgcatctcgctcttgctgctggcagcagagtctgacctgctggaacccgttgtggcctgtatctttgtgcattgtttctctacctgtatagaacatgcatagatgtctacgatatgacctcttctaggactccttgggcttacccaacggtgttgcgtaagcctagcgaggcaccagctatgatagatactgtatctgttaacgctttagaacgatatatggctgctgtcagcactagctgcaaagcaaattgcaagccaagggggagaatcctgggtttcagagaagcatacacacatccacggtgcacacccctgactaagatggcgcattccacgcgggcccccggcctgcagggttcactggcaatctccccacaggcgagagccagaatattcaagcacgggcctctgaccctcccctggggggcgctttgtctgccagtagcgatggaggccctcaccgttcccctgtctccgctgctgttttataagatgtgctccttgttccaaatctttgtgacacggagccccagcccggggtgtctggggcggaggcttgactcaggcctcagtcagcagagccgtcaccgggagtgcggacgtcaccgtctgtccactccgtgtgcagtcgagtggtggctcctggggagggaggcagctgccccaggggcccgcagcgccccacacacagcttagctgaaacccaaggtcgatccctcggcccgtccctaatactgttcatcatcctgttttgtgtcacaacaccctgctaccttgattcactcttcgtcgttggctaggttttggatttattactttcgaggacgaacaatcagtggaccaggctgtcaacatgcattttcacgacatcatgggcaaaaaagtgtgtagttgtagttttattttaccttaagaccaaaccaagtcttaggcaacttaggggtttcactggaaaggaacattccttcacggaaagggtcgggcgagttcgtcctgtgaacctttgctgcgtgaggtgggcctgggtctgtagacgtgaggagggtcccatccttccccagcacccttcctgcggggtggggatctctcagctttgctcctggagcccctccctctgggtgacctgggactgggcgggtagggggctggggctgggaggctgtggcggtgttggggctggctccagtgaaaccgcagcgttgcctcaggcttggtttccacgaccactccttcagatgtctgcaaatccccattgtctgacactgacctgtaatgtgatcagcaagggacctttgagagccgaggttccgcttaaaatggaaagcacagtggaaacatcatgaaggactggttgtttgaattgggtcacttactgtggaactccggcaccagccacatgctctcggtagtactcagccaccatgcagtcaagtgacctctggttgtgtcatcttcatactgtgttacccccggaggtgagagggacaggaggccacccccccaacccccaggccagcccttggaaggcatgtgtcagaaaggggtccctaaatccttgttttacctggacccttggaggttcttgagaagtggactctgaaataaataactggtagaaattctacagtgtggaatttcttgcagttagcaaaagcttacgggtccaggtttttgcacgattcctgtcttggtcctttcaaaccaaaggagctctgctggctctgccaggccgcctcacatgcccagtgggattctgacccggcctccttggtgcggcagcttctcccg

SEQ ID NO: 180090 - DNA, 1772 bp, Homo Sapiens
  misc_feature (82)..(104): n is a, c, g, or t
  misc_feature (1145)..(1193): n is a, c, g, or t
ttgggtttggtaccgcgtggtagttaaccctccatgccaggcgactgcattgctgcattcaggtaggaaagggtgaaagaannnnnnnnnnnnnnnnnnnnnnnaaagtacaaggaccgctctgctttgtaagcaggaaccgcagtcccctgaggagggtgtgtgaagactcgctcatttgagttctttgaaatgggtcccttggtcctgctgtcacattgccttgagctaacggatcctgttcccatcataggccggtccttggggcattgggcaggtgggggctttgtgcctctgtggctgctgctgtctgttctctaacaggcagaactgagggattctgaactcaggatgtgcagctctccagactgagaccccaaggctgactccaggtggatccattgtctctttattctcattacgatttatcagaaaagtgagacaaattcaggattctcaaatgctgaggcagccccggaattggggggatctttctgttgttagtccacccatattttcaagcaggcattaaaggaaggtcagccactgcgcctagaataagtaggtcaggcctgctccatccattgtccccggccccgcaccctcctcctgagaagactgtggctcctgacacgtctagagaggaagggccccgggctgctgagcgaacacagtatgaagattgcttactgatccaaatgtccattttattgcatgtttgttactttttttgttagatgtaatgtaagattctcttatcacatccattccctctgacattagttttgagttaattgagattctttaagcgttagcctggggaaggtaagtctttatcttccattagacattttaaatttaaaaatctaagtaaaacaccagccgtgtttctcaggtatgagttaaaagcacaggtgggcgggctccaagcagtccagagggcgatgaggatgccgattgctgggaagatcctggtccctttttgtccccatgttttcaagaggaaggaggacgctgccattttacttgagtgaaagacccttcgtcacgcacgaaacccccgagggctctgggctcggtcctgctgccccgcagtgggcgggctctgtgtgtcttacggttgcatctgttgtacctgagaaacnnnnnnnnnnnnnnnnnnnnnnnnnnnnnnnnnnnnnnnnnnnnnnnnntgctactggcctaaataaggtttatagttaagtatttagtcttaagttgtaagatgctaagtgtagtcataagttacccgagggtgtgtctaaagggaagggggtgctgggacccgcagcctcgccctaaaccagagctcggtttgtttaggtggaagttaaacgagctgagcctcgggacagcaagagccaagcgccgggacagccaggtgccagccagtgggggagccgggttgtgcccaacgctgccaatggctgggcaggccagcccccgcccacgtggcagcaaggatatggcccgcaaggaatgtgggtgccggcaggacaggcgattggtggctatggaccgccccctgcaggaagaggagcccccccgccacccccaccgttcacctcctacatcgtgtccacccctcctggaggctttccccctccccagggcttccctcaaggctaacggtgcccccgccacagttcagtttcggctacggcctccacctccaccgccagatcagtttgccctccggggggttcctcctccacagccactcccggggaacacctctggctttcccaccg

SEQ ID NO: 180091 - DNA, 2035 bp, Homo Sapiens
  misc_feature (181)..(190): n is a, c, g, or t
  misc_feature (836)..(910): n is a, c, g, or t
  misc_feature (1115)..(1138): n is a, c, g, or t
  misc_feature (1240)..(1249): n is a, c, g, or t
  misc_feature (1462)..(1488): n is a, c, g, or t
ttggagcatgatctccaaaggatccttttcccttctcttattctcctacccaattggattctatcctgcaaaaaaagagagacctgtcattagaagcaaccaggttctcctgatacaagagaagaaatgtgtgatgacaatatgggtttgctgtatctgctcccatagctttgccataggnnnnnnnnnngtggaaagtttcttttaagatggaattcataaaagggaaaatacggaggaaaaaaggtctcactccaacttgtgaatcagtttaggagttcagatattaatagtaacaatacaggaaaaaggggaactccaacgttgggattactgtctgaggcttgtagcaagtgctttctgtggaatgatcttgttttgctaacaaacggcttgctccaaatgaacagtagtaggttggtgcagttctcgtaacaatcagcagaacttatgatgacacaatccattaattccagctgcgtgcatagatcacatttttaaaatgtaaaaatgcaagcaaaaacagctgtaacaaagaaagtgtgctcaaggaccaaagatttaacagataaaaatacccaattagaagagatatagtagactatatgaagagagattatatttgttacacaccaatatacatcaaagtgcctgttgccttctgaaaatttgaagtggcaaaattattttatggtttaatgattattttattttatcagggactgcctcaagaagaaaataacataagcttgtgaatggtggagaaaatgccctattttttcttgcaaatacttgtataaagttaacatttgttgatctgatattatcataggtannnnnnnnnnnnnnnnnnnnnnnnnnnnnnnnnnnnnnnnnnnnnnnnnnnnnnnnnnnnnnnnnnnnnnnnnnncacagtagattgactatgatctagaataatgtctcaaataggaaatgtttaaatactgtgtgtttttatgttttcaacaggataacatgagacgtgggcatattgcaatgatgaattaaatccacatctaaaaaattaaatgaagggagggaaccaagtaatatatttcataggaagagcagaaattatactgttttagtgggannnnnnnnnnnnnnnnnnnnnnnnctttggtgagccataaaattccacaaatgggagaatatttgtttggcaaagcactcttttttatattgaactgccattttgacagttggaacccatttattnnnnnnnnnnttgcattcctctatgatgtttaatctagtggatcatggatcagtaataggctacttaaatccctgactgctaaaaaggatttccggtgatctaaacactacttgctaatgtttaaatgaattttaatgaatgcattctgcatttctggaccactaaaatttagtaatgtgaaatgaccctttttacagaatatttgcacaattgcttaaaatnnnnnnnnnnnnnnnnnnnnnnnnnnnacattttataaatcatgtcaatatgaaacatctttgatctggttgtcacactgcatttaaatatttagtactgtactttaaatcgctttccattaaatcaaatccaactttattttctttcttacaaaaataccagttatacctttgtgaaatgaactggcattactatttcagttcaataacagctaatcctaaaaccaccctttctcctagccagtagttcctctagatactggtctctgaaaatgcatttgttaaaaacaaaacaaaactaacacataagaaccttccctttgtgttgtgaaacaaccacataatctccacaaccttagtggatgactgcttgctatgataattcctcaagacccaattagaaagattttcattcatcagttaaagagagaccacgggagaaaaaaatatccctcctgttggcagtataatatgtttggtttgtttatctagggatcctcaaaatgctaagtgcttggttaatccaggtttaatccgtctggactacctttttgtgcatctttctttgaaaccc

SEQ ID NO: 180092 - DNA, 1863 bp, Homo Sapiens
  misc_feature (60)..(69): n is a, c, g, or t
  misc_feature (282)..(308): n is a, c, g, or t
ttggcagagcactcttttttatattgaactgccattttgacagttggaacccatttattnnnnnnnnnnttgcattcctctatgatgtttaatctagtggatcatggatcagtaataggctacttaaatccctgactgctaaaaaggatttccggtgatctaaacactacttgctaatgtttaaatgaattttaatgaatgcattctgcatttctggaccactagaatttagtaatgtgaaatgaccctttttacagaatatttgcacaattgcttaaaatnnnnnnnnnnnnnnnnnnnnnnnnnnnacattttataaatcatgtcaatatgaaacatctttgatctggttgtcacactgcatttaaatatttagtactgtactttaaatcgctttccattaaatcaaatccaactttattttctttcttacaaaaataccagttatacctttgtgaaatgaactggcattactatttcagttcaataacagctaatcctaaaaccaccctttctcctagccagtagttcctctagatactggtctctgaaaatgcatttgttaaaaacaaaacaaaactaacacataagaaccttccctttgtgttgtgaaacaaccacataatctccacaaccttagtggatgactgcttgctatgataattcctcgaagacccaattagaagattttcatcatcagttaaagagagaccacgggagaaaaaaatatcctcctgttggcagtataatttgtttgtttgtttatctagggatcctcagatgcttagtgctaggttaatccaggttaatccgtctggactaccttttgtgcatctttctttgaagccttaatgggaacctgatgggtttgctgtagcagcttccttgtgaattctgtcagagctgcaacagccgctgcactgccactcagttttctaaggaactcctcctactaccatcttggctcagtctccctcacttaagccctgggtttgaaaaattaattgcaacttcccaggaaacattgttcagtttgcagattaagcctggcactcacctatcagaaaccagagctccgcctgcttagttgtttcaaagttttctgaaagaaaactaggggagcacttgtgaacacaggagcagctggtgatctgctttcttaccctaactcttgacaaatgagtcgtctactattttaaagagtctggaggtctctgactctgccataacaataacctgctgttaatttataacacagatttttgtttggaagagccttatttgaaatacactttgatttattttcttaaatatttatattcttttcttgcttacttcagggttggtagcttagttggaagtgccagcacctggcacctattcatatagaacaggctgtactcaagacaacttctagcatttactttaagacttatataatttatttctattttgtgtgtactatagtcttgtgcatatgtagttgaacacacagtgaaatatatgtctctctttgtggatgtgcggcctaaaaatttgaatgtctggtgagagagagccatgtgtataggtcagagaaaagaacagctcccgactccctattagcgcctgtgatttgtttccttttgtgtttatctggcctagtgtgctgtttctttaaaccaggaagaagttttgtcttttggaggctcttctcacctgtccagcctggcatgtcagagaacacatagcctgtgacaatgccgtttttaaaggtttacttaatttgcagtaaatccagctgcctcaagaactcctacaccaagatggacatttcctttcccagaaatgggatcaagtatctgctcacttggtattggatgg

SEQ ID NO: 180093 - DNA, 1326 bp, Homo Sapiens
  misc_feature (418)..(491): n is a, c, g, or t
  misc_feature (696)..(719): n is a, c, g, or t
  misc_feature (821)..(830): n is a, c, g, or t
  misc_feature (1043)..(1069): n is a, c, g, or t
ttgggttctcgtaccataacaagcagaacttatgatgacacaatccattaattccagctgcgtgcatagatcacatttttaaaatgtaaaaatgcaagcaaaaacagctgtaacaaagaaagtgtgctcaaggaccaaagatttaacagataaaaatacccaattagaagagatatagtagactatatgaagagagattatatttgttacacaccaatatacatcaaagtgcctgttgccttctgaaaatttgaagtggcaaaattattttatggtttaatgattattttattttatcagggactgcctcaagaagattttaacataagcttgtgaatggtggagaaaatgccctattttttcttgcaaatacttgtataaagttaacatttgttgatctgatattatcataggtacnnnnnnnnnnnnnnnnnnnnnnnnnnnnnnnnnnnnnnnnnnnnnnnnnnnnnnnnnnnnnnnnnnnnnnnnnncacagtagattgactatgatctagaataatgtctcaaataggaaatgtttaaatactgtgtgtttttatgttttcaacaggataacatgagacgtgggcatattgcaatgatgaattaaatccacatctaaaaaaattaaatgaaggagggaaccaagtaatatatttcataggaagagcagaaattatactgttttagtgggannnnnnnnnnnnnnnnnnnnnnnnctttggtgagccataaaattccacaaatgggagaatatttgtttggcaaagcactcttttttatattgaactgccattttgacagttggaacccatttattnnnnnnnnnnttgcattcctctatgatgtttaatctagtggatcatggatcagtaataggctacttaaatccctgactgctaaaaaggatttccggtgatctaaacactacttgctaatgtttaaatgaattttaatgaatgcattctgcatttctggaccactagaatttagtaatgtgaaatgaccctttttacagaatatttgcacaattgcttaaaatnnnnnnnnnnnnnnnnnnnnnnnnnnnacattttataaatcatgtcaatatgaaacatctttgatctggttgtcacactgcatttaaatatttagtactgtactttaaatcgctttccattaaatcaaatccaactttattttctttcttacaaaaataccagttatacctttgtgaaatgaactggcattactatttcagttcaataacagctaatcctaaaaccaccctttctcctagccagtagttccttctagatactggtctctgaaaatgcatttgtt

SEQ ID NO: 180094 - DNA, 597 bp, Homo Sapiens
  misc_feature (437)..(471): n is a, c, g, or t
ttgggtggactcgtggtgctggctgccgctgttcaggcggccgggaacgggcggtggggagcgggcggagctggccctgcctctgcctggccggcgccgcagtcggcgcgggccgcgcccgccgccgccaactgccctgagcgcttgctgaggccgagggagacgtcggggcctgcacctggagggagcctgccgcgctggccccgaggagggggcgttgccatggcgacagcctctcccgctgctgacggggggcgggtgtaatattttcaaaaatagttctactgatgctacaggaatttcaagcctgtggtgaatgttagtatttaccatagggagtgaagtggagttatggtttcattcaatagagtattgctgattatacttgagtggaatcctttcctcacgtactcccacagacgtctgggcctggaaannnnnnnnnnnnnnnnnnnnnnnnnnnnnnnnnnnagaaaaacaccacttttattatgtacaataaaatatttcattagcttgaattgtatagatttttaaaaattcaatgaaagcatgttgtttaatttcattttaaaatcactgttgggctttgaaagc

SEQ ID NO: 180095 - DNA, 921 bp, Homo Sapiens
tcttaaatgtccctcatcctggatgaaaggtctcccccttttcctcccaggcattccgcagcgcagtgcctgtctcttccatcctgccgctgcgttcccgttatcccttcagcatcacttgcttgaaagggggtttgttataaatatccctgacgtctgcgctgacgcaggcgccgctccggagtctccagaatgaactcgctttttatcaatgaaactgccttacacacccgcccgctgcaccctcctccctcatccctcctccgtgctccaggctgccgggggaggggggattgccgctttctgccacctccccggagaagccaggctctagttagcgagtttgtgcttgggacacgtctgctccagctaatgtcagagatccgtcctggagtgcagaccagaggttgctcagaacgaacctgcctcccgaagggggaaccaattcttactatggcaagcgtgcgtgcgctcagagcaagtcccgagcccccgagccggcaccgctccggccacggcagcctccctccaggcacaagggagccccctactcatctactggagcgtcccgcccggtgtctcctcctccgcgaccccaagcccccggccccgcggcgacgggaagccagccttacctgcgcgttgacaggcgagcccatgctggagaaggagtctgcgggtgagtggtagtaagagaggctatccccggccggggacgcgctgctgcagcgggaggatgacgcctcgtagtctgcgttgaagcccgagaacatcatcgtggcggttaggcaaagccgggcgaggggccgaggggcggagacaggtgggcgctgtgaagcagagctgggtaggagcacggtcactgctcgttcgctgcgccgcggccgccggctcagtcttggcttctcagttgctcgccaa

SEQ ID NO: 180096 - DNA, 1420 bp, Homo Sapiens
taaactgaaaatttaatattaaaacaattaaccaaatatctccccccattggttaacccaatttttgaccactcagtgttgaggttcatttactactatgatttttcaaagactaactcagatgtaatactgtactgttttttctttccaccacatcatactttcactcagattaaagtataaaactagaagcagggtaggtgattttatatgacaaaatatgaaacaatgactatgacaggcattatggcattttcatatgtttatatttttactacttagcaaaaaaatacttagaacttctctagtaactcctgagttgtagattttattttctcattgaagctggaaaaaagtagtcccaaaacctaaattcaaaataaaactatgcaacataatttttgagttgacaactaggcttgatttagagaaagtaaacatattttcacctctatcattattcttttgaatttcttatgagatcgagaatgaaaatgtataatggtacaatattcttcatgttataaactctttctctactgtacagaaatatatcttataactatatgtcactttacagtatttaaaaatagtttcacataatctcctttgatatatgaaagcacaaaatattagaaatgttctagactaatcaagcgatataacatctatttgccatgaaatgcaagttagtattttatcaatagccaatatttagtatccttgcactccacagtacaacaataaagattatatatttgtaaagattcagtaatatttttagctatttggtcatgcttcactgcattttttataacagcttctcaatgaatttctgcaagcatatcgtagtttttaaaattacaaaacataggagtcaaacccagagcactgtttcatatataagacacacataaatacatatctatagatcttatttaaaaaactaatatacaaagcattaatagaaaaaaattctagacactcaatgtttatctccaaaaggaatgatatccttttacttgttctccactgaatgattatctaagttatttagggattaaatgtaagaaacatactattatatatgaatatgcatttaaaaacaccatagtgggaaaaggccactatttaagatggatgccaggaagtgtttctcttgagactaaatattctcgaatttaatgttacaatctaatcaaaatccctaagtaggaagaatattctaaaagttaagttgctaaatgaaatgtttttactcataagggctctaatatacaatttctaagtaattcaaattacattcattgattttagtatctggtaactttattaatatcataatatctggtcacaatcttttactattatgcatttagaaagttgtctgaatactttatcatgtatataaaattgccaa

SEQ ID NO: 180097 - DNA, 1962 bp, Homo Sapiens
  misc_feature (176)..(221): n is a, c, g, or t
  misc_feature (1494)..(1628): n is a, c, g, or t
tttgtacaaaaaagttggctcctgtttgcgaggccaccgcaaagaggtggtgggatgcctctcctcaagagaggtgatcgtgggcttctcctgaaggagaacggtaatcccagatgagctcccaaattgttggcaataagagctcagagttgcaaagaaaatgatctccaaaagannnnnnnnnnnnnnnnnnnnnnnnnnnnnnnnnnnnnnnnnnnnnnctcctggtcacagtgagagcaccccgaacaaaggaggtgaagtggtttttatccctaacacagctagttcctgcttctgtgtcctatccccattggctagagtccaatctaaactagtcctgatgggctattttaaacaggaggggtgtgggttacagcagtgggaagagcagttgccacgagcgagggagacttttccagataaggaacaaatgcgggttacaggttgggattggtgggagaaatgtttacagaatgggtaattaggagtgggaaggtatgaggaagttgaccttaagaacaaagaacaaggaagttaaactttgaagagaaacccatcatacctaacagtcttgtaagaaaggatgacaaagtgattgaacattgggtggagctaattttccttggccaattcacttagtaagataaggagctccaaattatatttaagttgggagtcaattgattttacttaattcttgtgaggttcagttataagattcatcatactactaccatgagccatcctcagctccttgttacatgggcctgttaacatggcagctttgtctataagcaaacccaggagagaaagatatagcagagatggatgtttgaagtctataccttccaccccctttaaagagaaagtaacaccactccttttctgtgtcccttggggacactacctccatgtctggtcacatggctggactttacagcagataagcatactgtggcctgagaccatgattgtatgctttccttctgctgacctttacaatccctcaataaattgagctaacacagggaagcttttttaccaaataactgtgttgcatcatcctccagtttgcctggtgtccttaatcaatggaaggggaataagcaaactgagttttcttacaccttttgagtatagtgtttttgccatcatagatgtggctcctcataattctccaacttttatattaaaaaaccaaaacctcaaaaattgtagttcatgtcagtcagtgatgactcatcttagaattattttgtttttggatgtgtgaatgtgcatagttcttaaagtccaacattcatgtaataagacatcttgcatataacaatgacccttacgtctaagatgttaaatagatcctaagcctggtataactttattcaagtatccttatttgcccctaaaatgtctttaatacacattacttgggttatctcttgaatgaacatacaggtatcccaatttctgtttttaagagaatggggtctnnnnnnnnnnnnnnnnnnnnnnnnnnnnnnnnnnnnnnnnnnnnnnnnnnnnnnnnnnnnnnnnnnnnnnnnnnnnnnnnnnnnnnnnnnnnnnnnnnnnnnnnnnnnnnnnnnnnnnnnnnnnnnnnnnnnnnnagagttgcagccttgctacgtgacccaggctggagtgtagtagctattcacaggcatgattgcttgaaactcatggcttcaagggaaactcccaccctcaatatcctcagtagctgcaactacagccataccccccactgctcagcttctcatcctttaaaagatttttactggtagtgtcctcattctgggtttttgtcttctgtgtttactgtgacatgaaagtcatttttagatgaaggttaaacattttgccaacgcaggtacaatatgggattcaataaaagtacagaattaaagttgtctattagagattgggaagtttcccagctcc

SEQ ID NO: 180098 - DNA, 2008 bp, Homo Sapiens
  misc_feature (224)..(238): n is a, c, g, or t
  misc_feature (1378)..(1423): n is a, c, g, or t
  misc_feature (1528)..(1581): n is a, c, g, or t
ttgggttgaatgcttgggaaatactctcagttcgggatactgatggaacattttgaccggtagggtgttaatgttcccagactaccaaagcagccctatggatcatggttcttctcccaagaagggaatgcctaaaatggacataagctcggcccatacaactggggtcctaaaaaatgatttgatctgctaccccataagggtcatctaacaagggcttgagnnnnnnnnnnnnnnnagattttgtacttctgagctggttaagggggcatttacgaagctgatgcctcctctcccaaggggcacttcttcaaggggaagagagttgggggcaattctttggaggtggaaaggggaaagggaagttctgagtatcctttttacattgttctatttcatgctgtagggcttaagtgtgtggctagggggaacatggggtattgattcaggattatatgggggagggactgatgagtggggggatcctgtgtaccggcctgatgcatggggtttggcagaggcaagtggtctggtgggtcccatatgttagcaggctgttcgggggtagagaccttactcctttcagaggagttggcttctggcttgcttcctgtagttatgtttagtcctttcactatccttttagcatgagaacctaggggactgtcagaggggatgttactgtcattaatttgatcctttctatttactgtctttcttgaggtattttgcataatgaaggtttggtgtgaggcccaaaattagatttattgcctttcctcataggctcaacctcccttactggagatttcttgccattcctttctctagagggtcagcccctggctactggagatttcttgcactcttctccttttgcttcatccttctctggctgcttcccaggagggaatatttcaggtcctccttagcattggtgtgtcagtataagccccatgacaggaatccaccataagctatacgaggtgaccatggaatcacagatccggaatcatcgctcgcttcgcactcagttgtgcgtctcattgacacactttcaacctccaaaatgccctgaccaccaaggaaatactttgtcgcccctgtgacttttcttaacttggtctgtgcagttacctggtcaccgcagtatgtgaggatcctttccgcctgtgttgctgagagtctgggtttatgtgtcaccttgggtgggacccaatctcctgtttgtgaggccaccgcaaagaggtggtgggatgcctctcctcaagagaggtgatcgtgggcttctcctgaaggagaacggtaatcccagatgagctcccaaattgttggcaataagagctcagagttgcaaagaaaatgatctccaaaagannnnnnnnnnnnnnnnnnnnnnnnnnnnnnnnnnnnnnnnnnnnnnctcctggtcacagtgagagcaccccgaacaaaggaggcgaagtggtttttatccctaacacagctagttcctgcttctgtgttctatccccattggctagagtcnnnnnnnnnnnnnnnnnnnnnnnnnnnnnnnnnnnnnnnnnnnnnnnnnnnnnncagtgggaagagcagttgccacgagcgagggagacttttccagataaggaacaaatgcgggttacaggttgggattggtgggagaaatgtttacagaatgggtaattaggagtgggaaggtatgaggaagttgaccttaagaacaaagaacaaggaagttaaactttgaagagaaacccatcatacctaacagtcttgtaagaaaggatgacaaagtgattgaacattgggtggagctaattttccttggccaattcacttagtaagataaggagctccaaatcatatttaagttgggagtcaattgattttacttaattcttgtgaggttcagttataagattcatcatactactaccatgagccatcctcagctccttgttacatgggcctgttaacatggcagctttgtctataagcaaaccca

SEQ ID NO: 180099 - DNA, 1902 bp, Homo Sapiens
  misc_feature (404)..(431): n is a, c, g, or t
  misc_feature (450)..(684): n is a, c, g, or t
  misc_feature (1781)..(1795): n is a, c, g, or t
ttggagaatgagggttttcccactcaaaagcaaatacttctcttgtcttcagccaagggacatgcccagaaggcatcttttaaatctgttactctgaaccattgattgtcatggaattctgctgaggatggtaaaaggattggggacaacagggtgggtagtctggactatttggttgatagcctggagatcttgtactagttgatgagacctgtctgatttctttacaggtaatactggggtgttaatagggggacatacagggttcagggaatcagtcctgaatgagaacttcaactacaggctttaattctattctgccctctaggggaatgggatattacctttttcttactatttcccctggggtctttaactttgtatggattggagtgacttgaagnnnnnnnnnnnnnnnnnnnnnnnnnnnngagttggagtctctgtcannnnnnnnnnnnnnnnnnnnnnnnnnnnnnnnnnnnnnnnnnnnnnnnnnnnnnnnnnnnnnnnnnnnnnnnnnnnnnnnnnnnnnnnnnnnnnnnnnnnnnnnnnnnnnnnnnnnnnnnnnnnnnnnnnnnnnnnnnnnnnnnnnnnnnnnnnnnnnnnnnnnnnnnnnnnnnnnnnnnnnnnnnnnnnnnnnnnnnnnnnnnnnnnnnnnnnnnnnnnnnnnnnnnnnnnnnnagtgtgagccagcaagcccagcctccctgatttctttttcctgcccatacatgaggatgaatgtatttttcttctgcggtggtaagtctcttcctaataagttcgttcctgcctcagggattaacaggaatttaacatgggctgatcaatttttgtatagacctctgtcttttaagatttttgctttaaatcttttatccctgagatagaaagttcttctgaagaacaggtgatagataccagatgggagggaacgggagcgagctgctgctgaatctgtaagaaggttttaagttcacatttgggtcccacctctaaatttatcaggggctcttggtgggactcaaggtaaaagagacagcccctgacctccctattttcctggaaggccataagtggaatattttttctttttcccatttggggcattctcttttgaagtgacctactcttccacatttgaaacatttgttttcccctcttccctgtcctgcactgtgacttccaggttttattcccttactccttgtatacagtttggtcgctggtggcctagagggtttgtaagttttacttccttgtgtctcctactgcagagttctctgttgtaaggtagacagcatgatttttgccttttgtttctgctgctctttgtccctacttatatgcttctctaagaagttagtctctgggacaatctttccaattctctatcttttgtagttgtttttagaggtgtttggccaagtcttagtaacaaaatgaagctttagcatcccttgccccagtgggtcttccatttctaaacctgcatattttctcatctgttctttaagcctatttaggaattcatgggtccttcatccatcccttgtatgttgaatgcttgggaaatactctcagttcgggatactgatggaacattttgaccggtagggtgttaatgttcccagactaccaaagcagccctatggatcatggttcttctcccaagaagggaatgcctaaaatggacataagctcggcccatacaactggggtcctaaaaaatgatttgatctgctaccccataagggtcatctaacaagggcttgagnnnnnnnnnnnnnnnagattttgtacttctgagctggttaaggggcatttacgagctgatgcctcctctcccaaggggcacttctcaggggagagagttgggggcattctttggaggtggaa

SEQ ID NO: 180100 - DNA, 1495 bp, Homo Sapiens
  misc_feature (243)..(273): n is a, c, g, or t
  misc_feature (1240)..(1293): n is a, c, g, or t
ttggccccattgtgaccatgcccaccagcctatcccccacctataggcctatgaggctcaccccagagcagcaccccagggggacatctaggacctagccaagggctcccctcctggcctctggggcctgtggctgccccatggccaccctgtgccctgccatttacttattcaacacatgtgcctggagcagctcctgtgcgtctagccctttattccgtggaggacaaggggatggagtgnnnnnnnnnnnnnnnnnnnnnnnnnnnnnnnacaggggctggagagaatggtggggttctaagactaattcccaggtaggtgtttctctggttccttgaggggtttgggaaaggcaagaagtacctgatggagaagcccaggtgtttctggtagagtgtcactgtccctctagggctgaggctccctcgaaaggtcctttggagaggctggagggatctgggaggacccaaggcctgggtgaggcgggcagtacagatgcaccaggttaccctgccctgaaccaagttcattttttagggccctggttccttcctctcgccccactctcttcttgggtacccacttccacaggggccctcaggggcctgtctggggctgacctatccccatccccaagagcacatggtctcaggccacaggttcccatgggtgccccatcacagcagggtggtgctctcaggccacccctgagctgaggggatgcctcttgcccagatcccatggactggagccccagcaatgtgcagaagtggctcctgtggacagagcaccaataccggctgccccccatgggcaaggccttccaggagctggcgggcaaggagctgtgcgccatgtcggaggagcagttccgccagcgctcgcccctgggtggggatgtgctgcacgcccacctggacatctggaagtcaggtaggatgtggcatggctgggagcagcccctcccaggctccaagccagggacaggatgctggctaggaggttgccctctgctagggcagcagccccttggcccccaactggactccactctgaatctcagccccagtttcagctgcctcctggatcctggtgcactcttcaccccaacccactcccagccctggtcaaggccccagagctttgggacagagcacctgggaggttaaaaggtagaagtcagactgtgaggatgcaggatgtcagagctggggacaaccgtggatactaggaagtnnnnnnnnnnnnnnnnnnnnnnnnnnnnnnnnnnnnnnnnnnnnnnnnnnnnnnattaaagaagtaataaatgtgcatgttataaaatagaccacagtgaaaagtagtgtaccatgaacagtttccccctcccgctcccgacccccagcttccaatcccctccctagagggaaccactgttacaagtttcttgagtatctttccagggaaagtctatgaatactcgagcacatttacatatatgcagttcttattc

SEQ ID NO: 180101 - DNA, 1258 bp, Homo Sapiens
  misc_feature (689)..(697): n is a, c, g, or t
ttggatttctttcttttctttgaatattaatgaggaggaacatcttttcatgtttcttggccatttgcatttcctattatgaattgcttttgcccattttcctttttttaattatgaaagtctaatgactaccttctcattgtataaaaaacacagttctttgaatagagagacccttttctccaatgctaccaatcacattccacttaccacagtttaacatacatcctctagtcacctttccgtacgaatatacatacacataaaaacactttttacataaataggatctcatattctgtagctttttaaaattttggtctcaaaaaaagataacaggtctttaaatttctttaatggttgaatatgattaaatactatgaaaatgccattatttattcccttaatttttttcctctcgctattacattgccaaagtaaacatcctattcagatgtctttgtgcatgtgtgtgaatatttctttagtctggagtccagtaaggtggatttttggatcaaagggtttgttctctgtccaccttcagtcttcccaaaggccttcataactgtattttcaccaagtgtatggagaatgttcatttccccatataaccatacctacacttgatagtttttatctgttgggcgaaaaagaaccttttcttattttgcatttccctgattatnnnnnnnnntggtgagattggggttattttcatgtttattggccatttatagtttactgtggattgtttgtatcccttacctgctttctattgggttatgtgtggatatattgtttttatttgttcagcatctccttccccatcttctggtaacacaacctttatttatttgtggggaacctattccctgtggcttaggtgagcatgtgaccaggcctggcctcctgagtcccacagcttcctagccacagtgataaaagaatgggtatataacttaagccaggctaaggaaagcccttaacagaacttctgctggaactactggaaagaaggctttatggagatcccaggaaccaaggaccatgtaagcctgaatttgtgccatgtggagagagtctgtctgaggagaaactcggatgctagcagaaatggaaagagaaccaagttctgatgtcatttttctggagggccctagatccagctgtgcctaaagcctgccctacctccggactttaaagttttgtgagccaataaggtccctttcttgtttagaaatttgaattgagtttc

SEQ ID NO: 180102 - DNA, 1432 bp, Homo Sapiens
  misc_feature (1327)..(1335): n is a, c, g, or t
ttgggttaacaaatgtgaaagctattaaacattgctggtttgaattttttacagtgcagaaatgtaaaatgaaaaaggatatttcctttcacagtgttaccgagaagtcatgataatttcgtttgttcttccagatttaggcatatacttatttaatcaataatgtgttaacagctgacacctgtggttgctgtgacaggcactatttgaagtgctttatcatggattaactcttaatcctcagctaccgtataaagtaggacataaccccatttcacatgcactacactgagacttgcctcctctccccccacattgaagatgttcttttttcataactatatactattccattgcatgaatattctgtaatttatttaatcccctatggattgataattaggttcattatagatagaagtgtaattaacattcctgtacatgtattttgctacttgtgtgggtatttctgtaggatgaataactagaaatttattggatcaggtttcacatttgcagttttgaaaactactaccaaaaagatttcaccaatttacaactccatcattagtaagaatgcctgtttgcctatagtctgccaaccctgaatccttaaaaatttttgccaatctggtaggcaaaatttctttcttttctttgaatattaatgaggaggaacatcttttcatgtttcttggccatttgcatttcctattatgaattgcttttgcccattttcctttttttaattatgaaagtctaatgactaccttctcattgtataaaaaacacagttctttgaatagagagacccttttctccaatgctaccaatcacattccacttaccacagtttaacatacatcctctagtcacctttccgtacgaatatacatacacataaaaacactttttacataaataggatctcatattctgtagctttttaaaattttggtctcaaaaaaagataacaggtctttaaatttctttaatggttgaatatgattaaatactatgaaaatgccattatttattcccttaatttttttcctctcgctattacattgccaaagtaaacatcctattcagatgtctttgtgcatgtgtgtgaatatttctttagtctggagtccagtaaggtggatttttggatcaaagggtttgttctctgtccaccttcagtcttcccaaaggccttcataactgtattttcaccaagtgtatggagaatgttcatttccccatataaccatacctacacttgatagtttttatctgttgggcgaaaaagaaccttttcttattttgcatttccctgattatnnnnnnnnntggtgagattggggttattttcatgtttattgggccatgtatagtttactgtggattgtttgtatcccttagctgctttctattgggttatgtgtgg

SEQ ID NO: 180103 - DNA, 1332 bp, Homo Sapiens
  misc_feature (635)..(646): n is a, c, g, or t
ctttgtacaaaaaagttggattttctgaacgaggcatttgaattgtaccagcaatggacttttaaaaaattggatgtaaaaccattcagggtgatttttcttgtcagtggacagtgacgaacagagatttgaaatcccttacctccaataataagccattcagcctaaattcatttttatgaataaatctcttctttctcatggtaaatgtggcttgtgccactcaaacactagtgaaagggtatgtacaaccgcaacatcaggccaggacaccatttatttaaccaagtaatggaggagagtgaaacattttccaaggccttatttctttttcagaatgctttaagtgttgattatgtgtgctgggtctctagagaagtttttatttgttacaatactgctgctttgagcaattttgtttctcttcattgtctgttaggggaatcaccagctttggcatcttaacaacaaacagtggatgggtaatttttatttctgatacgcatctttagagtcaaatatatcttttccctgtactcctcatgtacaaccaaagaacatacattatgaaaattgtattataatatctggaaacacaacattttcctctggcaggtgacttttgtacgaaatgnnnnnnnnnnnncctgtattttttttgttgttcttttgtgattaaggatatacatttagtagtctttgttattaaaggaacctgctgataagtacaagtgtgaccatctcattcaaatgtttgttgttatgatgcaaatggatattggtttcaatagaagctggatccttaatactgcattttctgaattctgttttaatatttgtgttaaagtagacatagctgaactcacatggaatcctggagttttgttatcagcagctttgcagtttgggaaacaaagaaaccaaagctgagtgttttaaagaatgaacatatctggaaatccttgctctcaaaacaaaacaatataatctatcaaaggtgttttactcagtgttctaatttttaaaaaattttatctgcatatttgcatcaaatatttatgtgtaaaatgtatgttttacctccttaaaatgcctaaaagttagttaatagttactttggtttaacctatacacaatgattaagtgcatttaatattggtaatttaatgaaaaccattccttgcccaatggatgtataaatttttgaaagaataagcagaattatataatatgaaatgctatgtaaagttttctatgtaaaaatattatgtataatactattaaaatatcccatgctttgatcaggtggtacatcaataaattttaaaaagt

SEQ ID NO: 180104 - DNA, 3027 bp, Homo Sapiens
ttggggcaagtctaaacccaatcttctaaaacaagaaaccagcagcctggcctgttgtttgaggatcctgtttcgaatgtatgttgatgagaaccgcagggattcctgggaagaaatacagcagagacttttaactgtttgcagtgaagctcttgcctatttcatcactgtgaattctgagagccatcgggaggcctggacaagtctcttgttgttacttctaactaaaaccctcaaaataaatgatgaaaagttcaaagcacatgcttcaatgtactacccctacttgtgtgaaattatgcagtttgacctgatccctgagctccgagcagttctgcggaagttcttcctacggataggtgttgtgtataagatatggataccagaagagccatcacaggtaccagcagcactgtcaccagtgtggtagccctggctgcccaggccagtgctgcagctctgcagaatgttcagcatgccatttctgactggcacatctcgtgaagtttcatagaaacaaggagttggcatcttggatctcagaatggcctggaaacggatggcctctacgctgttccatcacagtctccaactaaggcttatggtatttcattaaactgttgcatacccagttagcacagtaggtggggagtctgcttcatttctatcattccatttttctgattaaactgtcaaatctgtcattgcatatgccatcgttttctagcaaaatcccatgattggctataaacgttttgtaagaagtcactctccttgaaaatactgaacatagctgtataggtttgtgattattagagaatatgttaataaaacttcttgtaacggctaactgccacctaaaatatgctgggttttctgttgtttgagtgtgttagagaaatttgaatgtttttgtcagttacgagtcagccgtaattagattagtttaaggacaggtcaggattagagaagagttgtttttgtgttttgttaatgtctgagtgatttttaaagtattttacaaaaagatattgaaaatttggttgaaggcagagtttagtaattaagttagaattaagagttttgcgaggttaaaaaaatgtgcctcgtggatctccctgttttagtaacatggagagaaaaagtctacacgaaaaagtgaacaatttaatgaagatgattagccttccttgaaataagtatttgtggatgggtgttaaattaaaatttccagaatacactgtccatctcacacactctgaaatctaatatatgaagtagtaatgaaaatgaagtagtaatttaaccagagttcatttatccttgaataaacctttttattttcacctcagaaaagtgagtgtactggcagttagtgtcactgctttgcacagtccccattaaaggaccctccagagagggacagtaactgtgcatgagaagccgctcccataagcctcctcagccagatgtcatgggtggaactggagctgtgtcggggccagcacagctgaactgtgacaatggcaggaggtggcatgtgcccagcacttccattaatctgagcctaggagttgaattctttggcaaggttggattctgaggtccttattatgttaatgatggtgcaatactctcacctgcagtagaactgagttctgctgcagcttgtgtaaaagtgggcagtacacaagtacgtcccaaagcctgtgagcagtatacgtggatgctcacccatgagaaggagcacacacgcctcattctctgccctcacccactgctcacctagagcatcgctgagcgttagacaaagtgttacacagaatgattaaaactttcagacttctacctatgctctttagtcctgtaaattgggttgtattgatgtcaactctggtgccttagaagttagtagtttgggaacctatctgtaaaatcagatgttttttctttgtagagaaggatttctggtgcttttgcttactaagagaccgatattcttaagttgttttcttgttttaacagccttgagaaatgtttggttttggccagcagaattcttgtctacttttttctttcccaaaaagtgttttttaatttctctaccaaagaaaaaatgagcaggtttaggtttttacatgacttatatacattagataaaaggagctgtataatttagcaggaagggactatgggagaatactttactgtgagtggaaaatgttagcacatttgactggtttgccctggaatccactgcacctttacactgcaccatgaaacctacactccctggtatcatagcgcgtcatcacctcaacaagtcagtcgtctccattgatatttgtacaaaaggtatacatggggaacacgtgttcattcattaagtccatcttgcgtgcagctatatccctgattggttatttttcctttccttctgaggttctcatgtcattttcttcatcggatgtgactaaaatttttctggtgtcttctgccctctctttaattttgcctcttgaggggtagcagatgtgtcagtgcattttattacttgctgaaacattcaggcttacatttcttattagtttagtattttaaaagatttaattttctgaatgaggcatttgaattgtaccagcaatggacttttaaaaaattggatgtaaaaccattcagggtgatttttcttgtcagtggacagtgacgaacagagatttgaaatcccttacctccaataataagccattcagcctaaattcatttttatgaataaatctcttctttctcatggtaaatgtggcttgtgccactcaaacactagtgaaagggtatgtacaaccgcaacatcaagccaggacaccatttatttaaccaagtaatggaggagagtgaaacattttccaaggccttatttctttttcagaatgctttaagtgttgattatatgtgctgggtctctagagaagtttttatttgttacaatactgctgctttgagcaattttgtttctcttcattgtctgtt

SEQ ID NO: 180105 - DNA, 2356 bp, Homo Sapiens
ttgcaacaaattgatgagcaatgcttttctataaaaagcaactttgtacaaaaaagttgggttttctgaacattttgagggaagctgtcaacttttttcctctgaattaacattgctaacctaggcgtttgaatctctaataactttatatgtaagaataatagttggaatttgcactaatatttaaaaacatgttgaatcatgcttctttcacacttattttaagagagatgtaaattttgttcctgtcctctttctgtcattacaggtctggctcttgtaaccgtgatcaaactgttcatgttgtctgctacatttttgtctccatccatttttcctaccacctcctgaaggctatctgatagtcagtcacattagcagccccaggcagcagacaacaggaaagttaggaaatttgtgtttcgtgtcatttttaggagcatctgataaaacctccagcaggttttaggaagtattcatgtatttttctggttactttctgtcatctctaattgaactcacctgatgaaggttcagtgttctggggccagaatttatgattttagatcaccttctttggaaccttagatcactgtgttttgaaatcatgagtttgcttttaacttcatagggtcaactttaaaatgatatgcactgttaattttaaagcatttgctgcagataattaaacttagaagtgcctttgactttaggatacaaatattacagaagaaaatataatttcactttttaaaattggggtgggaaaatcccattgcatatttgaaataggcttttcatactaagcttcatagccaggagtccccagagtcttgttcctctgaaagccactggggagtggcctctggggtgctgattccacagaggtgtatgctgtagacaggagagtgccatctatgccaaaactcgccctcaaaaacaaacaaggcttgctgggaggcgtgctgggcttggccatcagtatttccagtgtggtaaactattgctggcacttccccctggaaataactaatgaggttacgagttgggcacctgcacagatgtccttctctcatagttcctaatgcttaggaatagaggagaaataaaaaaatggattctctcaaaacactgccatttgaatagcgacagaagtgctcccccagcccccaactttggacagcaaagttgaggagaatgagcagacacagttgtttgcttgatctgaatctctctaaagtaaagtatttccaaactgtgtgacaagagcctacctaccactgtagcggtcaaagctgaagcttcttacagcagtgaaacggggcaccacctcccccacactcctcattccccgcttaaaacatggatactttcaaatttgactgtttcttaaactgccatcctaagatatggaaaatttttatagtaaagtgtctagttagcttatttccttttctaaaacaagtgttttcaagataactgtattttacctttatatgtactgaatagctgtttctttttgaattatttgccttttaaaatttgataatgtctctggatataacaggacaggagttcttaaaaaatatcttaagaaattcactttatgggtaaacccaaggtttttgccaacttgttgcctagaaaataagggctagtttcagtttatacaaatagaattattaaacattttacagtccttgattagaaaccagacccaatctccttataacaccacagcgtatcctgccattgacagtgtaatcacaattctccctttttcatttagctgcttttttattattactaaatgttttggattgagcatttttccctctgtaattttcttccttcacgtttattttaactcttgtagtattttattgttgttaatttacaagtttaaaaatattaggtactattaataatggttaaaaatagaaaaatgcatatttttgtatgataatcaaatgtaaaatacttttatttttgctggacagttgttatatcatgattattgtgctacagtttattgtgcataatatgaaaaacaactatgacagccttcagtcgggccagggtgaagctgcttataccacctctgccgtcagagggacatgtggtgacagcagtggtgtggctgcacagggcgcactagagagagctcagcacccctgctgcccgccagcagagcccgtgctgagggaatgccgcacagatgctgatgcactgggtgaaatttctagtattgaacgtaaaggtgtacagtgtcttgctgttattttatgatggaaactgattttgaaaccaaaaatagctaactaactttatttaaggaaaggatattattttgtac

SEQ ID NO: 180106 - DNA, 756 bp, Homo Sapiens
  misc_feature (360)..(368): n is a, c, g, or t
cgtttcttttgaattcagttgcatatgaacttcttactctgaattcctgtttcatcttagagatgatttttgcttttatctttcttaagagataatttcattcattcaataaacttttaataagacacctctatgagtgagaagctatgacagaatttgtagaaatgtcaaagatgaaaacacatttctgacctcaggaatttatatctagggggaaaataagacttcatgaaaattgtgctaaaaggatttcttataataaaatattttaaaggggtaaacaatgtattacagtaattggtaaggaaatgaatatcatgttttctaaattctgttttagtgaaaattctcttgcccccnnnnnnnnnagccactgcattcttttcttattcaggccatcactatgacactcttgtgttattgttataacttcttccacttcccctttgtttctgccccctacccagatactctctccttcacattatcactggattgtcttctaaaagactcatctccttaaaaatattgataaattcccatctctatgacattaagactatctagccagcttactctaagagtctgttcaccatctgggcaacactgtgcctgtcacatttttcaaatactcagtgctataactgttacctacatgaaacatctgttttctaactttatccattttctgttccttgtccttaaaacatcctttgcttgctgctccagcctgggcaacaagagcaaaactctgtc

SEQ ID NO: 180107 - DNA, 1309 bp, Homo Sapiens
  misc_feature (1083)..(1097): n is a, c, g, or t
ttgggtttaagaagactctttagttttcctgcagattgttcaagattacatgataatcacacggagtatttatttcctactgacaaaccaagtacttgttacatcaccaatggtaccaggagatgaagacgcgggttttgagcaggagcgagattaccacccaaaaaggagctacctgaggcagcccagcttctagcaaactttttacatgttgcacatttcagttcttaaatgaaggctactccagtgtcatttcattaaagtacctgggtgtagtactcaagtcccccctcaagagttcataagtaagcagtatccttttggccagtggtcctgtttttgcccctacccagactgttcgagaagcatattctatagataaatctgacatttgtcatccaataccattgcagtcctctgcagcatacattctcaatgggggctgtatcacccctagattggttctgagatactgcaatgtcttgtgtccttccaaaggaccataatacttgagcaaatatgaacatttcttggggtgagggcagaaagagagaaacaaaagtctaaaaagggacaataatgaaaaaacagttgagacctttagtatgatgggaacaggatgaggaaggaggagatactgacaggagccctgggtcttgctctgcattaaacagatatttatggacattaaacagatatttatggagcacgactctgtaccctacaggcccagaatagtcttaaggctcctgggaattgatgataggccatttacccagtttcagtttagaggcagattcactggccttagcatttcagtaattatatttatttatttttagcctgaaccagatttaataggagaaactactttctgcgtttcttttaattacttgtagtttacacagtaactttagaagagtaaatgaaagcatgcttcgatgctgccactgtaaataccattcattagtaacttattttccctggagtcttgtgaagtgtgaatttaaagcctgctctatctggaatatggaatagtattaagattacaagcacattttatattcatgagccggaaaggcnnnnnnnnnnnnnnngtgatcctccatcctctgaattctcttaactatgtgactaatttcaattagtatgctttgtcattacagaactgttcaggtttcatctctgaacatttgcttttggcatcttcttcagtagcccaaaactgtcctgccgttttccaagaacactttccgtccataatgaggcaaggggaataaattgatacaaattcatgatttgagaagtg

SEQ ID NO: 180108 - DNA, 1157 bp, Homo Sapiens
  misc_feature (914)..(934): n is a, c, g, or t
aattgatgagcaatgcttttcctataaaaaaccaactttgtacaaaaaagttggattttagtactttttacaaataatgctcttacaaaaatgctactgatcaaataagcttttaagaattggaaaaataaaaatacaaaagtccttcaccattatcctcaggtgatcagtagcattgccttgtcttggatcctcagtgctgccaaaaggccagtataaagaatttatatttgcactgtaaactctgcaaaaatatggtttaaagtgacatgattgcactgaaaagggatagtgcttttgtgaaatttttcaaatttgagtaatagatgcctttttaaggcagtgaatttacacaaatatgggaggggtatatggtgttactgatttttaaacctctttgaccatcttctagtttttacttctagtttttacatctaggagaattgtgaataacaccaactgttcttaaactctttaatgccatgtcttaaatgccggtatttgctgctgaagacaaaaatgaaaagtaggatgaaaataatagaatggcactgtaagtgtttattattttgtcaaaatgtaaacaaagactacataacccaatgatggagggaaaaagggcatgtatctcattcagatgtgccttttgtttttgcagactatgacgtctttagctaatgaattgcctattgttatggaaaacagttaatatgccatgtatgtacagttttgtttatattgtatatttaaagatactgctaataacctatataaatttaagtgacttgaggcctataatacaatctgctactttactaattcataaattcaaaaaaaattctatggcataggaaccaactgccttgccttcaagacctagtaactttctctataaatctcgtgttaactgaaannnnnnnnnnnnnnnnnnnnnagattggtaatatttaaaccagcaaatacttaaagctttattaaacattttaatcagataagtgagtaaagcttttatttgccatttggatgccttcgttcaaagtgatagagtgttttgctgatagtgctgtagcagcagttgtaaagtagccaaaagccacgttgtttatttactggtttgtggccttttactgtgctttgtatcagagttcttaacaaga

SEQ ID NO: 180109 - DNA, 1034 bp, Homo Sapiens
  misc_feature (576)..(635): n is a, c, g, or t
agagcaaactcactgtccgcgctcctagtcgccgggctgccaggaaagtcctttatggtggttcgccgccgccgccgcattcttgggcatggcctggcgcggccctcggagcggggagggcgggacggggaagctgggagttgtcattccttccttcctttctttgaaatcaaaatcctttcctcggggaggagcgcgggaggcagctcaggcgggctgtgctgtcagccgccgcgctcgaggccacctcgggctcggcggcgcacgtgggcttcaggcgccgtgaccccaccaggcggcacttccccgcgacggcggccggggctggctctctgggacgcgcggccgccccgggcgcatctcctgcctccagctcttgggaagcggcgccggcggcagcggggcagagggtgtggccggcactgtcgcggccgcgccgagtcagagtcgggcgggagcctgcactgattgcgcacagcggccgcccggatcgcgctcaagctctcgcccgcccgccacacgcccgggcgtgccgagcaccacggcggccccttcccgcctcgccggttcacagannnnnnnnnnnnnnnnnnnnnnnnnnnnnnnnnnnnnnnnnnnnnnnnnnnnnnnnnnnnggctgtctacgcaagtccatccctgtcgcctcgtctggggcccgcagcagctgagctctcccgaggccccgggccccgcgcatcggacgcccctgcacgagtctccctgccaccgggccaactcagaaggtccccgcggcgctgcggcaaccggcccgggccccggctcctgccatttttgtcaaccgccaacttccgagcgagcgggcagaaactgaaaggaagggcgggggccgaaaggcagaggggaaaacacccgcttcctctccgcgcgcggcttcacctcggagcgcggccgtggctgcgccgccgcccgcaggggctgccggaggcttttcctgttcccgtccgcgcctcgcccccgggctcgccgccgccgccgcctcggccgtaacccaa

SEQ ID NO: 180110 - DNA, 1477 bp, Homo Sapiens
tgtacaaataagtaaaatgatttgttttataatttatccaccatgtccagtttggttagcttgttatgcaatataagtgaaatatcaggtttttacccgtgtcccttttatcatgaaaattaacacaaaatgtgcattctcttttgtttcatacttagcgggatattgattgttttgaaattatgatcaatacttaatttatttttttctgtccttgaagtcactacaccttgatacagtctttctagtagtcaccatgattcaacagtctcaaaaatcttacaaataaaattctgagaagctttattattctataaattcttcagggtacaaagggtgacacattgaggtgaaattgtcagatttacttagcctggtgacatgaattagctgattgtggaactctcagcagcatttcacgtattgttaacatgtatggcatttattagcatattgtatattatataagattgagggatgtcatattttcagctttcttttaaataaaaattgagtatattttcctattttatatcaggtaactaaattatgctagttatgtggaaaaaattgcaaagatgctttgacagatataatccctttggtgctccatctgatcaaagttgaaaagttgatgttttttaagagacaagctttatcattgtctctgatttcagtagaataatggtttattgttagacaatgatgtttctgcttggataaatcaaagataaattacagttacatggttagatgcatcttttgtcatctatattgtagtttctacataactgtaaacctgacagataagaatagtttcggtttgatttttgtttaaaacagatgagtacttcttaatgttctagacaaatgagtaaaatgtatttctggtagaaattagttgggcaaagatactatgaatgaaaaagtattttaaacgtaaaatgttctttgtgaatatgtaagtatagtataaagatttctttcatcccatttatccccttcctttaaataaactagtttacaattggtagatctgtctatatataaatatatattaaagaacaaagatatatatctaaaaatcacctaaatctgctttattagactacagttcacttattgcatagaaactggacttggctttacattcttaatgtacttttacttttcctcaagatatgaacttactctcttgaagctgaattttcttttactacttaaatcatttatgtatatctggtaaattatgaccaaatttttgttagattgcatacagtaaattgaaatacacacttggtacactacgggattgttgtgcttttgtttggttttagttggaaataaatttgatgtagatggcttgttactgttaatttaaaatattctataattgtccattactttatgttgtgttgtgacagatttggctatatttttagtcaattgaaatatgatactttaaaagtttgttttt

SEQ ID NO: 180111 - DNA, 2382 bp, Homo Sapiens
  misc_feature (105)..(124): n is a, c, g, or t
ttggggaaaatatgggacaaggagtcctaattctgaatccatatcagaagccatgaagggctttgttttgtgggttttttgttgttggtggtggtggtagtgggnnnnnnnnnnnnnnnnnnnngtaggtcctcatggacctttaataggtagccagctctgccaacagctcaaatctcttaagatcacattccagcatcaggatttctggctgggattataagtgaaggcacttaattctcaaatctctacaggcatctatacagcctaccctcttcttaatgtcctgtaacttccagtgtgcttcataccatgtgggcataggtattggtggctctggaatagtttctagaaattgaagattaccccacccaacccctacatattttactttttcaccctttgttgcccattccaaaacactatccaaagtgtctttttaaaatacgtattcttcagttgaatacttctatactcatcttcagactatttggagtgttatctatagtgtgcataacatttttacttttagagaaagctcagcatcctttgaagtaaggtttaaaaaggacttagtcctcataggaactttttaattctagataatctaaaacatagatttttgtcattgtctatactactttcaagtttttaaaggttttgagatgaaaccaggtaacatattttcacagttttaattaggatatgtgaaaagaaaggagtcagtgtgaattcacttggtataaaattttttccctttataccttctttcagatcccttaggttggcctaatacaaaggtctcttctttgtttttttaaattacaatttatactttgtccaacgtcatgatagtaatttgtttcagtgtatgttttccccagatttctccattttaaaaaactaacattctcgtttaaaatttagtttcttaaacatagtattgtctgctcctaacatgtgggaagaaaaagatggaggtgaaatatgtccatactcaaataagcatgaaagacaagcgtgctgcaagttaacccctaaatatcagagtattagtacattctgaaatgggttctgactaaattatcctctcctgtggagtggagttaaatggaaaaacacaagaagttccttaataagctgtaattttttagtttggtatttctcagtgatagagcataaaacttaacagtagagtttattatcagtcatgacttagttatatgctttgtcatttattaaatggatttaaatctattagtgttgcatagtttttctgtgctttgccctaggttgattccatttgttggatgctcttaatttgtccaatgtaaatataaaaagagagggtattaaaccgttttgccctataatgggggaaagatgctggttagatgtttattttagtgagcttgcattttcttacacgtgcaaagcagttcatagaattcatagttttacacttactatgtctttcctaaagacacccaggatgctttatttttaactcttgagccactagtgactcttgaataaattgaggtcagaaatgttgcaaaagtggtaagtttctggcagtgtggagacaggggaataatctcaacagtaggtttttactgaatccaattattttaatttaggctgtgtctatatgaagcttttttgacttactaaatgaacttttatcttggcattgtatagacatagctttgatgtaaattgcaagaacacccataacctcttattctatgtacacttcttttcattctcatcggatgcaccaaacatgcagcggtaataagccagattttactcaggtgtgtgagagcacttgccttaagttgacttttttcctagtgtttatatatcattagctactatgaacacagattgatctcagaaacattttagaagatgctcttgaaccacatttttaagcactttcatttttataaaaattgatataacattacaaaacggtgtgggggcggggagaattgtggttgggtatcacccacaggcagaccaccctaaccctgtcatacaacttatcattttgatcaaacaatatactaaattgggatttttgtttttacaagtcattgctgttctggcttcatatttacacttcccattcttatcccccttaaaatcattcttgatcatcctgttttctttcaacagcttcagaggatgattccgaagaagacggagaccataacaggacatttgatattgcctaacttcatataagacagatggatgatctgtgaacataagtgtttattaaaaatggcaattaaatataaattacttttgtgggggaatgcctaataaatacattgactatatataaaatgaatatatacatacacatgtatg

SEQ ID NO: 180112 - DNA, 1549 bp, Homo Sapiens
  misc_feature (135)..(177): n is a, c, g, or t
  misc_feature (811)..(820): n is a, c, g, or t
tgagccacaatgcctggccttactttttcaacttctatttgtacttcacgttttaccatttggagcttcatttagcatctggtaccttcttctatagcatctcttctcttccaaatatttatattctttgttaannnnnnnnnnnnnnnnnnnnnnnnnnnnnnnnnnnnnnnnnnngttacatggatgaattgtacagtggtgaattctgagattttagtgcacccatcgccggagcagtgtacattgtacctatgtgtagttttttgatccctagccctcctcccatcttcccctttctgagtctctaaagaccattatatgcaccctgtatgcctctgcatactcatagcttagctcccatttataagtgaggatatacagtttttgattttctactcctgtgttacttcattaagaataatggccgccagctccatccaggttgctgcaaaagacattattttgtttcttcttatggctgggtagtattccatggtgtatatacaccacatcttctttatcaactcattgggatgggcacttacgtcagttccacatctttgcaattgtgaattgtgctactataaacgtgtgtgcatgtgtatttttcatatagatttcttttcctttggctagatacctgatagtgggattgctggattgaatggtagatccacttttagtggaatcttcacgctgttttccataaaagctgtactaatttgcattcccaccagcagtgtctaagtgttcccttttccccatcctcgccaacatctgttgtttttgactttttaataatgtccannnnnnnnnngccagagtaaggtggtatctcactgtggttttaatttgcatttccctgatgattagtggtgtcaagcattttttcctatgtttgttggccatttgtatatcttcttttgagaactgtctattcatgtcctttgctcactttttgatgggattatttttctcttgctgatttgtttgagttcctcgtagattctggattctagccctttgacagatgcatagtttgcaaatattttctcccattctgtgggttgtctatttgctctgctgattattccttttatgttcttattaaggttacgtgaaagacttgctcagtgtgatctggggctccctcttgtggcagacagtggcccaaagccattcccaaacccctttcctttccctgccttcaatacacaggcaccaagcgagacatttatatttctagacttccagaagccaaggctgagcatgtgacacttatggctaaaaaagatttaggcagaaatctttgagtagggatttccttttcaactacaaaggcaaagcctcattaggaagaagccctttgctctcgtcctttttctcttctcaactgtgatgcagactgccccaagggctgccacctttggccgacatgaggatgagaactagccgctgaaggatggctggaagtcacctgagggatcaagtagctcccaccccgagatgggagggtaaaggaaaaaaagtcaagggcaggtctttt

SEQ ID NO: 180113 - DNA, 1485 bp, Homo Sapiens
  misc_feature (903)..(1021): n is a, c, g, or t
ttggctgtatctcaagacctttttttaaaaattgaggtaaaattcacataatagaacagcaaccattttaaagtgtacaactgagtggcatatagttgtcagccatcacctctatccagttctaaaacatgtcatcaccccaaagggaaaccctacccattaagcagccactccctgttctcccctcgctccagccccggcaaccactcatctgctttctgtttgagaccttagctcttgaacctacaggttgcaccggaaccagcccagcctcgacctctaggggagtaaagggagagcaggtttgtcagggaatctggacacagctcttggtgtagcttagtgtagcttatgtgcagtgttgaaatgcatggatctaaaggtttgcaggtgttgacagactgatgcacctgtccgtaaccccagaggtgatccttctgagtcaagccttctcttctccagaggtagccactgttctgatttttcaccataggttagttttgcctgtttttgaacttcatgtgaatggaatcgcacagtatttatccattggtatctggcttctttatctcagcatcgtatttttcagattcatccacattgttcctgtatcagtagttcgttcctttttattgctaagtatgctaagtagtagcccatgaactggattaccagagtttgtatatctgcatgtttgggctgtttctggcttttcagccctgcatcttgtgggaaaaccctggcctgggattcttgatcctctacctcatccccttcattaccccaccattgggcaaggaggaaagattcatgcatccaagctatgccccaacccacagaagtaggaagacagtggaacatctgagtggtcaagagcagggtgttggatcacatagacctctnnnnnnnnnnnnnnnnnnnnnnnnnnnnnnnnnnnnnnnnnnnnnnnnnnnnnnnnnnnnnnnnnnnnnnnnnnnnnnnnnnnnnnnnnnnnnnnnnnnnnnnnnnnnnnnnnnnnnnngattgttgataaggttacatgagatgatgtctgaaagggatgcagcacagttcctgacacagagaaggcactcaagaaataacagctaagaaataagaagctctgcctatttgcaagtgagccggagcacatgtccaaattccaggcttagaccagattgtgaagagctacccaccctccaagctggagcctacttgggcgttttaactatgtcccctcatgctcttttccatgaaaggctttggtatttcacctccaggagatgcaggtttctgaaacctcctagatttcccatcatcttttttggagctcttttttcctatccagcagggaagcaatcccacctcactcacctgctcatttgcagcccatgtctttgagtacagccaagaatcacagccactccataatcagctcaagtgattcggatttttaaaatacaaattggaagcagcctttgatga

SEQ ID NO: 180114 - DNA, 1511 bp, Homo Sapiens
  misc_feature (263)..(338): n is a, c, g, or t
  misc_feature (385)..(422): n is a, c, g, or t
  misc_feature (431)..(454): n is a, c, g, or t
tacaaaaaagttggatttttctttataaagtgaagagtaggtagcatgaattcctcttgccctttgctatttcagtctggcatcagtagcaattgttgctatgtccagttttcattcatggatttttctgggattgaagatgagttcaatgttgattatttaattgggcagtataagtaaattcattggctctccttccagtttagtgaatactaaatatcatccatgatattttatacttcttacacttctggaatctaacnnnnnnnnnnnnnnnnnnnnnnnnnnnnnnnnnnnnnnnnnnnnnnnnnnnnnnnnnnnnnnnnnnnnnnnnnnnncccaggccttcaaggctgtagtgcacaatgactgtacttgtgaatannnnnnnnnnnnnnnnnnnnnnnnnnnnnnnnnnnnnncaccccttnnnnnnnnnnnnnnnnnnnnnnnntagaagttgtggagagggaggaggatgcttgaatactttgaccgtacttggcataatagacattttgagggtttttttgttttcttaaaattcctctggatcagttttcattgtttctagtaattatatttatcgttaatgaattcatattctgctctagcccctaaagatagtttgatatgctaacttttgttttgcctttctagctgctaagatagataatggttattgcaaaatgcacgtttttaaatggtctccagtgtggattgcttctgagctgctgatggattgaatacattgagaaggaatgtgtcatttggaatccaggaccagtcagcaaggataactgcctgattttatgatttcgtgactgatgctgaaatggaagccaaccactgcagaaatttgggggaaaatgagatctgaagaatacaaggggaagtaggaattcatttctagcatttccaaacctgcttaatcgtgtctgctccaccacagtcagaggaaaagactgagttcatggaaattaccagctaagccttacatctgtctttaatgtttttaggaagtatactgaaaaggtaagtgagatgtctgttttgaagaaagactcttactgggtaccttaaaacccgttgtttcctattagtaaagatgggcagcttctttattcctagcttcaaaaagccttgcccctgtttggtgtgtttctcagtattgtggagaaggtagtttctgagcaaggtggtgcttttcctctgcttctcagcagctaagacagaaattgcaccgaagtgtacaaagggccaatttttgttgtcctgttgtgctcaaatccttttttttaaaaaagttatttcaatcaagtcttagttttattcctcactatataggaaaaaaatctttaatgcctcaaaagttccattcagcattacatttgcattactcttatttgcagcaaatatgagtaaaattataggtttttaaaggtctctaataacatccacttatattggttttgtagataatccataaattaccagaaataaattattcc

SEQ ID NO: 180115 - DNA, 1051 bp, Homo Sapiens
gatgaacacgtactggtcttcggtctgcaccatgtagttcctctgtgatcgcatgcaggtcacgtggccatagatgtccacggtcttctcgtgcttcatccgctccaacatggcatcaatcacgatgaagcagccggtgcggcccacgcccgcgctgcagtgcaccaccatgggccctgcgtctagggggttgcaggccttgacccgtcgtaggaaggccaggatgggagttgggtactcaggaactccatggtctggccaggccatgaactgaaactgacgcagctcacgcttctcactggagccactcttgtggagtgcgaaggtgcgcacagtgtatgtggccagctccactgtgtccaacagggtcacctgaataaggccacaggtctcggtgccacgggctggccagtactgatcacattttacctgcaggaggatgagcagggcaggctgaaggaagcccacaggctcagacgggcagaagcagggtggaggctggtcaactccctggctgtagcctttctggctacaaagccccccagccctgagctctcagatccattgccccctgtcctccacaagccacatcaggtcctcaagctatgtcaccgccctgccctagctagtggaataagggtcataattgaaaattatttattcaacgccagatcgcaccaggcacattttctgccaaatttacccataacgtttatgtgccattttcaagctctgtaaattttacgttccagtcaatgctttgcagtccaaaaacagataacagcagctctttccactaattaacttaggagatgtgttaatgccccaggaacactccagcatctggggaacacacgaataccccgggaacacgccagcaactggggaacacattaacattctccgaaaatgacagcatttggtgaaacatattaacatcttaaggaacccactagcatgtggggaacatgctgtatcccagaaacacccagtatttggggagcataatacccccagtaacaatagcatctggggatcacttgagcgccaa

SEQ ID NO: 180116 - DNA, 909 bp, Homo Sapiens
ttgggggcaacagagcaagactctgtctctaaagaaaaggaaaaaaatgtccttgcctattaggttttattaactaattaaaggatgatagttctgtagatgagaagagtagccctttgccactgcagggaattaatcatctgttgctcacgtcaactctgttgccctcctaggacaagcagtgcatgagcagcagctcagagaatgaaaaccctcctttcattttcatcaggggctgcatggttatccctctcagtgcaatatagctaaaggggcttgaaatgctgggagtagtcttaaacagcccattcttgaaaggttttcattaactcactctaaacatctaaattaaaaatgtttttgttttcactatagtaaacaggagtgtaacattgcaggtttggtacatttctgaatgcctctccacacactgaagcacaagagccactgaaaaaagctatatgataaatattttaaaaattatttatctgtgttgcattacatgaggccttatctcccagacacttaataaaagagctaatgagaagaagagctaaattctaagattttgatgtttggtcattaaacattacagacaccagtgatcagagaaaaaaacagaagaaataatgagaaagtgacataaaaaattttaaatgcagcaagatatatcagaatcacgatatctggccttttatttatctatcggctcactactactactacgcacacaatttatcacttaaaagaaaaatacataatgttgttagaatttatcagcagtaatgctccaagctctatctttctacaaaaatttcatatcagtagtttgcttgaggattcaagatttggtaagattgcagtttgcacagagaaaagatatcaatatcaataggaaaatattctttt

SEQ ID NO: 180117 - DNA, 1307 bp, Homo Sapiens
  misc_feature (666)..(686): n is a, c, g, or t
ttggtttagaagaatgcagagtaaagggaccttcttggttctgcaggaacttctcaagggatgaggagacagaacccctacttccaagtgctctatttgtatacttccctgccttctcttaagcttcagtcatctgggtaatacaaataatttgacagggacaatggaagggtcttcttcaccactccttaccttctatgtgatggaaagactagagcttataaaagtacttccatttttttattctcctgaataccaaaggcaattaaagtcagctacaaatgacttgccagtgtcatgttttatttttgttatagatttttaaattatttccttcaagatcaattcttatcccatataatgcttagcttccaagaatattctttactttcttctgtcttttacagctctttgcattttgtagaccttaatactcaggttaaatattcattgcatttataagatcttctgcaaaaagcccagaaatggtccttttcaggtgcctcttcaaagagctgacaccttaccttgtgcctttggcacaaatgtgcagaatagatacatcagttggtgcataatcgaaaaaaataggaattttgaacactgttcttccttctacatttatttctcttcattttagaatcacactttttatgttaaaccagnnnnnnnnnnnnnnnnnnnnncaaccagtattaagttgttaaaaccaagggaatggggccctaaccaaaaagaagtctcaactcagaaaaataagtccccagtcaggtggttcttactttcttgtgggttgcacattttgtatctctctaacatcagcgtattcctgactttaagcaggtgtttatatgtaaaataaaacctgggtatcgaagggaaatgcattctttttatggagtattgaccctgatcctctatgatgtcatatagagcaactcagggctatacttgctagattttaaccaagcagtttgaaatattaatcatcatcctctcatcttctccactctccattgccaaagtctttgtcaaaactccaaatttgttgataaaagattgtgtttgccattctcatttataatgcagtttctccttaagcctggagttttttgaatgagtgcatgagtaaatgagagaatgtgtgaacgaacatttatgaagtatctaacatgtgccaagcattgtgcctggcactttcaatcattagaatgttttatgtgattccacagcattttctgtaaaagagtagctcacaacattttaaatgtttcaatatgaatcgtgttacaaaattcttaatttta

SEQ ID NO: 180118 - DNA, 431 bp, Homo Sapiens
ttggcacggtgtcccctttaaaaaacccggagagcaggccggccccgggctccaccgcccccccagcccacggtgtcacctcggccccggacaccaggccggccccgggctccaccgcccccccagcccacggtgtcacctcggccccggacaccaggccggccccgggctccaccgcccccccagcccacggtgtcacctcggccccggacaccaggccggccccgggctccaccgcccccccagcccacggtgtcacctcggccccggacaccaggccggccccgggctccaccgcccccccagcccacggtgtcacctcggccccggacaccaggccggccccgggctccaccgcccccccagcccacggtgtcacctcggccccggacagcaggccggccccgggctccaccgcccccccagcccac

SEQ ID NO: 180119 - DNA, 286 bp, Homo Sapiens
ccgtgggctgggggggcggtggagcccggggccggcctggtgtccggggccgaggtgacaccgtgggctgggggggcggtggagcccggggccggcctggtgtccggggccgaggtgacaccgtgggctgggggggcggtggagcccggggccggcctgctgtccggggccgaggtgacaccgtgggctgcgggcgcggtggagcccggggccggcctgctctccggtgccgaggtgacaccgtgggctgcgggcgcggtggagcccggggccggcctgctcccaa

SEQ ID NO: 180120 - DNA, 906 bp, Homo Sapiens
aaagccaactttgtacaaaaaagttggcgcggttcttgtttgtggatcgctgtgatcgtcacttggtgagtagcgggctgctgggctggccggggctttcgtggccgccgggccgctcggtgggacggaagcgtgtggagagaccgccaagggctgtagtctgggtccgcgagcaaggttgccctgaactgggggttggggggagcgcagcaaaatggcggctgttcccgagtcttgaatggaagacgcttgtgaggcgggctgtgaggtcgttgaaacaaggtggggggcatggtgggcggcaagaacccaaggtcttgaggccttcgctaatgcgggaaagctcttattcgggtgagatgggctggggcaccatctggggaccctgacgtgaagtttgtcactgactggagaactcggtttgtcgtctgttgcgggggcggcagttatggcggtgccgttgggcagtgcacccgtacctttgggagcgcgcgccctcgtcgtgtcgtgacgtcacccgttctgttggcttataatgcagggtggggccacctgccggtaggtgtgcggtaggcttttctccgtcgcaggacgcagggttcgggcctagggtaggctctcctgaatcgacaggcgccggacctctggtgaggggagggataagtgaggcgtcagtttctttggtcggttttatgtacctatcttcttaagtagctgaagctccggttttgaactatgcgctcggggttggcgagtgtgttttgtgaagttttttaggcaccttttgaaatgtaatcatttgggtcaatatgtaattttcagtgttagactagtaaattgtccgctaaattctggccgtttttggcttttttgttagacaatgcagatcttcgtgaagactctgac

SEQ ID NO: 180121 - DNA, 1426 bp, Homo Sapiens
ggtgaacgctctactatccaggaactgaaccacaacttctcattcaaggagagtggaagaaactagatgcatacttgccctggacatcaggctgtccacataagatccacatccacaaaatcaggaagtttcccacttctgtgttgccttctccaggagttggtcccatagggtgacactgcatccacagaagcatcaaaagcacctgtgtccctgccacagcccctccttcaccaagtcccagcagtgccatgtcctaaacctctcgtggatccacacacatctctttatctttagtgcccacatttagttcccaagttgccggtgtctctaccctagaccactacagccgagggcctgcctggcttcctcccacctgtcctttgcactgtacccagagcgagccgtcagagatcattctggtcatgccactcccttggagtctttcaatggagttccgccactcccaggagaaaacatcaaaaccttcagtattgaccaaaggcctgaggtagtttggccccggccttcctctcccgtcacttcctgcgctgggcctttgcacatgtgaagggcccctcctccccgaatcactcaggtaactcctgcttcactccctacagatggtccatccaaccaccacctctgcaaggtgctgcccagaacttcctgatgtgactttgcattttgtttgtgtgattctcctatcaatgtccatccctgtccttggaatataagctcctgaaggtctgctattatttgctcaccactgtataccagcaactttcagtacgtgtgttgaattgtttttaaagtatttattgactagtttttatgatattggtagacctatagttctcaaagataatttttaaaaaatcaaaataatccaattacagtaaggcaaaaatttatattatctgagcattaaaaataattaccagaacattaaaaataataatcagaccacctgtagtacatagtcacataaggtaatcagtttattggtcatatttgtcactaatgccatgtcacaggtattgttctgaataatatatttctcctcaatacaatcttagtattttaattacctacaatcctcttcatagttgcattttatagctaaccaatttgaaactacttcaattactcttacctatcaattgtattttttaactttttattatggagaattccaaaaacacactcaagtagacagcgtgtgatgaacctccatgttatcatctaactcaggcgcatggccagtctccctgaaagaaggcacgcttctgagcatcccctgtgcacacaagactgaagcagctttgagataagaaaagaagtaccaaatggtctctctcaggcagccgcccactacctatgtgtaccaatatctgcagtaaatgagaagtcctaaacgagccaa

SEQ ID NO: 180122 - DNA, 1284 bp, Homo Sapiens
gagcaatgctttttcctatcaaaagcgcaactttgtacaaaaaagttggcttgaaagtattcaatcccagaaggaaactggaatttgcccttctgtttctagtttttgatgagaatgaatcttggtacttagatgacaacatcaaaacatactctgatcaccccgagaaagtaaacaaagatgatgaggaattcatagaaagcaataaaatgcatgctattaatggaagaatgtttggaaacctacaaggcctcacaatgcacgtgggagatgaagtcaactggtatctgatgggaatgggcaatgaaatagacttacacactgtacattttcacggccatagcttccaatacaagcacaggggagtttatagttctgatgtctttgacattttccctggaacataccaaaccctagaaatgtttccaagaacacctggaatttggttactccactgccatgtgaccgaccacattcatgctggaatggaaaccacttacaccgttctacaaaatgaagacaccaaatctggctgaatgaaataaattggtgataagtggaaaaaagagaaaaaccaatgattcataacaatgtatgtgaaagtgtaaaatagaatgttactttggaatgactataaacattaaaagaagactggaagcatacaactttgtacatttgtgggggaaaactattaattttttgcaaatggaaagatcaacagactatataatgatacatgactgacacttgtacactaggtaataaaactgattcatacagtctaatgatatcaccgctgttagggttttataaaactgcatttaaaaaaagatctatgaccagatattctcctgggtgctcctcaaaggaacactattaaggttcattgaaatgttttcaatcattgccttcccattgatccttctaacatgctgttgacatcacacctaatattcagagggaatgggcaaggtatgagggaaggaaatccacaatacaataaataacatagaatgacacaaatttgagttttgtgaacccctgaacagatggtcttaaggacgttatctggaactggagaaaagcagagttgagagacaattctatagattaaatcctggtaaggacaaacattgccattagaagaaaagcttcaaaatagacctgtggcagatgtcacatgagtagaatttctgcccagccttaactgcattcagaggataatatcaatgaactaaacttgaactaaaaattttttaaacaaaaagttataaatgaagacac

SEQ ID NO: 180123 - DNA, 1889 bp, Homo Sapiens
ttggccctaaaatggggaaaaagggaacatacaaatgaagaaaatataaatgtaaatatatttgaagatttaaaaagccctgaaaggttaacctttagtgcaaatggaaagttttaatttctgctcctgggtcttacacaaacaacttacatcatgaaaaactatttccattaatgccctttttattagagcagtcactgataacactagaatatcaaagactctaacagacaagccactaaatttaacgccaataacttgaacaaagtgaagagagccaaatatgagaaagaaaactttagtctttaaataacacttgcaaccatgtggttacatgtggttgcatgtaaaccacacaaaaggatggtcttgctcaaaaaaataatggtgagtaagtaacatggaggcatttggggaattcatgtgtgcaaatgcctggcatgcagagtatggcactacagggtaaccctacacacacagccacagagaagattcctcctgtgtaacaaccgtgaaagaagagggagattactgcttggttaagaaaggcgagatagtttttaaagctatagtaaaaattacagaacaaatagcaaatatgaagtaaaaatcaacactagataaaaaattaaagagaaatttgacttttgcaaagagaaaaggtattgcatgagactgaaagcagcagactgaataaaaaaagatagtttgaactatctttggcccataaaatcagtggccatgtttatcagtctgaatcatctttaaataagtccaataaagctttgagcaagtttacattaattatgagtcttagaaaagcctgcttagctttaaatttcttacaggcagggactatatattctgtatttctagctaagtacccaaatccaatacaatagtttgcttactgaatgtataacaacatattaattcaatgaagagaaacttttgaaacttttttgacataatttcagattcccatatacctttcacccagattccccaaatattaatgatgtgcgtagccacattggctttctcattcttttccctatctccctctcatgctcaccctctatatgtacacacacagacgtgtatagatacacatacaactatctttcctaaaaacaagaatattcttgtacatgaccacaatacaatgatcgaaattagaaaagcaacaatgatttaaaaactagagatcttcaaatttcgctaataatcctaatcatgttctttacagaaaaagaaaatcccggatcatgtactgcattgttgccatgtcttttaagtctcctttactctgaataattccttaatacagggcactttgtagaatgtccttcaatttgagtttgtctaatgtttccttatgattagatttaggttatgcacttttggcaagactatcatggcatgatgttgtgtttttcttagtacaccatatcaggaggcacaagatattgatcagttctattactggttatgttaacttcaagctttggttaagatggtgtctgccaggtgtctccattgtaaagttattcattttccctttacaattaataaagatcttgtagggaagaaagtaatctttctttaaataaagcagcaatagaatgagagatttttaaacatacaaaaagcagaaaaatataaatgaatcaggagtaaagtaacattaaaaattggaatacatttaaagaaccatctactaatttctaaccatatattattttaataatggtcttaaaatttctttttctatagacaccaaatctggctggatgaaataaattggtgataagtggaaaaaagaggaaaaccaatgattcataccaatgtatgtgaaagtgtaaatagaatgttacttttggaatgac

SEQ ID NO: 180124 - DNA, 1520 bp, Homo Sapiens
ctttgtacaaaaaagttgggtgtatttcatgtgcaccgagcaagggcattggaagacgtcatgaggctgtattttagcaggactgatcgtttttctaagtagacctgagctttgtttatcagtgaaattcaaggagaaaatgaggttaatgaagaggtatcagttaaatatccccttcttctcaccctgccaaaattagcagttggatttttggaaactctggaatattctgggtcattttgttttgtatgtttgttgtttttcgtcttccaaaggtgaaagctatgatacagttccacttaaattttagtgttttcttactcagctcaagcattaatttttgattaagtcttaatctgcatgacctgtgaatctgaatccatcatctccctttcctgccagcttttctacaaacattgaaatatgttatttggtcagcacttatttcctaggttcacagccttgggaggttgtggcatgtcctcccagtctggctgggaagagaccagctgtaccatccaaatgcttccctggtcttgatgatctcttccagagtcgatctgagtggccttttctgcaccctccccttctttctctttgaatggaattaaacccaatttggaaacaacattgacccagtcaaaagcttctaatggtttctttttcttcctccagttttagtttgcttttattaaaaaaagaaaatagtgcatggccatagctccttcagttctcttattgcagactaaccatcaggatggtatcaaagcacaaatactttggaggggaatgcgttgaactggggcaagtactctgtaacacaaagtgggaaaccacttcctggtgctgccgctcctgcccccactttaggtgggagggacgagttttgccctctagattttaatccagctggtgtccaccggatgttgccctcctggggagcagatatcagtctgtggaacgctgggaaaaccacaggcacatttttcggtgcggacagatttgccagcacataactgggcagccagctagaatactttgtggaaattaagcgaggttttccatttcagccccatggtgcatggtggtggccgatgaatgtgtcagtctgctcagagaaaggacaaaaaggaaattattttcaaaactgtgttcactgtttgggtgtgtgtatggctctgcatgtgtgtgtttttgtctctgtataggtagaggtattcacatcttactccgactgtaaggttgtcttacttcatctctgcccccaccacagttgccattttgtaatgtccttccaacatggagaagacacgagctctctccagttggcatcatttgtcttttttgttgattgcctcattctccagtgaactccatctggccaattgattcagaatcaggcaagatccctgccctttggcacatccactgaaagggccaaacagcaagtcccgagtgagttttaaatattaattaatcaccctttattttttacactttgagagtgattgtaataaagg

SEQ ID NO: 180125 - DNA, 1425 bp, Homo Sapiens
  misc_feature (94)..(114): n is a, c, g, or t
ttggaattaataatgccagttttccaagagtgagaaaatcattgcactctatacagttttaagatatacttaaaatattcccatttgtatctannnnnnnnnnnnnnnnnnnnnatttggacacttacataacagtgcagagcacaatgctgtgtaacataggaattcactgtgttttcatttgatgtcgtactggttttaaaccttgtgctctactccttcctgttaatgaattaagaacacattctaacaagggtctgtggcagacattgccgagtgactttctaacataggaattcactgtgttttcatttgatgtcgtactggttttaaaccttgtgctctactccttcctgttaatgaattaagaacacattctaacaagggtctgtggcagacattgccgagtgactttcttagtcactcccttactctgctggcggagtttggttatccatttatcctcaaaaggaagtgagataaatcctgattagttttaaccagtgacactccccttctcgttgccagcagttgatttacagtggtcacagggcccaattctagacataaaacaaaggatatacctgacagactacttctggaaaaggttttctcaaaggcccaaggattcaagcaaagggaagtggaatcttgtggtgaacagtaccttgtctggatgtggtgcctggtaaccatctttcagcaatggattatagtttaatcatggcctgagcagaaatactgaaagaccctgagacctggatgatgtctttgagccaccaaaccaagcagccttgtagccactcctcctttggactgtttcttttgtgagagactaaacttatttttaagccagttgatttaggatgctctattactaataactgaagacattctaattggtacagactgaaacctttataggagttatgcagttcagaagtggactttaggtaagtcatttattttaagctgttgatatagagatttattttctgtaaattttgacgtaaatagtttgagcattagaaatcaacttgaaacaataaaatgtatgcttccttgaactgtcatatcgttgacctgcaaaattcacctttggaacgtgacacaatgttaggcatacctccttttttctaatacatggaatacattttgttggaggtaatttatgtgattcatataccactgctacagtgttagctgacaacatatagtatgaggtaaggatctaattctgtttcctctcacatgattacttgatagctaagcctctgattggtttactgctttaccactgagctgaaatgccgtgttttccatttattaaaaatcacacatggctcctgtttttgtcactcagcactttttctccatattcttcaagacgattgtgagtatggtacgtaacacgaattacatctg

SEQ ID NO: 180126 - DNA, 2526 bp, Homo Sapiens
  misc_feature (51)..(73): n is a, c, g, or t
  misc_feature (110)..(132): n is a, c, g, or t
ttggcctctagtgtcatatatgaattcttcaagaagacctgaaggattggnnnnnnnnnnnnnnnnnnnnnnnaaaaaaaacatttcactaaagagtctctggagcatgnnnnnnnnnnnnnnnnnnnnnnnccccattggaatcaataggaggtaatgtttggctcaatagtgtggatagtaacaactgcctatttaaattaaatagcctttggctgtaactacacagatctcatcaatagttacctacatgaatcaagctaggtttgtctgaaatgctagaagactttttcaaatgcctgcttgctcacttacttttctacagagtaactcaaaagtaaccattgaattacaatccactttgtaaaaatctgaatgtaaaacagtaaataataaattaaataattggatcctaggcataccaataaatgttatttggggaaagaagctagcactatctcatgcagtgagaataacgggttctagtgaattatcctatctacactaccacctgaagaagttgaaagaaagattgataaatcaacgggagataagactttattagaaggtaacacctgcaaggtaccccacatagttggggccactcttttttctgtcccttatgagttacagaacagggagtctgctggagacacaaagccagcagtaaggtccctttagcctgtctcctgttctctgaagctccctgccgaggctccctcacgcccagaggacacatctccccttcttctctagatgttaatgtagggcctcagatgtggcatgtcaacactcccatggggaatttatgaccatagagatagtagaaacctaaatattttcagaaaaaaaattttttttgcaggatttccaatttatctttgaaaagacagtacaatcatgtttgaatgtctgatgaaagtgtcttatttttaggtttgcaataattgttactttcttattctcattcttatgtaagatgactattgagaaacagttgaaatttattctcctcaaatgagattttgaaagggatttatgggccataaaacttaggaatttcatagaaaattttgtctggtcatcttttataagatgatgatgagtcttatctgcacatagcagagtttgtttcttaggagtttatatgttttattgattctgtttacgatgtttacatgttcttgaaaaggttgtaaaagaaatacatatggcacatattaatgatgctgatcctaatgatttgtgaacctcttagaaattcttttgtctaaaagcctagagattcttctggttcctttagaaacatgtaacaaacttgggccaggggtgctgaggcatggggaggactgcttattggcaggaacacagagggggtgggcatcaggtagggtggaactggatgaccttccagaccccctcctactcagaagtcagcatgcaagcagcgcctgctgtctcccgatgcctgcagggaggaaaatgtctgtgaaggacactttaatgaaggacgaagctctctgctgctccctcaaagctgagttcactgtggcaggcaggaagcagagaagctcctgcccgccaaacccactgcacaggtggctgctgctggtatcagattctcctttttaagtgtcaatttctgttcacagacagtttgttttcaatatggctgatttaccctttcacctctccaccatctcatttaatttgtaaatttttagttctgtcttttctcattttaacttttaaaaaatctccttgctttttaaaaataaatattacccacatagttttcagatcttttttgtctggagagcattaaatatctgcactcatcaaagggaacatagcaaatgttgatcatctgtcagcagttttgcatgtgacacctttatatgaattattttcccaatttttgctctatgtaatgggtcaccataaaactgtaagacttggcaaatgctatagaaaaggttcaggtttcagtattctctctgaaggcatcattcctgggcttccggcagcatcacacgcttccagtgcctgcagggtgagggtgtgtggcacagaggcaagcagctcctctcttctgtaggagctttgggttttcagaggtgcagggaaggcagttttacaggttaccgtaaaacagaggttccgtccagtgttccttatgatgcctccccatttaaaaagaaaagagatctatggaaaactgggaatgtaatgtggattctgtcagagctcctacagagcacagttgcctttagtttcctttaaagatgtaaaaatattgtataatacagttttgtccctacacaattgtatttgccaagcttagtgcattatgatacctttatttatttgttttgggcagtattactatatatatataaacatacagttactgttttatatattcttaggtcattcaaagccatgtatgctgtaaatgtgctagtctttagaatgacacataataaataactgacaagatattaggaagaaaaacaagaacaggat

SEQ ID NO: 180127 - DNA, 1628 bp, Homo Sapiens
  misc_feature (1048)..(1057): n is a, c, g, or t
ttggcttattttcttgttttcagaataaatgagttgcttcactatcaccctccaaaggtgaccaaagaggtttctttttcttttcattttcttaagtgtcattattaactcatggatttaaaacatttgatgtgtttcaaacttcagtgcttaaattggtcatgctggctggcaggcagcccatgtttttttgacctgaccctgctagtctttgcagtctctgatttctggaatccaaagatactccaggctcatcttgggcatttaatgcccagaccaggaatcagcaatttcccaaggagtcctggttcctcttcatgggaaacggtactaagagactatgttgcagacatattcaacatttgaaaagtagacttgattttttgaaaatggtcaaaagttaacaaatttagtgttaacttcttttctgttttggtgcattcccaagataatactgtatactcccagaagatgaatgcaaatatttatagttttccattggtcagtgcctttgggttctaagtgaacaagtcccaactttaacgtacacaaaaaaggaattgggaggggaggggccgggctgggaatagtgagaatgagggctggtttgtgcttctggggtctctgtctctgcctctttctggatgtcagtttcattctcttctgcaaacagtgtagggtaaacaggctttaaattaggtcctaaaagtttaggtaaatttttcattcccttccatagttgtttctaattttttattatggaaaatttcaaatagtcataaaaataaaaattagtataatgagcttccatatacactcataactaaccttctgcagttataaagacatggttgatcttcatacatctgtgtgagcctccctcaatctttttatcctggacaaatccttgaaataatttttaggtctcagggaaccactgaatacaaatttggctacatcttcagttcatgatacattaacatgtccggtaagtggtaggtataataatgaaataataattaacaatgtctttctaagtagagaaagnnnnnnnnnncctgggcatctatttatcctgggcatctatttatcctggccaacttgttagcatatttttgtgtgtgtgtgatttctctcttttcataaaggaaatcagcagtaatgtaagccaaatagaatgcagatggaggaaacttcagtttttccatttccttttccatttgacttttcccccttacttctccaagtaagctagaagttttgtcacaacttcctaccatatgtcttggagtatggtatgtagtatgaccaagaatagtttctttccccaaattgtatgaaacagtgacttcctggcagtgcagaacggtgaccctgaggtagggaaacatgaggggagctcagtgtctggagaagtttcaggttacggggcagggagggcaaacccaggcagagccttgtgctccctgtgttaaagagatggagctgggcttgcaggaggccaaggaggtgagaggagcaagctgccagagagagggtgtcagagagcttcagaggagcccttttgagtcttctgctcagtatgatcagcacatgtgtgtgaggaaaccgcccagggctgggcaagg

SEQ ID NO: 180128 - DNA, 1470 bp, Homo Sapiens
ttggctcctgcctcctcttctccttggctggttcctgccagcaaatggagtggccctggtccatgccaggttttcctcttctgggtccggagctcactatagtattcagccctcagtcctcccaggatgttcttcccagcactgctgcctcgtgcggattttcccgtaacctcagtaactggcttcttgtccccctgcttcctaccagggaagccttcctgtccgcgtctgtggtttcccaactctgatatttgctctcaaatgtggtggtgtcctggttctgtgtttatttattttgtgttttctcacacacacaaaaaaaagcctcttcctccaatgcatcaggaggcaccagccctgccagcccttctcactgggctcaccctgccccagcaaccccccggtgccacccttaagccacactgtcttctctgtaagcagcctgccagcagcagccccagcactttgcaatgggcgtgtgtgtggtggtgggtggggggggcttggatccctcctttttcctcccctgccctgcccaggcccagatggccttgactgtaaagcaggtgctgcctgacaggttcttctctccctgtctctggtcattgatccatctctttgtccattcagtatccaaccatcctctccattctcctctggacctcaccactctcagagctgcttgtcctggcagaatctacagttcaccccaactctatgccttacccctcccaacccaacagcatttgcagtttgcaaaatatacagacccaagtcctgaggggactgaggacatgatgctgggcccaagtctcctgctcagggcttctctccaatgccagccctgccactccttcctcaccctccttggagcctcctctgctgcttgtctatcccaacggccctgctcccctcccttcctgcccttcaccagctttctggacaccatgccctgaggaagggacctttggttttctctaaacatctttgaagggctgaggcagtcagggctggctgccttgtcactctttatttggaagccactcaaaccattcccaagaagagggacctcagctggcaatctggaaacctggcccaggtctgggcagatgtcttcacttctcctaccttcccagtcttgtgatcctgtgatgagcaccaggatggccctgtggtccctagagcacccctcatgctgtagggtcctgcagccccatcctttctctactgggccctggtatcctggctcctctctcagctctgccactgatctctgtgccttagtttacttctctgcacgggggactcaccccaagaccatttccagcagcttcccaggtgatgtggtgccccaaggctgggctttgccagctgtggcccagctccttagtgctgcccaggagacaccaggctgctcagaatgaggtgactgcgggcaccattctcagccagtggttcttgtattgcatt

SEQ ID NO: 180129 - DNA, 1471 bp, Homo Sapiens
  misc_feature (1020)..(1028): n is a, c, g, or t
gtatgagccacctcacgaggcccagtaaacatttatttaatcagccacaaataaatgaagttgcaaaactggagtgacaaggacagccaggaaaatatttaacttcggtaatctttacaatgcttcaagtaggtcctgtggaagaacacttatttgctatgatgtagaggctgatgcaggaagaaaaaagtggtaatatttataagcttttcaagaccattcgtttaaataagaatagcagaagcagctcccctttcccaagcacatactctccatcaggcactgtgtgccttccaaacaccatactattatcttccccattttgacaatgaggaaattgaggattagagaacttaagacgattgttgaaggtcatacactaggtatcttagtagctgattcaggaattttttgacaatgaggaaattgaagattagagaacttaagacaattgtttaaggtcatacactaggtattttagtagctgattcagaaatccaatatagtctgtctaaccacagagtctatgcactttaccagtgggctacactactttttgttggtatttctgtattttatgccagttaattactggaaatagggaatataaattatattcagttacaggaaaatggttatttaagttcaaataatttaactctgatagccaagagtcaaattatgtaactaattgcaatgactcctgtaattaaggaaacgatcaaattgatttttctattttctgtaaggcattttgagtgggatacaaaacaattttaggctttagttgggaatgtaagacatgaaaaattaaacagtctttcaaaataatagaagagatgatacaaagtagtactatatgattccttctcaaattatttagacaattgttatgataaaggttaagttccagtgtagtaaaaaactaactagtgtgtccaggaaaaactttacagaaaaagtaagatttaaaccaggtctggaaaaaggaaggagaggagggcattttagagaagagtnnnnnnnnntcatgaatgtgcaaaaggccaacaaaagatcttttcatgatgaaatgagtcatgcttgtccaaaacagaattcagaaaggtgagtagttggagataagactaaaaaggtagattaagccctgtatgattttaagactcatgattgcaggtcacagaacctcagcctaaattggcataagtgagggggaaaatacatgaaggggaaggagtagctcaggtgaattgaagaagcaagcaccgggaaagtgctcctggagtccttgaacagcactgggaggtctccacctcccatcccctgtctctaaagtggctacattctcacagcctatctttctgtaggagctgaagctccagttgccagcagctgtcttcccttaattccagttggaaaaaattctaagagggccatgtgcctgtttgtatccatcggatatggccaggaa

SEQ ID NO: 180130 - DNA, 361 bp, Homo Sapiens
ttgtacaaaaaagttggatccgccattttgtgagaagcaaggtggcctccacgtttcctgagcgtcttcttcgcttttgcctcgaccgccccttgaccacagacatgtctcgggatcggttccggagtcgtggcggtggcggctggtattacaggcgtgagccactgcacctggcccgtgtgttgttttgagcttctgtcttatgtaccacttcccttggctcaaggcgtcctttttatctttcttccacttgactaaatgataatagtgtgggtcactctctacctgcctcccatctgtggttccttttggagataggccgagtgggcctctcaccctttaattttctcttagtttcctt

SEQ ID NO: 180131 - DNA, 829 bp, Homo Sapiens
cctttgaaagccaactttgtacaaaaaagttggctttaaaaaccttatgctacatatcattgccattttcatattttggggttttgctactcttatacaatggaatcaatggaaatgtcatccagccactgaattgccattattatatctaaaaagtttctaagatgacagttatcactattttgttttatctccatgctgacatttgaaagaaggtactagtatccctctagccagattgcttagtttttcgttggtaatcaaacaacagttgtactaaaggaaagtaaagctaggacctaaatcagaatcatagttgcctgcatatatggtaacaaggtcgtgtgcatttgctttcacagtgatgagtgagaggatgagaagaaattatttgacatttttctgtggttgaatagaagacacctttcttttgtctttaggtttaggaggagatactaagatactggatgtttatcctatcttagtttggttggagtaataagagagaagaagagggtggactttggcttttcagtgttttttcccctaaagagtgatattgctgacgtttctatcaattttacacataatatgtggctatgaaaccatatatctcacttaagtaacaaagtaatcactttgtctatcactaagtaatagacaaaaatcattgtctattatttaaagccaacaaaacagtgtaacagttttaagttcaataatgttaagtattgtatagaaatatattggaggcaaagttcagttgatgacaattgtgtatatgttactgatgctgtaaattatttttaataaagaaaattgtattatc

SEQ ID NO: 180132 - DNA, 1391 bp, Homo Sapiens
actttgtacaaaaaagttggatggatgtaggccgcttctagaatatgttacagaatttcagacttaacctattaatagataaatggatcttgacttaaggtgacaaaatgaaacttttattattgcttaaaaatgctgtgccaatattgtataactagctcctctaatacttttggtattttggatttaataataagaccttaagcattttaaatgtgaacatgttcagggaagtatgctttgatgtaaatgtctcagatctaagttgtaacacaattgaatacttgtggcttattcttggtttaacttaggaaaactggttaaacaatcccccatttgggcctgtcatcattttaatagtgacgatgttctttctgaaatcttcagggtcggagtcaggctgaatttttttaaaaattaaatattatgttcaaattctttcctttttgccattgtgaaaaagcaaaattttaaatgatttctcctgttagaatttttaaaaatacccacaggttggaccatctttcttatgggttgcacaatgaatttatattttaaattagattaagtagaatgtgaagtacatttcagatttactagttttctttccattgttcattttgggttgcctcagattcagtgtatattttaaaatattggttacataataggtactcaatgaaatggtttatagtagaatatctaagctagcactttattttaaaaagtaacttattaatcacacattgatggtacaccttgtatttagcaaatgtttgcatgttgataaaatctcctatgtcttctttcttaaatccagttgctgattttgtaaaatacagttgtgataaagcagcattacgggggggaaaaagctatattccaactggtgttaaatgtattcaacaaaatcttacatcatacagtatttatttcttaattaatagaacttcagtgatatacttggtagatatctcaagccttttgtcttttacacaatggtgctctatcctattgttttcttttcaaagaagcatctgaacacttgcatttctattttcctatccaaaggcatccacatctaagtgtgtttttaaagttgattaaaattatttttctgttaaagcattctgaaagtgtttgtctttacctagaatgatttgtacacactcgtggtcaactgaacatgaatgtcagtagtagtctaattatgggaagggtaaacgtgttagattaaggctcttaaagctctaaaccatataaactatggacttgtatcatgatttaactgttcttagatctttcttacacagtgattcattcctctatttgtacagtggctttatgaaatgttgtgaattgatactgtaatcaataaagtgcttttaacc

SEQ ID NO: 180133 - DNA, 2154 bp, Homo Sapiens
  misc_feature (958)..(1165): n is a, c, g, or t
ttgggttgacactttgagtacccccctaaatagctggactttccttttcatttcatatttggaactaagtttgtagcgtatactcatctttcagaagtttggtaaacattgggattgtccctgcatctgaacatctttcccagtgctatcagtatacatctagagaggaaatgcaatgtgacagtgttacatttggagagaagtgtgaaatctaaccaatcgctagcacatatttgttgtaatacggtggtttatttcatgtttgcatactataaaatctgaattgatgtgaaatatctgtgcctttaaatttcttaaacctttaagctttttgttctgttttgcaacattttgtagtatttcttcccttccttagcacaaaatactggtttctaagtggttttgcttcaaaggatgtctagatgtaagtgattccacttaaagccaaaataaaaattcctaaagcagttcttaaaggagttagagagctatattaaacagtttttctgtggtataataatgtgtctcttactagaagtcccccacgaccaagttaaagatacttttcctgttggattctcttttacaaataagtctaaatgactgataatagaagattgttagtcttgcttgatggtaaagtcttggattattctgatatatagacgtgcattgttttgtaacttagttacttttcagataggtctgtgttaacttttgaacatgtgtaacttaacctaaatactcccaaactttacctctaaatttttgtttttatgttgtgaatgtgctaatatgtgcatcaactgtaaagatgtatcagttttattaaaatcagttgacaattagaataataaagtggataaaggcaaattaagatataggaccaaaacagaatattgtagatggcagttatgaatgtatatttatattttgattaagatttctattaactttnnnnnnnnnnnnnnnnnnnnnnnnnnnnnnnnnnnnnnnnnnnnnnnnnnnnnnnnnnnnnnnnnnnnnnnnnnnnnnnnnnnnnnnnnnnnnnnnnnnnnnnnnnnnnnnnnnnnnnnnnnnnnnnnnnnnnnnnnnnnnnnnnnnnnnnnnnnnnnnnnnnnnnnnnnnnnnnnnnnnnnnnnnnnnnnnnnnnnnnnnnnnnnnnaaagcagtttttgccatcagcaaggatatctcctccactttaatggacaggcctcatttttggcagctatgctgtttgagatgtagactgaatatccaaggttcctccctagctcaagtttttgcttgtgattacacacaccacattgaattccgtcttcagaggcaaagatttgggcttcatatctcaacagcaaaagggcctgttcagcaattcccttcattttagactcatatgacctcagcgattgcatgatagtagtaaactagtctcctggaaataatggatgtaggtgcttctagaatatgttacagaatttcagacttaacctattaatagataaatggatcttgacttaaggtgacaaaatgaaacttttattattgcttaaaaatgctgtgccaatattgtataactagctcctctaatacttttggtattttggatttaataataagaccttaagcattttaaatgtgaacatgttcagggaagtatgctttgatgtaaatgtctcagatctaagttgtaacacaattgaatacttgtggcttattcttggtttaacttaggaaaactggttaaacaatcccccatttgggcctgtcatcattttaatagtgacgatgttctttctgaaatcttcagggtcggagtcaggctgaatttttttaaaaattaaatattatgttcaaattctttcctttttgccattgtgaaaaagcaaaattttaaatgatttctcctgttagaatttttaaaaatacccacaggttggaccatctttcttatgggttgcacaatgaatttatattttaaattagattaagtagaatgtgaagtacatttcagatttactagttttctttccattgttcattttgggttgcctcagattcagtgtatattttaaaatattggttacctaataggtactcaatgaaatggtttatagtaaatatctaagctagcactttattttaaaagta

SEQ ID NO: 180134 - DNA, 2757 bp, Homo Sapiens
  misc_feature (195)..(203): n is a, c, g, or t
  misc_feature (1651)..(1671): n is a, c, g, or t
  misc_feature (1691)..(1927): n is a, c, g, or t
  misc_feature (2339)..(2359): n is a, c, g, or t
ttggcaggaatccttaccatggagcagcagatagtcccagtatactcacttatctcatccatggatgtaaatgatgatgaatcaacatagtaactgaaatgaaatcttcttgattttaaataatatacgaatggtgctattaatattgctaaaatcaacgtgtgaagtgtgttgtggaagagacctgtaagtatnnnnnnnnncgatattttatcagaccattttgtaaataaaggcagaatttgtgttgaagattcttatatgaataaccttcctggatttgtttagttttgcaccaataaaactgtgtactactgtttgttggtttaagagtagcagattgaaatataagaagccagattagactctaaaattgtggccattggaatctcatttataaatggaccttttaagtatattaattcctcttcagaattgagctggacacatttggcattcttagtttgtcatataaccaggtttatccttagtctaactgcaagggatagaacctgccccaggtcacaatcattctgtccaatccagccaaggttccctccacatatgaagatggaccatggcaggatacaactgattgtgtggcaccatgtattagcagtgggaatatgtatcacatatgatgcagcctttcatatttcagcagtttgccactgtgactgtctggcaagcccccagatggcgttatattaattggattagattattttgctcaccttatgtaatactgtaacttcctataacctaatattttcggtatcattaaccaaaatttcacactcatagttgctaaagagaatgttattcaatcattaaactctgaactgatttcttctatacatttaaattatccaccctcaataatacgggtgctcaaccctatgcattttttaagtgttgctatttcttaattaaattgatttcctgtcattttgaatcatttatcacctgcgatgcatgattctattaattttgttatgttactgttttaaccaaagctgaccgtaaggataaaacacttaagttgttgctgagtactatatatcctcaatatgcatgtctgcccatcacatcaaatgttctgtcaacaagatgtttggtaattttttttaaaaaggttggaaaattaattatagaaggttctatactgtttttttaattaagaaactaaatctagcaggctaaaggttaattgtagtgattttttttcacatagatatctttctatgacctagttagttactgcaattcagaattagttcacattgcataaagaattacttgttgtaagcaaaatgctgaaactaccaaaccagtggatgaagaccactaagaactttgcacataatcatacaatcttttgaaaatattttgcaaatatgtgtttagacaataagatggactagagttcgacaaaatgatttctttatttaaattttgtataagtattttcttcgacactttcaaattatattgtgttcttgatatatgctgtatatttatttgttagtgcatgtgtttttaatttacatgaaaacatgagttaggagaaattacaggttgaaagatgaaatgcctgtatgtgctctgaagaaatggtaattccagattgtgcagggggaaacaaatctannnnnnnnnnnnnnnnnnnnngagacggagtcttgccctgnnnnnnnnnnnnnnnnnnnnnnnnnnnnnnnnnnnnnnnnnnnnnnnnnnnnnnnnnnnnnnnnnnnnnnnnnnnnnnnnnnnnnnnnnnnnnnnnnnnnnnnnnnnnnnnnnnnnnnnnnnnnnnnnnnnnnnnnnnnnnnnnnnnnnnnnnnnnnnnnnnnnnnnnnnnnnnnnnnnnnnnnnnnnnnnnnnnnnnnnnnnnnnnnnnnnnnnnnnnnnnnnnnnnnnnnnnnnngtgtgagccaccacacccggcctatattgttttgaaagcatactctatatatagttacgggcagaggcacaggcatcctcagcagctgattcaggagatgatggtaaagctagctaactatgaattaaacattcacatatccagtctacctggtccagtaataatacaagcaaatcttgtatttcaggaacaaatcaaggttctcttaattttttggcttatatacaatgaagtaaaaacttgataaacatggtttcaaattgaggaggagagtcttggatgtatgttttaatatgtataccttataattctgcctctagccaaatgctatgtttgcaaaatgtggcatctgttagtttttattgtctgtgtcttctttgtttactataccttgggtaattttgtgttaccnnnnnnnnnnnnnnnnnnnnnggaagtgtaatgtcagacacacaagaaaagcaaatcagtgttgtaagcttaaagtacaatttcaaaggtcattaccaacagcagggttttttttatactttaaaaacattatgctacatatcattgccattttcatattttggggttttgctactcttatacaatggaatcaatggaaatgtcatccagccactgaattgccattattatatctaaaaagtttctaagatgacagttatcactattttgttttatctccatgctgacatttgaaagaaggtactagtatccctctagccagattgcttagtttttcgttggtaatcaaacaacagttgtactaaaggaaagtaaagctaggacctaaatcagaatcatagttgcctgcatatatggta

SEQ ID NO: 180135 - DNA, 2172 bp, Homo Sapiens
  misc_feature (747)..(777): n is a, c, g, or t
  misc_feature (930)..(1013): n is a, c, g, or t
ttggctacctatatgtattccatggctaacaaaccctggcccctttacatatgagctctggaggttcgcctggctgcctcaggcttgcagaaggctgccccaatcacagagcctgggtaaggtggaacaggaggcagccccactcggcttttctgattgcatcccacctgtttctgagtgtgttggtttggtttaattcttttcaagggttggagttggaaagtgaaaaccctagacacttgctgtggaatgtttgcctggttgtattggtgtgtccctcttcttcactggcatgtcgctttcaagtgtaccaaaggacattttgttctgttgaaagccacaggaccaaaaggaaaatattgcaactatttgcaaacatacttccctacctatacaagcagccatatactaaaaagcactaaacaagcacaaatgaacactaaatagccttataccaaaaagcattcttgtaactgtcagggcatggtatgaattccttcctctttaagcagcaacttaccacaggcttggtggctttaagtaatatagcattaagcaaatggtcagttattttttaatgttgaaaacttccaagtgtgaataatacggacatagtttactaccttttgcttttaatatacctggttatctatttccatttgaaataaaatgaaaggagacctcaaactgatgctgagaagtagacaaaatcagctctcagacttaactctccccaattaaaatagnnnnnnnnnnnnnnnnnnnnnnnnnnnnnnnaagagatagggtcttgctgtgttgcccaggctagagtgcagcagtgacatgatcatagctcactgcagcctggaactcctgggctcaggatccttctgcttcggcctcctgagtagctaagaccacaggtgtgtgccaccacacctggctaannnnnnnnnnnnnnnnnnnnnnnnnnnnnnnnnnnnnnnnnnnnnnnnnnnnnnnnnnnnnnnnnnnnnnnnnnnnnnnnnnnntcaaattgctagaattacaagcatgagccaccacacctggcctgttattccttctttatctaatgtgtgctaagcttgtgaaaaatatatgttgaggtaaatagggcaaaacattagttgataaattatgctaattaatgggaaaaatagacatgttcctctctgaacatttagaaggactctgccctacaactatcttctgtttttagaatttgtagtcactgttcttagtgccactggaaatatattcattctttgagcatgtacagggtgggctccctgttgtatttattacacttttcaaaatgccagcaagtttttgtttgtatagagttggaatgtattgttcgtgcatgcctgtgatattcatcatcaaaatatacctgtaaaaaataaactactgcttcctctccacagcttaggcctccctcttactaaaaacaatagtagtttctgtagaagtttcagtgagaaattatggttatataaataacagatatggcagaacaattttgttgtagtatttttttccgtagcatttcttaataatagctcagtttttaaaggaggggaacaataccccatgagttcaaattaattttctctactttgaggtataccttcctaattatattttacataggctgttttttttaagtttaaattctcactgttaagttgcattgagagacaattagaaatgttgtaattgtcatatctttacatgtggattatgaacaaatgaaagtttgctgtgtgattgcagttttaaattataacatttcataaatatgtcaattttagaaactcaaactctttcccatcttttgtatggataaagtttatggtttcatttctgagaatagagttggtctgctgtgctaacttcatgtttcttattccaaaggcttgattatatttttttctccagtgattaaaaatgcagcgaaaaatccaatctacaagttcatatattggtatttctagacatagtctagttctaaaagaatgtacttggtgtgcattttttaagtgtttcatgtagacagattaatatatttttgtacaacattgtatttctacatttatttcaagactgtactttttcagtgactttttcaagtgcatgtgttaacagaagattgtttggaaacaaagt

SEQ ID NO: 180136 - DNA, 835 bp, Homo Sapiens
ttgggttccttgtcttcaaagagctcaaagtttaggaagaatctggagatagtgaagtctatttttctatacctctaggacagagcagagtgtgctaagtgaaataagttctaagaaagccagtgacagcttaaagagggagaaatagaatcagctgagggattgcaacagtagagcgttaattatttaccctgggttttggaggatggatcagatgagaaaaagagaatggagaggagaatgtcccaggtggtgggagcagcatgagttctgggaggcagcatttggggaaacagggaggcatttagtttggctgaaatagagagtgtaaatgggggcataatgggaagcatggaaatgagttagaatcatgctttaaagaatcttcaaagctacagagagtcatacttccctggggaccaggactagaactgggcattcaaaacattaatagctttactgtctttctttgcagaccactctgcttcatttttgggagaaaacttctcacactatggcagccatccatgagagtttcaaaggttatcaaccatatgaatttactactttaaagagcttacaagaccctatgaaaaaattagttgagaaagaagagaagaagaaaatcaaccagcaggaaagtacagatgcagccgtgcaggagccgagccaattaatttcattagaggaagaaaaccagcgcaaggaatcctctagttttaagactgaagatggaaaaagtattttatctgccttagacaaaggctctacacatactgcatgctcacgacccatagatgaactattagacatgaaatctgaggaagtgcttgcc

SEQ ID NO: 180137 - DNA, 2339 bp, Homo Sapiens
  misc_feature (1025)..(1038): n is a, c, g, or t
ttggcgccgctcgctatggcgtcgctcaccgtgaaggcctaccttctgggcaaggaggacgcggcgcgcgagattcgccgcttcagcttctgctgcagccccgagcctgaggcggaagccgaggctgcggcgggtccgggaccctgcgagcggctgctgagccgggtggccgccctgttccccgcgctgcggcctggcggcttccaggcgcactaccgcggtgagcgggccggggagcggcgggggcggtgacgcaggccggacacggcctcctgccgcggggtggctgccccctcccttctcggcgacgcctggcgggccgtgagggggtctgcgctggctgctccctggatggcggtggcctgcatgggtccccagttcggccatgggagccggcctggtgactggagtggtgaccaaggccgggacccgctgctcagcgtcggccccctggggcggtggagccctgccggccgggggctcgagcctgggggcgtcagacgccccgctccaccccccgcgctgttggggattttggcaaggacgcgccggggcgaacgctctggctctccgcgggcactgggtggtcaggcgggcactcgggttacactgacaccttgctgcgccaggtggtgggttcagataatgccctggaggagccgggcgagcgccggcgaggggagggagtgacgcgggtaaacaagcgcgggggtgcgggggactcgcgagcgccgcgacagcgcctgggagaaggcacggatcgccggcggaacgctccgagccaggtcgagtacagatgttttcccattggcaagtggacgagaacgttcttcagaagtgttggtgttggcccagaagccctgtttcctgctgcgctggtgtgaccagtggctgctgggggtggggttagggaggtggttgtggccaggagggcgggaggtggccaaggccggcccctgggagggtgcagtgctaggacctccctctggagcgctgccagcataccaggccctctcctattcttnnnnnnnnnnnnnnttgtgatgttattgagctgtaactgaaataagggttcacccatttagtgtacaagtcagtggttttcactattttcataggtttgtggaccatattcagtgtgagagcttttcatcaccttataaacgccatacataccatttatcaccctcttatccacatgcccccagcaacctcctttctgtatctattcatcttgcaatcctggacatttcatgtaaatagaatcagacaatgtagtcttgcaagtggtttctttcacttagtgtaatgtgttcagtgttgtggcacatatcagaactagtttttttggaggaataatattctgttgtgtggacaggccatgttttgtttacctgttcattagttgacagacatttgggttgtttgcatctttgggtgcctcacctgtgccctcggtggatggcgtggtttggtctgcacagctgtgctttaaagccatttcagctcacatgtatctgtcacaaatggagactacatacaaatacgtgtctttcagctttgttagggaaggaagcaggcagatgcccttgtcttctcctttactcccaagccactagaagtctaaggcctttgtggggctgggcccctcaggagcaggtcacaggcagggatctcccacagttgaagacggacatgggcctggtcggatggggaatgaggtggcacgtttctgaaaaggcagctggcccaaggctaaataagtgcagcagccaaagctgctgcccctgtgcacaggccctccgccccctgcatgtggctgtggtccagggcccaggtcggagcactcaccttccaggaggtgccagagcaagggggtagtcttgcctctcactcctgccctctgtggctcaagtaggtgtgtttgtttatagccctgtgagtgtccctttcatacttgcctcagcccattccagcagcttatgtccagctgagaacccctgggtgctcacgtgctgtcttttaaacaatctagatgaggacggggacttggttgccttttccagtgacgaggaattgacaatggccatgtcctacgtgaaggatgacatcttccgaatctacattaaagagaaaaaagagtgccggcgggaccaccgcccaccgtgtgctcaggaggcgccccgcaacatggtgcaccccaatgtgatctgcgatggctgcaatgggcctgtggtatgaacccgctacaagtgcagcgtctgcccagactacgacttgtgtagcgtctgcgacgggaaagggcttgcaccgggggcacaccaagctcgcattcccca

SEQ ID NO: 180138 - DNA, 1794 bp, Homo Sapiens
  misc_feature (259)..(272): n is a, c, g, or t
  misc_feature (1364)..(1528): n is a, c, g, or t
gcctgcctggtgacaacacttaggtttactttatctaaaatcagagtgtaccaggtctgtagcagaaaataatcaactaaatgtcagggacctatgagtcatttaaaacaaaagagaaagtgaaagccattaggcaagctatgtgctgggctgctaatgtagcccctgcagggaggggtcaggagcgcgctgcagtgagccttgggtctcgcaggcccagccctgctgcaaggagccagggcacccaggaaacatcagnnnnnnnnnnnnnngggaccctcccttcatgtcacttgttttgctgccctaaatggcttcttgcaccctaacccctgatcctggaagaaggcagagaaactggcccgtacagagacctgcaattctacgcaagcttaacacaactatgagacagaagaggggcacgcagaagaggtgggcaaaagtggtcacaacggcgggggatgctttgaatactggatggtgtccagagccgctccgatgtcatagttcttggtctgcaggagcctggtgagccagccgccttcatcagagaagcccatggacagcatctgggagagggactcaatcagccgcgggtcagcctctgccgaaacagtaaggaagccatgaggagtggtgctgagccctgtgagtgacccgaaacacataccctgctgccttggccagccaggaccagggtctgccagtgtccgagcctgcccagagctctcgtcctcacaggccacagtggacctgctttccctgtaaagggccaagcagtctttttcacactgctcaactctgccactgcgacaccaggcagccaggtggtgtgtaagcagaaccatcaatggacactgaaataggcatttcacctgtcacatcttttgattttaaaatgtaagaacaggccagttagccaattattacactcctccatgcaagagatgatggggcattgaaatagattgaagatggagagagatgaatggatacaagatacattttggaggtagaatgaacaggacttggaaatgtatgtggagaaggcaaaggagttaaagatgatatctggagcagcacaactcacaattgcaaagatgtggaaccaacctaactgcccatcaagcaatgagtggataaagaaaatgtggtatatatacaccatggaatactactcagccacaaaaaggaacgaaataataccttttgcagcaacttggacggagctggaggccattatcctaagtaaagtaattcaggaatggataccaaatatcatatgttctcacttatgagtagatgcccaagctatgatgatgcaaagacataagaatgatatagctttccctctccctccacgnnnnnnnnnnnnnnnnnnnnnnnnnnnnnnnnnnnnnnnnnnnnnnnnnnnnnnnnnnnnnnnnnnnnnnnnnnnnnnnnnnnnnnnnnnnnnnnnnnnnnnnnnnnnnnnnnnnnnnnnnnnnnnnnnnnnnnnnnnnnnnnnnnnnnnnnnnnnnnnnnnnnngtaaactaaaagaaggaaaagataaatagcatgtcaactaactactacccaggtcctcaaaagtccaaatcccaaggcctggcttaggggaaattgcagactattgttcacccaaaggagggcagtcagaggtgacaggcaagacctgcaaccacagtctggtcaccctccctcactgggattatcccaaccaaatgccagctgattcgacttcactccatgtagaaagctcgagaattttgtcagggaattcaaccttgagccaa

SEQ ID NO: 180139 - DNA, 2108 bp, Homo Sapiens
  misc_feature (114)..(154): n is a, c, g, or t
  misc_feature (177)..(188): n is a, c, g, or t
ttggttttctttcatttctacacattcatgcagtatttcatggttctatcaaagcagcagtaaaaaaaatactcttgacgcatgaaaattaactggtgaggggcctcattgctnnnnnnnnnnnnnnnnnnnnnnnnnnnnnnnnnnnnnnnnnatcagaggatcagatgcatgacnnnnnnnnnnnnaatggtgcagatcttctatcaggtgtctcacaataaattcaagaggattttagtttgccagaaatgttgcaaatgcactaatttgagtaagatgttgatactgaatatatcctcttgagacataattttgcatgcaaaattatcccataatctttgtaggtttgttaatattgatgcattactgccctatatctaaatgatcttctcccccttcccctccataactcttggtatctaaattgatgacagctctgacacaagcaagataacagtgctgtgtagtatacatttgtttatattatcggcacttctcagtataggtggaaggaaccattacctttatttaacagtggtttttcttttttgttgttgtgttttacagttcttttccctggttcagcctgaactatataccaggccctgctgaaaataccacccaacagttttcttctgcagcttatccagtttctcttaagtgccctgtacatattgtatgttttatgatgagatgcagtttcttaatatgtattacagaaatactactggtatttgcaaatatgtagtttaattgtattattgaactctcattttgggggcttgggcacattaacagattaatccatctgtatagggcttttgctgttggatagaatttaaattgtctacataaatatttgttttaggacccttagattttatctgaatacacagattaggctttaaaaacagatatatatgtcatttttggcttaaggagtttggctaagttagcttttcaactggcactgtatggcagcattttttggtatggttagcatggcacatggcgaaacataaagcattttactgtacaggtaaggaatgtgccatgttgttttacctatctctctttctctctcactcccatgcacacatcctgtgtgtattcagagaccttcagaaacattcatattcattttcatgagtcagcaaaagccctacgcttgattccaacagaatatttcctttacatactttcttctcttaatttttacaaaatttgtatggtaggtgtaaaagaaaatcatagtaactgtaccatattattaacccctaaatcaaactttttttgtcttgtgtatcttgatttttctgtgtgctttatagtgaagcagccgacacgagtcgttgttcataaaacagcttttgaaagttgagagcacacccctggagaaccgactgtgcttgcttacgtttggttcatgacttaaaaatcgagtacaggagttattcctgatgaagctaaagctttgtctctgttggcaccagctaatgcagtggcaggtcttctgcctggtggtggactcctgcctactcctaacccacttacccagattggcgctgttccactggctgctttgggggctcctactcttgatcctgcccttgctgcacttgggcttcctggagcaaacttgaactctcagtctcttgctgcagatcagttgctgaagcttatgagtactgttgatcccaagttgaatcatgtagctgctggtctcgtttcaccaagtctgaaatcggatacctctagtaaagaaatagaggaagctatgaaaagagtacgagaagcacagtccctaatttctgctgctatagaaccagataagaaagaagaaaaaagaaggcattcaagatcaagatcacgttctaggaggaggaggactccctcatcttctagacacaggcggtcaagaagcagatcgagacggcggtcacattctaagtctaggagtcggcgacgatccaaaagcccaaggcggagaagatctcattccagagaaagaggtagaaagtcaaggagcacatcaaaacaagagacaaaagaaagaagacaaagaaagaaacgttctaaacaccaccaaaagttacagcacagcc

SEQ ID NO: 180140 - DNA, 1491 bp, Homo Sapiens
  misc_feature (354)..(368): n is a, c, g, or t
  misc_feature (1228)..(1245): n is a, c, g, or t
ttggctacttatggtcttgtttgttgacatgacaaattaacattcttatagttacatctggaaatgagcatttgaaatagataatcctttaagccttgtggcaaaatttttgtggcttttgtttaactttgaaaggttattatgcactaaccttttttggtggctaattagggtttaaatacagaaacaagatttcaaataaaactgtctttggcagtgagtaaatagcatattttgaagtagagttgtatactttttcataagatgtttgggaatttttttcctgaagtaataatttattccacatctacatcagtgaaagctatctacctatcctgagtctatcttaaaggnnnnnnnnnnnnnnnccttatctcttgcccttattttgaattttccactctttcattaatttgttttaagctccgtgttggaaaaaaggggtagtgcattttaaattgaccttcatacgcttttaaaataagacaaatctacttgataatgtacctttatttgatctcaagttgtataaaaccaataaatttgtgttactgcagtagtaatcttatgcacacggtgatttcatgttatatatgcaaagtaggcaactgttttcttagttacagaagtttcaagcttcacttttgtgcagtagaaacaaaagtaggctacagtctgtgccatgttgatgtacagtttctgaaattgttttacaagactttgataataaaacccttaaacttatgttcatgttcctgtaaaaccgtatttgtatttatttacgctactgaatgtatgacatttacctcattcattttacaaattctttccctttctgtccacatatttcagtatagtaaaaagaggaagtctatcactgtagtgataattgccatcaaaattgtcaaaaatgatttaatttctatccaaaatagtccttttcttagcttagtatcattttattgcttattttttgtgtgggaatggggttggataaagcaatgaactttagtataaacaaatcccacctatatctagcaaatttatattttcggtgaaatacagatatttgcctttctggagtagtatagaagctgtcaatatgtatctactgtacagtactaaatagtattcatttatgaaatgagtagtgtttgggtggctggggttaagggaaaatgagacttggaattgtagcttttatccaagttttgagtataaatagggnnnnnnnnnnnnnnnnnnaacctaaaaactgaaatgccatatagaaaaacagcattgtttttacagtttgtagtaagtaactttttaaagattttatcaaaaagaattttgtctatagtgagtaaaagaagttctaataatgagtcctaatcactgcaattttaaaaaacaaagttcaacacaaattgacattttgttttaaactttagtagataaaaagtgaaccatgtgacatgggcatttttgtaagtcaaaaacaaattt

SEQ ID NO: 180141 - DNA, 3673 bp, Homo Sapiens
  misc_feature (860)..(871): n is a, c, g, or t
  misc_feature (2342)..(2402): n is a, c, g, or t
  misc_feature (3410)..(3418): n is a, c, g, or t
ttggccttttccgttgccggtgccggcctagcgtcctggaattacttcaatcaacaggagcgagaacccgagcagcgccatgagcaacactaccgtcgtccccagcactgcaggtccgggccccagcggcgggcccggtggcggaggtggtggtggcggcggaggcggcggcaccgaggtaatccaggtgactaatgtctccccgagcgctagctctgagcagatgcggactctcttcggtttcctaggcaagatcgacgaactgcgcctcttcccgccggatgattcgcctttgccagtctcatctcgtgtctgctttgttaagttccatgatccagactcagcagttgtggcacagcatctgacaaacactgtattcgttgacagagctttgatagtcgtaccatatgcagaaggtttgtgctttgtttaactacctatgtgggcatcctaagatgaccatctacctcagtagatgtagagtgagcattagtagcatgttaaatctaagctattaacatttttaaacccttgttatactgcagtccgtaatttttgcttgcagattttttttaattctaaaaattagaaattaggtctgttattataaggtatttaccttttgttttcttttaaaacatttttaagttgtttaaaaccatgtcccttattgtaactccctgagatacatctacttagttaatttaatgttaagttttatgaaaaagccctgaaggtaaatgattcactccatgtatgcttacagagccttcaaataaatgcatgatgttatttctgttttaaataaatgagtaggttgattttattttcttaaagcttcctcacattgataatctggnnnnnnnnnnnncacattgaatttcagtataccaagggttgcagtgattttggttttcgtgaaagttcaagatttcctgtagcttaggtgccaaatgggcactgggtgttttattttatgccagattttcttgttcattcttgctatatttctagaatatctctaaataataaattcttctctctgttatttgtgtgtgtgatttttatagtggagaaggcaaatgcaaaacccttccagatgcctgaaaaacagtgggtcctctgcagctacaggggattctagacattaactaaaggccagcaagcactcaagtgccccaagtgttttcctggtgtaaccatttgttaactacattttctctctttttacattttaggctgttaaagtaatttgacagaaaaaaatgagcaggttttttggatctaaaaagccactgtgacaagaaattttaataccattttgtaaaattttctaaggcgtattttataattagtttgttcccaatgtactgctacttgatttgcattttggtaactataaattttactcgaatcactgaaatatgataaaactgctggattttaagttaataatttaatatgctgaccaggatttaaatgctttcccctttccttaataaactggtcagtggaagtggaatcttaatattgttcattttagatgctatctgaaatctttgaaaacaaatgtgagcatttacaccataccttgtaaaagttgtgaaatgtctagtccttaacagagaagttgcctctggttttctaaagaaattaacttatatttataaatgggttaagacatgttatgtaatagtacctctgtctccatgatattaaagtgtatgagcccagttttaaggttttgtaatgtatagatagataaatttttgagttagtgtgttttggttaagcaatttcttttatgtcagtgtgcctgttgtagataagaccatcaacagaaaatttacagaattcaaattcaggatgaataaaatagagtataggtcttggaacaagggtcaaatcatgtgagtaatatgtaaaacattttggttagcctgtaaatttaaattttttattggctaagtattatagttcccaatccctgaacataatacagtatatcatataaatgactttcataaatattttcaggccatagtaatttttctagacctatttttggaagtgaagtatttaggaatatacagtatatagaattaggggaatatttcattcagaattctattgttggtgaatttaattctggtatgatatgctgtattaatgttacctccagtaaatacaattccctccagatttagctattacacttcggtgttagctcttggtcagtgttttagaacagtagacatagtctacggtaaggaatagtcttaattggtaaaactaagatagctgaatttggaaggaactcttaatagtaatggatttggggnnnnnnnnnnnnnnnnnnnnnnnnnnnnnnnnnnnnnnnnnnnnnnnnnnnnnnnnnnnnnacacattcatgcagtatttcatggttctatcaaagcagcagtaaaaaaaatactcttgacgcatgaaaattaactgttcttttccctggttcagcctgaactatataccaggccctgctgaaaataccacccaacagttttcttctgcagcttatccagtttctcttaagtgccctgtacatattgtatgttttatgatgagatgcagtttcttaatatgtattacagaaatactactggtatttgcaaatatgtagtttaattgtattattgaactctcattttgggggcttgggcacattaacagattaatccatctgtataggggcttttgctgttggatagaatttaaattgtctacataaatatttgttttaggacccttagattttatctgaatacacagattaggctttaaaaacagatatatatgtcatttttggcttaaggagtttggctaagttagcttttcaactggcactgtatggcagcattttttggtatggttagcatggcacatggcgaaacataaagcattttactgtacaggtaaggaatgtgccatgttgttttacctatctctctttctctctcactcccatgcacacatcctgtgtgtattcagagaccttcagaaacattcatattcattttcatgagtcagcaaaagccctacgcttgattccaacagaatatttcctttacatactttcttctcttaatttttacaaaatttgtatggtaggtgtaaaagaaaatcatagtaactgtaccatattattaacccctaaatcaaactttttttgtcttgtgtatcttgatttttctgtgtgctttatagtgaagcagccgacacgagtcgttgttcataaaacagcttttgaaagttgagagcacacccctggagaaccgactgtgcttgcttacgtttggttcatgacttaaaaatcgagtacaggtgatgaaatcttggcagtgttaacaaaaaagtagtgtgtattgtgctannnnnnnnnactctagaaacttaaccatttgtagagaaaaaggaaacaaattttcacacattgaagttcattctgacataaaattaatgataaataatcatagaaatcaagctttgtattttagcgaacataagtactttcaacaaactcagtggtgtatcaggagacattttctgggtgtttttgtgtgttttctgtcttagaaaagaatgtgttctaatgcaaggatgtttctctgcaggagttattcctgatgaagctaaa

SEQ ID NO: 180142 - DNA, 1564 bp, Homo Sapiens
  misc_feature (1443)..(1451): n is a, c, g, or t
ttggattatagttcccaatccctgaacataatacagtatatcatataaatgactttcataaatattttcaggccatagtaatttttctagacctatttttggaagtgaagtatttaggaatatacagtatatagaattaggggaatatttcattcagaattctattgttggtgaatttaattctggtatgatatgctgtattaatgttacctccagtaaatacaattccctccagatttagctattacacttcggtgttagctcttggtcagtgttttagaacagtagacatagtctacggtaaggaatagtcttaattggtaaaactaagatagctgaatttggaaggaactcttaatagtaatggatttggggattttttaggttccttggttaatgtttgtttcttttgtctgtttctttttctttcatttctacacattcatgcagtatttcatggttctatcaaagcagcagtaaaaaaaatactcttgacgcatgaaaattaactgttcttttccctggttcagcctgaactatataccaggccctgctgaaaataccacccaacagttttcttctgcagcttatccagtttctcttaagtgccctgtacatattgtatgttttatgatgagatgcagtttcttaatatgtattacagaaatactactggtatttgcaaatatgtagtttaattgtattattgaactctcattttgggggcttgggcacattaacagattaatccatctgtatagggcttttgctgttggatagaatttaaattgtctacataaatatttgttttaggacccttagattttatctgaatacacagattaggctttaaaaacagatatatatgtcatttttggcttaaggagtttggctaagttagcttttcaactggcactgtatggcagcattttttggtatggttagcatggcacatggcgaaacataaagcattttactgtacaggtaaggaatgtgccatgttgttttacctatctctctttctctctcactcccatgcacacatcctgtgtgtattcagagaccttcagaaacattcatattcattttcatgagtcagcaaaagccctacgcttgattccaacagaatatttcctttacatactttcttctcttaatttttacaaaatttgtatggtaggtgtaaaagaaaatcatagtaactgtaccatattattaacccctaaatcaaactttttttgtcttgtgtatcttgatttttctgtgtgctttatagtgaagcagccgacacgagtcgttgttcataaaacagcttttgaaagttgagagcacacccctggagaaccgactgtgcttgcttacgtttggttcatgacttaaaaatcgagtacaggtgatgaaatcttggcagtgttaacaaaaaagtagtgtgtattgtgctannnnnnnnnactctagaaacttaaccattttgtagagaaaaaggaacaaattttcacacattgaaagttcattctgacataaaattaatgataaataatcatagaaatcaagctttgtattt

SEQ ID NO: 180143 - DNA, 1229 bp, Homo Sapiens
ttggattattgtcctctagcaatttctaccacaactacagtgactttctccactgaagtcaaagtcgtccatgaggattggaatcagcttcttccaaactcctcttaatgttgatattttgaccttctcccatgaatcttgaatgttcttaatggcatctagaatggtgaattaaggttttaaatttacttagcccacatccatctgaaaaatccctatctatagcagtgtagccctacctaaagtatttcttgaataataagatttgaaagtcaaatttattgatccatgggctacagaatggatgcgttagctggtataaaacaacattaatctccttgtatatcaccatcagagctcttttgtggccaggtgcattgtcaatgagcattaatattttgaaaggaatcctttctcagcattaggtctcaacagtaagcttaaggtatttagtacaccatgctgtaaacagatatgctgttatcagattttgttgtgctgtttatagagctcacgtgaaataggtttagcataattcttcagggccctaggatttccagaacagtcaatgagcattggcttccacttaaagttaccaactgccttaatgcctaacaagagagtcagcctgtcctttgaagctttgaagtcaggcattgacttctctcaagatatgaaggtactagatggcatcatcttccaacagaaggctgttttgtctacatggaaaatctgttgtttggtgtagccaccttcatcaatgatctcagctagatcttctgggtaatttgctgtagcttctccatcagcacttcctgcttcaccttgcacttgtatgttatggagaaggcttctttctttaaacctcatgaaccaaccactgctagcttcatacttttcttttgcagctttctagcctctctcagttgtcacaggactgaagagagttagggccttgctgtgggttagattttggcttaagggaacattggggctggtttgatcttctatccagatggctcaaactttctccctatcagcaatacgtttgctttgctttcttatcatttgtgtgttcactggagtagcaattttaatttccttccacgaactttcctttgcattcacaactggggcgggctgactgcttggcacaagtggtctaccttttgccctatcttggcttttgacacgccctcctcactcagcttaatcttttccagcttttg

SEQ ID NO: 180144 - DNA, 1405 bp, Homo Sapiens
  misc_feature (258)..(410): n is a, c, g, or t
ttgggccagctcagatttgattatattttattttggatgggtgtaattcacagcacagttctaatctcccaaatctttctgctttttagaatgaagtataaaaatacttttctcacctgaataccaagggttggccctttagttggatcattgtcatatgacttggtagatccttgtcctcagcacctcacgtgagagaagggagtcagccagccggccccctgcttggtgctcgtgaccagctcgcaccccttctgnnnnnnnnnnnnnnnnnnnnnnnnnnnnnnnnnnnnnnnnnnnnnnnnnnnnnnnnnnnnnnnnnnnnnnnnnnnnnnnnnnnnnnnnnnnnnnnnnnnnnnnnnnnnnnnnnnnnnnnnnnnnnnnnnnnnnnnnnnnnnnnnnnnnnnnnntctcaggcagggaggaggccatcccaagccgagattaacaggacttgacataagccattagtttgtagctttgacaagaaattatgaatttttgttgcttattttgcaaaggatgcttttaagatcaaaataataaccctacctaaagtctagctccactgctatgggtcatactcttcagcctcccaacagggcagagagagagagctactgaggcttgtctaggttgccaggctaactgggcggcttgtccatattcaccccatggattgcaccatggcactctttgatttttccactgcaatggcaagtaatctcatcagtcataatagagcagtcccgaatgcgtgcagattctaaaagcagggctttaggagagaaacactgccagggggaatagttttggggagggttttcccaaaataacggtcatcctactgggtttatcccacccttaaatatgaagcctgttacctccagaagcttctgagaagaatgatgtgaaaagacagggagtgggttctaggcaaagaaaacataatgaccatttagaggagtcagtagcaaagctcacagataaagtattttattactatctgaagttttcttttgttttcatgcaggacattttaaaaacgtatatggcagcagaaacttgtttctcaatagaaaaaatacattcagaggcatttctgggatagtctatctgtgttagtatttggtgctatctatgtccagccaagttatctaccctcaaattctgactaatcatgtttgtgctttgggtatttaaaattacatacatatatattctttttgccaaaaacaaaagtcttgcttcttgtcaaatgattgctaaagtagatcttacattttttgttattatgtatgtatttatacacatccccaacacacttagtgatttctgttatttcctagggagcacagctttaagctatgagatacaactaaaaggagcccatctatttggtttt

SEQ ID NO: 180145 - DNA, 1320 bp, Homo Sapiens
  misc_feature (1220)..(1228): n is a, c, g, or t
tcaggaatgaacatgcaggaaactttcttttctttttagcagacacaggtgccattaaatcaggggtattgacatccaccagatccactacttcaaagtttttctttgtctcttgagttggctggctcgggcggtcaagaaaagccttcacccagtagtctacacacccatattttcctttgaaggatgttcccagaggcctgtgtcaagaaaatgaaaattttaaaacgctctccaagaacagtaagtgatcaaaggagggcaagatattttagacagaaaagttcaaagatgcatttagctgatatttacccctgaggaagctcaaagccgaacttgtactcatatttgtttccaggtctcatgatcaccatctcattctcacctgaagggaaagaaaatcgagtagccattaggcttgctgttacacttaaaatgcatctgtgtgataaggaatgcttgggtggcatgcaaggtattgaagtacccccaatttcatcccatatatatattttttaatccatcccatattgttcttaaagagaaattctgatgtattttgtcgggcagcaagttgccaagccctgcaatactgaaagattcacccaggacagttctctactaacatctcaaataggaagtagacaaagaataagcaacttatgcacacataagactttaactacccgaggcaacgcccctcaggatcccctttaggacacagcaccataaaaaattgtacaaatcacccttttttttggggggggaggagaatgtctgcaaattaaaacagaaaaaaggaagcaacaacacgtaattcaaaccactcaaactgagcaacttaaaacatttcgtacaggttttgtgtattcaattctcttctctaatcagctttcaccctccaacaatgaattgggccgcttacctgttggctggtcttccagaagaagcgtgtcttcatagcgcaggtactccgaagtctgtttgcactgctgggatccctgcatccaaagcactttagccactccgcaagccaggatcctaacggctttgacacgagtaacttcacacacctccactatcacccggccagccaccttctcgccactgccgtacaccttttcagggtcgttaaagaccacctcaaaagacttgatcttcttgaacatcaccatgatggaactgagttggttttaagagttagaaatgacggtggaagnnnnnnnnngctccaaatcgaggaaacccctttgcaaaaaattatttcactttaaggaatctctttttgaagtcttaagcagccaacttttttgtacaaag

SEQ ID NO: 180146 - DNA, 1390 bp, Homo Sapiens
ttggtgatcatttgaactgagtagtagttgagtaaagttgctaatccatctagagccttatctgagtggatccagggtttcctattggtgctgggtgtagcctggctaggaatttgtgaccattaggtatttactgtccttaaacattagctttcacttgcagctttttactaccagtaatattttggaagccttaacataagattttctcagcatcagggttgtcgtcaatgaatttcagaaaactcttcagaccagaaggcagaaaagctgtttgctaatccacgtctctgactttgccatcacccttgtgttctcataattcacttaatgccaagcaagtatatgcacagatggaggttcatgtctctgtctgctttctctacagaaggcagctgccatgttccttcaaagctcagtttttcttacagtgaaatcctattgtcataaaataatcatgatccactcctactaatgggtccctctgtgaggcctaaatggcagaattcattcatttttctaggccttggatttttgtctctttagacatgcttttcatgtttgttaaactcaacatatccaaaactgctgtaagcaactctttctcacctttttccccatttaggttagttgtactaccatcttctcagatgcccaagccagaagcctgggaatcatacttgattcctccctgtttaaccctcaccaagccaatcactctggctcttaaatgtcacaaataataattcactactttccatcccaattaccaccgctctactcaaggcagctttcatctttcacccagattatcctgacaactttctaactggttttattgcctccaatcttacttctcttttattctccagactggaaatatttttcaaaattgcaaacggattatttcatctccctggttaaaattctttagtaattgtccttaggagaaagtccaaactctttaacatggatcttataaggtgcttcgtaagctgcctcatctttgtgctactttttcacttcattctctgcctcggccataccactccctcagttctttatgctaccatattcatcctcagtttgaaactttttactggtaatgctttgacatttgcagtttctgtattttgaccaggtaactcctactattctttataatacaacttaaatattacttgtttagggaaactttctctgtaaccctaacctagattagttgcccttgctgtgtgctcctatagcatcttttatttttcctatgatagcagttagtaccttttaattttaattaattgttcaatctttagagtataaactctgtgagtgaagttactctgctgtcttgctggtgatctttcaaagatggaatggactttcttgggaa

SEQ ID NO: 180147 - DNA, 1120 bp, Homo Sapiens
  misc_feature (98)..(107): n is a, c, g, or t
  misc_feature (121)..(141): n is a, c, g, or t
  misc_feature (701)..(710): n is a, c, g, or t
  misc_feature (1041)..(1049): n is a, c, g, or t
ataaaccagcatgcccggctcaagctgttctcttataatagatgtattttttatttttgtaaaattaaaaacataaattttagatttcttatttaccnnnnnnnnnngagactctgtctgnnnnnnnnnnnnnnnnnnnnnttttattttgttttcggtaatctaagattgttgtacacaaaaactttacagattatggtagggtttagcaaactgtgtatataacgtaacattaatatcgctattttctgatgtctaacttttaggaaagattttttgtttacaaatgtctccacaaattctggcttattttataaaaatagcagaatactaaagaaatgggtggtttgccacactacatgaattcacacactactggcattcaattaaaatagcaaatattttcctcaaaatttagacagatgaaataatttcttgatttttgagtgcagtgacagacattcacaaatatttcagaaatcaaagctgtattaggttttacttagtagtaatatgtatataagatcaaggatctgttcagaatagatatttttcatcaataatttggtgctttcaaatacccagaagtcttgttttaatcagatgaagtctgaggatagtttagtaattttactttttgtatgatgtgttcacaattttctaatttaacctagtattgattgatgatgggtaaaccaacnnnnnnnnnnaatctcgtaggtttattatgttgttgaagatgtttttagttagaattctgtctttcaaaattgtttacagagatttaggtctagttgaatttgctcaacctgttaatcagtgtcagctgccagattctaattcatttttagtgtgcctgtacttttctttctctaaactaaatttatattctctatattacttgttcaaatgtgatataatacagctcacacatttaaaacaaaaccatgaggacaaattaattctggcttagtataaagaagctgttaccaaattagtgttacatatgcagatggatgcagctcaacaaaattttacacnnnnnnnnnttgaattgaactacacgtgttgccatgacttagcctctaatgatctcgtgaataaagacaaatttcaacac

SEQ ID NO: 180148 - DNA, 947 bp, Homo Sapiens
cccactgccggtaagaacccacatgaagttaggggcgctcaggccgcagacctcccggctgagaggagctggcggctgcccagccccacaccctcctcagttagggttaggtcatgaggagcttcggctgtcccctgaggtcctcgagactgactccccacggctccagcagaacacccaggagcatttgcagaacaggaatgcgtgagaggcgggcatgccttgagagggctgtaaactggaaacctctggcaccgcggacaccaagaaccacaggcggacatagatacagtgattcctggagggctccagacacttgtagaacatgaaatgttaacagatcccacccccacgtaagaaggacccccgatctgtggcttctctcttcccgtccccgagggtagccaggctggtggtctctcctggaaccctggccctcatccaaactgcccacatccatttcctcagcctgtgtgctcacccacggttcagatcccagaaactgccccacgagggacaggcgacctcccacctgaactggctacgtgccccacctggagaaaaagcacaggcaggcacatgagagttcaccggcctcagccttcctgcccgcgggacactcctgagacacgaacgggtggggtggggtggacctgtccagaccactgctccagaggcatctgtgtggtgtgtgtgacctcacaggtggggagaggtgccacttgcaggggggtggccagcagggcccctgcaggagtgtgcagcctcgatgtctccatcccacaaccctgtctctctgggtgctgcccttgaaggagctggggcacaacgtttgggctctgaggagccagttccaattgtccaaagcaggagagaaactcagaaaagcacaagcatcaagcatcccatcaagacatgttcttcaaatccatctacaaatagttgtt

SEQ ID NO: 180149 - DNA, 1131 bp, Homo Sapiens
aaagtcagaacacctggcttaataggcctcactgtgcagatgaggaaactgaggcccagggaggaagagcgatctgtggagatatttctagaacccctgcaagctgagccccagtgaaggagagaaggtccagtaggagcttgctaagctcaaaatcgaagaaaggttcagcaagactgtcagggtgacctcaaagcaatggcagccatcagaggagccccattgctattaggaggctcctattgccctccccttcagcctctgactttcacctgtgctacccaattctggttccttcactcccattcaaaaatggaccccagaaaagccttattttgtggagtacctagttcccttttgggtttgtctcttgactgctacgggcattgccccagggcaaccatgacagtgaagatgactggccaagcttgtggactggccagcaagcttgggctgcctgagacgctttgaaatggctgccttctgagttggtcttgagggtgaagactgaccacccttctcacctgcacagtcacagtccctctcctgctggcctgactgcagctgtcctcccagctggccacctgaccagagaccaggagagaggccacagcctccagaccctccagagtcccacggaggaagaaggcttaccagagagaccctctgatgcatgagccaggccccagcccttctccctgcatccaggtgtgtttccaccgcaaaatgcctccacacaatgagcgactttggccctgcgtgggtcagcatgtggtctgaggtaaccctcaaatgcctccaccacacatctgtccacctgcacgggttcaaggtaagcacttgcccccttctctcctccagaccagtcgcctgaaattctgagcaacattccttcaagactatcatgtaacccttggtgatgctgagtccagacaggaaatgcagacttgggacccacctgtatcagcagaaagaggccttgtgccccgtttgtccgagtcccagaacggagcaaatgagaaaaccggcgagctgtcccccgaggagctgtagggagattggtttttagtataaattacaataaaattttgtgtatgtgtacagctgtgttcacatccacagtgtaagctg

SEQ ID NO: 180150 - DNA, 938 bp, Homo Sapiens
gtttgggagttggggttcttgcgttccgccagtatcatctcaagctgcaacacgagcagccccggggaggctcccaccgccgtgcagggccgcgccctacgccggccgccgaactccagcccacccgcagggaagctactccgagaacgcaggcggagacagtggccaatcggacccggcgggtattctcatccctccaatcaacactacgatccgcccgggcagctcgggaatttaaggctacggatgggaaaaaggttgtcggagggaggcagaagggactgggttaaattaagcaggaggggcaagaacacacagaggaccctgcaaccaatgggaattcgcaggctggggtggtttcgaaggaaggtcgaacaggcctgaggaggcagagctttaagttgagatagccaatagagatgaaggcacagtagatggcgtgtcctaaatccaatcgaaatagagctagaggtgagcggggcaggaatgcggcaggttggaggcaccctaccaatcagaccaggtcagcagcggacaggcgggacggccggctaatgggaaacaaggactgcggaaggccagggtcgggagaagaggcaggaggctggcgctatctttcaggtagccaatcactgtccgctaagaacagcgggcgtgtcagcagcccttttagggactctgagggtctcggaaggggcctgtgaggggtctttcaaggttgaggaggcggcatcgtccaaagagggagaagtatggtcccgagaaccgggcgaaggaaggcggttgtgaatttgggatcctcacctcgggccttgcgccgagtctcctggtcaccgaggctgggtggcttctccatggagctcaggatggagcccagtaggtccgccatcttgggagtgactgagagggggcggtgcgtcttaaagggaagggcccaa

SEQ ID NO: 180151 - DNA, 1469 bp, Homo Sapiens
ttggcaaataatgtaattatcagttgtatataattttcctttctcgaaggaatgacctctgatgtttgctggatgtttttaggcaatatatgaaatgtcccgaggtgaacaggatttaattgaggatctcaaacttgcaagaaaggtcagtaaataactttttatcagatgccctagtttttaaaaattacatttcacaaaatctaaaggatagttttcttaacctttagaagtagaagaatagaaaatatctactggtgaatacattttttttaggtgaggtctagacacatcctcaaatacaagtattagtaagagagtttatttggggattaatacatactaatttattttatgtgtagcaaacagaatccacgctagcttttatgtaattaattctctttgtttccaagtatagatccctcatgttttcctcacatgatctctctgtgacacatttctcccctctgacaggcctaccatgaccccatgttaaagttgtccatcatgtcagaagaggaactcacacatatatttggtgatctggactcttacatacctctgcatgaagatttgttgacaagaataggagaagcaaccaagcctgatggaacagtggagcagattggtcacattctcgtgagctggttaccgcgcttgaatgcctacagaggttactgtagtaaccagctggcagccaaagctcttcttgatcaaaagaaacaggatccaagagtccaagacttcctccagcgatgtctcgagtctcccttcagtcgaaaactagatctttggagtttcctagatatccctcgaagtcgcctagtcaaataccctttactgttaaaagaaattcttaaacacactccaaaagagcaccctgatgttcagcttctggaggatgctgtaagtagtcccttaagtgattgttttgttttttaagtttatacattaggctgctttagaacgttatcttctgaagatgctgattcacatcagcatagtgaattgttttgttgttttaagtacccagtgcgttagtacgctgtgcactaagcaataaggagctgtgtatgctggacttcgcacattttgtatcttaagggacaggattctcatctgatctcaccttgtcacctttgaacaaatcactcaatttggctaggactgtttcttgatctataaaatgaacagactggcagaattaactgatttctagagtcccttcaagctttaaagttcttccattccatatgacatttttgctctgcaggaagcagaatgagttaataaactgaagctgctctgtcaattttatttatcattttcagatattgataatacagggagtcctctctgatatcaacttgaagaaaggtgaatccgagtgccagtattacatcgacaagctggagtacctggatgaaaagcagagggaccccagaatcgaagcgagcaaagtgctgctg

SEQ ID NO: 180152 - DNA, 1390 bp, Homo Sapiens
tttaccccctaactgcatcactttttccttaagctttttaattcctatgaggccctttccacttcccctatccccttaggcccacccccaagaatgtgcaagaccccagccacagggcccatcagggcactagcggccgcagctcagagccgtggcctctccgaagtggcagatggggcgggcgcggccagagcaagtgccaggcgggaacagagggactgggcgcgcctcacaactcaccacctcgcccgctggtccttcctggctcgcctggctctgaagctgcacctggaggggaaacctcagaacagtaggcgggattgcctagtaaatatctcccattcagggaggcccaggtcgtgtgacgtcgacagttgctgggtagatgaggccaacacaggttgcaagaagaggcggggtttagaggcgtgaaactccgcagtgctcagccaagcagggagcaacgctaggaagggcgggcagaaagggcacgctcttgggtgggtgactacaggttaggagaccgttgaacctggaggggccctaggatggaccccgtggaaagattcagagactgcgccctctccctggcgccgccttcccctacacgcggcgggtatattctgttgcagttggcccaggacctgtttccaagactctgccccctcgcacttccgtccctcctggttttgtaaagtgatgctcataggaacccccaccccgcgtgacactactcccagctcctggctgacttctagtcttctggttgaagctgcgcctttagatgacacgaccctacccacccctgtttccagcggatgcccgggcctggaggtacctcttactgtaacccatcgccaagtgggcttttgaaggcgcctgttcctttctcgctttcttcggaagacccttgacccatcattcccccgacccccataacgggagagcagagaagccggtccccagtgtgatggtcctggtccaggcactaactgtccttttctcggaaaaggcagggggatgtggaaaagagtcttgttccctccccttcgatctgtggctttcgctttcacttcctcctccgagagcggacagatctctgggtgctgggcggtcatggcgctactagatgtatgcggagccccccgagggcagcggccggaatcggctctcccggttgcgggaagcgggcgtcgctcggacccaggacactacagtttctctatgcgatctccagagctcgctttaccccggggaatgcaggtcggggcagtagggaagcccctatggatgcagggaggcgggcgctgaggagtggagggtcgcctgagagagaggcgagagcgggagcgcggggtacaggtcgggggtagccttcagtcccggagag

SEQ ID NO: 180153 - DNA, 1163 bp, Homo Sapiens
gggagagaagggatgaccccatagatcccccagtgtgtcctaaatcaatatccacttccactttgttgcagagttggctcctgtggaaaggagagcccagctccccagattctgcttgctggagcgtatacactcactaatgtaggacccagctgaggcccgagaatccactgctgcaatcactccatgctggaacttgaaggcgagcgtggtggtgccatgggccatctcaatctgaacgttcctttttccgtccccacccagggactggaagaattctgtgggctgataagagaaaagaggttgagaaaggcaatgaaaaattctgtagtaagaggctccaggaaaaggttttagggagtatgagggtgaggagatatgcagaaatgatctaaccatcaataaatgaaacagttaataaccaatctctagaaggaaatggcttgggagaaggaaaagaagaggcatgccagtatcaaccttttccattttccagcacaacagaaatgaaagcaagcacatgttaccattactaaaaaattttgagagtgacttaaagggtttcttccatgcataaagcattcaaccctcacaaaacacgtttagtaacagtatcctcactttacagaagaggggcttgggacctagactaagtgacttgttctaagtcgcgcaacagtgagttgctgagaggaggccagcaggcaaatttcataggtttcccaagacaccacacacctcctatatcatgtgataaccccatgaaaaaggctccaccatttgtgtgtggacaagggcaggaaagttctcttgtcttcctttgggagcccccacctcacctgtaactctttgtcctaacttgcacttcctcctctcaggccccatccccatgtggcctcttctttgggtctggcgctctccgggactgaaggctacccccgaccctgtcccccgcgctcccgctctcgcctcctcctctcaggcgaccctccactcctcagcgcccgcctccctgcatccctaggggcttccctactgccccgacctgcattccccggggtaaggcgagctctggagatcgcatagagaaactgtagtgtcctgggtccgagcgacgcccgcttcccgcaaccgggagagccgccaacttttttgtacaaagt

SEQ ID NO: 180154 - DNA, 1462 bp, Homo Sapiens
  misc_feature (1266)..(1274): n is a, c, g, or t
gccaactttgtacaaaaaagttggctataggctttgtgttatgtgatggcactatttcaattggctttctaattggacaattgatactatgctatctacagaattggcctttggagacctaagtgagccacagtggcctcagggtgaccatatactaggattcatagcagtggccacagtcagaaagcctaagctttcctccattgccattgctcgtttatacccacgttttctgtcaaagtcatattcattcaacaaagtcatactgagaaggtgtcatgtgaggctggatgtgggctccaaagtcatagctgtgacattcgcaggcagcggggatgttctcagtcccacatttggcagagaagtcagtcaagaggttctacaagggctggtgtccaccttatactcctagaaacacaaaactgcccccacccccgctttcttggagcaggaagttacacccacacgcatgcacaggcgcacactcagcgggcctaggcacgcgtggctcttgtgttgccttagctgaaatttctgttgtgctttctcagcatagcagagtcacgctggcaaaccatcatgcgccctggccaccgacctgacaccagacccaggagcattcacttctctgtcttctgtttctctcccacagtgtcgcccttccaaaggcaggaagcggggcttctgctggtgtgtggataagtatgggcagcctctcccaggctacaccaccaaggggaaggaggacgtgcactgctacagcatgcagagcaagtagacgcctgccgcaagggtgagtactcaggaggggcagcctggggctccagggcctcactgtccttggaccagcctcaggggctgggcgtggccactggcccttccccaggcttacagacccaggagctgcagctcagggccagaaagagcaaagcaaataggacagagccctcagaagggtgcagggagagggagaccccatcaacccaaccaaacaagtgtggggaaggaggccggccagtgcacctcagggacactctgctttatctcagatacctcacagcacctaagctatcattcatccacacacaaagtgaagattttcaaagttaggctttacccgtgaggtctggaggtccatttatcttcacagagaaaccgttttaatccgcaagaacctgctaaagatacatgtttctaaattaaagatgtgaatgtgagacagctgaaatagctcagttgggagagcatcagtttgaagatgcagcnnnnnnnnnctgtaaaatatataatgaatattctgttagtctgtggctaatataattttaataaagttaatttaaatctgatagaaaaatgaaattttaaacgataattttagagaatgctattatatccagtcttcttttttcttttaataaatgagggaactattggggggaaaggaataaatacattttctttc

SEQ ID NO: 180155 - DNA, 1697 bp, Homo Sapiens
  misc_feature (376)..(389): n is a, c, g, or t
  misc_feature (659)..(694): n is a, c, g, or t
ttgggtttgatgatagtgaattgataaaacccgaagcttttccctgtaaatcttacatctttgcctttaaagaatgggttacaaccatcactagatcacagtagtgcctaatgaaggttgagaaccgtaggagaggctctcatgctgtaaataatgttgcaggctaataacctttcatcacttcctttgtgcgcttcctgccttaagtgacaagtagcaacatggcttgggtcccctgtgcagcatcagcttatgctgccacaagtcagtttgcaccctaggtgcccaggagctagtatccttagatctttctatcgctaacttaattctcttcgttatttatctgaccctctaactccatgtctaacttgcattnnnnnnnnnnnnnnttctttacagtcaacccaagcttaacatggactcaggttccccagcagccttaatttgttttgttaacatctgttccttctttttcagctctcctagagtatttctgagtgttgtgttcatctaatcttagtattcttttaattacaaattgacctcacagcttgaggtttcttgtgtcttattctgtggactacctgtgctcctttgcttcccctcccctcgcataataactatattaagaaattttttttggccttgagttggctggnnnnnnnnnnnnnnnnnnnnnnnnnnnnnnnnnnnngatttgcaaaatgtaagtgtagatcatttgaacaagcaaaattaaagtacccactgggggaaatgtgtctgaatcttactcttctggatctgcaggattagggcttggaagtatgtcaaagatgcagggagtgtcaaagtttaggaagattgtagagctgagagcaagaagcagaaatgagtgagtcaaagaagggagtcctaatatatcaccagatctaggaggggagaggagacagacagaagaaaacaccagaggcaagaactgtagaaggccaggtttctgagaatgaattgagcggggtgtcctgagcagtttggaaaaggagtttttgatggtatggtgtaggtgagggctggctgcataggaaggactgaggttggaacggacatcgggaaagctgaggggcagtgaggtttactacatgggaaaaggactcttgaaacgagaatcagtgttgatgtcggggtgaactttgtgggtacattacttggtgttaacattgttggcagtggtagccccttttcagaaagcaacttgctgtaagtcagggtgtccgttccaaccttcagctagtgaaaaggtagtaacaaatggtaaacaagagaatgattgtttaaacctatctgtggacacttaatgcaactgtttaaaaatgataatcacgagttatgtagcaacgtggaaatatatttacagaacattaagtggagaaagcaggacacgaaagtatatttatactacagttataactcaacagttcatttatatgctgttcatttaacagttcatttaaacagttcattataactgtttaaaaatatatatgcttatagtcaaaagctgttgtggtgttgttgttgtaggcttatagttgagcattattttcttaaatttcttgaatgttctttatggtagtgttactaaaaagtttatgatcacattttcattgtgaacataatttgaactcattatcacacacttggaaatacagaaaagtgga

SEQ ID NO: 180156 - DNA, 897 bp, Homo Sapiens
ttggttcaaactgtagagctctggacttctcacttctagggcagagggagcctgaacaagtgaggctctgggttccccattcctaattaaaccaatggaaagaaggggtctaataacaaactacagcaacacatttttcatttcagcttcactgctgtatctcccagtgtaaccctagcatccagaagtggcacaaaacccctctgctggctcatgtgtgcaactgagactgtcagagcatggctagctcaggggtccagctctgcagggtgagggctagagaggaagcagggagtatctgcacacaggatgcccgcgctcaggtggttgccgaagtcagtgcccgggccccacacagtctccaaaggtccggcctccccagcgcggggctcctcgtttgaggggaggtgacttccctcccagcaggctcttggacacagtaagcttccccagccctgcctgagcagcctttcctccttgccctgttccccacctcccggctccagtccagggagctcccagggaagtggtcgacccctccggtggctgggccactctgctagagtccatccgccaagctgggggcatcggcaaggccaagctgcgcagcatgaaggagcgaaagctggagaagcagcagcagaaggagcaggagcaaggtgagcgggccctggagcctgcggttggagggccttgggcaagatcgcctcctcccctccagccctgagtccaccgggtgctttctgcccaccccctgctcctgccagctggcccctgcttcccctagggcacatgctggaagccctgggccgccaccagaggtcctcagccctcctgcctgggctatggctcctttcctggtttgggagccatagtggagctttcctctctaagctc

SEQ ID NO: 180157 - DNA, 2803 bp, Homo Sapiens
ctttgtacaaaaaagttggttcatcttggtgattgcagtctaccctctggcttttaaaaattgtctgagccttgattcgatcatgaaaccagcttacccttcccctgtgtgctggccccagttttctaaccaggtgttgaatgaactggatggactctgccagatccctccgtgcaaggctggaatcagtccattgttcaactgtgccctttggggctgtggttcatttggctctgatttttcctatatgttctctcctccaacccccatagctccatcttgtctacaagattttgttagaagccgtcaaaatcctgctgattcgagatgcgctgtggtgcatgttttccccgggcacagcaggctaataatcctgttacaaagagaaatgctgtacatttcgagcagtgctggcccctgggactcaccgtggccttttctaagtgcttacagactctctgtttaataatccattccagaaattttccagggctcattgttgagcttggtgttcgcaactttgagtgatcagcccttctcctttgtgggagcaccaggacagagcagcctttgtccctccccagtctcagttccctcccactgcccctgtggacctcgaatgcagagcttatgcacctaccgaaggtcgtgtcagcacccaaggcagaacgaggctgccctgggaactagggtcaattaagacagcttgtgctggaggaccctttacagcagatgaaggcctctccccagccagaaaagatggagcacacgctgggtggtggccccgcttcctcactggaaggagatggtgctcttcttttttctttctgaattgtggccaccttcataccagtctgtcatggaacacttaagccgcttgagtgcctgctggtactcccagccctgccatgcctgagccccctgcacacaaaggagccaggagtaatcagggcagaccctttagggcacggggacttctggattgtgaaattggctctctgggggccaaggccttctaacgttggtggaagtggctttggcttattgggtcggattctaggccattcattccaacctttagagacatcccagctttccctagcccagagtctgcagcccctccaccatcccacatcctccccctccctttcctcatgaaccccagtcgcgcctctgccttctcaaacccctccaccatcccacaccctcctcctgcccttcctcatgaaccccagtcgcgcctctgccttctcatccctgcgcaccacacaggctcgctcatgcccggtgagtgctgaggctgctgtgcatgtggagtgtggccctgtgggcaagggctgggctcttggaggtaggggagctacaggggcgactgggaggaggatgtcgtgttacacacgcatcagagttaactttgcagtgagagcggccttgctgcggccaaagaacatggaaaagcatgagtggggtgatgtgccttaaagcatcagacacttgggcctcgggcatcaggagccagccacagggatgtctggggaaatggcgttccatgagacgcaagcacacaagaatgcacttggcacatctggggaacagcaggcagccgatatcactgggcccaccccgcaccagggaggatggaagcaggtgaggagctagaccacactgaggcggtggttgggactcagggtttgctcagtgagccgttcactatgtgcaggggcagttccccgtctgaatttaggtgacgacactcaggtccagccttgccagtctcagcctccggtctccgttccccctctgcagaggccactttgtctgctgcacgtgatcatgaggggttgtgaagtgcttgccccatcagtagccatgtgtgcatgtgtaaataccatcctctgtgtgccctggaggctgtccttcagatagcatgtacaggtggcagcatagggcctgtccctactgagagtgcagggaactcagcaccgtcaactcctcgaccctgcaggtcagattatccttgtagaggccccctggatggcaccaagatcggccctggcaagcaggtgaccctgacttcagagcccttgcctgagggcctggcctggcagctctgctgttagaagcaggaggtgtgcagggggtggggagcagcccagcctctgtgatcttctccatggcaggatctcccagcaggtagagcagagccggagccaggtgcaggccattggagagaaggtctccttggcccaggccaagattgagaagatcaagggcagcaagaaggccatcaaggtgttctccagtgccaagtaccctgctccagagcgcctgcaggaatatggctccatcttcacgggcgcccaggaccctggcctgcagagacgcccccgccacaggatccagagcaagcaccgccccctggacgagcgggccctgcaggagaagctgaaggactttcctgtgtgcgtgagcaccaagccggagcccgaggacgatgcagaagagggacttgggggtcttcccagcaacatcagctctgtcagctccttgctgctcttcaacaccacctagaacctgtatggccagaaggcagggccgaggggtgtgggcgggaggcccggcctggcttagtggggacccagggcatcagacacaggtacagcacatgggccaggagccagggggtgactggggtggctcggctcgggaggcttgggaccccaagtgcacgctgtgcccctgatgatgtgggagaggaacatgggctcagacagcgggtgtcagcttgcctgacccccatgtc

SEQ ID NO: 180158 - DNA, 1297 bp, Homo Sapiens
ttttctggctggagagaggccttcatctgctgtaaagagtcctccagcacaagctgtcttaattgaccctagttcccagggcagcctcgttctgccttgggtgctgacacgaccttcggtaggtgcataagctctgcattcgaggtccacaggggcagtgggagggaactgagactggggagggacaaaggctgctctgtcctggtgctcccacaaaggagaagggctgatcactcaaagttgcgaacaccaagctcaacaatgagccctggaaaatttctggaatggattattaaacagagagtctgtaagcacttagaaaaggccgcggtgagtcccaggggccagcactgctcgaaatgtacagcatttctctttgtaacgggattattagcctgctgtgcccggggaaaacatgcagcacagtgcatctcgagtcagcaggattttgacggcttctaacaaaatcttgtagacaagatggagctatgggggttggaggagagaacatataggaaaaatcagagccaaatgaaccacagccccaaagggcacagttgaacaatggactgattccagccttgcacggagggatctggcagagtccatccagttcattcaacacctggttagaaaactggggccagcacacaggggaagggtaagctggtttcatgatcgaatcaaggctcagacaatttttaaaggccagagggtagactgcaatcaccaagatgaaatttacaaggaacaaatgtgaagcccaacatttaggttttaaaaatcaagcgtataaatacagaaggtggagggaacttgctttagacacagttcaggtgaagaaagacctggaaacttctgttaactataagctcagtaggggctaaaagcatgttaatcggcataaaaaggcaatgagatcttagggcacacagctccccgcccctcttctgcccttcatccttctttcaatcagcagggaccgtgcactctcttggagccaccacagaaaacagaggtgcatccagcaccacagaaaacagagccaccacagaaaacagagggtgactgtcatcccctccagtctctgcacactcccagctgcagcagagcaggaggagagagcacagcctgcaatgctaatttgccaggagctcacctgcctgcgtcactgggcacagacgccagtgaggccagaggccgggctgtgctggggcctgagctgggtggtggggagagagtctctcccctgcccctgtctcttccgtgcaggaggagcatgtttaaggggacccaa

SEQ ID NO: 180159 - DNA, 1046 bp, Homo Sapiens
ttggcatttagatgccctgactctggaatgccagagtagtgcctccttaaatcaaatctaatatatgaaatctctttaaatgctctttgaagataaagtatttgatggattacaggcgtgagccaccgcgcccggccgaagactgttttcatctaataacaccaaggtgttacttgctttagtatgaacatttgcactgatggagcaatagtgggtagaactgcgggcacctcagtaggagtcaaggcagcagcctaaataatagctgttaaattcttccctgctctgcactcccagtagcgtgcataccagtttcacttaagagtgtcctggatgcagcagtaaagataattaaatatcactcctcgggcacacgtctctttgatattctgggtgacagaaagggggtgcacatgtctgcattcttgagttaggtggttatctccatgcactggtgcagttgtttcagttgagaggcagctacctgtcttctcaaacatgatgaagtgagcctgtcacttcagggaaaacaattgaaaattcaaggtttaaagcaaaaattaaaatttagaaaacttgtatccactgccgtaacctgccagcttcccagtactttaagacttttctggggaactcaatagtaatgttatgtgcatgtgaattaatgggtgtgacatttttgatgtgtaattacatggctcaacgtttggaagatctgcaaaagtcggtgaaccacagttttccaaatgatacgaaatcatgtacgggtaaaagatttgttcaaagtacaagataaaccaagtaagagtatgaaaagttcattgataaggtttcagacttttacactgccatctaaccttgaggaagctaccatttgtcaagttttagcatagtatctaaaaagagcatccaccattatctgcacaggctgttaaaatctttcctcccttttctaactgtgtgcctgtgtggccagattttctttcatgcccgtcaatcaaaatgccgtattgcacaggatggaatgatgaaaccaatacaataat

SEQ ID NO: 180160 - DNA, 1640 bp, Homo Sapiens
  misc_feature (517)..(525): n is a, c, g, or t
  misc_feature (1352)..(1360): n is a, c, g, or t
ttcactttattcagttttgtcctctcaacttagaaggcaacaaatgaccacattaaaaagggagcatttcagaatatatatacataaaattggtctgggtacccctaaggtgtttgcattgatagaaaattgacaccccaaactaagtgttctacttagcttctacaatagttattcctagaccttagattagtcattacatttttatttaaggtactatgttactttcatgactacaaaatgaggcactcgtacaaaacaggaatgaaaacatacatatactgtcttgtctttatgtcgtattaatgccaaagatattgtcagggattattttaaagaagcccttactcatgatggctatttttaaaaatggcacaggacagtaacaggctgaaaagaaaacacctggttgaggggacaaattaagtaaatacaagacagcttaaccaaggaagtcagcgaatctccacaaatgaggcttttaataatactttactggtaagacattttagttggnnnnnnnnngatggctgaataacatcctaaagaagtattttaaatataatcttttaattttacaatgtagaaaacttctcacagtaagtagagagcttagagtactcaaccctgaaaatgaaaataagtagctagcttggaaagttttaaaaagcgccagtgttcttatggcactacattctcctgcacgtgtgcgtgtgttcacgcacattcgcaaacgcaatacaatgtagaactgtccagtgtttgttttgttttaaaaagtcatcaattcaacctaaattcaagaattacactttaatagtggcattttgccaatacagaaatgacgtatcttggatcaaatcattttaaggaaagttattctatattacttgaataagggaaagaaaatacacaagacaagaatccacaataatagcagttacattaaatgttgaaataaaaattactttttgtttacatctggaattgagatggcccatcttcattgtttctccagagtactaagagggggaaaaaagtcacctaaaaacatgggaagttttttaaggctagctatacacaaacgtcacattggcatttttcttcagttttcatctcaactattagtactaaatagtttaaaaatcaaacataatttactaataatgaacaactgcacacttcatactatgaccgtttgataactggtcatgtaaaactatcaccaaatgctgatttgtcttctatatataaatagtaaaaataaaacaaaaaggtcttctttcctagttaaccttcttgaaggttgttttaacccaatataaaattaagcaaaataatagtataatttnnnnnnnnntttatgtgaagaagggcagcaatactaacattttctgaactatgggttttcaatatttaaaaggctcttggttaaatactaaaacccggatgctacccaagcaaatattatgctggaaaatgctttccctatgaaaatacttatctcattgaaaacaacacgataaagtacaattgaaaaactaggggagaattcttaagtaagacaatataaattacctgccagtaaaatggagggcaattttttggccattcatattgtttgtttacaaaacatccaa

SEQ ID NO: 180161 - DNA, 738 bp, Homo Sapiens
  misc_feature (327)..(335): n is a, c, g, or t
aagagggggaaaaaagtcactaaaaacatgggaagttttttaaggctagctatacacaaacgtcacattggcatttttcttcagttttcatctcaactattagtactaaatagtttaaaaatcaaacataatttactaataatgaacaactgcacacttcatactatgaccgtttgataactggtcatgtaaaactatcaccaaatgctgatttgtcttctatatataaatagtaaaaataaaacaaaaaggtcttctttcctagttaaccttcttgaaggttgttttaacccaatataaaattaagcaaaataatagtataatttnnnnnnnnntttatgtgaagaagggcagcaatactaacattttctgaactatgggttttcaatatttaaaaggctcttggttaaatactaaaacccggatgctacccaagcaaatattatgctggaaaatgctttccctatgaaaatacttatctcattgaaaacaacacgataaagtacaattgaaaaactaggggagaattcttaagtaagacaatataaattacctgccagtaaaatggagggcaattttttggccattcatattgtttgtttacaaaacattgataagattcatttaaaattctgtaggattaagaatttttaaccttttgaagtatctgcctaggatctcttgctgttaaaacagatatgttccaatgactttataccaagatccacaaattatgag

SEQ ID NO: 180162 - DNA, 943 bp, Homo Sapiens
ttggctctcactagctgttagaagaatgcttggcatatggtaggtatctgttgagtctaagaacacaaaccacattccccagtctcctagtggtgatataacactaaagatcagtagtgggaaataggttggcacaatctggagaaattaagagaagcaagatttggagagaatcttggagaaagttacagacacacacaatggcttagaacagaaagtacacaatacatacgaaaacaggtcaagtctcaccaaggtcgtgaccttatagcagccttaaaaatgcaaaataccctccagtttgaatgaatgctcccctttcctcagacctaaagccccattcccttattcacaagcatcacaaatttaaatatcacatacaccttacaaaatgagctgatgtttctgcaagacaaacttctatttccataaatgtgggttactttgagaaactcagtttcatgtaggtatgttagtttgaggatttttctgtgtcatttcaactactgaagtctcctaaagacttcaactattaaagttaagcagttgtgccatttttcatagttcccttgctatttttttgttaagtggagtcattgttcctctggtactaatttcgcatcacacaatttgttgctctagaaatagcaaaacgagaaatagattactgtgattataaatatgaagcagtaggtggaaactgaagctgtttctggcatttctcaccaaaacggccatggcctccaggtctgtctctctgtaagagggcagcacccctgaagacacagtgccacgtcaaggatgtgtgtgagctcctctgcctgcacaggctttgcgaaaggtttccgtttcagaaatacaatgccctgattttagtgtgggcatttcccatgttagttaagtgatactaaatctttaataattatagctggaaaatgttttt

SEQ ID NO: 180163 - DNA, 1629 bp, Homo Sapiens
  misc_feature (867)..(875): n is a, c, g, or t
ttgggtgcctgtgtaattatcttaggagaaattctttgtgggtaagtggggacatttttacgataatgtaatttcttgaatagccagctcttcaaaagctatttgtaaaaaatatttaaaagtttcttagttatacaaagttaggaaccactgttctaggaactggaattgtgttatttttattcctctggaggaaaaatgagatcttcgtaatgatctctttaaattgactatttagaaaagttaggagttcagagaagctttcttcaattgtgaaaacaatacaaaatagctagctgattggaatgcagaaaaatgcagattaatcaggataccattaaacatctctgtttttccttcctttcttgtagtttatttatgtgaatcagtcctttgctccttccccagaccaagaagttggaactctctatgagtgttttggcagtgatggtaaactggttttacattactgcaagtctcaggcgtggggatgaaccacaaagaaaatcaacttgctactacatgaaatggattttcacggaagagacagctctgaaaagttttgatgcttgtggcaagagacttaacagatgtgatctatttagtatgtgtctactctatgtttatgcataagaaaacatccatagcatgaatggactcagaaaaatgtgatttgtattaatgcaccagtcatcataaaagatggtcatgatagtacacccattgctcctacttgttactattattgctgcagatctgcctccaaggttgaaaaggagactaagactgtataaacatcttcattgtcagttctcaaaatgactgaaattgttttcatggtaaaagttaatatactaaagggttccnnnnnnnnnaatgtttacatttatctctatgtttacctttttagtcacattgacctgctggctgaatacctcaaatagtccagtagagggcagtccaccaggcagaaaaggttaggcgttttggtttcacatctttgctgggattataggtgtgagccaccgtgccgggcctggactttgtactttttcaaatcatatttaattatttcttgatctttactcaaagaattattctgcgctaaatttgcaacattaaacaataattaagcctggatccgataagttattgggtgactagaacctacaacacaatttatttttaatttaaactctcaagtctgattaaacttgggggaaaaactgaacattcaggtgatattttaaattttctttgtgactaaatagatgtcattaatatcatgcttcatcttactgtgcatagatgacccatggcacacaaagtatatgtataatattgcaatattgtacttccatctttaaaagtatgccaaagacttcataatgaattcaccatatttaaggaataaggcaaattaatgtttatccgaaatcaaaatgagattggataattcctggaatctgatttctgtaagtttcagtcctaaagggaccttaaatatctactagaacgaagtacagtgtatttctcagattacatgacattagtcaaccaatttagttgtaaacacaaagtgagaaagccttaggtgttgaaggagtgtgaaaataaaaatctcttttc

SEQ ID NO: 180164 - DNA, 1471 bp, Homo Sapiens
  misc_feature (235)..(299): n is a, c, g, or t
  misc_feature (352)..(440): n is a, c, g, or t
  misc_feature (1148)..(1208): n is a, c, g, or t
ttggctgaattcttttcattattttaaggaagtacattttctcacaattctgtgaatttctgttccttcaggctggaatattcttccacacattatttccctaactgcctcctgtactgtcttaaatacctcctcttatgaggggctgtgcttaacccctaagttctcctgctgtctgctgcctcagtaatcttgctttatagcaggatatgttaacagcagtttaactagtggnnnnnnnnnnnnnnnnnnnnnnnnnnnnnnnnnnnnnnnnnnnnnnnnnnnnnnnnnnnnnnnnntgtaaactgtgtgtctttgggcacctcagatctgccaagtcgggttaatgctnnnnnnnnnnnnnnnnnnnnnnnnnnnnnnnnnnnnnnnnnnnnnnnnnnnnnnnnnnnnnnnnnnnnnnnnnnnnnnnnnnnnnnnnnagatcaacacacattaagcatttaataaatcttgatccttaatctgggataggtattcaaaatatgtttactggaaagataaatggacagatgaatagaaagtatacttggctcatattctttttcttcccaaaactacatcatgctgccttagtcatgactaacagatcatttaaaactaaaaataagtgttgttcattccctctttctgaaaactctgtccaagtatttgatcatcctctggaaaaataagcagttaaatcaacactcagtcatccatggtctgaattaaccacctgtagaatttttgtaccaagtttttaattacagtttgactatgatataccctagtaccctggctatttctgggtcagctacttcaaccctatactcaggaaaagccagataatttaaatgttaagctcagagaaaggcagacttactacaaccacagtggacattcaagtagtacatcatgaagccaaatggaaattatttttagattagaagtactattgtcctttccatgattatatgtaattaaagattgactacatttgagatgaaaaactgttaggatgccagaccttttctacttggccatatgcagcaggaaaagacaagtttatttatttatttattttaaatacctcatctgtgtgggatgttgatagtgggggaggtgtgtgtatgtggcagcatacatgnnnnnnnnnnnnnnnnnnnnnnnnnnnnnnnnnnnnnnnnnnnnnnnnnnnnnnnnnnnnngactattttaaaaaagaccttgttcttaagtagaaaacagagaattcggttacatttgatttgtattttagactcaattttgtattacatctagtctaaaaatattcagcgaaaattgaaaaactggcttttattgttagagagctattaccaactatgatatctgaaccttgggtttgcttttccagagtggggaagcaaatcagcttttatgaagatggattttagctctttgaaacaagatgcttagaatagatgacttt

SEQ ID NO: 180165 - DNA, 1848 bp, Homo Sapiens
  misc_feature (1653)..(1662): n is a, c, g, or t
ttgggaaagaaccccccttaatttttcagtgaatttgacacctattttttagtgatgaaatttttctttgagaactggcaaggatgcagtcagctgtttgcagtttttagcctgattttggggtctatagagattgctttattggatacttcaagtcattcttgcttgcacttcccctattgacacatgaaagctgtgttggtgttttattgtacatacttcagatgcacataggaatagaagtgtgttataaatctagctttctttatgatgtttctgataatacgagaattgaaaactttaccttctcttgtacatagtcagactatttgtattaaatttacatttcattctaagttcaaaagtttgaaaattattagttttgcaagatcacacactaatgtaaccattttatgaaggttgaagtggatttatgcaggcagttctatatatagaaatacaattctttttaaatttttaggaccaatacaaaataacaaaaatgtaatggaatcagactgaattaaagtaaggctgtatattgaaagtcatattataaaaggtttgctttctttaagtgttatttatcttaaattataatcgttaaatgtttggaagataatttttgaatcataacgtcagcataacttcatttgacttctcaataatcttgatactagaagcaataaaagaaccattattaaatatattgtaatgttaaagatgtgaaggttcttccaaaaatttgtaaggctttcctaattaacagtaaactcttatagctgatattattacatactaaacacaagttgctgttttttccccatatgtttgcttacgcatgtctttatacaatcacctctttttattgctgtagtttattttctaaagatgccaaaggaaacaagatttttctttatttattttaaatacctgaaacctcgtactttatattttgaagtaaggtgggattgtgtgaaaatgtggatggtttttctccagtgttggttagaactactttttttaagtggagggcaacttggtagtattagtagaatttgggtttaaaaatatcagacacatctacccagtttattttttgcctgtattatcagggtatatttaattgtcctgtggttaaacaaaggtgagagagctcagaggtttctaaaggtcaagcattttactatatacatacatacatgctcttggaggcagctatatcctgctttgatttttatgcacatgagccctatagggttatatactcatctaactacacttcagcatccccagtgcccaagaaattggaaagtacaatatttggtttgagacattcttcataaaagattctttattataaaaatttacctcatttacatttaatgtgatgatcttttttttcctttctggtatatttcccactgtactgtttggtttttgttattctcttgtctgtgggtagatttagttacccaaacatagaaactaaagcaattgcttttttcctctggtcttaaatatgtttggacaaaaagacactaaaaggtcaggcctaggggaaaagtaccctggtggaaattatttttgtaattcttaatatttttgagttggctccgtttgtcagttttaaaagcctcaaaaattatgttnnnnnnnnnntccagtgaaatcccatttagggcaggccgatttgttagaagtcactgatgctccagtaggcttttgttataatcaacctgtttcctgagtatgtgcctcttttaaaagaagaaataattagctgtatagtatttcagtactgatgaatgaatgaatgaatgattggcagttagtggacccaaataa

SEQ ID NO: 180166 - DNA, 1254 bp, Homo Sapiens
  misc_feature (290)..(307): n is a, c, g, or t
  misc_feature (877)..(909): n is a, c, g, or t
ctataaaagacaactttgtacaaaaaagttggtcctgatggaactaaggactccaatgtcgaactcttctttgctgcattcctttttcttcacttacaagaaaggcctgaatggaggacttttctgtaaccaggaacattttttaggggtcaaagtgctaataattaactcaaccaggtctactttttaatggctttcataacactaactcataaggttaccgatcaatgcatttcatacggatatagacctagggctctggagggtgggggattgttaaaacacatgcnnnnnnnnnnnnnnnnnngaaattttgtatatataaccattttaatcttttataaagttttgaatgttcatgtatgaatgctgcagctgtgaagcatacataaataaatgaagtaagccatactgatttaatttattggatgttattttccctaagacctgaaaatgaacatagtatgctagttatttttcagtgttagccttttactttcctcacacaatttggaatcatataatataggtactttgtccctgattaaataatgtgacggatagaatgcatcaagtgtttattatgaaaagagtggaaaagtatatagcttttagcaaaaggtgtttgcccattctaagaaatgagcgaatatatagaaatagtgtgggcatttcttcctgttaggtggagtgtatgtgttgacatttctccccatctcttcccactctgttttctccccattatttgaataaagtgactgctgaagatgactttgaatccttatccacttaatttaatgtttaaagaaaaacctgtaatggaaagtaagactccttccctaatttcagtttagagcaacttgaagaagagtagacnnnnnnnnnnnnnnnnnnnnnnnnnnnnnnnnngggcacaaagggattggcccaatattgattctttttttataaaacctcctttggcttagaaggaatgactctagctacaataatacacagtatgtttaagcaggttcccttggttgttgcattaaatgtaatccacctttaggtattttagagcacagaacaacactgtgttgatctagtaggtttctatttttccgttctctttacaatgcacataatactttcctgtattgatatcataacgtgtatagtgtaaaatgtgaatgacttttttttgtgaatgagaatctaaaatcttttgtaactttttatatctgcttttgtttcaccaaagaaacctaaaat

SEQ ID NO: 180167 - DNA, 1438 bp, Homo Sapiens
  misc_feature (929)..(940): n is a, c, g, or t
ttggctataatttgcattgtgggtgttttacagttggtcttcttagccctctttcattggagaagaaatcatgggtatgccccagcattttcctgtttctttgcttccttgtcacttggtgtgtggtgtgatcctggcaggatacagcaggagtttttcctgcatttcatgtggttccctgaatagccactaggtatcttggtgaattgcacaatctagcgaaaccactgaagtttcatcattcgtttctactgacttccagataatcggagtcaaccttctaaccttctagtctcacttcttccaaataatactgtacagactggggagaattattctacccactccctcatttcatgcttgtctgccttcctctcgaaggctcgtatgatgaaaattgcaaaaacccagctagtgcttctgcctgtttcctcattcaaaataggaagatggtcatacctaatgtcttgaggatcatggatagaatatgtggagaagacatagaaatggcctaattaaaggtcacagcatgactgcaacttttacaaatcattgaaaataagtttactttaggtgattgttgtttcttcattcttttcctcattttataactatccagcctctgcccattttgccacggtgcaatgttgtatgcattgactcttaggtttataaatacatcagaatgttctttgctgcctcgcttacatggaaaactcacaaaccacctatacaatccaaaagaggggaaacagctcatctcatattaattatggtccatttccatgataggatattatgcaaccattaaaaatcatattttatctgagtgttagtatatggattattttaattatttatacttttcagtgtaattcttctctgagcatactacttttggagttaggaacacaaatcagtaaatgcannnnnnnnnnnnaacaaaaactaaagcacctggttttttggagtatagtttccaggtgcgccacaggccttctgaaacgttttccttcggatttttctttccccaggtgagctgtcagggagaaatgtcgaaacaggtcaagagatgttctgctcaggtttccagacatgtgcccgggaggtgcttcagtatctggccaagcacgagaacactcgggacctgaagtcttcgcagcttgtcacccacctccaccgggtggtctcggagctgctgcagggtggtacctccaggaagccatcagacccagctcccaaagtgatggacttcaaggaaaaacccagctctccggccaaaggttcggaaggtcctgggaaaaactgcgtgccagtcatccagcggactttcgctcactcgagtggggagcagagcggcagcgacacggacacagacagtggctatggaggagaatcggagaaggcgacttgcgcagtgagcagccgtgcttcaaaa

SEQ ID NO: 180168 - DNA, 950 bp, Homo Sapiens
ttggcaccgccagtctgtgcgctgagtcggagccagaggccgcggggacaccgggccatgcacgcccccaactgaagctgcatctcaaagccgaagattccagcagcccaggggatttcaaagagctcagactcagaggaacatctgcggagagacccccgaagccctctccagggcagtcctcatccagacgctccgctagtgcagacaggagcgcgcagtggccccggctcgccgcgccatggagcggatccccagcgcgcaaccaccccccgcctgcctgcccaaagcaccgggactggagcacggagacctaccagggtaagttggcactccttggcccttcaagcctcaactgcagccccatgttatgcgccactctcaacttggagcagctccgggcgcaccgggaggttcttgcccggcagaacgcctgcagccgtgcgcaagcagtcacgacccttcctggtctctcttcctgcaggatgtaccctgcccacatgtaccaagtgtacaagtcaagacggggaataaagcggagcgaggacagcaaggtaagcaagtgcacccctagggaccctgcgctcagcccctcgcgcgcgctgagtttccaagaaaagttttctcgctttgaggttggcgaggggatgcagggtgtgggctcggtgcctcttctgagtgacttggaaaagaaagggcagacgatggttctgggtgctactctgctactctgctcctctgccggactgttgctgcggggctgggaggataggcttctcatctccttccccaagcgcccaccgcctccccgtgcgtcttgcagggagacctacaaattgccgcaccggctcatcgagaaaaagagacgtgaccgggattaacgagtgcatcgcccagctgaaggatcttctacccgaacatctcaaacttacagtaagtgagaagctggc

SEQ ID NO: 180169 - DNA, 1784 bp, Homo Sapiens
  misc_feature (428)..(439): n is a, c, g, or t
tttgtacaaaaaagttgggaaagtgaaccaccattttctaggagtggttctatatctgttaaaatcataagacatgattctagacaggatagtaagaaaagtactaccaaagatagtaaaaaacattcaggctctgattctagtggaaggagcagttctgagtctccaggaagtagcaaagaaaagaaggctaagaagcctaaacatagtcgatcgcgatccgtggagaaatctcaaaggtctggtaagaaggcaagccgcaaacacaagtctaagtcccgatcaagatcaacaacccctccccgtcgtaaacgctgaggaatgatgtggcaagaatgccatgatgttctttaaaaaaattccatgagttttaagggcttgtctcattatagaggcacattgtggctgtgtaggtgaaaccagaatcnnnnnnnnnnnnaatctgtaaataggtgtactttttccaatgctgctccaagttacttaataggatttctttgtattacgtttttttcaaaaaatatagtgcataataagactataaacatgccattctctttcagctgtaatgttcttaaaattattcttgaatgtactgtgatgtcaataaagctctttagttcatttttgttaaactcttgcaccttaattttatggttttaatctaaggaacgtacttttataaaaaggcagctggaattttgtataacaggttttaaaggtaccttctctcacctcccccaaagaaaatggtttttacttaatagtttgtcaaagtttgtaaattgtacccatggacttttgccagattccaactttaagggtatgaaagagggctagaaatagacctttacttttcatttggaagtatttgacaactttctaaacttttcttcctattttggggattttcaagtaatatattctctgtgtgtataacgtgtggttcactcctgtaaaatgaaattgctggaatcaatcaagccagtgcaccagtagagttatttgtaaggaacgattgtgtttgacagtaatagtcaagtctggaactatattctacagtcacccacttctgttttagaagcattttgaaacactttttggggttatagaaataagactcatgattcaatatatttatttatatttttaaagtataatatgacctcaaatcaatggaggaatgctgtattatgcaggtttgtgtcaatttcctgacattaaaattgtctgattttgtccgtttcttaaaattatgattagtgagtggtctaacagtttaaggcattgataacttacaagtagaatggggctctcaaagcattttaactcagttgctttagggtccatttttttatgtaatcacttactcagtgataaatgaatctctgaaaacaaatgcttttacattttaatttaaaaagaaaacaggtgcaggccacagaaaagttttaaagtatgccttcttaccagcaatagttcattttaaaaatcatgccagatttttgccaagatcagtgtttcctcaacatgaagatagaaatagatttgtatagtgtgctcttgtacctctacatagattattatataattttgagcagttacacatttatctaaaggaaataaatcaactgtgaataaatgcatgtttaccaaaatggctgtttacagtgcatttagttctgatatttataaagatgacatttcacagaataactttaaaatagtttgaaattctatatagtttagacatcgatcacatctggagacaaaataaaatgtgc

SEQ ID NO: 180170 - DNA, 1291 bp, Homo Sapiens
  misc_feature (316)..(388): n is a, c, g, or t
  misc_feature (405)..(523): n is a, c, g, or t
ttggttttagtagagctggggtttcaccatgttggtcaggtctcgaactcctgacttcaggtgacccacccagcttggactcccaaaagtattggaattacaggtgtgagccactgcgccctgcctattttcatattgaacttttaaataagttttctttatggtggtgggatgattattgtaatcatacttgggaacagaagtgatgaaaaaggtatgttacttgagatatgggaaacgctattttccatgtttagttatggggtattcaagtctaactagtggaaagtatggatacattttatttattttttgnnnnnnnnnnnnnnnnnnnnnnnnnnnnnnnnnnnnnnnnnnnnnnnnnnnnnnnnnnnnnnnnnnnnnnnnntgggttcaagcaatttnnnnnnnnnnnnnnnnnnnnnnnnnnnnnnnnnnnnnnnnnnnnnnnnnnnnnnnnnnnnnnnnnnnnnnnnnnnnnnnnnnnnnnnnnnnnnnnnnnnnnnnnnnnnnnnnnnnnnnngtgtaagccaccgggcctggccggatacatttttattatcaagtatatattttaggaatgattagtgttggtttagttgaatagattggtacaattagtagtaatttgaaatgatgcctatggtttcctaacattttgtcttagtgttgattaaagacataataatgtgaaataatatggtaatactaaggaatgagaaagtggccttacaggtgggcaatgtaaactttcctgtagaaggattgaaagtaaatagatgtaagactagaaagtgaaacaattctgtactgtaagagcaatgttggctgtgttaaataactcgttcccaaacatcagatccacctggggagcccaaatatttacctacatttttggagttcttaggggctgaaacttacgcttgtgattttgtagtaacctattctagagaggagccaaatttgtgatactcaagagcttgtatgatttctgcttggactgtattgttaatacatacatacatcttttggtctattggcaaatgacccttgcaagatgttgacattttgggtataaatcatggtgcttaataatctgttttcattttttatgtataaaattaaattctttttgttctctgcagaaatatgaacctcaaactgaatcctctaaaggccccatacaatgaagtagacattggtggaaacatttacacccagtcagcttgaagagtttcaaatggaccctaccactgagaaatcaagatggcagtctactatggggaattga

SEQ ID NO: 180171 - DNA, 814 bp, Homo Sapiens
  misc_feature (131)..(150): n is a, c, g, or t
  misc_feature (538)..(549): n is a, c, g, or t
ttgggtgttttgcatacaactttacaatttcatagttgaaagctgttacaaaatgaaagttttgtgtatggtaggatatcttcaaggtgggtggatgttttctgtttaaaagattaagatgccaacagcgnnnnnnnnnnnnnnnnnnnncatcaagcacccagtcagcttgaagagtttcaaatggaccctaccactgagaaatcaagatggcagtctactatggggaattgaggaaaaatggattaatacaagagtcctgtgataatatacaaccaagacagggttcttttaacatggattccatgcagtgaatgaagacataggtttcttacccaacacaaatggacagtggatttgactttctaaagactttttttgtggacattttgacatttggagaagaaagatggcacactaacccagataatagtttttatgcctggaattttttgcagtttgatttgtatgcgtatgacctcttgaaatgttaatttttaataaaatttgtaacacttaaaaatttctcagtttgggnnnnnnnnnnnnaagtggaagtttaattaaatgtttagttttattttagtaatactttggcctttgtagttgccgagtggtaaagtgtactgaatatgaataaagctggtaaattggaaatggtgtaatcgaaaacattttacttggtttatgaagatttacgtttttcacaaagttgtgctcttagatggtcatttggtttaaatactgttttgtttgtgctttcatgaaacacctttcaaaacaactcaatggggtaataatagaatctgatttt

SEQ ID NO: 180172 - DNA, 1373 bp, Homo Sapiens
  misc_feature (111)..(142): n is a, c, g, or t
  misc_feature (408)..(427): n is a, c, g, or t
  misc_feature (815)..(825): n is a, c, g, or t
aaatcccgttaagagcttttctataattagttttctttgaagaagcttggaaagttttctgcattgagatttagaatccacagtgtttctgtaatttagctttccaggaannnnnnnnnnnnnnnnnnnnnnnnnnnnnnnntgtacacagtataatgatgttagtgttaaatattaaaaatctgactcttcactgggacttttttatagatacaaatgtatctgtggtagtacaaggactttgttactttggcgtgcagtcttatcaaggagttgtgtgtgtgttttgcatacaactttacaatttcatagttgaaagctgttacaaaatgaaagttttgtgtatggtaggatattttcaaggtgggtggatgttttttgtttaaaagattaagatgccaacagcgnnnnnnnnnnnnnnnnnnnncatcaagcacccagtcagcttgaagagtttcaaatggaccctaccactgagaaatcaagatggcagtctactatggggaattgaggaaaaatggattaatacaagagtcctgtgataatatacaaccaagacagggttcttttaacatggattccatgcagtgaatgaagacataggtttcttacccaacacaaatggacagtggatttgactttctaaagactttttttgtggacattttgacatttggagaagaaagatggcacactaacccagataatagtttttatgcctggaattttttgcagtttgatttgtatgcgtatgacctcttgaaatgttaatttttaataaaatttgtaacacttaaaaatttctcagtttgggnnnnnnnnnnnaagtggaagtttaattaaatgtttagttttattttagtaatactttggcctttgtagttgccgagtggtaaagtgtactgaatatgaataaagctggtaaattggaaatggtgtaatcgaaaacattttacttggtttatgaagatttacgtttttcacaaagttgtgctcttagatggtcatttggtttaaatactgttttgtttgtgctttcatgaaacacctttcaaaacaactcaatgggtaataatagaatctgattttaatctgccacaagattttaatgaacttgaaacaaactgcttgttgctcgaaaattcaggatgagtgatacacatatacttctgaattattttgtgttgattgaaatggtttcttaagctttttaatactataaatacatcttgctatagaatattcatctgaatatttaaattaatgtctcctattgtcttactattagaggaagaagtgttggatttatgggttagggtccttggagtattcacaattttttaaatttgaaattatgtgtgtaatccatttta

SEQ ID NO: 180173 - DNA, 1434 bp, Homo Sapiens
  misc_feature (595)..(642): n is a, c, g, or t
cagggggaaatctaggagagtatgatgtcacagaagccaaggcttgtatattacaaggaggaaacaacaaaagattatctactcaactaagctacccagtcctcagtaacccagtgacagcagtttcagggcagtggtagtagcaaaggtccaactgccttggttagaggagtcaagggaatataaagaagtgtaggcatttcaacaaataatgctgggatacctggacagccaaatgcaaaagaatgatgtttgacagtgactttacatcatatacaaaagttaagtcaaagatcttaatggctcaaagaccttatgtaatagcaaaaactataaaattcttagaagaaaacataggagtaaatcttcatgaccttggatttggcagtggattcttagatgcaacaccaaaagcatgagcaaccaaagaaaaatgtagatacatttgacttcataaaaatttaaaactttgtgtattaaaagacactaccaaggaagtgaagacaacccacctgggagaaaatatctgcaaagcatatatccgataagggactagtataaggaatacaaaaagaactcctacaactcaacaacnnnnnnnnnnnnnnnnnnnnnnnnnnnnnnnnnnnnnnnnnnnnnnnngtctgcatagacatttctcccaggaagatctacaaatagccaataagcatatgaaaaggtacaacatcattagtcatcaggaaaatgcatgtgttcatgtactggaagacttaatagtgggaagatgtcaatactacccaaagcactctacagattcaatgcagtatctatcagactcctaatggcacaaccagaaatagaaaaatccatctaaaatgcatatggaatcataattgactcaacagccaaaataatcttgaaaaagaaaaagttggaggtctcacacttctgaatttcaaaaactacaaaactatggtaatcaaaaaaccgtgagcctggcactcaactcctgcacaacaaaggaccaaaaaagcaagtagttaaccacatgtcaggtagagcaccaaagacagaacactattcaacagggaactgaggcacaaagggagcagtaaataaagcagccagcatgtcttggactggctcagaagcaggaggggaatcccatttctgggaaaagaaaagtcaaagaactgcagtggtccacattcgcagcacagatgctggcacccacaggggatgccgtcagccttcacaggccctgagtccagtatacggagctgcctggaatccatgcaaatgcgttcttccagaaagggaattccactggatcctactcacatcccaagaaacatgctgctgtggcacagcaccattttaagaggctagcccccaccagattatatcctgcagtccacatccctggacccccaagaacatcctcccacccaa

SEQ ID NO: 180174 - DNA, 1734 bp, Homo Sapiens
  misc_feature (629)..(707): n is a, c, g, or t
  misc_feature (1328)..(1349): n is a, c, g, or t
actttgtacaaaaaagttgggccaaatccaaccgtcatgaagatttactcctatgttttcttctaagaattttatagtttttgctattacataaggtctttgagccattaagatctttgacttaacttttgtatatgatgtaaagtcactgtcaaacatcattcttttgcatttggctgtccaggtatcccagcattatttgttgaaatgcctacacttctttatattcccttgactcctctaaccaaggcagttggacctttgctactaccactgccctgaaactgctgtcactgggttactgaggactgggtagcttagttgagtagataatcttttgttgtttcctccttgtaatatacaagccttggcttctgtgacatcatactctcctagatttccccctgtcactgtggcttcttctcagtctctgtccatccctggtgctcctgaaggttctgttctcagccttacacacattacctgggtgatctcattctctgccatgacttcacttgccatatatgtgctgattttccccaaattcctatttctcccgacctttacatctattttatttgcaggtcatatatctaataaggaattgatatccagtgtacatgtagaannnnnnnnnnnnnnnnnnnnnnnnnnnnnnnnnnnnnnnnnnnnnnnnnnnnnnnnnnnnnnnnnnnnnnnnnnnnnnncatctcaagctcaagatttcccagataacttttctttcttcaaaatctgcttctgtgtttcctcatctgtaggtggcacagcatacatctgatttcccaagccagaaacctcatagttattcttgactccaggaagaaatattattgagtttttaaaaactcagcttattgactcattgttttatataataaaatgcaacagttttaagtgtatatttcaatgagttttaatacatttatgtacttgtgtcactatcctcatagatagagacaaaacatttctatcacaccggcaatttcctatgtgtcccatcccaatcaatcctttcccctttgctggctccaaacaatgactctttcctatctttttagaaagattagaattgcttttctagagttccagtaatggaatcatacagtgtctaagtctgtttgtggtgctgtaacaaaatacctgagactgggtaatttataaattataggaatttatttctcacagttctggatgctgaaaagtttatgatcaaggcactagcaggtttggtgtctgagggcccagtttctaatttgaagatggtgctttaaacactgtcctcacatggtagaaggggcagatgggcnnnnnnnnnnnnnnnnnnnnnngggcaaatgctgtgtgtagcccctctcataaagggcttaagctcattcaccagggaagagctctcatgacctaatcacctccaaagaccccacctcttaatactattgcattgcagattaagtttccacatgaattttggagggatacaaatattcacaccatagaatatagtaatatagtatagtatatattttttgtgtctgtctgcttttgctcagtgtaaatgtttttgaggttcatctatgttgttgcatgtattagtaaggttgtatctattggtgccatagttattccattgtatgtatgtaccacactcttcatttacctgctgaatggatattgcattgtttccagttttgggttattatgaataaaaactgctgt

SEQ ID NO: 180175 - DNA, 842 bp, Homo Sapiens
gacgtcctttttagacttgtattagattacgttgtactagttgctggcccagagtaagcactatataatttttagctattagtaattatgagtaacctaattaccatctattgaacactgcttactgtatggccaatactgtaaagtgttcttatattctttagttctagtccttctgtcattcctatgaagtaggtatacttcccattttacagagtcagtcatttagtgtaacttttccaaggtcacatagtaagtggcagatccagaattcatacatgtaagtgcttgctcattccactatgccactctcctatttagagtgctggaactgggacagtttctgatcttctgaaatatttgtggtttggagttttaagtggaaaatttttaagagagtgaagcaaagcttcttctaggaactttgtgaatcttaaagctggtaaattagacatttaagtatcttctaggagtacagaaataaatgaggcatggtgtcattctttagaaattgtctagctgatgccaatcactagtaccctgaagaagtgtctaatgctcccccttcgtagaaaattagaatttagtccggctctttatttttcattcctagaaacgactacagaaatgatcagcgcaaccgaccatactgatgactgttttgaatgttcctttgtctctgacatgatccatagtgaaattgccagagttttgcctgctgcgttgcgtcgtggcctcttcttgggtagtgaaattaagtgacatttggatttttatttggggtgggagggctgggacagtttttcttctagaaatgtctgttgagatttccccctttagtt

SEQ ID NO: 180176 - DNA, 1990 bp, Homo Sapiens
  misc_feature (221)..(250): n is a, c, g, or t
  misc_feature (1559)..(1570): n is a, c, g, or t
  misc_feature (1754)..(1786): n is a, c, g, or t
ttggaaacaaaatgtctgctgctgttgttgatttcaattatgcaataataacatgcaattccaggatcaggccagctcagcactgtattaaagatttaattggaatagttatgattcaccatgggaatacaatcttgtaaaaaatatgttttctgaaaattaagcaatccttatgggctctattcatcagacatgttatgtcatctttcttcatcaaaggnnnnnnnnnnnnnnnnnnnnnnnnnnnnnncacattcccactacatttctttagcttcccttctttatccatcttagtttcactactttctatatatgtgaatgcaatatcttgattacaatgagcaaaaatataattattttctcctactaaattacatcctcactcacagagcataagctacattttattaagacacacatgttcaatggtccttccctacctacccagaggccttgaaacagctctaacatttacattccaatgtaagatgtttcttttactcctccttagacggtatgctgttattaagaagtattttaaagtagaagtaaagataaattaaaccaaattttctatttttatatttcgttgttgacttgtttctaaaattcctataattttttgctgcatattatcctcatccccaaaataacatccattttaaagtgtatagttgaggggaaggatgctgtttttggtataagttgtcaaatatggaacatttgacctggagagggctaaaatcaatatttaatcctcagagcttcacctgtcaaaactatttaagtctgcagaaaatcaagattgaaatgaaaactaccaaccagctgagcatccaaaacgtcaaattccttaacatgatgtaaaaaatgtaagctaaaaggaattagtccattttgatagcagcaatagagagccctgtgtattcgtattcgactttcatggaaaggttcttctgtggcaagaccacctgtggaactagtacctaaacacacagatttgttttattttagagcttcacaatttgagatctcaaaatacaaaacctaataaggctgaaacacagggtctatgaaggctaagaacccacattaattcaaaaagttgacacagctaaacatcttacaagcatgaggtgagaactgcagaaaccaaagctgtgctaacatctcacctctactgctttgatgtgatctagatgcacagttagcttcagtgtggcccgttatctaatagaaccatctttcaaggcttttcattagaaatgacaaaaagccagttgctctggctgtgtggcttcagaggcacatttccagttaatcagtacaaccaaagtcaaccaaatagttgactggtatttaatttattttaatttacttttattatagatctaggggggtacacacgtaggtttgatagatggatatattgagtaatgctggggtttaggcttctagtgaacccatcacccaaacagcaaacatagtacctagttcaaagactattatcttacttaggtagacgacacacgtttaaaatatatacctttaaattnnnnnnnnnnnnggatagtgataacaaagctgaaaattaaagacattttagcctataacttaaatactgatcatatcatgtttgttgaatagagctcatgtctggctggctgaaatttattcttacttttaagtattctgaactatgtttcattttttcctttctatgtcactgttatcagatgcatgaaaaacannnnnnnnnnnnnnnnnnnnnnnnnnnnnnnnnaattgagaaagaatccagcaatgcaatttaagatattatgaattgcatgacattaatcatatttgtcttctgttgcaatgcagccagtattttcaagaagtacaaaagaaggtaaagcgctttagcggtacaattaaaaattacagatttctagatataattccctcactttgtgagtatatatttcactagatcaaattcaag

SEQ ID NO: 180177 - DNA, 1872 bp, Homo Sapiens
  misc_feature (210)..(264): n is a, c, g, or t
caataaccttgtatacctattgtttccatgtgtggagctgcaccttcagaataaggttagggttagaagtataactgcaaggtataagaataaacacaagtaattttgtactccgtggaacttgaaccatttttccactcccaccaggaaaggtaatttcaacgtgtatttccattgtaagtgaggtggagcgactttctatgtttaaannnnnnnnnnnnnnnnnnnnnnnnnnnnnnnnnnnnnnnnnnnnnnnnnnnnnnncctttggcttttgcactttgttttcaatttttgagagctcttgtgatacgagttgcaaagattttctccagaccgatctgattcactggaaatatactacgaccatctggaatgtactttaatcttatcctaataaatcaccttactacaagacactcctttggggatgaacaggtttgataaagccggctaaggacagaccaatcaaaagaattacgtgctcttctagtaagtgtttagagactgtttcacgttctccaggtaacaccgccattactcggcggtccagatggcagtcttacttcagggagtctactccacttgcaggacctctttgattgagttcactaaacctcacagggccgccttccccgtgttccagttagcaaggggccctcaacgccgcggacacagcgcaacctccgacgccagagaacaatagctcctcgatgcgtctccagagatgtcaaggaggaacgaacccagcggccaggagactgcgcctcacgactgatgagagggaaggcatcggtttctaagttctcaaaacttacaggtgagcttctgctaagagtaaacgcccgcggctcgccgcccacggcctctctcttgaggtggcacctggtcctccgacacgcggaagcatcacggatgagcgtcacgaacacagagcggccaatcacgcgccgccttcgcccagatccctccgcacgaggcagccccgcagccgcaggtggccccggcgagtacttccaccttcccttcccgtgatgccctggggctgacctccgacctcgctggcccgcccctcccctcggccgcttcccttactgagcttgctgagctccggggcccgcggagctcgcgccaggctcctgggaaaggacggggagtgttaccggggagcagctgctccattgtgcctcgaggccccgatcgggctaggccgacggcctccctcccttcacctttcctctcctggcggggttcggcggcgggcgagtgactgcggccacgcctgaaaggcgactctcctgattcaagatgaccaacgaagaacctcttcccaagaaggttcgattgagtgaaacagacttcaaagttatggcaagagatgagttaattctaagatggaaacaatatgaagcatatgtacaagctttggagggcaagtacacagatcttaactctaatgatgtaactggcctaagagagtctgaagaaaaactaaagcaacaacagcaggagtctgcacgcagggaaaacatccttgtaatgcgactagcaaccaaggaacaagagatgcaagagtgtactactcaaatccagtacctcaagcaagtccagcagccgagcgttgcccaactgagatcaacaatggtagacccagcgatcaacttgtttttcctaaaaatgaaaggtgaactggaacagactaaagacaaactggaacaagcccaaaatgaactgagtgcctggaagtttacgcctgataggtaaacaaatcatactccccagtcaagacttccctgacagtcccactacgagaaagctgtggtgggacagccaagtactcgtttccacaccaagactcagactttttgagcc

SEQ ID NO: 180178 - DNA, 1213 bp, Homo Sapiens
attgagcctaacggttcctagctattccttttaaactgatagtttcccaacttgcataccacagtctatcaaattgtgttaaatgtctttaaaatgtttgaatctgtgtaaaacctgagtggtatacttctattatttcattctttcttcctacctcccaccctactggggtctgaatcctcttatctgattactttcatagcataaaatgattttaatatgccttcccttctttagccttccatattacaacccgtcccagccgtattcatcggcctattcctggctttcctgttttggtgtttcggtccattgtggtagagaaaggtacaagcactattgttgagtccttgtctgtttgtccccgtcacctttttgtgccatatttgtaatatagtgcatggcaagaacacacaggtattttgttacctgaagcaaacccttcatttagtatgccgtgtatttgtgtcataccaatgaactgaacagtcaactaatcccataactttttgtcttgtttactttgtagtaatgctaaccatgagttaattccaacctaaccagttgttaatatgcttccattaactgagtctttatctctagcaaactggagtgcactatgaatttctgcaatattagtaccctctttccaattatgtgtttaatcagatttgaatgagaaatgaagagtttgcctccttgaagttttcagccagccttcttccccttcctccttatcctcttccttttcatagtgtagattttctttgtttcaaccctttgcctgtttatactatggctatgaagatgaaaaataatgagattaacataatgaaccattggctcacaatctcaaccctattgtgtacttgcaaggatataaatgtatcccatttctttctgagccctgacctgcaacatcagaatatttctttaaaaaccagtttttctcaataacacttctggaatacaagtaaaaataaaagtgtcaaccaaagcaagttgatcttataaagctctctaaaagctagcaggcaacagcccatccatgcttgtttctaactggcatgcatgttagtagagcatatgcggtgatcatgtggctttattacactgaacagagtctataccagaattatcagacaggcaggatccctaatgttacttttccatcttgaaccctgtttgattttgtcttctgtggtttcaagtt

SEQ ID NO: 180179 - DNA, 1520 bp, Homo Sapiens
  misc_feature (828)..(854): n is a, c, g, or t
  misc_feature (1109)..(1117): n is a, c, g, or t
ctttgtacaaaaaagttggatttttcctaaaggttctgtgacatagtgctaccttttttttaaaacctgtcttgcccaggcattattgagtgccccctggtgccagcatgtgtatttcacgactgtatcaacaaatcatgatcatcttctctggccattgtgccctttcagattccaaacttgttacctctcagtccttcctacaaacttagaaagtctaatatcttaatgtttacttatgtagcaacctccctttctcccatccctaaatcctcttgtaattaattattttcctttggaactttttaaatctacaatttccttataatatggtaaccaatattaattttcttgttctgcgccaagtttgattttatacaaattgtttccagtttgggtcatgagcacaaaaccaggtatttttaaaaatctatataacccttcaatgaggcagtattaattttattaactcattaattcaaccaataattcttgattgtttactgtgttagatattggggtatccccaatacctgacagctgtgagcaaaacaaatgccctacacacatgaggtgtacagtccagtagaaaagataaacaataagcaaattaatagataatatgatgtccaataaggacttcaaaggaaaataaagcagagtaaagagccagagaatgacagtgagctgtttttcacatgagtcatcagaaaaggcctctttaaagaattgacatttgaacagaaaaacgaatcaagggcgtcaactgtttattgcttttattgcttaccatttgaccaagcaattctacacataggattcaccctnnnnnnnnnnnnnnnnnnnnnnnnnnnggattgtatatagtgtttaaacactgaacagcctaaaatgtcaaaaataaagggttgggcaaataagttatatatactataactatttttttgttgaaagagtttcatcaacagaaggatagggaacactgcatatattgtgatcactccctatttaatgtttgtttttacatgtttataaatgcataggaaaaaatccagaaggaatatcagaagtaattttctgtgtgttggggagatgaagatcactttggnnnnnnnnncctctttgctatctgtattttgacgctttctgcatcaaacgtggattgtttatacactttaatcaaaagcaacagctctgacaacccaggttatgcattagctacaatcctgtatggattattcttttattctaatgggccaagaaaatgatggatatacttttgcagcccaattgcagaggttacacatcgatactgagaatctccgggaggagaaggacagtgaaatcacaagtactagagatgaattgcttagtgcccgagatgaaattttgctccttcatcaagcagcagcaaaggttgcctctgagcgggacactgacattgcttctttacaagaagagcttaagaagtgagagctgagcttgagcggtggcggaaagcagcgtctgaatatgagaaa

SEQ ID NO: 180180 - DNA, 1663 bp, Homo Sapiens
  misc_feature (739)..(1006): n is a, c, g, or t
  misc_feature (1026)..(1039): n is a, c, g, or t
  misc_feature (1334)..(1453): n is a, c, g, or t
  misc_feature (1538)..(1548): n is a, c, g, or t
actttgtacaaaaaagttgggtctgatttctcttaacgggttttcagggttcattcatgttgcagcatataacagtactgcgttcctttttctggctgaataatattccactgtatggatagaccccattttgtttattcacacatcatttggacatttggattatttctggtttttggctattatgaacaatggtgctatgaacagttgcgtacaagtttttgtgtgaacatatgttttcaattctctcattatatacctaggagtagaattactgggtcatatggtaactgtatatttttgaggaactgccaaactattttcccacgtccatgcaccatttcacattcccaccagtaagtaagagggttccaatttctgcgcattcttgccaacactagttattatctgactttctggttataatcattctaatgagtgtgaagtagcctctggtgtcatttggatttgcatttctctgatgagtgatgctatcaagcacctttgctggtgctgttggccatatgtgtatgttccctggagaagtgtctgtgctgagccttggcccactttttaattaggcgtttgtctttttattactgagttgtaagagttctttatatattctggattctagacccttatcagatacatggtttgcaaatattttctcccattctgtgggttgtgttttcactttatcgataatgtccttagacatataataaatttgtatttnnnnnnnnnnnnnnnnnnnnnnnnnnnnnnnnnnnnnnnnnnnnnnnnnnnnnnnnnnnnnnnnnnnnnnnnnnnnnnnnnnnnnnnnnnnnnnnnnnnnnnnnnnnnnnnnnnnnnnnnnnnnnnnnnnnnnnnnnnnnnnnnnnnnnnnnnnnnnnnnnnnnnnnnnnnnnnnnnnnnnnnnnnnnnnnnnnnnnnnnnnnnnnnnnnnnnnnnnnnnnnnnnnnnnnnnnnnnnnnnnnnnnnnnnnnnnnnnnnnnnnnnnnnnacagaatgagactttgtttnnnnnnnnnnnnnngtgacttgatttaagggaaaaaatgactggctatattcagtcagatatggcaaaaagtctcaaggtgttaatgtgaatgattaaggtcttggggggggtgtcccctatcagactacaggtgtttagaggcacagaaaaaggtgcagttgggttcttaatgtgaaatgatgagaagcacaactccagtgtgtctctttgtgtagaatgtcagcagacaccccctgctagatgtgctggatcatgggaaagcatttccatttgttactagattgttcagaagttttaatttatgatnnnnnnnnnnnnnnnnnnnnnnnnnnnnnnnnnnnnnnnnnnnnnnnnnnnnnnnnnnnnnnnnnnnnnnnnnnnnnnnnnnnnnnnnnnnnnnnnnnnnnnnnnnnnnnnnnnnnnnnnagaagaagtttttaaatttgaaataataataggtactggatttatgcaaatgtcttttctgcgtcttttgagatgagtatcaggnnnnnnnnnnnccttttatcatctgatgatgaacttaatgtttccatttgtattaatggaatactaagtccctctgtgatttctgaaccaagctattcctaggcctgagttttattttgttgacac

SEQ ID NO: 180181 - DNA, 494 bp, Homo Sapiens
  misc_feature (75)..(85): n is a, c, g, or t
  misc_feature (207)..(397): n is a, c, g, or t
tttaaatttgaaataataataggtactggatttatgcaaatgtcttttctgcgtcttttgagatgagtatcaggnnnnnnnnnnnccttttatcatctgatgatgaacttaatgtttccatttgtattaatggaatactaagtccctctgtgatttctgaaccaagctattcctaggcctgagttttattttgttgacacagaaatnnnnnnnnnnnnnnnnnnnnnnnnnnnnnnnnnnnnnnnnnnnnnnnnnnnnnnnnnnnnnnnnnnnnnnnnnnnnnnnnnnnnnnnnnnnnnnnnnnnnnnnnnnnnnnnnnnnnnnnnnnnnnnnnnnnnnnnnnnnnnnnnnnnnnnnnnnnnnnnnnnnnnnnnnnnnnnnnnnnnnnnnnnnnnnntaaactaaggcaatgacagtccctggcaaatgctgggagggaggcagcagtggtcagggaaggtaaccctgaagcaggacttgtaaagcaaataaga

SEQ ID NO: 180182 - DNA, 4321 bp, Homo Sapiens
  misc_feature (2030)..(2097): n is a, c, g, or t
ttgggctaatgttattatattatgtgctattgtaatggatggggctgtggagtgtatgaatttataaatcactggtcttgtaattaaaattcaaacactatagaaaaaggccatgtagaagataaaagttcctctataatcccggacccctaagataactactaatgacaacttcatttatattccttcagacattttctggctgtggatgtactaaaatgtatcctattattctctgccctaaaatggaatcatacaaggtgtactgttatttttatggctctataacatgtcatattgtacgtgttggtatggtcattttaaccatttttctagtgatggctttgaggttatttgcagtttcctagccatctcaaagtgtgctgcggggatctcttttgcatccctctgggtgcagagctgaggcacccagaggcagtgtccagaggaggcagcatctgtaggtgtcttcacctgctctggctcttggcacatctggttggtgacactgttttgtgagatgggttgaaagcacgtgctgccaaaatagaataatgttggtcctctcctcatgtgccgtggaactggggtaaaactgcgtagtggctgcagctgcctgtccataccggaatcgagtataacacggtgcctggcttagcacaaaacagtagtgggtcctgcaggccccagagtctaattcctggtattctttcccctacacagattaaataaaccaaaaacaaactattctaggaaagcgtctgtgacatttgtaaaaagtggtatttaatgatcttttattcacttgtctgtttagtttgttgaaatcttaagtggcatcctggtctgggaaggagtgctgtctgcgcctgccctccgctgggcacagcgtggctgcttcaggggctaagcacacactttctgtcttctaaagggccgccacatgccaggagctcaggtgtgagcccggctctggctcttacctcatagggtcactcataggggcacagggagcagaacattgtacacagcgaggcaccacccggcttggcatctgcctcggtggacttactacctctagaaggaaatacctgagttcctctggcctcagctcctagagtgactggtgtgctgtccctgttactcttctgtcaaggtgacaactgtgtgacccatcatctgtgtgtcaaagcaaggccctgcctgggcctctgctcctgtgctgaccccaaaggcaaatgctttgctagtttccttccagttaatttcacctatgaatagatgtgtgaaaactgttcaaagccatacctgcacatgtttgaacttcaaaccctgtgggtgattcagtggtctttctctaacccccagcctcccttcccacagaggccaccgtcatggccagttgctgcagtttctttccagagaacctgtgtatgtgtaaagctgtacaggcgtgggtacaccacacagcctgtcttgcactgtggactgttgagttactagtacatctaggtaagcaccgcatatctgtattcatgtctgccttggtcttttcaacatctgtgtggtagccgtgtttgaattacccattccctttttggggaaccattaagttgtttcagcaatttttactgtagataaggctataccgcatatctgtgtacatgggtttttatgtacatgggcaagtatatctgtgagagaaaagtttcctcaggaggaattctgggcacagcatgtgtaaatttctaaatatgatggacacccccagcttccacctcaaggaggttggtcccattgacatttccccacaccttcacccaggctgtgcccttaaacttggttatttgtcaatgtgagaagtggaaaatagtatttaattgtagtttggatttgtatttctattgggttgtatacttactgattaataataagagctctttacatattaaggaaattaacccttttcaaatacattcctatttctcactaatctttaagttttattgtaatattttgctctttagttnnnnnnnnnnnnnnnnnnnnnnnnnnnnnnnnnnnnnnnnnnnnnnnnnnnnnnnnnnnnnnnnnnnnctaattttcttttatggttcctggattttgtgagtagtttgaaaaggctaatccagctgaagattttgttgttgttgttaaaccccatgttttctcctaactctttttatttttattttggaggactctatctagacttaattttagcataacaagtgacagggttagttagcctgttgtccttacaccattttctggctaatacagctattaactattgatctgtctattcacgtgccagttcctaatggttttacatagtgtaatctgcacttcaaaatagcgaagggaagccctacctcattattctacttttccagaattctcctggctattccaggctgcatgtttaccttaaccttccctgtgatgtcttcatgccgttgtcttcttatgcaagaataaggtacgtctttccatccactcacgtctatttaatttgactttgcattacacagaaagctggtcttggtctgtctacctcggcatctagttgtcctcactgccccctagccgaccccaccccatctgactgactaccccatcacagagtacttttatttacgttttgctctgcctaatggttacttgatactgtcacgccgacagtgtccagttcagtggtctttgcagttgaaatgctcccgtacacactgtcttgttaaaaatgccagtaagttcatacaaacccagcttgcacccaaggtcacattcagagagcgtagggctgggatgggttgttttccaagcttctgccactgtgtggctagctcttcccactgggaagttctgtgtacccggaatgtcggagtggagtcctgttctagtgtccagcacctgaccctgtgcccaacccctcaacagcctattcctgctgtccacagcctgctggaactttttacaaaatatgttgccatgctggaccctgggcactggacataagccccctggcagcctttttcatgtcacccaaaggggtaattgtcctactggtggtctgtaagatgagttagggtgacttgctaatagacattgtaaatcttaatatttatgtatgtattttattattaccggttttccatttatgatggtaatattgtttcttctaagaatatttatttttccttctaaatattgagataaaattcatgcttttgaaatgttctattcagtggcttttagtatatttgctatgttgtgcaaccatcgacactatccatttctagaactttttcgtcatcccaaacagacgctctgtattcataaaaaaataacttcctacctgtctctccccctagtctttggtaacctttgttatactggtaaactttgttgtgctctctgtctgtgtgaatttgcctattctaggggcctcatataagtgtaatcatacagtatttgtctttttgggtctgtctgatttcacttagcgggttttcagggttcattcatgttgcagcatataacagtactgcgttcctttttctggctgaataatattccactgtatggatagaccccattttgtttattcacacatcatttggacatttggattatttctggtttttggctattatgaacaatggtgctatgaacagttgcgtacaagtttttgtgtgaacatatgttttcaattctctcattatatacctaggagtagaattactgggtcatatggtaactgtatatttttgaggaactgccaaactattttcccacgtccatgcaccatttcacattcccaccagtaagtaagagggttccaatttctgcgcattcttgccaacactagttattatctgactttctggttataatcattctaatgagtgtgaagtagcctctggtgtcatttggatttgcatttctctgatgagtgatgctatcaagcacctttgctggtgctgttggccatatgtgtatgttccctggagaagtgtctgtgctgagccttggcccactttttaattaggcgtttgtctttttattactgagttgtaagagttctttatatattctggattctagacccttatcagatacatggtttgcaaatattttctcccattctgtgggttgtgttttcactttatcgataatgtccttagacatataataaatttgtattttaaaagtgacttgatttggttttccaagtgctgggattacaggcatgagccaccgcacctggcgggactttcttaattcctgtttgggattg

SEQ ID NO: 180183 - DNA, 726 bp, Homo Sapiens
cagcccaagaggacttcaaattaccctaactagaaactattcaaactcaagattacaatatttgtaacttctctcaaaggtttttctttaactgaacacaccacataaaacatagtctctttcttgtttcttgagttttacatatttagctgatctgaagatgttgaatgacctaacatgacctgcacatacaagctgccaaagagaaggacattcttaccaaactggatgcagtcacttcactgtaaagaagcccaaaagggacaatgaggaagtgttcctgctcggagttcactttggtttgtggggaaaatgactgaattagctcaaagatccaagtgaaattatttgcatctctttcaggctacaaattcacgggtttgttcagaacactgagtgagctatgcagggaagcgtccatgcacaatgcctgtcatgaagccaaggggtactggaagctttccattattctactgtactaatttatcacatatatgaagtgcttcttgctcacgttcatgataactgactttatagagggaaaaaacagttccacactagccttctgacaggtcaataaattactgctgggttactctgtcacactttctggtggctactagtgtcaaaggcaaaaaggtgtcactcctcagggatataataatgaaaaccaaaacttacccaacttttttgtacaaagttggctataaataaaaaagcattgct

SEQ ID NO: 180184 - DNA, 835 bp, Homo Sapiens
tgagccaccatgcctggcaaatagccgtttcttagaaacctcaattcctagtcatgatttacagtgcctgatttctgtaccagaatgagacacattgctgaaaatttgtcccttttccttttcagtttaagaacaaggtttagtgtaacctgtttctggctctttgttgtcatctgtcaagggccattttctgggttttggttttcgttgtaacatctgcacttctcagcaatcctcaggaggaggcaggaaggatgggacttaacaccatagcatccttgaaataggccgttccatgcagggagtattttaagcctcccttttatcctccctgcctcgcttgtgtgggttcattccccagggcgtgccaggtagagaaaacagccatgtggaacccagccagctgagaaggcagtggctggagaggctggtggcgtaggaagtgtcaccatgcaccctggtgatgagaacagggtaggccaccttaccaggtagtggccagaggtgtggggaccctcaggggacctcttggcttcaggtgagacacccccaactctccctttctccaggccatgtgcatgatcataaacggtttaatttcttcattgcgcttccatgtagattgcaaggctaacaggacttggtatgaactaacccgcatgtccatccactgagctgccagcaccggtaacaccgtgttgagtgagaagtgagttgggcgatgctgggttgcacgcctgacttcgccttttctcccctgacccaaaggtggcgacctgcacatgacccagtttttccgagcaatctggctggcttaactctccgttccgggaaa

SEQ ID NO: 180185 - DNA, 873 bp, Homo Sapiens
ttggggactgtcaagcatacttcattgtgtgtttagagtccagcatctcatatgtggccacttggtgggccagtgctaccgtgtaggtagtaccagcttcctgaaggtgcccacatgcttgtaggcccaaattgccactaacagcgagaccccattctccccaccatccaccccgaaatgaggattattctgctgaaaacaaagtaaaaatagtgaaaacacctttgtttcagaatgtagaaattagagataatttttcaacccatctattttaagtatgttccaaggaaaatctttgcaataaatacagttcttgccacacacctttgtctttcgaggtaagactggcctttgattagtaagagacatgataacccacacttgagggttactccggtctctagactcttgatttacccttaaaacaggaatgagaaattgattttctgcattttttaaggtttttataaatgttactattgataatagaaaatatactttttaatccatatgagtgtttatgtgtatgttttttttaggatgataatgatgtttatattctgaccaaagtgtcagatattttacactcaatattcagtagctacaaagaaaaggtgttaccatggtttgaacagctgcttccattaattgtcaacctcatttgtccacatagaccatggccagacagacaatggggattatgcatctttgatgatgtcatagaacactgtagtccagcctcatttaaatacgcagaatatttcttaagaccaatgctccaatatgtatgtgacacagcccagaagtcagcaagcagctgcatatggcctgggagtcatggcacagtacggtggagataatatcgcccttttt

SEQ ID NO: 180186 - DNA, 1520 bp, Homo Sapiens
  misc_feature (622)..(633): n is a, c, g, or t
  misc_feature (793)..(801): n is a, c, g, or t
ctttgtacaaaaaagttggatttcccctcccctaaaggaaaataaacataagactaaacatgagaaaaacgctaacttattggaagaaaatcggagaaacgttggtgtcaatgctttgagagctggttgactgagacgcacgaactttttaattttaaatatatttttaggaaactctcgcagtccccgccctccatctcacctcacccgtctcccaaccacccttttccatgttaccctcccttcctcacattgttacgggaatcttctgggatgaaaatgagtgtggttggcccttttgcgttgtttcagtcctctcggtacctcccctcccagccctgcgatcttaactcaccgggcccggctccccggccgcttgcataattagggagggcgagggcggggcgggaggcctgtggagaccaggcggaggctgcaatttttggtgccggccggcagagcaggttctggcggctgaggaaaatccggaccaataagttgattcaaacatcatcagttcctttcagaaatgttactagctcccagccttgccagcatctgcatagagagaatctcacatttattatatttgtgtcatctactaattttatgaactatagtnnnnnnnnnnnncacacacacacacaatatgaatacgttgattagtatgtaattccttcggaggggtatgtaccatttcattctcttctgttttccaaagctttgcccgcatggtttatgagcttcttcaaagaggacttgggcttcctacacaatctataaggtacagagnnnnnnnnntccgatccctttttaatcaaagcctgtgtgtcagaattctgcaggtgcacttctttaaagaagctcaaagggaataatttagaaagtggccaatatgatggaagcagctttgaatctacatgctaacattcctcaacactccaattccggtggaggtggcaggggagggggtctgcaaaatgaattttaagggaaaagagtaaggattcttagagccctatattctaatagtattgccctgcatttaaaattgatttgatttccctgggttctttggtgattgctgtttaagcaaggaaagaagcagctttacgagtggacgtggggaggagggcggcacaagcacccacatttctgtaacaattgctttcttacaagatgctttatgaatgaggcatttttccctcccagacgtgcacttgttttggcatataatggcaaaataatgcaaagtgaagggagatgtatttcagctttgatttttaccgtctggatacatcgggactattcccagtggataaagtttcatgcatttaatatttctcacttctggcagcccagctcctttcttgggctccatcttagcattatcatgaaataagatctggaatccattgtctgcacctccgcaaaagcagtgagaaattatcccgggataaggtgaatgagagaggtctctaaatatagtgttgatacactcacctatttaacaaagtaga

SEQ ID NO: 180187 - DNA, 1678 bp, Homo Sapiens
  misc_feature (862)..(935): n is a, c, g, or t
  misc_feature (944)..(1196): n is a, c, g, or t
  misc_feature (1219)..(1232): n is a, c, g, or t
aattgatgagcaatgctttctttaaaatagccaactttgtacaaaaaagttggcttatgaccttgaactctgacctgtgaccatgcagcatcacatgatggcatgacgttctttggatcagaagagcttccccagaatctaacctgcactcccgatggtggttcaggagactcttcctgatctttctagaaggggtaaagtggggttgaacaaggccaagccgttagctctgctgctgctcagtttcccagcctagttttctgagctgggagaggacataatgtggtatttcgtcacgtagctgagacctagaagggcatactcaggcggagattgcacaaagctgggctccaagttctgtgcttcctgatcccgagccctgacactcatttgctgtgtggtcccgggcatgtcatcaagaagctcgctgtctgcatgaggctcccgacgatctccatccccagggggttgggaggatgtctttagattttaggactctgtgataaatattccacagcctggtgtgaggaagcttggaccaaatgcttcccctttggccggttagtctgaacaaggatctgctgatttaaaggagcagttggagattcagaacacatataactggggaattcagggcaagctaccaacccagccctgctgtagttttcccaggactgaaggaaagaggcagacaccacattctcctctgcaaagttctctggagaatgtgtgatgttaacactcccagctaaggaaagcaaagtctaaaggaaaacacacaggaatgcttccaatgtctccaagtattcctgtggtcaacagtttcgcagatccgttaggcccttaaagacaaggaggaagnnnnnnnnnnnnnnnnnnnnnnnnnnnnnnnnnnnnnnnnnnnnnnnnnnnnnnnnnnnnnnnnnnnnnnnnnnagacagaannnnnnnnnnnnnnnnnnnnnnnnnnnnnnnnnnnnnnnnnnnnnnnnnnnnnnnnnnnnnnnnnnnnnnnnnnnnnnnnnnnnnnnnnnnnnnnnnnnnnnnnnnnnnnnnnnnnnnnnnnnnnnnnnnnnnnnnnnnnnnnnnnnnnnnnnnnnnnnnnnnnnnnnnnnnnnnnnnnnnnnnnnnnnnnnnnnnnnnnnnnnnnnnnnnnnnnnnnnnnnnnnnnnnnnnnnnnnnnnnnnnnnnnnnnnnatgagccactgcacccggccacnnnnnnnnnnnnnnaaagaaaaatgctctgcatggattggagacacagcaataactactgttgccatggaagggttaacagtgtaggagctggtttatcagtccgctttgacatacagctaaaggaaatttatgtttgggggaaaaaggccctctgttcactttaaaattcagtgtggacttatgccaaagggggctgtttaagttgaaagaagccaagttaagtttggcctcttgcctggaatcacttgaattctgaaatttcactgcgacggacatgtgccttgtcacattttccattgcttaatcctgaagtttggtgcaagtctctctgcacctattaaaaagtgatgtatatacttccttcttattctgttgagttgtatagaattgtcttttgtatttaacactttgtaattttcaaatatttttataatttaaataataaacacattttttcc

SEQ ID NO: 180188 - DNA, 1881 bp, Homo Sapiens
  misc_feature (105)..(119): n is a, c, g, or t
  misc_feature (1038)..(1047): n is a, c, g, or t
  misc_feature (1088)..(1096): n is a, c, g, or t
ttggatctgaacattttaaaatagccacaatagctgattctgtttcagtgaagtcccacaagaacaaatactctctcagttaattctttcagggtattttagaannnnnnnnnnnnnnncaagcaggaaggaaatgtagggttggggtttttttcatgatttatacataagcatgtatattccttgattaaagatgtttctggttagttttgtgcaataacattcaaaacggatgcttctgattgatgtagttttagtgtccaatgagtgatttaacaaaattatttgcctagtaatggttttgaaaataatttgatctccttcttggtgatatttaaggaaggagctaataggaacattcacttttgttatgaagccattttgatacggattgaaacaggaaacagagtaaaacaacacagtgctacccaagtgaagctagtgactgagctgtgttcgcatgtccagtatcagctacactcatggtttttttggtttccatggtttctttttcttggtttatcaaaggattcagaaaaaagatttcaagaaaagatagagttcctagaagcaccattaatttttgtgtcccattcttttttttatactcaaaatactaaatgtttctagtttccatgttttggggacatctaaatatgctagttctttcaaaaatgctttgaggtccttgtacagaggccattgtaatagcactgtattaagtatttgacaaaggcttatacatgaaaggagatgtgtagtattaatacaaacataaaattctgccgtattgatatcatgtcatggtaaggcactctgcaccctcttgaatataaaagaatatttctacatttggttccagcaaacactattgtgctattctgaaatccacagcacagaaattataagacatccgctcataaacagaaagcaaatcactattcagcatttcctgctctgtttcctgccaatttcagataattgaaactttttttaaaccttttattctattctgctttaattctgcttcctccaccnnnnnnnnnngatttagaaattaaaactctgtgtatgtaagtcacagtccnnnnnnnnncttatcctgtgataatatctcattcttcattattgcagacctcaggatatcattgtgtttgtaattggaggagccacctatgaagaggctctaacagtttataacctgaaccgcaccactcctggagtgaggattgtcctgggaggcaccacagtgcacaacacgaaaagtttcctagaggaagttctggcttctggactgcacagccgaagcaaggagagctctcaagtcacatcaaggtcagcgagcagaagatgaaacggtggttgggggaagggcacagcttcctctcttgtccccactacaggttttccctactaaacaaaggtgttggagagcagctttgggttctgtgctggttgttagaactcatctccaggtagcccacggatacgtggttggcacagacacaagactcccagagttgtcctaacaataagtctgagcccatctcaacccacttttctccggtagtctttatgtatctgttagcacaatcacttcagttactgatgaattttgttgggatctgacttggggaaagggttatcagagcctagaggggcttaaaaagtaatcatttgatgtacataccacactccttggcttcctttctcttcccttaaccctttctgcttttcattaaccacattcctgcacaactcatttctgaaaaacctaccatgtttctttacagagcccatccaaaaattttttgtccctacatagcaattttctgtggcactgagaaacatgtatgaccacaataaaaaatccattttgtg

SEQ ID NO: 180189 - DNA, 2591 bp, Homo Sapiens
  misc_feature (535)..(554): n is a, c, g, or t
  misc_feature (1605)..(1631): n is a, c, g, or t
  misc_feature (2039)..(2099): n is a, c, g, or t
ttggcttgtatctttttccaaaaacacctacccatgtttggggaatgttaaacaaaatcaaaaaacaaccttttgtagccgttggaagcttcatgtcctttcttctaacttgtcttctccagcggaagtgaccgtggtggcttcaataaatttggtggtaagtgaacagagtttccaaaattcccaactcccagcaatgctttgtctgattgttcatttgcagatgtcttagcgtgttaatttaaatgtcaaaggttttgaggtgtccagaaccacctccagaaaggggtagggtagaatgccacctgttgcctggtgtgtgctaacctggagcaggtaggggtaagactcaatagtcatcttttaccaaatgggtttgccccaggttaataagaggggtctagtaggccttggactgggccgttgccacacctggcacttagtgaccatcatcatgagaaactggagagtgcgtgctggaacacgtggtgccatcttggctttaggatccttttgatcgttgtgtccaaggctnnnnnnnnnnnnnnnnnnnnggagacaactccgaatgtttaattctggaagagggatgtaacattgccctgaggatggtgaagttggtatacatttataaagtacggaatggtgtcaatgaatgcaattctatgtatatggacttaactgagatgggcaaatagaaactagctctgggaaggaacatgtgcactacttcaagaaagattggaagcatgtgtggctcatgggaaataaccaggtcttaaacagcacaaactgaattcgtggaccaggaaggtcttaaacagcacaaactgaattcatggaaaaatgacaaatttgagaagtctcccagtaagctggaacttttctggtttggttaacaaaaggtttcttgatttgtttcaagatttaaagccaaaggtgtgggttcatgacttaggtgtcattgcgtgtgggtacaatatttatatatggcgaattcagataaacattggtcaaagatggtctctggaaaaacaaaatagaggctgcattacggaaataagatttctggtctgttccctgggacatgcttaaaaaatacaatagctattatgtatggtttttattttcatgtggtttcggggaaacaacacggttttaaggatggtttctaaagatgaaattaaaaattgttccacaagggttaagtgtctggtggtaaagttgggagaaactggatggatgcacatcgcatggctggtggcgagcccatctctcttctctcgggtgagagaaccgggccaagctgagttggtttgttcactttaatgggtctccgtttcccctgccacctgtgctgaggacatttcccagcctgagctgggggaggcagcattttctgaagtgtggagttgtctctgtggagactcaagttacagatcttaaggggcctgcctagaattttctcctctgggcaggcgacccaggaaagggtttggagtgaggctgtgagcacttacttgatattttacaagtttggatttggtgttaatttttttccttgtccgttttttcctgttgactaacggctcatcttttccttgnnnnnnnnnnnnnnnnnnnnnnnnnnnccatgtcactaaaggccctcgggaccaaggatcacgtcatgactccgaacaggataattcagacaacaacaccatctttgtgcaaggcctgggtgagaatgttacaattgagtctgtggctgattacttcaagcagattggtattattaagacaaacaagaaaacgggacagcccatgattaatttgtacacagacagggaaactggcaagctgaagggagaggcaacggtctcttttgatgacccaccttcagctaaagcagctattgactggtttgatggtaaagaattctccggaaatcctatcaaggtctcatttgctactcgccgggcagactttaatcggggtggtggcaatggtcgtggaggccgagggcgaggaggacccatgggccgtggaggctatgnnnnnnnnnnnnnnnnnnnnnnnnnnnnnnnnnnnnnnnnnnnnnnnnnnnnnnnnnnnnnaggacagcagcgagctggtgactggaagtgtcctaatcccacctgtgagaatatgaacttctcttggaggaatgaatgcaaccagtgtaaggcccctaaaccagatggcccaggagggggaccaggtggctctcacatggggggtaactacggggatgatcgtcgtggtggcagaggaggctatgatcgaggcggctaccggggccgcggcggggaccgtggaggcttccgagggggccggggtggtggggacagaggtggctttggccctggcaagatggattccaggggtgagcacagacaggatcgcagggagaggccgtattaattagcctggctccccaggttctggaacagctttttgtcctgtacccagtgttaccctcgttattttgtaaccttccaattcctgatcacccaagggttttcttgtgtcggactatgtaattgtaactatacctctggttcccattaaaagtgaccattttagtt

SEQ ID NO: 180190 - DNA, 1336 bp, Homo Sapiens
  misc_feature (888)..(896): n is a, c, g, or t
ctaaaaaaagccaactttgtacaaaaaagttggcttttttctccccatttaactagttaaaaccatgacatgtaaatgtagaagtagaataatcatagaattccctaaaatatttctgtttactaacatatattgaccaagtacatcaagcaggagagatcttccttcattctgttatagtccacatcattctaattttgctcagttgttattaagagcatattcctaaaccatacacttttgtttcaataaagttttattttgttgagatgaataaaataacaaagttataagctgcataagacaaaagttcaattgttcaaaaaaatttactgggatagctttctattacaggtattgttagattatattgtgctgataagattactttctaaaaaatttgtacttttctgtaaattaaaagaatatggagtcataaaatggcaagtgttttaggattagcctaaaattggacattgtcattgatttcaaagaaggtatgaactagcagtcttacagcctaattcttctttggactggtccttggcagcagttccttttcagactcgataaacagaattcagatgatgtaagtcaaaacaaaactttacaaagccaagcgtattatcttttgcattaacctatttttttccatcatacatgctactagtatgtgcattagcatgatattctcatatacattgcactaaaaattaaaaggtggcagctcagggtgagctcttctgttgctcatttgttcctaaatttttaagggctttttctcagtcaatagtttgtacaaactggttagtttaacttcattacccatttcattaaagttgatgggtcgtgtgatgagatgcatttaaggccgatagtgatagatgnnnnnnnnnatttcttgaacacaggctttgtctgaatgatgttcttttatctcttgaacacaagctttgaatgataactacaggttttaagtgctgttacattaataccataatgtgatgtgttagaaacaaagggatatttcaaaggtagatatttgaaaattctctagtctcaatatgtatgtgtattgaatatactctaaaaataaatgtgcaatttgctagtaggacaatgcagtgactgactagcattaggtatgtttcttttatatcctagctatgtcccactttcttctaagtgcaatcctttcatgttcacttgctgttttaccccatctactctaacttcatttggaaggcttgtctagagtataccatgtatttttacctttgcagtgaattgcatgtgctaattgtaaccacaactatttttattttgacataactcc

SEQ ID NO: 180191 - DNA, 3407 bp, Homo Sapiens
  misc_feature (208)..(250): n is a, c, g, or t
  misc_feature (318)..(386): n is a, c, g, or t
ttgggatgcatttcacaaactcaacagagtgccatgataagagctagggatcccccaaactatctcaagcatctaaaaaattgccatttttaaaggcttaaattgtagtagtaaaggggaaaacaggaagtagtagtaaaggggaaaaaaaaccaataaagcatctaaaaaattggcatgttaaaaggcttaaattgctaatgtgtgnnnnnnnnnnnnnnnnnnnnnnnnnnnnnnnnnnnnnnnnnnncattgacttttcttaagacttcagagtactgggtagatgaacactttatacagtatatatcttcagcnnnnnnnnnnnnnnnnnnnnnnnnnnnnnnnnnnnnnnnnnnnnnnnnnnnnnnnnnnnnnnnnnnnnnagtaaatgtttgaggcacactaagacaacttgggcaatatttgccaaaacaaaacagaaccccaaaaaatgtacatcttgttcttagcaaatatcattattgtagagacacttaataaagagatggtattttaatgtctgcagttctgaggtagggtggaacttagttctacattgtgatttaggaatttttaaaaccttttttcttcaagggagaagtgacccaggcctcgagtttagtgctaaagccgctagtgtacttatgctgtcccctaaccaccacgtgcgatatggaagcagatgctaaatataggggttttcttagaaagtaagaggaaattagcaagcgttattagtgattgactactgctatcaagtgaattcaaaggaaacaggtttttatgccatatttaagttacagaaaccaggcatgcttagaatagtttctagaggttattggagaatagaaagctaagaaaacttggtatacatttacaatggaaatataattacactttttactctcagaatattgttcacattagacttcctgtttatcttttatattcttgcatttatataatgcctcatcctttcaaagttctttcacatattatatgatcttctttatgaaaaaaatagatgtttcattctgatatattcagtttcccactttaggcaaaagtagattaatagaatgacgaattcaaagtagatgaggaaaatcaggcacagagaagtaaaggtagggatagacccaaatttacacaacaagataatgacatctccagcttttaagttgatcatcaaaggctgggctggatttgtcttgctgtatgtgtcaggaaatttatacctattacattttccattttctcaaaatttaagtcacatgactaatatttagctgcaactttcctcataacaaatagtgtcatgaagaatgttgtagtgtgaagtttgtacatttcagggtcagatatacaatatgaactcttaatctacaggaatgagaatggaggatcattgaaggccatgatataaacaaatttgcatgttgaagcctgtataaaacatggtacagtgagtgaatatacccccatccccaagaacactttatacatattaaatggatatatgattactgtgcaaaaattcattctggaaatgaacatatatttgagcactaatatgtaatgtacacctgccctaaggagaaaataaattataaaactttttacattcaaaattactttcccaagcatgtcttagaataatctatgtgttgatgcatgtaaattgtactttaggtaggcaaagaaatctggttatttatgtaaaaactagtctaataaagttagttagtggctttatcactttaaatctttagtgtccaaaagtggtgtttaaagtaatagcacatcagaaaaccttgtctggacaaaactagttcactcactgcttctgcacctgcagttgctccctttagggttataaaataatgacccaaatgttacatgtgttgatattataacttgtcagttactgatgtctgtggtatcctaccctcatctctgaaagggataatactgaataattattagaaaactataaaacttcacactttgtaccattaaaacctaaaattttaatcttgtccttttttactatggatcagtcggcactcgggaacagcagcaaggaaaaaaagcaaatttcattcacatgttctgtgttcatacctcttctctacctaattgttcatttaaatttcagccttattccttgataagggattttaccacatgaagtcatccagtgaccctagctcttattgtgaagttagtggagtatacttagaaatgttacaactttaaaatgttacaaaacattcattaaagctcatatttaaagtagagcatctagtttgagaaatagaaatcaattattaaagatgtcttttttctacccatttaactagttaaaaccatgacatgtaaatgtagaagtagaataatcatagaattccctaaaatatttctgtttactaacatatattgaccaagtacatcaagcaggagagatcttccttcattctgttatagtccacatcattctaattttgctcagttgttattaagagcatattcctaaaccatacacttttgtttcaataaagttttattttgttgagatgaataaaataacaaagttataagctgcataagacaaaagttcaattgttcaaaaaaaatttactgggatagctttctattacaggtattgttagattatattgtgctgataagattactttctaaaaaatttgtacttttctgtaaattaaaagaatatggagtcataaaatggcaagtgttttaggattagcctaaaattggacattgtcattgatttcaaagaaggtatgaactagcagtcttacagcctaattcttctttggactggtccttggcagcagttccttttcagactcgataaacagaattcagatgatgtaagtcaaaacaaaactttacaaagccaagcgtattatcttttgcattaacctatttttttccatcatacatgctactagtatgtgcattagcatgatattctcatatacattgcattaaaaattaaaaggtggcagctcagggtgagctcttctgttgctcatttgttcctaaatttttaagggctttttctcagtcaatagtttgtacaaactggttagtttaacttcattacccatttcattaaagttgatgggtcgtgtgatgagatgcatttaaggccgatagtgatagatgttttttttatttcttgaacacaggctttgtctgaatgatgttcttttatctcttgaacacaagctttgaatgataactacaggttttaagtgctgttacattaataccataatgtgatgtgttagaaacaaagggatatttcaaaggtagatatttgaaaattctctagtctcaatatgtatgtgtattgaatatactctaaaaataaa

SEQ ID NO: 180192 - DNA, 1004 bp, Homo Sapiens
  misc_feature (856)..(856): n is a, c, g, or t
gagcaatgcttttttataattgccaactttgtacaaaaaagttggctggacaaaactagttcactcactgcttctgcacctgcagttgctccctttagggttataaaataatgacccaaatgttacatgtgttgatattataacttgtcagttactgatgtctgtggtatcctaccctcatctctgaaagggataatactgaataattattagaaaactataaaacttcacactttgtaccattaaaacctaaaattttaatcttgtccttttttactatggatcagtcggcactcgggaacagcagcaaggaaaaaaagcaaatttcattcacatgttctgtgttcatacctcttctctacctaattgttcatttaaatttcagccttattccttgataagggattttaccacatgaagtcatccagtgaccctagctcttattgtgaagttagtggagtatacttagaaatgttacaactttaaaatgttacaaaacattcattaaagctcatatttaaagtagagcatctagtttgagaaatagaaatcaattattaaagatgtcttttttctacccatttaactagttaaaaccatgacatgtaaatgtagaagtagaataatcatagaattccctaaaatatttctgtttactaacatatattgaccaagtacatcaagcaggagagatcttccttcattctgttatagtccacatcattctaattttgctcagttgttattaagagcatattcctaaaccatacacttttgtttcaataaagttttattttgttgagatgaataaaataacaaagttataagctgcataagacaaaagttcaattgttcnaaaaaaatttactgggatagctttctattacaggtattgttagattatattgtgctgataagattactttctaaaaaatttgtacttttctgtaaattaaaagaatatggagtcataaaatggcagtgttttagattagcctaaaatt

SEQ ID NO: 180193 - DNA, 1390 bp, Homo Sapiens
ccaactttgtacaaaaaagttggctagttaaaaccatgacatgtaaatgtagaagtagaataatcatagaattccctaaaatatttctgtttactaacatatattgaccaagtacatcaagcaggagagatcttccttcattctgttatagtccacatcattctaattttgctcagttgttattaagagcatattcctaaaccatacacttttgtttcaataaagttttattttgttgagatgaataaaataacaaagttataagctgcataagacaaaagttcaattgttcaaaaaaaatttactgggatagctttctattacaggtattgttagattatattgtgctgataagattactttctaaaaaatttgtacttttctgtaaattaaaagaatatggagtcataaaatggcaagtgttttaggattagcctaaaattggacattgtcattgatttcaaagaaggtatgaactagcagtcttacagcctaattcttctttggactggtccttggcagcagttccttttcagactcgataaacagaattcagatgatgtaagtcaaaacaaaactttacaaagccaagcgtattatcttttgcattaacctatttttttccatcatacatgctactagtatgtgcattagcatgatattctcatatacattgcattaaaaattaaaaggtggcagctcagggtgagctcttctgttgctcatttgttcctaaatttttaagggctttttctcagtcaatagtttgtacaaactggttagtttaacttcattacccatttcattaaagttgatgggtcgtgtgatgagatgcatttaaggccgatagtgatagatgttttttttatttcttgaacacaggctttgtctgaatgatgttcttttatctcttgaacacaagctttgaatgataactacaggttttaagtgctgttacattaataccataatgtgatgtgttagaaacaaagggatatttcaaaggtagatatttgaaaattctctagtctcaatatgtatgtgtattgaatatactctaaaaataaatgtgcaatttgctagtaggacaatgcagtgactgactagcattaggtatgtttcttttatatcctagctatgtcccactttcttctaagtgcaatcctttcatgttcacttgctgttttaccccatctactctaacttcatttggaaggcttgtctagagtatagcatgtatttttacctttgcagtgaattgcatgtgctaattgtaaccacagctatttttatgttgacataactccaaatgttatattaaatgttctattatatattagctctaatcccttaagtaaattttaagaaataaatacttgttcaaattttt

SEQ ID NO: 180194 - DNA, 1929 bp, Homo Sapiens
  misc_feature (1496)..(1538): n is a, c, g, or t
  misc_feature (1607)..(1673): n is a, c, g, or t
ttggcatgcatgtcatcttctaggccaagcatttctagcagtgatgaaaatgaatcttcacaaaacacttcgagcactgtccagtattctaccgtggtacacagtggctacagacaccaagttccgtcagtccaagtcttctcaagatccgagtctacccagcccttgttagattcagaggagcggccagaagatctacaattagtagatcatgtagatggcggtgatggtattttgcccaggcaacagtacttcaaacagaactgcagtcagcatgaatccagtccagatatttcacattttgaaaggtcaaagcaagtttcatcagtcaatgaggaagattttgttagacttaaacagcagatttcagatcatatttcacaatcctgtggatctgggcaaatgaaaatgtttcaggaagtttctgcagcagatgcttttggtccaggtactgagggacaagtagaaagatttgaaacagttggcatggaggctgcgactgatgaaggcatgcctaaaagttacttaccacagactgtacggcaaggcggctacatgcctcagtgaaggactagtagttcctgctacaacttcagcagtacctataaagtaaagctaaaatgattttatctgtgaattcagattttaaaaagtcttcactctctgaagatgatcatttgcccttaaggacaaaaatgaactgaagtttcacatgagctatttccattccagaatatctgggattctactttaagcactacataaactgactttatcctcagactagctgaatgattttgtgctgtttcaggatgtttgcactgaagaaaaacagaaagcttatctgaaatttataaaactttttgttttgctacatagaaaacagaaggtatttgaataataagcagtgatatgcttagtgagcacagctatactgattttgattagaatagtcatcagagtggcttagggacagttaatataaaagaggagcaaggtgtagaccatcatctacttctgctaaaataacttaaaaagaggtccataggccataactacatgagcccagcttttgtaatctgacaaaaaaatgaggagcagcttcgtgtatatcagtgtacacggtattccttaggtcccttccattggtagtgatgctgcgagttattactggagaaaaggaattctagagctttaacttggcagattaaaagtactcattttttattcatcaataattagtaatctcactagttttcaaaaatttgcatattattgacaacctctttgaagatgcatttcacaaactcaacagagtgccatgataagagctagggatcccccaaactatctcaagcatctaaaaaattgccatttttaaaggcttaaattgtagtagtaaaggggaaaacaggaagtagtagtaaaggggaaaaaaaaccaataaagcatctaaaaaattggcatgttaaaaggcttaaattgctaatgtgtgnnnnnnnnnnnnnnnnnnnnnnnnnnnnnnnnnnnnnnnnnnncattgacttttcttaagacttcagagtactgggtagatgaacactttatacagtatatatcttcagctnnnnnnnnnnnnnnnnnnnnnnnnnnnnnnnnnnnnnnnnnnnnnnnnnnnnnnnnnnnnnnnnnnnagtaaatgtttgaggcacactaagacaacttgggcaatatttgccaaaacaaaacagaaccccaaaaaatgtacatcttgttcttagcaaatatcattattgtagagacacttaataaagagatggtattttaatgtctgcagttctgaggtaggggtggaacttagttctacattgtgatttagaatttttaaaaccttttttcttcaaggagaagtgacccaaggcctcgagtttagtgctaaagccgctagtg

SEQ ID NO: 180195 - DNA, 1783 bp, Homo Sapiens
  misc_feature (295)..(320): n is a, c, g, or t
  misc_feature (987)..(1007): n is a, c, g, or t
  misc_feature (1405)..(1443): n is a, c, g, or t
ttggtgcctatttcagtggcacgtcatctagttttaaaaaaataaaacattttaaagacaagacagttatttttctcgtaagtggcttacctgggactaacagacatgtccaactttctctccagttcttagctcagaactttagttgtactctgcttgaggggaagaaggctcctgctctgctgtgtaggtagtcataggaattgtattcttaatgtacaggcactaattgtcatctgtgatgtacattttatgcaagtttctgctggcctggtatagagaacataagggcaannnnnnnnnnnnnnnnnnnnnnnnnntttgtaaaatctgtaaatagcacatgaccaaatgaacatattgtatagaactatttttatttgaatgtggcactaaccaccaccaccgttactacgatcaatgtttgcgcatgttcgagatgagtctcaccaacagtgtgtaagtcattaacagtcctaactgtggtgttttcctccaatgccttccaacatccatcaactaacgtgagtattttcttcctgggatttggatgctttagcctaaaggtgactgccaccaagtgagataactgtatgtcactaacttataagccgcctccatggcagatgctgctgtgctccctgatgccctgtgagcaccggggttgcctgtggcgcctgccatgtgactcgggcgcagcatcagctggctggaggtgtggctttcatagacctccacaggctgcctaggacaagatgaccaggagggcccaagccagacaaaagccggagtggggagagaggcatttcagccagaccaacaggctgaaggagctgtgcagactattgctaaaatgagggttcgcagctgccaggagtcatcccagaacattgctacttatttattaaaaagctaaaaactagtgaaagcaagtaactgaaccagtgaactctgggtatcgataggttcgtcttaaataggccactnnnnnnnnnnnnnnnnnnnnnttgcttggtcttgtccttggtggctaagacttagctctgcaggggatgttaaagcacagttagtaggacgtggctctgcacagcccaaaaaccagcttactccttagccagggtgtgaggcctcgactatattcttcaaaatgtacttaggctctggttactgggatggccagtagatgtaatgcagatggttggagtttggggagggttaggaggcatcaagcaggacaaggtgctgctgagttcagagggcccacgttcaagggatggaggtggaacctggagaccgactcttaaaagcacagtccgtggttgggtgtggtggctcatgcctgtaagtaagtctcagccctttggaggccacagcagaaggattgcttgagcccaggtactcaaannnnnnnnnnnnnnnnnnnnnnnnnnnnnnnnnnnnnnntcagccttactgtgaagcctccaaggctgctcgcaggcagctgtggctctcgggaagggaggctgctttgcccagcagggaacatttggggcagggggtaaattttgccagtttgagcatcatgaggtgtaacaagaaatgggttgaatgggccaaatgcaaggagtgcatctctgggctgcaaactgacttgagtgctgcactattgctattccgtgcaaacaaaactcagcttttcctgactcagttccttgacttagtggcctttacaaaaaaagttgagtagtgtgtggcctgctgtcgcacagcccctagttagcttcatggtttctcagcttca

SEQ ID NO: 180196 - DNA, 1464 bp, Homo Sapiens
  misc_feature (113)..(121): n is a, c, g, or t
ttggcatgttttcaaggcatatcttgtcactgtgtgtgcttctgacttgtatctttccctagaactaaatattttgaaggtccaaacattatacttcgggaaacttgattgannnnnnnnnaatctagcttttcagctgataatggttacacgtggtattatttcaagtccaaggtattatgtattctattttaactgtttcccagttttgtattttttgtattggaatgattatgaaattaatgagaaatctttagaaatcagactacaaaagagtagttcttaaatacagaagtgattgtgaaactttgtgatagcaatgtgtgtagtagcagttttgtctcaaatacatttatcatttgttactcaaaggatgttgaagtattaaaagtcattatgctgtctgtggaatcctactattagtacagaacaccctgcagtgatttttccgcccatgttagcattgaagttgtgagctctacttgcttgtctttatggccctttaattcaagtaattggtcagtatccgtatgggtcttttataccacccgctgggggctaaactaatttagctgctgctgtatacttactaacaaggaataaatgttaagctttcttctcagtattgatggatggtatctaaaagtatttttatgtttctttaacatggcttaaattttgaacttaatgtatcaagttagtatggtcatattaatacctgtgcttttcagattcttcaaacacctaaatgaaagtgataaattcaaaactgatccttttagttcctcattatatgatatgaagggattaactgtagcaggatagtcaacctgaccgtacggcatggtgctttttttcaggataaatcttcagacaaaaaagtgcaaacaaaagggaaaaggggagcaaagggaaaacaggccgaagtggctaaccaagaaactaaagaagacttacctgcggaaaacggggaaacgaagactgaggagagtccagcctctgatgaagcaggagagaaagaagccaagtctgattaataaccatataccatgtcttatcagtggtccctgtctcccttcttgtacaatccagaggaatatttttatcaactattttgtaaatgcaagttttttagtagctctagaaacatttttaagaaggagggaatcccacctcatcccattttttaagtgtaaatgcttttttttaagaggtgaaatcatttgctggttgtttattttttggtacaaccagaaaatagtgtgggatattgaattatgggaggctctgactgtctcgggtgtcagcttaacattccacagatggggggttagtttttatatcctataatacaaagcatattaaatggcatatggagtcagtcctgcatttaatgtcttgaacattttaaattacttctattaccatgttgttttttagtagaattgtttcctaaagaaaacc

SEQ ID NO: 180197 - DNA, 2011 bp, Homo Sapiens
  misc_feature (155)..(163): n is a, c, g, or t
ttggccaaacattatactttgggaaacttgattggaccttcaaaatatttagttctagggaaagatacaagtcagaagcacacacagtgacaagatatgccttgaactaaatattttgaaggtccaaacattatactttgggaaacttgattgannnnnnnnnaatctagcttttcagctgataatggttacacgtggtattatttcaagtccaagatattatgtattctattttaactgtttcccagttttgtattttttgtattggaatgattatgaaattaatgagaaatctttagaaacagactacaaaagagtagttcttaaatacagaagtgattgtgaaactttgtgatagcaatgtgtgtagtagcagttttgtctcaaatacatttatcatttgttactcaaaggatgttgaagtattaaaagtcattatgctgtctgtggaatcctactattagtacagaacaccctgcagtgatttttccgcccgtgttagcattgaagttgtgagctctacttgcttgtctttatggccctttaattcaagtaattggtcagtatccgtatgggtcttttataccacccgctgggggctaaactaatttagctgctgctgtatacttactaacaaggaataaatgttaagctttcttctcagtattgatggatggtatctaaaagtatttttatgtttctttaacatggcttaaattttgaacttaatgtatcaagttagtatggtcatattaatacctgtgcttttcagattcttcaaacacctaaatgaaagtgataaattcaaaactgatccttttagttcctcattatatgatatgaagggattaactgtagcaggatagtcaacctgaccgtacggcatggtgctttttttcaggtgattggtcttaatgtgagggttaaggtcttgtgaggacagtattgttgaagttcacaacaaatttggggatgggtgggaatacggtcgacgagactcctccggtattcaacttcatgacattgtcctgtcatgtggaactgtagggaatagtggatgatggcgacagtggtgaaatatagctcgggctttaggatttgtcatatgtctaatgaggcttgacatgcaagtactattaaaatctccttagcatacgttgttttcctgattactgggggggaccttaagttgtctcatgtaataggtgtatcaactgatgtgtgatagacattaatatgacagctgttatggatacagtctatacaaaatgagatcctttcataagcttgaagattggggtttcacgctcatgtgtgagatgtccctctctcaaaccttactatgaagtcagcaccactgggcacattacttgtctgacatgaaggggaaaaagtaaaacaaaatgtaaataaggagtaaagcatgtacttaaaatatattcttattctatcataggataaatcttcagacaaaaaagtgcaaacaaaagggaaaaggggagcaaagggaaaacaggccgaagtggctaaccaagaaactaaagaagacttacctgcggaaaacggggaaacgaagactgaggagagtccagcctctgatgaagcaggagagaaagaagccaagtctgattaataaccgtataccatgtcttatcagtggtccctgtctcccttcttgtacaatccagaggaatatttttatcaactattttgtaaatgcaagttttttagtagctctagaaacatttttaagaaggagggaatcccacctcatcccattttttaagtgtaaatgcttttttttaagaggtgaaatcatttgctggttgtttattttttggtacaaccagaaaatagtgtgggatattgaattatgggaggctctgactgtctcgggtgtcagcttaacattccacagatggggggttagtttttatatccctataatacaaagcatattaaatggcaatatggaagtcagtcctgcatttaatgtccttgaacattttaa

SEQ ID NO: 180198 - DNA, 1613 bp, Homo Sapiens
  misc_feature (533)..(795): n is a, c, g, or t
  misc_feature (1035)..(1047): n is a, c, g, or t
  misc_feature (1068)..(1090): n is a, c, g, or t
ttggcttttggaattaatgtccttttactgagacctgatggcttttatgtattttagggtaaatttctgaagttttattttcttgttttaaaattgtttaaatgtgtttggtaactattggaaaattttctcttcttaattatgttctgtgtattgtattgatcctgaattgtatagttaatagtgacttttcaagatggggcatgctcaagatcgaacagataataaaagatatgcacatagaatactaattgtagcttttttttcttctggaacatttcagttcttcaccctctagcttcttccaaatatcagtattcccacttgcatagaagtgcagaattgaagagttgggtgttacataaataggctaagtgtttggatgacttgttcaaggtgacaaaattttaattccagttttctgactcctagtacaccacacacacctttaaaaaagaaattttttaaattgtaattcgagtctccctaatttgaaatctgaaatactaagttagatttaaatcgtgtatgcnnnnnnnnnnnnnnnnnnnnnnnnnnnnnnnnnnnnnnnnnnnnnnnnnnnnnnnnnnnnnnnnnnnnnnnnnnnnnnnnnnnnnnnnnnnnnnnnnnnnnnnnnnnnnnnnnnnnnnnnnnnnnnnnnnnnnnnnnnnnnnnnnnnnnnnnnnnnnnnnnnnnnnnnnnnnnnnnnnnnnnnnnnnnnnnnnnnnnnnnnnnnnnnnnnnnnnnnnnnnnnnnnnnnnnnnnnnnnnnnnnnnnnnnnnnnnnnnnnnnnnnacaaaatatcatatatgcattaatttacttgcatggtgaagtccaacatgtcaaaaatgaaatgatgagctgtattgtccctatgtctacccagtctactactttgtgttttaaggttcataagactttttgagtgctatgtgtcagtagtctatttacagagttcatccaaagaatttattgaattaaaggatggttctaatggaaatctattgtgttttgttattacatgcacacctnnnnnnnnnnnnntctcatttagacatggagaannnnnnnnnnnnnnnnnnnnnnngcctgttaactgagttacttcactcagaagaagcaaaacgtgttttaaatcacaatctttaaggtctttttatctttagatcagtttttcagactgaagtgcttctcccttctgtctttaaaaaagcatgttcctcttcataattggtgttgtattggttttgtttctggatgcctctattttatgttttttattgtgtttacaaatctgaggtcctctatttaagctaacttattgttttcttccttagatatctgcagcgattatatttggaaatactgtatatctgaacacttaaatgtgtgtgagtgcaagcagttttacctttagctcttgttttcctgtttagataacaaatctcactttccttgtgtgcttgcactataggtttgggactgacaatagctgactaacatgtcctgagctgtgagagggcatagcaagaagccttcatgcggacctagatgtgaaggctggtggaggctgtgtaatgaccattggagaaatgctacgatcttttctc

SEQ ID NO: 180199 - DNA, 1220 bp, Homo Sapiens
  misc_feature (287)..(300): n is a, c, g, or t
  misc_feature (321)..(344): n is a, c, g, or t
actttgtacaaaaaagttggcacagtaagaccctttctcaaaacaaaacaaaatatcatatatgcattaatttacttgcatggtgaagtccaacatgtcaaaaatgaaatgatgagctgtattgtccctatgtctacccagtctactactttgtgttttaaggttcataagactttttgagtgctatgtgtcagtagtctatttacagagttcatccaaagaatttattgaattaaaggatggttctaatggaaatctattgtgttttgttattacatgcacacctnnnnnnnnnnnnnntctcatttagacatggagaannnnnnnnnnnnnnnnnnnnnnnngcctgttaactgagttacttcactcagaagaagcaaaacgtgttttaaatcacaatctttaaggtctttttatctttagatcagtttttcagactgaagtgcttctcccttctgtctttaaaaaagcatgttcctcttcataattggtgttgtattggttttgtttctggatgcctctattttatgttttttattgtgtttacaaatctgaggtcctctatttaagctaacttattgttttcttccttagatatctgcagcgattatatttggaaatactgtatatctgaacacttaaatgtgtgtgagtgcaagcagttttacctttagctcttgttttcctgtttagataacaaatctcactttccttgtgtgcttgcactataggtttgggactgacaatagctgactaacatgtcctgagctgtgagagggcatagcaagaaggccttcatgcggtaatgacccttttcagagacaatggtcatcatggattatgcgtttccaattatttgttcatttatttattttctacataactaaattagaaacctcactgcttcatggcagttggtttgctattgcttccagttttattagggcttcattttatattagagctgttaaaagataacctttagacaggaattatctaaagtagatcatatgtagctaggttatggtgcaaggtatatgatgtgtgcaaatatgtccacagaaataaatacatagtaagtatgtggaatgtaaatttaagtcaatcgttccgcatagtttagaatgtaaggggctttttcatattgttaactgagtgagatcagttccctttatgcctgtgagctgcagggtttgttctcacttgcatgcacacactaa

SEQ ID NO: 180200 - DNA, 1081 bp, Homo Sapiens
  misc_feature (394)..(545): n is a, c, g, or t
  misc_feature (547)..(558): n is a, c, g, or t
  misc_feature (1002)..(1018): n is a, c, g, or t
gcctggcctcttagctcattttcaatgttggttttatcttgtctaagttagtagccttggaaatagtcttattttcaccatgtgtttaatgatgaatatatatttcctttgtgtgagataattcttttgtgatttgaaggtaatttttaaaaaagattcataatcctgtattgtctccagtttttaaaaaaataattgttttaaaaaaacataacatataatttaccttcttaaatccatttaaatgtacatgtcagggcgaggcaatgtggtggatcccttctgtaaaaccaggattttgagaggccgggacaggaggtttgcttgagcccaaaagattgagaccaacctgggtaaaatatggagacaccctctctacagatatttttttctnnnnnnnnnnnnnnnnnnnnnnnnnnnnnnnnnnnnnnnnnnnnnnnnnnnnnnnnnnnnnnnnnnnnnnnnnnnnnnnnnnnnnnnnnnnnnnnnnnnnnnnnnnnnnnnnnnnnnnnnnnnnnnnnnnnnnnnnnnnnnnnnnnnnnnnntnnnnnnnnnnnngtgtatatttcaggcatgttaagtatattcacattgttatgcaaaagactcctagaaattttacatcttgcaaaactaaaactcaatacccatgaaataacaactgctaattttaccctctctccagcccttgacagacaaaatttccactttctatttttatgattttgactacttaaggtatctcatataagtggaatcgtacagtatccataattttgttactggattattcaagtgacataatattctcaatgtttatcttaaaatgtgacaagattgttttatttaaggtggaataatattccattttatgtatatgttatattttttgacgtatttttaaatcaagagacatctgggttgcttcagccttttggcttttttgaatactggtataataaagatagattttcaaatatgtcttccaggtcctgtgttgcnnnnnnnnnnnnnnnnngagatggagtctcgctctgtcacccacgctagagtgcagtggtgtggtctcgtctaactgcaa

SEQ ID NO: 180201 - DNA, 1310 bp, Homo Sapiens
  misc_feature (261)..(281): n is a, c, g, or t
  misc_feature (321)..(341): n is a, c, g, or t
  misc_feature (607)..(639): n is a, c, g, or t
  misc_feature (699)..(809): n is a, c, g, or t
  misc_feature (1154)..(1172): n is a, c, g, or t
ttggcattttttcaacaatttcaacaatgacacaaaaattcacatggaaatggggaagatggtctgttttgacagaaactgacaggaatcaatcaaaacaatcgaattttgaattgagtaaagtgcaatttcattggatagctaaatatctttgtaagatagagattgttgaaaattctatttttgtttttctagtcctttcaccccaggactctaaattattggggtaaaaaacagccttgcaagaaaaaggggagctannnnnnnnnnnnnnnnnnnnnattgttaaacttgtatccctttaaaaactgaaggaaattnnnnnnnnnnnnnnnnnnnnncaaatctaatggtgcttttaccacaatatgttaactacattaaatgctaattaattattttctgttatcaaagcacatgactaaaatgaaatcatggtatctgttaattttataagctagaagtcactataatggattacgccaattctaaaaaattttacacctatctggcatcataggatttatcagttatcagacacctcattgtaccagagattgtccagaagttttaaagacctttgcatccctgaactgggctatgggannnnnnnnnnnnnnnnnnnnnnnnnnnnnnnnngatgaaaccaatactgacacaaatgctggtgcccattcagatcaagggtacttgttaggnnnnnnnnnnnnnnnnnnnnnnnnnnnnnnnnnnnnnnnnnnnnnnnnnnnnnnnnnnnnnnnnnnnnnnnnnnnnnnnnnnnnnnnnnnnnnnnnnnnnnnnnnnnnnnngtgcaagtgatttttctaccaaacagcgaagcacccctttgcttcccatgcgacttcaagaaggtttcctatactatacatatatatacgttctggttggcaagccctgctgatcagagaaagtctctgcatgttctagtgttagtaactaatttttatatagttaatgtaggataaagtagagtgcattaagacacaatattgtaatccctactctaggcacttgcctttaaactatgtttttcagcccttcagaagggttctactactgtcctatacaatcaagtaactgaaattcttgggaagacactttgctcctcatctttctccccgaaacaatgttgnnnnnnnnnnnnnnnnnnnccttaatttgcacgaaaacaaaaattccatatcaatgtgccttgccctgggatagcgattatttgtggaattgttgcacatgcttctctattgaaaggggtttttctctagtcaagcatttggagacactttttgtaa

SEQ ID NO: 180202 - DNA, 1593 bp, Homo Sapiens
  misc_feature (194)..(223): n is a, c, g, or t
  misc_feature (1075)..(1091): n is a, c, g, or t
  misc_feature (1225)..(1252): n is a, c, g, or t
tagtagtataaattatgagctgaatcttttcacacccccagagagtcaagtatttagaagggaacaaataagagaaaaggagagctggaaggcctttgtccttttctatggtgtggacagagaagccaaaaatgttccaagcaaataaaatgaggtttagtaggtcacagcaatctagtgaaggcatgtatttnnnnnnnnnnnnnnnnnnnnnnnnnnnnnngcattcaggtgcctgctttggaagctgaaggcagtatttttcactgaggacacacaacttttacaatacaaacagttacattctatgttttaaaatagcagcaattttaatgtaatatttattctctagttgcagtctcatcaaatctgagtaaaaaataccatatttaatttatgacaatctccaattgaatggtacaagtataataacactttaacatatcaaaaatattgagtatcaatgtaaactctgtccaggtggcaactcttgcttgataataagaaatataaaacttattattgtaacaaaataacgtaaagtgaatatttcataattccatctaaaacttaaagtgtacacactaaagagaaaagtagcaattcatttctaaaattggatcccatttcatagtaaaaatattaaaatacttattacttctttaaaccaataagaaaacatgtctgcccaagttaaagtgccaatacattaaatatcaacttatccctatacatattattcttatgaatttaaattttcccatgaatcaatagtttgaaccaatgattgtagcattctaaatattttaaaattgtactatacctataaataacttatattgaatgattaatttaaaatataaaaattccaagacccttggtaacagtaaggagacaaattcgttgaatagtacgtccaatgaatgcaatactaaatagtacaaacacatactagatgtatgactatcaagtggcggacagcaataaaaacaaaatagtagctctagacagtactaaagaacaaaaccaatcatgattctagtatcagactgattatgattggtatcaaacagtnnnnnnnnnnnnnnnnnttaaagtgagtagtaatttcaataatgcaggcacagtgggatgtaggtgtggtaggtcaatgcttgcatgcgattagaggtctttaacgtgcaaattaacgacattaggagcctaaaatgcattttaacgctannnnnnnnnnnnnnnnnnnnnnnnnnnnctacctcagctcaccagcattttcatgttttaacactattaaagtcatgtcaagtttttccacttagagaaactgcataatatatacactttactgcatatatgcaataaactggaagtctctgcagaattatgagaaatatactccagaaatgctcaacttatttcttaatcttacttggcagttacttttctgccaggtggagaaatattatgtcttttattgaggtctatcttgtttaggtgagacagtttatggcttagggaagaagctctgaaacagtttaaagcaaattttttaaagctgtgtatataaagttgctaatgatgaggctgtgccaa

SEQ ID NO: 180203 - DNA, 923 bp, Homo Sapiens
ttgggttaagatttcccacagtcttgtttctctgcatttgtttctttgtaaaaaaaattactctgtttttgagtggaattcattctgttgctttcttaccacttctgcaaatttttatcttagccacatataatccccctagtttgttgtcatctaaacttaatgaacatgttctctattccataagccaggtgattggtgaaaacactaaacaaccctgagcccagggccaacccctacggaacaccactactttacccaggttgatattgacttattcatactagctgcatgaatataaccctatagcaaattgtacaatcatcttgtgtgacctagatttccaaaacttatttatgagtatattttctcatacacagaagccttgctgtatcttttttacataatagacttcttacactttctacaccgtgtcacagggattggtttagtcacacttccattaccaagtttatatgcttttgttgtacattttctgtaattttacacatttttgcaaggcttttctttgatatcttaaataattgagaggtggctatattttgaaatgagattcttttgaaattgtagagaattttttattgtatttatatgataactgggctcatatccaaagtctaaacatcagataattttatgtgtgtaagttcctatctcaatttttaatttttttgctagcatcatggtactgaattttgtatactttcacagtcttaagaatgaatgctgagatttagctctagcttactagaatgcctactctctccattatgtcttacagacgccacaggtcatcatctggatcatcccattctggttcccgttcaagttcaaaaaagaaataatgtattaaaatttacatcttaaaaaaatccagtacagtgcatgaagcatatttttaa

SEQ ID NO: 180204 - DNA, 1135 bp, Homo Sapiens
  misc_feature (144)..(176): n is a, c, g, or t
  misc_feature (359)..(636): n is a, c, g, or t
  misc_feature (640)..(649): n is a, c, g, or t
  misc_feature (920)..(949): n is a, c, g, or t
ttggctaatacccaccataaagcctttgtggggaaatgataatctaaatatctggatacttctaactttactttgccagttaaggtttgttaagaaaattaaacatctactatcactaacatttcatataagaaatgaacaagnnnnnnnnnnnnnnnnnnnnnnnnnnnnnnnnnaagtgctggaattacaggcacgggccaccatgctcagcctcatttttatactattttagactttatgtttaaaaaaattttaagatgctattaagtcttgaaacaaacatttttcattcattttctaactcctgggtaatttgctaggattataaactacttaaatttttttgctttagtttnnnnnnnnnnnnnnnnnnnnnnnnnnnnnnnnnnnnnnnnnnnnnnnnnnnnnnnnnnnnnnnnnnnnnnnnnnnnnnnnnnnnnnnnnnnnnnnnnnnnnnnnnnnnnnnnnnnnnnnnnnnnnnnnnnnnnnnnnnnnnnnnnnnnnnnnnnnnnnnnnnnnnnnnnnnnnnnnnnnnnnnnnnnnnnnnnnnnnnnnnnnnnnnnnnnnnnnnnnnnnnnnnnnnnnnnnnnnnnnnnnnnnnnnnnnnnnnnnnnnnnnnnnnnnnnnnnnnnntggnnnnnnnnnntttttgctttaattctaattaactcaaagttttcccttattgtaaaaaagtatgcatgtttattacaggaaatttagaaaatatgtaaacataatgaattgaagtttaacacagtcccaccacccagaaataaccaccgttactatgttggtaggatctattttctttctccagccagaaaacaccagtgtttttatatgttttattttctgttctttaaataatccttatttcttaacagggaggcctcgtgggtctggtagattatccnnnnnnnnnnnnnnnnnnnnnnnnnnnnnnagataaggaagatacgttaccattgtcaaagaaagcaaaatttgattcataataatggcaacggcctagatcagtacctgttgaaaaaaactgggttctccacccctcccccatacaaaatccacaaaaaagcgcagtggtctcttgtgaatgactgacacagatcagcctcttacacttgacttc

SEQ ID NO: 180205 - DNA, 2399 bp, Homo Sapiens
  misc_feature (598)..(641): n is a, c, g, or t
  misc_feature (680)..(736): n is a, c, g, or t
  misc_feature (921)..(930): n is a, c, g, or t
  misc_feature (1005)..(1038): n is a, c, g, or t
  misc_feature (1600)..(1615): n is a, c, g, or t
  misc_feature (1754)..(1763): n is a, c, g, or t
ttgtacaaaaaagttggggttgtcatttccttaaaaagccgtgggttcggggtttattgattgaattccgccggcgcgggagcctctgcagagagagagcgcgagagatggagatgggcagacggattcatttagagctgcggaacaggacgccctctgatgtgaaagaacttgtcctggacaacagtcggtcgaatgaaggcaaactcgaaggcctcacagatgaatttgaagaactggaattcttaagtacaatcaacgtaggcctcacctcaatcgcaaacttaccaaagttaaacaaacttaagaagcttgaactaagcgataacagagtctcagggggcctggaagtattggcagaattgtgtccgaacctcacgcatctaaatttaagtggcaacaaaattaaagacctcagcacaatagagccactgaaaaagttagaaaacctcaagagcttagaccttttcaattgcgaggtaaccaacctgaacgactaccgagaaaatgtgttcaagctcctcccgcaactcacatatctcgacggctatgaccgggacgacaaggaggcccctgactcggatgctgagggctacgnnnnnnnnnnnnnnnnnnnnnnnnnnnnnnnnnnnnnnnnnnnntatgatgaagatgctcaggtagtggaagacgaggaggannnnnnnnnnnnnnnnnnnnnnnnnnnnnnnnnnnnnnnnnnnnnnnnnnnnnnnnntgaagaaggttataacgatggagaggtagatgacgaggaagatgaagaagagcttggtgaagaagaaaggggtcagaagcgaaaacgagaacctgaagatgagggagaagatgatgactaagtggaataacctattttgaaaaattcctattgtgatttgactgtttttacccatatcccctctnnnnnnnnnntccaatcctgccccctgaaacttatttttttctgattgtaacgttgctgtgggaacgagaggggaagagtgtacnnnnnnnnnnnnnnnnnnnnnnnnnnnnnnnnnntggaataaaatactatttttactgccactctttatttttttcccctactttttctttgtgtccggtttttgtccctgtaaatgcgatagctaagtacacactaagtgagcatttgttcctgactctcaaagaggatggtttggagttctcttacgtttcctggtatttcccaagtctcttgggttggttggaaggctgtggctggtctcagtttggttactcaatgcccaggaggggctgagcaccagccatatcttttgctttggttcacatgatgatacctgcttttctcaggcctgctagaggcatccaacgccctggtttgtaaatagcaacctaaaggcgtattttggcactggtctggggacattccccatctctcatcccttttcccccttcacagatggtggtgggcttcgctctacaaagaggactctgatgttactcttgagcttatgagccagagagctgaaaaccgcaggcttgttgtgttaagttacaaggaaaatggatttggtaattaaaattagaagaaacacaccttcaaacttcaacttctttnnnnnnnnnnnnnnnnctgtcctatcttgttctgtaaaatattagaacgctttgttttacaaaaaatgatgagagaattcttccacatgtacttctgtgcttagaacatttttacggacctaagcgctggagacgttgctgcatgtcggctgggnnnnnnnnnncatacacccgagcacggaaaaactaacgcaaaattgtattttcttacctagtggaaatctgaaatgactgcaaattcctagtgaatgtacaggtttgctttcgtgtccctcttctggttgctttagaagtgacgtgtaatttctgaacccatgtttcatctgtataaaagaacatctgcaccagtttttctcctgcccctcagaagagccaaactttgagttttatgtctgtttgtcttggataaatttcaataaatctttttatacaatttttttggggatggcttctttgagtccaacaggccattgatcttttcaagatgcattccagatgaactgctaggtgagggggaagcttcatttttgttacctgatagaatagcttttcttatgagatatatataatgtgatactatgtttggatatttttggtcttaaagcaagactcagtggtgtatcttcattaaaagcttcctttaaaaaagttacagagttactaaaaaaacaagtacccaaacaatcaagttgggccaaccttggaaccttgttttgaatatctttcattgttttgtttgtcgtattgtaaaaagaatgtatggttgaaaactcaggaatgtttataaaacaaattatttc

SEQ ID NO: 180206 - DNA, 1069 bp, Homo Sapiens
aattagatgaggcaatgctttactataaagaacaactttgtacaaaaaagttggcaaacttgaaagatgtgacagtgcttttaccaccacctccaacttttctgtacataaagatgattatactagtgtgaaaccctagaaataatagaaaatttgacaaatcctttatatggttgcaagacttgattgtaggtaagataattcatactggcaaaactcctacaagtgtgaagaatgtgggaaaactttttaatcagtgcatacaccttatttcacaggaaagctagtatccttgagaaaaattgcacaattataaaaaatatggaaaacccattaatgcctactcacatcttacccaacagaaggtggttcacagttaatgaaagcatttaaagtgcaattatgctcaagaaatctttcagaaaatagaagcctttaaagtgaagaagagtattctgaagacaaccattacacatataaagggggttgtattacctttacttgcatcacagatttcattgcacacattttgtactagaggaaaaccctgaagcagttgctccagctttgttcaacaacagggaatttatgttagagaagaatcctgcaaatgtagtgaatttggaaacaaattttttttcaaaaactacagcttagaaaacaccagagagttgatactaaaatatatgtttgcagaaacagtaaatataaaaaatatttaattcaaaatgaattccatgtaaatatcagagaatttacagtagaataaggcactgatacttcagacattacactaaaacagtgttgagtataaaaaagaatccacaacaaaaattgttagataaattatatatagctttaaaaggttttttgaagcattgtaattacattgaaagtatacttgctttcctgagaaaaaatttttgaaaagtgaataaggtaataaagctttcaaatttatgctgttactttatttctattcacatgtgaaagcatgtgatcaattgatgctgcatcagagatattacagattctttattgggcattccttataaccttttctattaaa

SEQ ID NO: 180207 - DNA, 2188 bp, Homo Sapiens
  misc_feature (254)..(263): n is a, c, g, or t
  misc_feature (894)..(902): n is a, c, g, or t
  misc_feature (1544)..(1784): n is a, c, g, or t
  misc_feature (1799)..(1818): n is a, c, g, or t
  misc_feature (1858)..(1871): n is a, c, g, or t
gttagtggcataataatgcttcattaaacgcagaatagtcttaacatggtataaaaaatgaaattaagttcacacatcatctaacaatttttaaatatactgcattcgattacataaaagtacaattagtaaaataatattctcatttaatacttttaactgtaatttttctcactataatgtagaaaactattactctgaacccccactttttaaaaatctttattaataaagtaattcattataatttttgnnnnnnnnnngttttaaaatggtctgccaacatgttaatgtaggttaggccatccaaaagacaaagcaaaacatcaacattaagtcataggctaggattatacaaatgagaacccccaccttatacattacttaatataagttaactacaaagagcctctccacttacatttttatcatgcatcttacattttaatgtccttattcttttatagaaaaggtcataatacccaataaaaaagaatctgtaatatccctgatgcagcaacaattgatcacatgctttcacatgtgaccacaataggaataaaataacagcgtaaagaaatttgaaagttgtattacatcattattcactgttcaaaaattttttcaagaaacaagtacactttcaatgaaattacaatgcttcagaaaatctcccttttaaagttatatacaaaaacagctttagttgtggattcatttttatactcaatactctgatttagtgtaatgtctgaagtgtcagtgccttattctagtgtaaattctcatatttacgtaaaatcaattttgaattaaatatttttttcatatttacatctgcaaaaatatactttagtataaactctctgatgttttctaagctatagattttgnnnnnnnnngtctttccaaattcattatatttgcaggactcttctccaatataaattccatgatgttgaataaagctggagcaactgcttcaggttttcctctagtacacaatgtgtgcaacaagatctgtgatacaagtaaaggtactacaacccccccttatatttgtaatagctgatttcagaataaatattcttctttaaaggcttatattttctgaaagattttttgacagtaattgcacttttattgcttttattaactatgaaccttctgttgagatgtgagtgggcgttaatggcatttccatattctttatatctgtacgatttttctcaaggataaaagctttcctgtgaaataaggtgtaagcactcaaaagttttgccacattcttcacacttgtaggagttttggcagcattaattctcttacctacaatcaagtgtggcaaccatataaacgctttgtctcatttcatacatttccagggtttcacattagtataatttatttttatgtatacaaaagttggaggtggtggtaaaagcactgttgcatctttcaggtttgtagagttcctcttcagcatgaattatcgccatgtctcttaagaattgagaacttgtggctgggcgtcgtggctcatnnnnnnnnnnnnnnnnnnnnnnnnnnnnnnnnnnnnnnnnnnnnnnnnnnnnnnnnnnnnnnnnnnnnnnnnnnnnnnnnnnnnnnnnnnnnnnnnnnnnnnnnnnnnnnnnnnnnnnnnnnnnnnnnnnnnnnnnnnnnnnnnnnnnnnnnnnnnnnnnnnnnnnnnnnnnnnnnnnnnnnnnnnnnnnnnnnnnnnnnnnnnnnnnnnnnnnnnnnnnnnnnnnnnnnnnnnnnnnnnncaagagtccgtttcnnnnnnnnnnnnnnnnnnnngaaatcataaatggatgaaatgtttcaacaggtgccctcnnnnnnnnnnnnnntccaaatagccaataagcacatcgaaaagtactcgaaatcattacacatcaggtaaatgcacactgtctgctggatgactataatcagaaagagctggacaggtgtgtgaaacaactggaactttcatgcattgttttggggattattcgtggaatcgatattttttgaaaactgcaatacctaccaaaactaaatttaaagtctaccctatgattcagtaaattcattcctgagcatatagcacataccaagataaataagcccatacatctatcaaaagaacaattaaaagtcaaaccacacattatgttgccaa

SEQ ID NO: 180208 - DNA, 1700 bp, Homo Sapiens
  misc_feature (452)..(467): n is a, c, g, or t
  misc_feature (917)..(917): n is a, c, g, or t
aagtttgtcaacaggagaagaggaatttgagcgattacactctttcactgaattgtagatggactaaagttcttggcagttgatttaaaagcattaaagttgccaacgccaaatgtggactcatgagggaaagaagttccaactttattttcttttgtttggcttttccattgtgtaggttttgtaggtggagcagcaggtttagggactaaacctttataaacacttggaccagttccattcttaactggctgtgacggaagatttcctactactgggaatccagatagctgtaagtcttttgtattacctttcttaatgaccagcatccttggagctctagatttaggattcggaggatattctgcataaataaagcatgaccaagagtcactcacaatttcaagttttagtatagaataaaaccaccaaaagaacagtatattccaaannnnnnnnnnnnnnnnaactaacagccgcctcctgggtaaaataactaaactaaaaaagtacaaactatattccaattgaacaagtaaagctaaaacattatcccacagaatataggaagaattgggcaatgtcaagtaatacagataaattctgctacacagtggctcagaatgttaaaaccaagacaaattatattttaacatgccttgcattaactataaaaaattgcaaacatcaacctaatgactcttaagatttagaatataaaatacatttctattttcccttccccatttgaagagaattaaaatttcaattttttcattctttttactccacttacaaagttattaccaataagcaagaaattacattccttttatttctaaatacttcagttatgactgagaattctatttcacaatatcaattcattcatgtatttattgaccatttatctacanttcaaagcattatatgaatgcagaccaaccaactcaatctgatttctgaagataaatactacgaataattgctaaaggcagacttttctcaagactactgcagttgccaaaaatacctattattcctataatttaatcaatgtgtgtgtgtaatcaaacagacattgcagtgaagtctttctttcttcccttacaaaaacttttaaaagcatcagtttcacagctggaaagtttagaataaattaagttctccacattaaataagatcatgtgaattagtgagctgggtagatatctgtaatgattccctcctcaaaaactaaatcaagcttcctcatggatcatctcaaaacccaaaactaaatatggactcctagggaaacccggagggactctccagttcatgggaggattcaagctctccaaaagataaagccggtatggtgcttcacctattgaaatgctaaaggataaaaagaacaagggcttaaaataatctgagaaaaggttcatctttccaaaaattaaacacatgttgacttactagggtaaagattgaaacttcctgacggtctaaaaaaagcccaatataaagggctaaaaaagacaacttctggcacacaaaaacacacaaagtattactaccaaagtatagcttttctgatattacacaacaaagttaacaaaacaaaaatgaataaagatctcaaacaggctgcgcgtgatggcttaagcctgtaatccctgcactttgggagatgaggcgggcagaccatgagccaa

SEQ ID NO: 180209 - DNA, 1449 bp, Homo Sapiens
  misc_feature (1035)..(1049): n is a, c, g, or t
ctttgtacaaaaaagttggggaagtttcaatctttaccctagtaagtcaacatgtgtttaatttttggaaagatgaaccttttctcagattattttaagcccttgttctttttatcctttagcatttcaataggtgaagcaccataccggctttatcttttggagagcttgaatcctcccatgaactggagagtccctccgggtttccctaggagtccatatttagttttgggttttgagatgatccatgaggaagcttgatttagtttttgaggagggaatcattacagatatctacccagctcactaattcacatgatcttatttaatgtggagaacttaatttattctaaactttccagctgtgaaactgatgcttttaaaagtttttgtaagggaagaaagaaagacttcactgcaatgtctgtctgattacacacacacattgattaaattataggaataataggtatttttggcaactgcagtagtcttgagaaaagtctgcctttagcaattattcgtagtatttatcttcagaaatcaggattgagttggttggctgcattcatataatgctttgaatgtagataaatggtcaataaatacatgaatgaattgatattgtgaaatagaattctcagtcataactgaagtatttagaaataaaaggaatgtaatttcttgcttattggtaataactttgtaagtggagtaaaaagaatgaaaaaattgaaattttaattctcttcaaatggggaagggaaaatagaaatgtattttatattctaaatcttaagagtcattaggttgatgtttgcaattttttatagttaatgcaaggcatgttaaaatataatttgtcttggttttaacattctgagccactgtgtagcagaatttatctgtattacttgacattgcccaattcttcctatattctgtgggataatgttttagctttacttgttcaattggaatatagtttgtacttttttagtttagttattttacccaggaggcagctgttagttnnnnnnnnnnnnnnntttggaatatactgttcttttggtggttttattctatactaaaacttgaaattgtgagtgactcttggtcatgctttatttatgcagaatatcctccgaatcctaaatctagagctccaaggatgctggtcattaagaaaggtaatacaaaagacttacagctatctggattcccagtagtaggaaatcttccgtcacagccagttaagaatggaactggtccaagtgtttataaaggtttagtccctaaacctgctgctccacctacaaaacctacacaatggaaaagccaaacaaaagaaaataaagttggaacttctttccctcatgagtccacatttggcgttggcaactttaatgcttttaaatcaactgccaagaactttagtccatctacaaa

SEQ ID NO: 180210 - DNA, 1109 bp, Homo Sapiens
ttggcctttgcctctcccagattctggtggatgcccacgttgcttgtttcaagctctggaggctggaagtccatgatcgaggtggcagcaaggctggtttctcctgaggcctctctcagcatgtagaccgtcttctccatgtcttcacacggtcatccatctgagtgtgtgtgtgtcctgatgtcttcttattggacaccagtcagattggattagccccctgcccctcagtgacagttacctctgcaaaggccctgtctccaaataagggcacatcctaagataccgggggataagactccagcatgtggatttggaaggacattattcagcccatggcaggggcccagtctcatcttggatttggggtgggagtgctcagcagacactggggtttcagaactgcagggtttctggtagcgtggtgctggcacagggttacaggcatgggtctggctctgaagtgtttgcctttggcatcccccaagtccctgaggggctctctgaggcccgctgtgactgcactgggtgacctgagcctgcccgttgaagctgtgctcagggattctgatgcctggcatccctagtccccccgagtcagcatcaaaggaggggactctccctgtgtcctgagtgctgtgggctctggcctagtggcccgcagagccaggcagtggtgaaacggcccccactgctcatcatgcagcccggggccagtgctgacttagtgcctcttccagaggggaccttttccctgtccttgggcctgctgtgtggggtgcatgaggcctcaggtgccactcacagactccggcctcctcaggacccagccccactcccgcgggaggtctgctgtgattctccatgccccctgacgccccaaagcctggccctcccgtgctccagcttctgcccccgagtttgtcagtttctgccggtgcctcccgtacccccaccaccattcacgcgcctctgccagcctggcctttccctgtccatttcctcctggccttgctgccaggtgggcctcctgggccagtttggctcggccttgcccatgatctgcggggcttagctcccacaccctccagatacataaacaagcattc

SEQ ID NO: 180211 - DNA, 771 bp, Homo Sapiens
  misc_feature (59)..(67): n is a, c, g, or t
ctcagaaatgctaagtgtacttatttgttgaagaaacttgttacatattactaacatcnnnnnnnnnatgagaaatacttttcccataaccaaaaaatttagtgagcagaatggccttgcttgaggtttttgcaaatctctcgggtgtctggcttagtgggaggcagctgggccctcatacctgcctccgcacttcagctgtttgacataaacccagcttcgtgtgagtgaaagggaagggcctggggaccctcagaggttctcggaccacactttgagaactcctcgtctggaagacaggcctggggatgccatgtggggtgagggcttacgggcttggtgtcgctttgtggagaaccgctggtgtctgaagcgggtgtcagccccactgcaccttggtgcttctgggctgtcctgatgccgaggcccacttcccagccatgctgactttgcctctttcccctcccagcagaaaaatggctacaaacttcctagcacatgagaagatctggttcgacaagttcaaatatgacgacgcagaaaggagattctacgagcagatgaacgggcctgtggcaggtgcctcccgccaggaaaacggcgccagcgtgatcctccgtgacattgcgagagccagagagaacatccagaaatccctggctggactctggaggctggaagtccatgatcgaagtggcaacaaggctggtttctcctgaggcctctctcagcatgttgacccgtcttctccatgtcttcacacggtcatcc

SEQ ID NO: 180212 - DNA, 1189 bp, Homo Sapiens
  misc_feature (827)..(836): n is a, c, g, or t
  misc_feature (895)..(913): n is a, c, g, or t
  misc_feature (917)..(996): n is a, c, g, or t
  misc_feature (1090)..(1110): n is a, c, g, or t
tccacttggcgcatgggagatacgtgctgggtctgtggggccgtggcccggtggcccaggcgagctcttctccagcacgttcagccgggcctccagcttggagatggcctgctgcagctcctgtaccacgccacgcagactctggttctccacttccagactggcaatccggacgacgagctcaccgtggtctccgctggtgccgctggaggccccggggcctgagcttccagccagggatttctggatgttctctctggctctcgcaatgtcacggaggatcacgctggcgccgttctcctggcgggaggcacctgccacaggcccgttcatctgctcgtagaatctcctttctgcgtcgtcatatttgaacttgtcgaaccagatcttctcatgtgctaggaagtttgtagccatttttctgctgggaggggaaagaggcaaagtcagcatggctgggaagtgggcctcggcatcaggacagcccagaagcaccaaggtgcagtggggctgacacccgcttcagacaccagcggttctccacaaagcgacaccaagcccgtaagccctcaccccacatggcatccccaggcctgtcttccagacgaggagttctcaaagtgtggtccgagaacctctgagggtccccaggcccttccctttcactcacacgaagctgggtttatgtcaaacagctgaagtgcggaggcaggtatgagggcccagctgcctcccactaagccagacacccgagagatttgcaaaaacctcaagcaaggccattctgctcactaaattttttggttatgggaaaagtatttctcatnnnnnnnnnngatgttagtaatatgtaacaagtttcttcaacaaataagtacacttagcatttctgagnnnnnnnnnnnnnnnnnnngtgnnnnnnnnnnnnnnnnnnnnnnnnnnnnnnnnnnnnnnnnnnnnnnnnnnnnnnnnnnnnnnnnnnnnnnnnnnnnnnnngtggtggctcatgcctgtaatccaaagcaggaggtcccccgacgctgggaattcaagaccagctgggcaacacagtgagacgcctgtttctatnnnnnnnnnnnnnnnnnnnnntggccaggtatggtggcacacacctattgtcccagctactcagaaggctgagatgggaagattacttgaactcagccaa

SEQ ID NO: 180213 - DNA, 966 bp, Homo Sapiens
  misc_feature (531)..(620): n is a, c, g, or t
tgaaccaccgcgcctgtcccattgttgtgtaattttaataattagttttttaagtacttgattttatgggcacatttttgtgggatgattggagttaatcaaataaagcttgtcatgtgtgtagtttggtaagataacttctttaaattcatgttttctctgccttgaggtagtgagggaaagatcttaatcagtattttggtaattaactgattgaattcaagcaaatgagacatcatgaacttcagtggttattgatatttcagggtatatacctgaaatgcctagaggatacagatttctcatttcattctttggtctttcatttctctatatacagaaatgaaatgacacttctgggaggcagtagaagcaggaagtcaatgaattgagtagagggtcccattccctcaggctgtcattgatcagtgacaatttataaaaacaaactgcaaagtctgtggcaagtggctgcctgcttcctagaaggagcccatgaaggttaaactctgtggtcggtatttgcaagcnnnnnnnnnnnnnnnnnnnnnnnnnnnnnnnnnnnnnnnnnnnnnnnnnnnnnnnnnnnnnnnnnnnnnnnnnnnnnnnnnnnnnnnnnnagcaaaaggtcctctcctgagtctttcccagatacccagcagtgcagaggctagctgtggaaggttgcagtgggacaggaatgtattgtatgccttgccttacttgtcaccattgagatttccagagaaaatgggcataacgtctcttaacaacaacagcagaaagcaaaatacattaacttaaggttgacaacaaaagattatcaagtaccatgttttccaacccaaccagttattcgtgggtaataataaaataaaggtggggaaatgttataatttttaaggaaactgtgtacttttaaaaatcttctttatgaatatccaatgtttactgtaatcctgctcc

SEQ ID NO: 180214 - DNA, 967 bp, Homo Sapiens
  misc_feature (252)..(260): n is a, c, g, or t
ttggaaaagaagtagaaagcctttaaattctacttaatgttaggtgacaaaaaaatcttgttctcgttataaatataatttctaaacaacacaattttaaaagcgcaagaataagatttctttttgcaatctatatcctttaaaggtaatttaccttcattcacatttagatcttctttcactgatgttctgtagaatcttaactttaacctttttgccagtgcctcagcttcctcactgcacatcaatttnnnnnnnnntgctttacaaaggtgccttctgatagcttgttttttaaatcacttttaattacatttactgaatacagtttggcagggaagggagggaaggtggatcagatctttcagaaaattttcatatttctttttaaaagagcttgatataatttcccagttaagtaaaatcagttgaaagctatgttttcatttagtgcctgtactgattttagttttcactactcttgagaaataaacaccaactgttataccgtatgtgtacatagaagacttttctataaagtcattaatctctagccctaaactaagaaaatatcacttttctttgtataatattttaattaattttatctcttcctgagaacacctgtagttaattacactctgaaaatcttacagtgaattacttattttattcttactggccatgaaacaattttgctgcctaaagccaaagtcagtatattaatgactacatctccaaattgtactcctaattttagttttatcaggattcctggttgtggactcctgatattaatgtcattagagactgttgtaaccatgccccataggctcccgctatttctctggcttctggtcttcagccccttgtgtagtctcctcccacactgtaatcaaggttggtctgggtgtccactaatatgcaatacaagggacagtataagactgggtcataagaaacccaa

SEQ ID NO: 180215 - DNA, 1131 bp, Homo Sapiens
ttggctatgatttgcttattctggacattttctagaaatggaataatacaatatgtggtcatttatgtctgacttcttcactaagcataatgttttcaaggctcattaatgttgtaatatatgtcagtgctttatttctctttgtggctgaataataattccattgtatgggtagaccatgtttaatttatccatttatcagttgatatccagttgggttttttctattttttggttattacttgttttatatgcttggttttaatgcaagatttgttttcaacagcgatttctaactaaataaaagtctgaatactactggcttagagaaaccttttcattttaggatttgaagatgttggctgttgattgcctgaatctctttccatgaggaacatgaatgcacccctctgtaaaatagcattggacaccctgggggacctgaccccatgtccacatccccttctgtggtccccgactcctagccacacacgatgcacaccagcctcaaggaaatctacaattcttggcactgtgccaccgcttccggggcaccttctgcctagagtgccttttctctcttctcttcctgtccagatctggctatttcaccaagaaagcttttgaccagaaatccagggctcctattgtacagccctgtctctctacaaaaccagaaggaacttcatgccacatagagccctgcaggtcccacagcctgtcccaggtccctggatcaggagggagggctcttgaacgcgtaaaccccaggggcatggcaaaatcctttccttctccttttgcagcaacaaaaggcccccaagccctccaaatgtctgctttttagcattgctattttggttctattgttgttctccctcctaaggaggagacggtaactaactgcattctgggtctgcccagagtatgatatatcttcctccgctgggccctgggcagagaagctgggctgcattgatttcctgggtgaaacggaagtgcaattcacaggcatctttcaaagtggagaaaggtcctgggtgtgggctggagctggacctgtctctcctggctcccctcagcagggctgtggatgatgcacctagtcctgtttgcctgacagaaaaatca

SEQ ID NO: 180216 - DNA, 911 bp, Homo Sapiens
ttgagtgcactttagcatatgaattaagaaacattgatatagtgatcctcatagtaactaaaaagtaaagtagaggttccttttcaaagactttcctccctaattaggaataaatggtaacttctcttataagcaaaatttattcaaagacctgtgctaacattcttaaatatctgctagccgtcataaagaaatcaacgtactttatgttcttagctcccacaatttagcctaaatatttgccttggcatgcttatactggtccaagcaagcattaggtcatagcctgttcctcttccttatttaaaagtgttttcacctttctcagcattccacaagttacttcctccttcctttgttctcatctacctttgcttcttttaaaaggttctaaattggctgggattacagacgtgagccaccgcgcctggccactaaagataaaatttaacttatttgatataaaatcatacaaaaaaattgacaaatatacaatggtatttagctttcttaaggccctaagatggccaggtaagtcacaaggcccctcatcctgaaggccacagtgagcaagggtggtgaaggccacaagaaggccaagacattaagaaggggcagggctgcagcctcccctgggtggcgctgaacaagaatggagcaggaggtgtcaccatgacgcctaaggccccagaatatgcagcaaaaatcctatacttaatttatcttccactttcacttccctcggacctaaaagtcttttagcacaataccacccctagaatttccagtacaccagcaccagcctgaaaaccacgtcctcatcaaaagctagaaagaaaaaactcaaaccagcctgggaagaaccctattttacgctgttaacccctgagactgccgtccacacagctgag

SEQ ID NO: 180217 - DNA, 1519 bp, Homo Sapiens
  misc_feature (485)..(495): n is a, c, g, or t
  misc_feature (1123)..(1162): n is a, c, g, or t
taaagcacctttcccccaacacaatcactttgcatttggcccatttcaactactaccataacggtaaattaggaaagaaaataatcttaccaggctgaccaagcatattagtgaatctaatatcagaactaatagttggatacaattccatccaagatgacatagaatgcagttgtccatgttcatgtaattcatctaaaaatatctagggagaaaaattgtatttggaaagtcatctcgagtacatgagaaataagagtctaacatgaaaacacacaaaaactttgacatagttaaaactcttctaccaatgttatcccaaacctgtttgggcacaaagaatatttgctatttgggcaaagtaacaactgcctctaggcaaaaaaatattttgtcctttagagaaaataacttttgaaactgcacattatcttcctaaggttctatttcctaccctttaagatagaacctaatttttagctttnnnnnnnnnnnggtaaaagttaacttaaattactggatatctacctcaaatgatgaggctaaagaatgtatatgcatgtttccttaaatatatactttctgtctttaaaaatagtgcctaatgtgttctaggtatttttatttacttttaaaaaacaaggggccttaagaggaggatgtataattttcccaaagtagtttggagacctaggattcaaacccatatctagtttcaatttccacacttcctgcttccaacccaatcctcagggagtttaatcctatacaccaggggatcccaacccccagccacggaaccggaaccaagccacacagcaagaagtgagtggtggaacaagcattaccgccccagctccacctcctgtcagatcagtggcggcatcagattctcataggactgcaaaccgtattgtgaactgagcatgccaggaatctaggttgtgtggtccttatgagaatctaatgcctgatgataccaactccccaccccaccccaccaagaaaaactgtcttccactaaaccggtccctggtgccaaaaaggttggggaccgctgctatacacaaatgtgcctaaaagaaactgtaaccctatattctgttcccacaattcctatacnnnnnnnnnnnnnnnnnnnnnnnnnnnnnnnnnnnnnnnntctcggtacatgaaatgtagctagtctgagttgtgatgtgctgttaagtacaaaatacacaatgatcttgaagatttaataccacaaatattagcaatttttaaaaatattgatgtgttaaaataatatctggttatattgggttaaattactaaaataaataggaaattaaaatcgcatttgtggcattcacatttttattggatagagctgtcccaaagtaacatcaggcacttacaactgcactcactcctcttcaaacaagactaaatatgtccatactcccttacaactcggaaattcttttctcaaaccctgcctgtatctacccttctgtcaactacccttaccccaact

SEQ ID NO: 180218 - DNA, 1588 bp, Homo Sapiens
  misc_feature (339)..(361): n is a, c, g, or t
  misc_feature (1408)..(1441): n is a, c, g, or t
ttggctggatttctggctgagtggatagctctggaaccccttgggtaattcctcttcaacgcccagtcactcaccaagatgggccatgagctcatccgatgtgatcacttccttctgcggggggagcttcacctggaggcagaaggggtgatcacgtgtgtgctttcctccaaagagcactgaaggaagaacccatggaaaggcaagggggagctccagtagtagggtggggtaggaaaaaaggcttgcaactggcacaagggaatgaatgtgaaatcttgcaaggcatgtgcatttgctagggagtaggagatacaggggtaggacagatcttcctcnnnnnnnnnnnnnnnnnnnnnnnaggaacatcttatctcatttgctcaagctggagaaatagggagaacaatctgaaaagttttgactagtttgaggacatcaggatgatcaaggaagtaagtcagggaagagtactccctgatattttttgcacccctaactgcatgttctcttaccttccactgaagaaagaggatgttcatgatggcaaggagagggcaagggccgttagtgctctgggtgatgatgggtgtctgttctcctttccaagggatccacttgacacaataaaaatctggctcaggctgtcgggtcctgggggactgaggaagctcctggggcatggagcatgcccttattgtctctacttcaggcagtgtcccaagggttggccccggtggagctgagctagcttcaggcagaggggactcaaggttgtccccacactggctaggcagcaaagcttggtctgctggctcccgttctctagcctccccatcagcatctcttgcatctgtgtcctgagggtgctcatctgggcctgccagaacctcatggttttcagggatgactgcttctgcagtcccggccttaccaggggctggatcctcaggctgatggtattccatggtcaaaagggactcggctgaggggcactgaaggtgtttactaacctcagggacttgcctaagccaggcttgggatgcaaaagagtgaccttaaagaagggggtgctgttccaagattgagaaggagggttcagccgtggcaatgagatgggggagataggtgcaatgaagggggctgccagtgccagctgccttccagctgtcaacgcctgagcttatacaggtttacacagctttataagcgacggtccaggctgggttgtggccacttccggactcacgcccagtactgggggcactggaggagggtgaaggcaggcagggacacagccaaggtgctccaggtcgctcagagagtcttcaggattcctgagtcgccgagtctatggcatgcgctccgggccctgactacaagctggttttcaaaggaagtttgtggnnnnnnnnnnnnnnnnnnnnnnnnnnnnnnnnnnatcaggacgaagaaaaattaggcaaggacaagctccctggaggaggaggggcctgcccagcgctggtggatttccatcaggactttctgacccggtcagcagctttgtgatcagcagagagggagcgccaacttttttgtacaaagt

SEQ ID NO: 180219 - DNA, 1400 bp, Homo Sapiens
  misc_feature (287)..(309): n is a, c, g, or t
  misc_feature (409)..(421): n is a, c, g, or t
  misc_feature (433)..(489): n is a, c, g, or t
  misc_feature (551)..(641): n is a, c, g, or t
  misc_feature (909)..(963): n is a, c, g, or t
ttggctgctttgcttatttgttgcatgggcagctggtatttaatttgagggataagtcccataaaataattcatattggctcatttagtagcaaacatagtaatttgggttttaaacattgaataatttctaccttgttgaaataactgtggttccatttataagataatattaagaatgagtagagtaggctggtccgagtgcagtggtatttacaacctattgatcacaaccagttacagattgcttagtttcttcttcattccctctgtttcactgaactagcnnnnnnnnnnnnnnnnnnnnnnngaataggtaaagttataaaaacttggaaaatatgtagtagttcttcacagaaacagactggtggctgggattacaggcatgagccaccgcgcccggcccnnnnnnnnnnnnnaaacagagtctnnnnnnnnnnnnnnnnnnnnnnnnnnnnnnnnnnnnnnnnnnnnnnnnnnnnnnnnntgggttcaagcgattctcctatctcaacctcccaagtgtgccaccacacctgccgaatgttnnnnnnnnnnnnnnnnnnnnnnnnnnnnnnnnnnnnnnnnnnnnnnnnnnnnnnnnnnnnnnnnnnnnnnnnnnnnnnnnnnnnnnnnnnnaatgctggtattacaggcatgagccaccgtgcccggcctaaatatttaataaaataatggacgatgggtgccttctactgagctcccggtaattgtgagtgagtagaggacttgccctggggacattcagtgacctgctgggtgttgctgagctgtgaggaagttcaggtctggctgcagtggtgaggctgtgactcaatcaatcactgctgatgctcccaggacctgcaccagcttagtcctaggggcaaggattttaactgtccannnnnnnnnnnnnnnnnnnnnnnnnnnnnnnnnnnnnnnnnnnnnnnnnnnnnnnggagctgtgtaatgcccgcaacagtgcctgctgcatagaggggttgctgccagctgcctctccctccttgtctcttacctgcctgctgcctgggtcaggatgaagaggggcccttgtgttgcccccaccctggctgcctgctaagggcccatgtgatctgcctggcagaggagtttcttcaggaagaaccagggcagcttctgcccctagagggccaatgcccttgctgtgagaagtcactgctttggggagacctgatctggctgtgccagatggacactgagaaagaagtagaagactcagaattagaagaggcacactggacagacctgctggagacctgatcctcagtgtccttaccccctcctacctcttttctgtgccacctgctgtgggtccagcaggtttttacttgagtacaataaaaagtctgagtc

SEQ ID NO: 180220 - DNA, 1000 bp, Homo Sapiens
  misc_feature (45)..(58): n is a, c, g, or t
  misc_feature (74)..(93): n is a, c, g, or t
ttggcacaggcatgtgccactgcaccaggctaattaaaaaaaaannnnnnnnnnnnnnggagactcccatcttnnnnnnnnnnnnnnnnnnnncgggaggaaagtaatggaatgtgccatatggaagcttctcagaagctcaagccctcctctctgggaaaatagaaaccttgttgacttgcacattttccagtcattttttcttaattgagaatttttttaatattggagagacagtcttgctgtgttacacagactgatgttgaactcctggcctaagcagtccacctgcttcagcctcccaaaatcctgagaatacaggcatgcgccaccatgcccaaccttcagtcatcttagataccatgtaccttgggctttataagtataaaggttttgttccttacagatctcagtagtactgttaagctggtgtgcttttcaaacagtaatcaggaaagaacaacttgtgttagtattttctggcgtgcttagtgggttggtagtggtgatataggctggtagctgagcaacccagcctttctggccaaaaagtgttatgtaataatattgtttgagcaaagctgctaaatataagatcattgcattttctttcgtaggacttgattattcttagaaatgcacttgacctgcttttgccaaagcttgccagagtgatctctcggcttgccgactttgctaaggaacgagccagtctacccacattaggtttcacacatttccagcctgcacagctgaccacagttgggaaacgttgctgtctttggattcaggatctttgcatggatctccagaacttgaagcgtgtccgagatgacctgcgcttccggggagtaaagggtaccactggcactcggccagtttcctgcagctctttgagggagatgaccataaatattctgaaagtgacctgcagacacagaaactcaatggtggagcctatgagacaaggctgcctttgaggatgataggagagattgac

SEQ ID NO: 180221 - DNA, 1242 bp, Homo Sapiens
ttgggtcaatataaccttctgaactcttctgaaagttaccaaacactactctgacccaaagatccaggcattaattcagaagccaagaaaagggtttttgcctgtgagcagatccaggaactgtacctgggtgttgctgactgcagtttatcctgactgcctttctagactgtggagtcattgcatttctcttgtgctcgttctgccttccctttctaattgataacagcccctacatgctattgagaaatatgcagtattcatcttcatgattatctggaagatagaaaattcccttactttctcactgcctccattcctgatttctttgtgttgatgggtatccactgctcttttaaaattcaaacacatagtccctggaaggaaaaagaatattggaaaagggagatatggaaccaaaggaagaacagccattggcccttgatgttttaaagtgcctgagccaatctcatttactctccttcctgttatgctacagatgagggaagtggaggttggggtggggatggggcagggattgggaggggagagaactgagattttcaagggaaggggagaaggtgtgtgcaggggaaggacatgacaggttgcaggagaaactgatcaagtttaagtttcctcccaatcttgtctgggggagtcctgtctggtggtttcattttgattcacttgtttgaagaggcctttttaattcttggtgcaattggaccccttagagcaccatcaatgctacctggatccttccttaaaagctcagcttccttttcaggccatggatgccagaaaataaaaatccaccttccacctaactagccaagtaagtcatccctgtctatttctggcccagatattacagttcactgcaggactttcttcaataccagctcccaagggtatgaatgaggacagattgggaagcaacaagcttaaagataatctttagccatttaactttcttctttcttgtgttttagaaattaaagcttaccatcggcaggatcccaaattcagagacattccatgccgcatcctgtatgtgtccctcaaaatgccaaagtgctgcaccttctcagctggataagcctagactgaacagagctcccaagaggagtccggccattaaaaagagccagcagaaaggagccagggagtaacgcaccccacacccatggcagcagaaaccaggatggagctgggactgtccagctctgccccctgctg

SEQ ID NO: 180222 - DNA, 1271 bp, Homo Sapiens
  misc_feature (296)..(305): n is a, c, g, or t
ttgggttttaacttcttatgctctagttttttcaaagagacatcccatgagtctgtggatagcagcaaagaggaaccccagacccttccagagacccaggatggggacctccacctgcaagaacaaggctcaggaattgattggtgtctttcccctgccgatgtggaagcacagaccacaaatgaccaaaaggggtcggcctcactaactgttgtgcaattgtctatattaatcaagtaaagctctaatttctaaaacttgatgggccctaagagcaaggcagcctccctcccacnnnnnnnnnnaacttagaatttaaattttaaagctgttcctaaaaatctccaagtcagccaaaaacttgaccatcttctccctgtcattgatgttgtggccaaggagaggggatgatagatctcaagtaaagcagttcctggggcggggggtggcattttcagctatttttaaaaattcccccttggctactctttcaggtcccaggacttgggatccacaccaatctgagtagcatgtcactcagttttcccatgagtgtaattatggacatgcaagttgcatgagacttagttatagaccaggagggggttatttaggctttaagtgataccaagagcatttggtacgattgatgtaattttaactcttttccatgccttcttctatggaatcatttccagcagagaaatatgcagactggcctgatgtggacagttacataaccaatttagtccatttttccctctgttcccatagcctaccatccgctaccacatcccaagaggatttttcagtaacttaaatttatattattctccaaatgttttgaacaacctttacctggacaatgtcatctcagaaatagaggccaaaagtctactcagaaagtacagttgagagccaaggtcagttgcctgatgtgacttttacaaatgtcttgttcatagtaatatccccgatgaaagccaagtggagaaactgaacgttttcctttctcctcctgatgtcatcaactatcttgctctcacagaagccacaggacggatatgtgtgtctcagtgggaaggccccccacgtttgggatgcatattttgccacggagatcatcttctggcagtgaatgacctgaaaccccagagcctggaggaggtctccctgtttcttaccggtccatccagaagagaattaaagcttaccatcggcaggatcccaaatcagagacatccatgctgcatcctgtatgtgtccctcaa

SEQ ID NO: 180223 - DNA, 872 bp, Homo Sapiens
ttggcctgaacttactctttcaaccacaacattaattgaaaattttttgcatctcctatgtgccagccactgtcctaggagctgggctaataaaagcactgccctctaagagcttacatttcagacagggagacacgcaggcatgcaggtactactacactgtaataaatcacaacagaggcagaaaacaagatgctcggagacttaacaggaaggtaaggtctccttgtttcgcccatgtctctgactctccccaaccactatctctagacttcgagaactcccattcattctctgttattcagcacatatatatatctcttgggcatagttcaaggtccctggctttatgttgctccagtgtgtttatacagctaccataacacttactgcttgtaaggctaggatcatggttttttgtgcctctgtagtcaaatcaaaagcatagctcctagcacatcataggtgccgaaagaatcaagaggccaatgtgacatgccattttccttatgcagggcccaaatctcatgcccctgtatagatattttgtagggtttggtgacaggagtactggtggtggttatatactgtacggtatcactagagcatgggattttttttccataggttattggggtacaggtggtattcggttacaagagtaagttctttagtggtgctttgtgagattttggtgcacccatcaccagagcagtatacactgcaccctatttgtagtattttatcttttgcccccctctcatccttccccccaagtccccaaagtccatcgtgtcattcttatgtctttgagtcctcatagcttagctcccacatatcagtgagatatacgatgcttggttttccattcc

SEQ ID NO: 180224 - DNA, 2258 bp, Homo Sapiens
  misc_feature (141)..(169): n is a, c, g, or t
  misc_feature (386)..(500): n is a, c, g, or t
ttggctccctgccccctcttcctgcttggtattgactcacctgccccactctcctcctgctttaatcccagtgggaacctggggcctggcttccaggcactgccgtgccaggctttcccacacctctgtgcgtagtatgannnnnnnnnnnnnnnnnnnnnnnnnnnnnatgcggggatgcgtgtgtttgtgtcaggtgtggctctgtgccgtgcctgtagatgtggtgggtgcgaggtccatctgggggagtgacaaacagcgcacaagctctctgcctgagtgtgtgtgatggtgatgaatgtgaatgtgtcattttggggagtggccgctggacagggcgggcagtatgagttagtgagagagtgtgtggtgtgcttgtgccnnnnnnnnnnnnnnnnnnnnnnnnnnnnnnnnnnnnnnnnnnnnnnnnnnnnnnnnnnnnnnnnnnnnnnnnnnnnnnnnnnnnnnnnnnnnnnnnnnnnnnnnnnnnnnnnnnntgagccctgcaccccatgtccagctgtattgtgttttgaggaagcagcagacagaagatgcatatgctgcatggaggtccaaggtgacccagcccctcatttgcttggcaaacatttgcttagtccggcgcgtagccaggctctgggtcaggtgctgggggcataaaggcagaaagggccccgtttttgcccttgaggagctcaccgacaggctatggggacaaagaaccacaggaaagaagcaggaactggcatggattggagcccagggctggtagggctgaggcggccatggtggctgggagggggcagggcagcttcggaagcagaattgaaccaaggggacagtaccaccagggacggtgtggtgcggggagctttccagaagagggagcagctcgttcaaagccagcagcatgtgagggccgggtgtcttctgatggtccctggttgctctgtgagcctggggaatgaagaggcataacgtgggggctgaagacaacatgagtccggagaggcaggtgggccagtacctggctcaccccaaggagtgtgactgcccgagcacgtggccctgggagggaacacattgctagcatgcaacagcagcaggaataatggctgctgcttctgcggtgcgtgctgaccaggactgtgctaagtgctttagatttttctttcatccttgcagcgactccgtgcagttagaggagcctgagctgtttccaggggagggggctcacccgaggtctcagggatttgaacctgccagactggctcagctcttcacctgtgtgctgtgttgctcaaggccctgaccgtgtccttggagtctggaaaaagcatgggaaggagggcaagggagagtttgggggctgggggaaggagcttgtgaagtaggcttcagggcagggagatggggccttacgatgatctcgttctctctctgtcccctttacagccctggcaggtgcccggcccgccccccaccctccggctcccagggcctgctggaggagatgctggcagccagcagctccaaggcggtggctcggagggagtcagcggcctcgggccttgggggcctgttggaggaggaaggagccggggcaggtgctgcccaagaggaggtgctggagcctggcagggactctccaccctcctggaggccgcagcctgatggtgaggccagccagacagaagacgtggatggcacctggggctcttcagcagccaggtggagcgatcaggggccagcacagacttctcggcgaccctcccaaggccctcctgccagatcccccagtcaggacttctccttcattgaggacaccgagatcctcgacagtgccatgtatcggagccgtgccaacttggggcgcaagcgtgggcaccgggccccggtcattcggcctgggggtaccttgggcctgtcggaggcagcagactcggatgcacacctgttccaggactctacagagccacgggcatctcgggtgccatcttcagatgaagaggtagtggaggaacctcagagccgccggacacggatgtcgttgggcaccaaggggctgaaagtcaacctctttcctggcctgagcccctcagccctgaaggccaagctgcgcccccggaatcgctcagctgaggagggagagctggctgagagcaagtcgagccagaaggagtccgcggtccagcgttcgaaatcctgcaaggtcccaggactgggaagcccctcacgttacctcccaagcc

SEQ ID NO: 180225 - DNA, 1472 bp, Homo Sapiens
acaaaaaagttggctccaccctcctcggagggtggagagtccctgccaggctccaccctcctggaggccgcagcctgatggtgaggccagccagacagaagacgtggatggcacctggggctcttcagcagccaggtggagcgatcaggggccagcacagacttctcggcgaccctcccaaggccctcctgccagatcccccagtcaggacttctccttcattgaggacaccgagatcctcgacagtgccatgtatcggagccgtgccaacttggggcgcaagcgtgggcaccgggccccggtcattcggcctgggggtaccttgggcctgtcggaggcagcagactcggatgcacacctgttccaggactctacagagccacgggcatctcgggtgccatcttcagatgaagaggtagtggaggaacctcatagccgccggacacggatgtcgttgggcaccaaggggctgaaagtcaacctctttcctggcctgagcccctcagccctgaaggtaccatctgatcattaagcaaacatgtccagccatctggccaggtggccaccttgcatgctgtctttcttctcttcatccatcaattcattcccctgtccccctctcccattcctcctctcactctcctctccatcgagggctccagaagatccctttgtgccccgccgggccctatgctgtgtgccaaatgggatggaaagaagaacaagatgtgttcttattctggaacctcaggggcagtgggagacatgatgcccataattagcctggatgagagaagaagtttaggtgtccctgaggagaggcacagataagggctgggcctgttcagagagagaggagttatttcctaacagcagagtggagggggatgggaagggagggtggattggagaaggcctcttgtatgtatttgatcttagccggcggcaggcacaggagttggctcctggagctgggatggtggggtggcattgcaggcagagggaacaggggtgggaagtcaccactggctttgtcccacccagtttgtctgaattcaatcctgccatatgtttttgaggacagaaaggtgtgcaaggcatagctcagttctgcgggaagtgcatctctaagtgacttcccatcctttggggtgaaaggactgcagaggggtctctgcttgattctggggactgcacactcttgagataaggtcttaccccctgagagtcctactgcctgtccctctactatctatctgcttctggacttgcttctcaggccaagctgcgcccccggaatcgctcagctgaggagggagagctggctgagagcaagtcgagccagaagagtccgcggtccagcgttcgaaatcctgcaaagtcccacgactgggaaagcccctcacgttacctcccaagccagagaaatcctcagggtatgtgaccctaagctctgggcatccgctgacctc

SEQ ID NO: 180226 - DNA, 1076 bp, Homo Sapiens
actttgtacaaaaaagttgggaagtgtccgtccgcgtctctgccaggagaggttaaacacagccggcgggcagagtctgagctccgggggtaggtcgtgcaggttttctgctgggagtgtggaggaaggccgcggttggttgaagtggctggaggtaacaggaaagtgttggaggaatcggttgctctcggggattgcaagccagagagttacccacctccttttaagaaatgggtttattgcaaatagataacgtggttagttcaggcaaggcatgcacttggaatgctttccgtcagcaagaggttcaccttgctgaggtgcaggtgcagggcagggtgcggtgacaggctggtgatcccaggtagaggacaggagtgacaggtgtggttgcccaggtgtggatgtttggtggaggtggagttctgagctcaggtgagcagctgcaaatgcctgttaagcctgaacgtgggctgggtccttcagatgggtggctggtctcaagtcgcaggggcagcccaggcactgtcctgggccttcccttctggctcctgacgcctgtgcttgtttccaggagcatcagatccatgctgctgctgactcggagccccacagcttggcacaggctctctcagctcaagcctccggtcctccctgggaccctgggaggccaggccctgcatctgaggtcctggcttttgtcaaggcagggccctgcagagacaggtgggcagggccagccccagggccctgggcttcgaacccggctgctgatcacaggcctgttcggggctggactcggtggggcctggctggccctgagggctgagaaggagaggctgcagcagcaaaagcgaacagaagccctgcgccaggcagctgtgggccagggcgacttccacctgctggatcacagaggccgggctcgctgcaaggctgacttccggggccagtgggtgctgatgtactttggcttcactcactgccctgacatctgcccagacgagctggagaagctggtgctgtggtgcggcagctggaagcagagcctggtttgcctccagtgcagcctgtct

SEQ ID NO: 180227 - DNA, 1496 bp, Homo Sapiens
  misc_feature (169)..(204): n is a, c, g, or t
ttgggggaaattgaaattaaatattttcctgatatactattattaaaaattttatatatttagaaaacatctttgtgcactttgtacattttgtattaaaaaatacaataaggaataataggaccattttgattcctacccatgaggagtttgtaatctagtatgtagnnnnnnnnnnnnnnnnnnnnnnnnnnnnnnnnnnnngagttccagagtactcttacattatttataatcattaaattatcgctacaactcagccatacttgaaaatccctcgtcagcagtgataaacctgggcctatttagggataaaaggtattgtgaacaggctatgttcagtatggactctctgcccctgggcatgggggtgcactggagaaccatttgtcagaaaaattatccatcagatttttccccgctaactttggggatcagggtgtaagagtcagattacagtggtagaaagttggtgtttaaatagtgttgggatttgtgaacaaatattttctatatgggtggccctgtacattaaaaggtattatagacaactggatagagtggtacctgtgactaaatttatcttccaactgtcaagactgttttatatcacatcatttaattctgtgtcgtttagttatatgacatttaattatatgtcatttgttgcctgcttctccttcaaatagtcttcaagttaaacttcatttgttctttgtgcccatagtactgttgattgcattccatgtaaactctacatctttatttttaaattatagaagacagagccgtggtatggtactatgccaggtttgtggttaaaacagaattgatgattttggctacttaatttctgaaacaggatcgtgtgggtggacgagttgccacatttcgcaaaggaaactatgtagctgatcttggagccatggtggtaacaggtcttggagggaatcctatggctgtggtcagcaaacaagtaaatatggaactggccaagatcaagcaaaaatgcccactttatgaagccaacggacaagctgttcctaaagagaaagatgaaatggtagagcaagagtttaaccggttgctagaagctacatcttaccttagtcatcaactagacttcaatgtcctcaataataagcctgtgtcccttggccaggcattggaagttgtcattcagttacaagagaagcatgtcaaagatgagcagattgaacattggaagaagatagtgaaaactcaggaagaattgaaagaacttcttaataagatggtaaatttgaaagagaaaattaaagaactccatcagcaatacaaagaagcatctgaagtaaagccacccagagatattactgccgagttcttagtgaaaagcaaacacagggatctgaccgccctatgcaaggaatatgatgaattagctgaaacacaaggaaagctagaagaaaaacttcaggagttggaagcgaatcccccaagtgatgtatatctct

SEQ ID NO: 180228 - DNA, 1074 bp, Homo Sapiens
tttgtacaaaaaagttggctacattcagaatggaggagtccagagtataagtcaaataacatttttccttattcaggttttctccctaaaaaacaaaaccatttttaattgcacttccattttgtaatggctcataggattgctgtaaggtctcaattactaggggcttccagggcatttctgagaaataaccctgggtccttgtctagacccttatgccagaccccactccaaagagcggtaagaattccttagtgtcatagcccagacctgctgagctgcgaggcttaagtgtccctgatcaccaaatgtcctgtgcttcagggtagcgaggctccctcccagaaggtagttatacatgagggaaggacgctttacaactgggtatctaaactgatgagaacacatgttaagcatcactttaggactgagcctaggtagagttttattgtctcatttctacttgtcaattctgggaaagtgcctactgataagggagactcttcaatagaatgatgaatagtaattgggggggtcagcctttaaaaaggtcaacagcaatttaagtacttagcaatttaagtacaagaataaaggtatatgtgcagcctgccaattttctctttttcccctaaaatagccgattccacgactcttctttgcgggagaacatacgatccgtaactacccagccacagtgcatggtgctctgctgagtgggctgcgagaagcgggaagaattgcagaccagtttttgggggccatgtatacgctgcctcgccaggccacaccaggtgttcctgcacagcagtccccaagcatgtgagacagatgcattctaagggaagaggcctatgtgcctgtttctgccatgtaaggaaggctcttctagcaatactagatcccactgagaaaatccaccctggcatctgggctcctgatcagctgatggagctcctgatttgacaaaggagcttgcctcctttgaatgacctagaagcacaggaggaactttgtccattagtttggaattgtgttcttcgtaaagactgaggcaagcaagtgctgtgaaat

SEQ ID NO: 180229 - DNA, 1485 bp, Homo Sapiens
  misc_feature (142)..(161): n is a, c, g, or t
  misc_feature (892)..(922): n is a, c, g, or t
  misc_feature (1175)..(1187): n is a, c, g, or t
  misc_feature (1267)..(1275): n is a, c, g, or t
  misc_feature (1314)..(1330): n is a, c, g, or t
gctttagaatgagaattatgcctgaaatctggcaaaccgaaaaatgttgctattgcaacaaagtggcaaaagctaaaagtaaggatttatcttcaaacataagctgagatagggaatagaagcaaaacgattggctactagnnnnnnnnnnnnnnnnnnnnattaggtaaatttgaaaaataaaaatgacttggcacttttaaaggtaacttcaccaaagaccgaagagccagtaaccagtagctccaacttgtctcagcatcacatcttctgtgctctttatttttgccggaccagtttgcggttaggagaatgtgccttttttgtacctttgcgtttaggttttataattttaattgatgtatggacacacacaaacaaaaaagcatgaaggaagatttggatccaagcagtgccacactttacatcatcactacaagtgttcaagtgtaaagaaaaccaattttgaaactatgaaattcctgattcataaatacacagttatttctactttagtacatataagataattcactgttattaaagctcttttattaaggcaattgcatatgttttaaaagcaatggtaaattaagttgtcttccaaaactgtgtacttgtctggtcagctgtgtatgatcagttatctacctcagagtctattttcttttgtgctgggacaggttgctggccctccctgtttccacagaccaaatcctcctagctcaggagctagggctaagcagttatttctttcaagtattttttagttcttaaattttatgcttgtatttgatgatagatgtcagtgacatttcatagtttcaaaagtccttgctgctctgagaagtgtagattctagtgaaaattacatagtcataagagaaatgtnnnnnnnnnnnnnnnnnnnnnnnnnnnnnnnaaagttgtggtattattggttctatgctccctggaatattactgctttgtgaaagtccagactgaacgcagcaccctctgtgtacctagtacagttataaacctgggtctctcactacttgatatttttgcattagttaagacagaaatttgatagctcggttagaggggaggggaaatctgctgctagaaatgtctgaactaagtgccatactcgtctgggtaagatttgggaaacataacctctgtacatnnnnnnnnnnnnntcagttaaacatcacatagtagacagccattaaattataaaaaaattaatttatgaagaaagaccttttgtacagattgnnnnnnnnngattttcatagagatatctatatgatcaagagagttaannnnnnnnnnnnnnnnnactagtgccacagacttgccagtggtaacttatttgtccggttcaagataactctgtagttttctttcctaggacttgttgttaaacgccaaagacatttttgaactgtacatttgatcagattgttagcttttctgttttatttcttttgagga

SEQ ID NO: 180230 - DNA, 1206 bp, Homo Sapiens
  misc_feature (176)..(193): n is a, c, g, or t
  misc_feature (924)..(954): n is a, c, g, or t
ttgggttttgtccttcctttatactaatgatagtgctttagaatgagaattatgcctgaaatctggcaaaccgaaaaatgttgctattgcaacaaagtggcaaaagctaaaagtaaggatttatcttcaaacataagctgagataacgaatagaagcaaaacgattggctactagnnnnnnnnnnnnnnnnnnattaggtaaatttgaaaaataaaaatgacttggcacttttaaaggtaacttcaccaaagaccgaagagccagtaaccagtagctccaacttgtctcagcatcacatcttctgtgctctttatttttgccggaccagtttgcggttaggagaatgtgccttttttgtacctttgcatttaggttttataattttaattgatgtatggacacacacaaacaaaaaagcatgaaggaagatttggatccaagcagtgccacactttacatcatcactacaagtgttcaagtgtaaagaaaaccaattttgaaactatgaaattcctgattcataaatacacagttatttctactttagtacatataagataattcactgttattaaagctcttttattaaggcaattgcatatgttttaaaagcaatggtaaattaagttgtcttccaaaactgtgtacttgtctggtcagctgtgtatgatcagttatctacctcagagtctattttcttttgtgctgggacaggttgctggccctccctgtttccacagaccaaatcctcctagctcaggagctagggctaagcagttatttctttcaagtattttttagttcttaaattttatgcttgtatttgatgatagatgtcagtgacatttcatagtttcaaaagtccttgctgctctgagaagtgtagattctagtgaaaattacatagtcataagagaaatgtnnnnnnnnnnnnnnnnnnnnnnnnnnnnnnnaaagttgtggtattattggttctatgctccctggaatattactgctttgtgaaagtccagactgaacgcagcaccctctgtgtacctagtacagttataaacctgggtctctcactacttgatatttttgcattagttaagacagaaatttgatagctcggttagaggggaggggaaatctgctgctagaaatgtctgaactaagtgccatactcgtctgggtaagatttgggaaacataacctctgtacat

SEQ ID NO: 180231 - DNA, 1206 bp, Homo Sapiens; identical to SEQ ID NO: 180230
  misc_feature (176)..(193): n is a, c, g, or t
  misc_feature (924)..(954): n is a, c, g, or t

SEQ ID NO: 180232 - DNA, 1194 bp, Homo Sapiens
  misc_feature (157)..(174): n is a, c, g, or t
  misc_feature (904)..(935): n is a, c, g, or t
ttggctaatgatagtgctttagaatgagaattatgcctgaaatctggcaaaccgaaaaatgttgctattgcaacaaagtggcaaaagctaaaagtaaggatttatcttcaaacataagctgagataacgaatagaagcaaaacgattggctactagnnnnnnnnnnnnnnnnnnattaggtaaatttgaaaaataaaaatgacttggcacttttaaaggtaacttcaccaaagaccgaagagccagtaaccagtagctccaacttgtctcagcatcacatcttctgtgctctttatttttgccggaccagtttgcggttaggagaatgtgccttttttgtacctttgcatttaggttttataattttaattgatgtatggacacacacaaacaaaaaagcatgaaggaagatttggatccaagcagtgccacactttacatcatcactacaagtgttcaagtgtaaagaaaaccaattttgaaactatgaaattcctgattcataaatacacagttatttctactttagtacatataagataattcactgttattaaagctcttttattaaggcaattgcatatgttttaaaagcaatggtaaattaagttgtcttccaaaactgtgtacttgtctggtcagctgtgtatgatcagttatctacctcagagtctattttcttttgtgctgggacaggttgctggccctccctgtttccacagaccaaatcctcctagctcaggagctagggctaagcagttatttctttcaagtattttttagttcttaaattttatgcttgtatttgatgatagatgtcagtgacatttcatagtttcaaaagtccttgctgctctgagaagtgtagattctagtgaaaattacatagtcataagagaaatgnnnnnnnnnnnnnnnnnnnnnnnnnnnnnnnnaaagttgtggtattattggttctatgctccctggaatattactgctttgtgaaagtccagactgaacgcagcaccctctgtgtacctagtacagttataaacctgggtctctcactacttgatatttttgcattaatttaagacagaaatttgatagctcggttagaggggaggggaaaatctggctgctagaaatgtctgaactaaagtgccatactcttctggggtaagattttggggaacataaacctctgtacat

SEQ ID NO: 180233 - DNA, 1208 bp, Homo Sapiens
  misc_feature (175)..(192): n is a, c, g, or t
  misc_feature (923)..(953): n is a, c, g, or t
actttgtacaaaaaagttggctaatgatacctcgctttagaatgagaattatgcctgaaatctggcaaaccgaaaaatgttgctattgcaacaaagtggcaaaagctaaaagtaaggatttatcttcaaacataagctgagataacgaatagaagcaaaacgattggctactagnnnnnnnnnnnnnnnnnnattaggtaaatttgaaaaataaaaatgacttggcacttttaaaggtaacttcaccaaagaccgaagagccagtaaccagtagctccaacttgtctcagcatcacatcttctgtgctctttatttttgccggaccagtttgcggttaggagaatgtgccttttttgtacctttgcatttaggttttataattttaattgatgtatggacacacacaaacaaaaaagcatgaaggaagatttggatccaagcagtgccacactttacatcatcactacaagtgttcaagtgtaaagaaaaccaattttgaaactatgaaattcctgattcataaatacacagttatttctactttagtacatataagataattcactgttattaaagctcttttattaaggcaattgcatatgttttaaaagcaatggtaaattaagttgtcttccaaaactgtgtacttgtctggtcagctgtgtatgatcagttatctacctcagagtctattttcttttgtgctgggacaggttgctggccctccctgtttccacagaccaaatcctcctagctcaggagctagggctaagcagttatttctttcaagtattttttagttcttaaattttatgcttgtatttgatgatagatgtcagtgacatttcatagtttcaaaagtccttgctgctctgagaagtgtagattctagtgaaaattacatagtcataagagaaatgtnnnnnnnnnnnnnnnnnnnnnnnnnnnnnnnaaagttgtggtattattggttctatgctccctggaatattactgctttgtgaaagtccagactgaacgcagcaccctctgtgtacctagtacagttataaacctgggtctctcactacttgatatttttgcattagttaagacagaaatttgatagctcgggttagaggggaggggaaatctgctgctagaaatgtctgaactaagtgccatactcgtctgggtaagatttggggaaacattaacctctgtacat

SEQ ID NO: 180234 - DNA, 2192 bp, Homo Sapiens
  misc_feature (1934)..(2015): n is a, c, g, or t
ttggctctgttaaaccagtccaacccttctttggcaaaggacgctggctttgcatttctctatcagctaccacttacgttgccactctcattcccacaaaaaactgggtagttactagcttaacctaccaccctcgtaatgaaggaaaaagccccttctaactcctacatatgcagtcattggccaacttctccatcaatgaaatgaccgaaaataccctgacaggtcgtgcagttcaacttttacgctcctacatgtccagcctcacccattacacaagtaatgaaaagcccatacacggccctgtgactacaaacgctgtcttaactttccaagcccctttatgcatccaacacaacctgtcatcaggcctacctctaggtcacctactgttccatcagtgcaactacgccttgcagcttcaagccccaactgactgtattaacttccaggtctcccaaacagctacattcaaacagcctgtccgcttctcaaagcccccagaagtcatcagcacctctctgcttaacaaacaatccgggttttgtaatggcaggcatacgcactgcatgaccattcacccctggacctcctgcagcagcactcccaccactgacgaatgcctccttatcccctctttcgattacccttctgagtggctcctagtagatacaaaatgatttttcctccaatgggaaaataaaacacagggagccactcagcttatcccaaacatcccttttcagccgctcactggggccgccttggcaagtaccctaggggtgtgggaaaatgaaaacaaattcacacacctttttaacatacacagccagttctgcctacccagccaaggcatattcttcttgtgtggaacttcaacctatgtctgcctcaccactaactggacaagcacctgtaccctaatcttcctaagccccaaaattgacattgcccctggaaaccaaaccttaccagtccctgtcagagcccaagtccatcagcatagggctgtgcagataatacccttgcttataggactaggagttaccaatgccacaggaactggaatagcaggtttgtccccttccctgtcctactatcatacactcttaaaggatctctcagacagcctacaagacatagcaaaatccacccttactctccaatcccaaatagactccttagcagcagtaactctgcagaaccaccgtggcttagacctcctaaccgtcgaaaaaggtgggctatgcacctttttaggggaagattgtttttccaccaaccagtctggactagtacgagatgctgcctcgcagttaaatgaaaaggcttctaaaatcagacaatgtctttcagacttttaacaccaatctttggagctgggcgttgtggcttctccctatagctgggcccctcatttccatcattctccttctcctatttggaccctgcctcttccgtctagcctctcagttcctacaaaatctcattcaagctattaccaatcaatctatgcgacaaatgctactcctaactgcccctcaatgtcacccccaccccaagatctctctcccaattaggagtccatgccgccccaagtcccgctcgaagaatccctgagaaacatcaccccgtccacttcttttcttattaaaacaaaaagacaggaatgtcatatcccacaaatatggctgcattattgccagcaggccattattgacggtgggccattaagaactctgtgaccggcacatatgcctccagacttcctggaaccagaaaacctgcaacaaccaaaaaccacaaaagaagaacaacgggtttctgttccaactggttgatcaacttcttgagtcaacaagtcccaaaaccatgttgtaattttccacccgccactttgctctgtaaagactgctctccctcacacctccggnnnnnnnnnnnnnnnnnnnnnnnnnnnnnnnnnnnnnnnnnnnnnnnnnnnnnnnnnnnnnnnnnnnnnnnnnnnnnnnnnntcaatccagaccacgctgtaacacacacttacaaaattctgctgagaatatgccccccgttattcataatgctcatgtttttcatactgagggtagctgtgcactttgggtttttacagagaaatgtgttttatgggaagtttttctggctgacttgttcaatcatatctaatctga

SEQ ID NO: 180235 - DNA, 1460 bp, Homo Sapiens
  misc_feature (459)..(506): n is a, c, g, or t
ttggcaggcattcaccaagcaaatacagagcaccctctgggtcaagcactgtgttattggggttccaaataaagaaaaaagaccaaatccagccctatggatctcacattaaagaggggagtaagaattatagataatttaatgagttaggtacattaatggggatttgcacagtatttcataggagcacagaaaaagggtacctcgttccacctgagatggcagggagatggctcctaagttaactaagcaaaaggggaaggagaggcacatcccataggatatggataacacaacaaaagctccattaccacccgccccaccaccacacacaccatctctggaataaattttgtaccttccaactggttttcagggtactcatgacacatgggttaataatagctaggtttgcccaaatgaccaaaattctattcccaacatgaattttcacaactnnnnnnnnnnnnnnnnnnnnnnnnnnnnnnnnnnnnnnnnnnnnnnnngaaatcatcttacaaaatcatgtagtggaatgcatatagtgatgaaattgttgaagaccagggaatctttgtccttagtttttattaggatggatgttttcaggtaaaactaaaataaaaatgaaatggaaccaattagaaagaaaataggagcacttaagacgaaatgtaattgttgctgaaagaattagaatctgatagcttagaaagaacttaattaaatttcagagtaaaataaatacagtttagcaatggcctttctcctagaaaaatataatgtctcttacagttcagttactccttggcttacaaaatagtggttaaatttcctgtttttctcattttgatttcgtatgttacatgttactggtgatgggattatctgtgtgacattacctctggtcttcaaaatgtacacgtagcaatgtagtctcacatatgccccttgggtgcgaaaagagaaggacctaacttaacctgacagacctcaaatctgttctctttctatagcagagtactcctatttaaaaagaaaatgttgagtaaggaggacagtcatcatatatgtcgagaatgttaaatgctcttgtggaagtgaaaagcagccgatctaagtaattacccattaagaaaggagtaggagaaatgtttagaaggcagacctgcaaaaaggtgactcacagtacgttcacatgaccggatgcattagtggaacctctaacccatcgccaatggaagaagcagtgttttgcacaaacttgaaaaagagtttttcattttcctcccacagcctcgtcacgtgttcaatatgctaaagaagtatgtccgcgcagaacagaagacagacagcacaccctaaagcatttcgagcatgtgcgcatggtggatcccaagaaagccgctcagatccggtcccaggtaagcgtggggtataatcatcttctgcagctttga

SEQ ID NO: 180236 - DNA, 1617 bp, Homo Sapiens
  misc_feature (1266)..(1327): n is a, c, g, or t
  misc_feature (1418)..(1451): n is a, c, g, or t
ttgggggaattcatggtaacttgtatttaaaattctgtaactttgggttgggtaaagatatacttaaaataaagcattccctttgtaattctaatgcattctcaacatatgggtattaaataacatgaaaaaaagtttatataaatgttaaattactttagaactatttcctagatttaaaaatactaatgcagtatattataatagtagctttgaaattttgatattggcttgaaacttaactgtagtggtacctatattaacgtatttatgtctcttatttttttgcagcaaggagtaaataatgctgaaaaatttgactatgtcatgcagtttttgaataagatggctggtaatgaatatgttggattcagtaatgcaacgtttcagtctgaaagagaaagtggagatcgaaattttgcaataggatattacttaaaagaaaagaagtgttttccagaaggcacagacatggttggtatattagacttctacttccagctgtgctccattgaagtgacttgtgaatcagccagtgtgatggctgcgacactggctaatggtggtttctgcccaattactggtgaaagagtactgagccctgaagcagttcgaaatacattgagtttgatgcattcctgtggcatgtatgacttctcagggcagtttgctttccatgttggtcttcctgcaaaatctggagttgctgggggcattcttttagttgtccccaatgttatgggtatgatgtgctggtctcctcctctggataagatgggcaacagtgttaagggaattcacttttgtcacgatcttgtttctctgtgtaatttccataactatgataatttgagacactttgcaaaaaaacttgatcctcgaagagaaggtggtgatcaaaggcattcctttggaccattggactatgaaagtctccaacaagaacttgctttaaaagagacagtatggaaaaaagtgtcacctgagtcaaatgaggacatctctacaactgtagtatatagaatggaaagtctgggagagaaaagctaaagaaatgggttctagtttcagaatgtttcttcatttaatctttcaaacatctttagcttttttttgcaagttataaatatttatttgaggtattttttgttctcaatcttgggtgctggagccataaagcttttttttccttttaatctttgtataaaggcagtagattaagaagtgcatttgttggtctttaaaaagtatttacaagtacataannnnnnnnnnnnnnnnnnnnnnnnnnnnnnnnnnnnnnnnnnnnnnnnnnnnnnnnnnnnnntgttaactatgtggtcagataatcccattttacaatagtaacagaaaattgtaattcttagttctaaaattcacaaattaaactcataagnnnnnnnnnnnnnnnnnnnnnnnnnnnnnnnnnnaaaactaatgtgatgtctttagtggcaatagaaagtacttctatgctaaatacaaaactaaaaaggcaaataatgaaccccaattattttatttaaaatagcagtggattataaaattagcttgtgtttacatttatgccatttttggtgatagattggctttaca

SEQ ID NO: 180237 - DNA, 2239 bp, Homo Sapiens
  misc_feature (412)..(463): n is a, c, g, or t
  misc_feature (567)..(600): n is a, c, g, or t
ttggcactttgcaaaaaaacttgatcctcgaagagaaggtggtgatcaaaggcattcctttggaccattggactatgaaagtctccaacaagaacttgctttaaaagagacagtatggaaaaaagtgtcacctgagtcaaatgaggacatctctacaactgtagtatatagaatggaaagtctgggagagaaaagctaaagaaatgggttctagtttcagaatgtttcttcatttaatctttcaaacatctttagcttttttttgcaagttataaatatttatttgaggtattttttgttctcaatcttgggtgctggagccataaagcttttttttccttttaatctttgtataaaggcagtagattaagaagtgcatttgttggtctttaaaaagtatttacaagtacannnnnnnnnnnnnnnnnnnnnnnnnnnnnnnnnnnnnnnnnnnnnnnnnnnngatgtaattaaaatgttaactatgtggtcagataatcccattttacaatagtaacagaaaattgtaattcttagttctaaaattcacaaattaaactcataagnnnnnnnnnnnnnnnnnnnnnnnnnnnnnnnnnnaaaactaatgtgatgtctttagtggcaatagaaggtacttctatgctaaatacaaaactaaaaaggcaaaataatgaaccccaaattattttatttaaaatagcagtggattataaaattagcttgtgtttacatttatgccatttttggtgatagattggctttacattttaaaaaatttatttaaaaatttatcaaatgctttaaaatatgactcctactttttttattttgcaactcctctgttctgtcagagttgttatatacaggagtgtcttatgttactaaaacattccagccaaagaatttcagatgtgagataatgatgtttcatcaataaaaagctataatggttagttactcagaaggagaaacagtgagtgtcttcaagtgaattgttcacctaaacaattttattttcatattatccacataactttttctatgttatatttaaatatgaatggcaaattttggtttttagcttttacattttattatcttaattttataaatgctaatatttcttttgtgataagttatagcatctcataaagtttgttctatttgaagttttttagagtacttgagaaatgaatttagtctgcaggtagtaagtatgctactaaaatacgttagatctaaatccttttatttggtataaaaatgcaatattgagaatcaaaacttgtttttaagagaactatagattctacacaacctgatttcaagtaattattcatagtatttatagttgtcttggcaaagtgattgtaaaattctgtaggacctattcacacttcttccttcttccatatacttctctggttttccccatagttcccctataatttcaagtttgttgaaacctgttaattttagtgggggattagaagaaaaacttggtggtttcttagcatgatggtgtatgtatgtggtaatggaaagtctgtaaaagtaaatatagtgtagcaaaaaagatttcactgagtattttagatactagtgcaaataaagatagaaaatcttgatcataatgtcttaagtttgggaactgtgatattaagaaaagaaattcccttctagaggtgctggccaaaaagccttttgggctaacttaagtattaaatttatatatttaaataattatattttaagttgtagaggattttcccaaggattttatgcttacttgaatgttctttgaatgttcagatgcatatcctaactggatgcttctcaaggccttactgcatatttgtgttgcatatttatgttagttgcaccagggccatttgtagtttgggcaaccgaatgccttaattggaaaaaaggcattgtggtttcccctatgatctaaattgttacattttaccatttcattccgaagttggttttactttattaaatgaagatttagttttcatatcgtatacatagctgtatagatttcaaaattaggttgttaatttgtgtcacttactatttttgtgttggtaatgctttaaatgcatacttaaaaatgaagtactgttatctaagctactgtgtttagaaaatgttaagaatgagcagaaatttttatagaaaagtataaacggaagaagagataagatactgcgaataggccctcaaactt

SEQ ID NO: 180238 - DNA, 1721 bp, Homo Sapiens
  misc_feature (1213)..(1229): n is a, c, g, or t
gggttcaaggactcacaggctgacacccataacacaggtgtggtagtggggaaacagaaaacggtggtagggtgtttcagccaattctatgggaggctaaagggaagcacacatactgggaatggcacagtaggagttgccagttaattcccatctaggaggccatgctagggatacccattagtccccttcaactctttaaagtcttgaacagtttaattgttagcaccacagtcccctgcagccctgaggactccattctgggcctaaagactcttaagggatcctgactggctttctgtgggtaaatctgacagatcaagtagagtgaaagaaaactgctgatctcctctcctgggtttctctgtgttcagcaaatgccctcaggccagcctttatacagcaggtagctctccaggtttcaggagtcctctgatagctgacatgggtcttcactacccattctagtccaggaaatgcctcaggagttttcagtcacctgaaaatggagaaataacagatcagtcttttgaagaggaagttttaaagacatacaaaataaaagataaagagatcctgcatgcagtttacacattacaggagaaacatgcaacttttaagaaattttaagtaaagtttcattgtgaatatcaatatggggacctacagggactcatccttacacagttttaaatagctgagcagaaagcttttggggtgcagcaggaggtctaatctacagtcattgaaattttacaatgtgtcatttaagatgtcagactttgtgcccaggttacgttacagttcacttgtgatgggcaggattattaagagttatggctaatttatgcggcaacatatggtttttctttttacagctatttttattaaacaagttttgcaaagttttaacattaaaattaacagctaaagaattgtttatgcaagttgctgtcacagtttatgtaaaagagaaatatgtgctattaaaatcagacatttaggttacctttggttttttgcgatgcatgttagctttacacatcctgattctcttgcgataattttcctttaaaaaggggggtatagagtgatctcttttcatcaaaacaagacataatgccctgaaagctgacttcaaaccatggttgaaaattcagttatttacattttatcacaatctacaaatacatttttttgttggtgtgttttnnnnnnnnnnnnnnnnntgtccatcatgcactgctgcaggcagcttggcacttcaatacaagaggatttttcacccccgagcagtttaggtggctctcttagggaagccatgagaaccctgagaatcagcatagagttgaaatgggaccaaccaattccatcacttcctctcttggtctcttaggagggggttcagagccagcctatcatgccaaatcctgccccagcccagctgagttatcagcatttctgggattgaaagagaaaccctcaagggcacccagagttggctgaactgtcatgcctaaaggcagatgctgtccccttctgagctcacagaaattatttggtgtcacactttagagccacctaggggttctacagaaggtgcaaaccaggctggcttgcacttttaaatactgagacctatctatggaaaccaatccaagtttcagctcagttgagttgaaaactctccataaattagaatttttgataggattggccaa

SEQ ID NO: 180239 - DNA, 1167 bp, Homo Sapiens
acaaaaaagttggccttgcttggttttcccagggagctagaggacacttctccgtaaggaaacgtgacttgctgttgcatggaagtggggctggctgcctgcttccaatctgaaagacttccagaagtcttcccaccttacctgagggtgcctgccaaattgttttgggaacaggaaaggccattgcagactcactaagattaatgagttcctcactatctcaagcaaggtgttgggtatctccaggtttggggactggcgtacagatcacatttgtctatgaagaacctcgttgtgggagattactccagagtcaatggcagcctttttagatttgttcccttctgtccttccactcaaaactgaaaaattgcccaggctgcccaagagggccaagccaagtagagagcaaggaacaccaggggaagtgtcaagacattagaagaaactcagtgtttttggtgatctttactatgtgacctatccctgcttatccctaagtgctgtcgccacatggtttataaactgtctttgttttccccacaggccaggacgactggaatgggaccaggccgtcgctgaaggcccctcctgctaggccagtgaagggagcatacagagagcacccatatggacgttattaaaaacaaacatgaggggaaaatatcagttatgagcaaagttgttactgatttcttgtatctcccaggattcctgttgctttacccacaacagacaagtgactgaaaactcctgaggcatttcctggactagaatgggtagtgaagacccatgtcagctatcagaggactcctgaaacctggagagctacctgctgtataaaggctggcctgagggcatttgctgaacacagagaaacccaggagaggagatcagcagttttctttcactctacttgatctgtcagatttacccacagaaagccagtcaggatcccttaagagtctttaggcccagaatggagtcctcagggctgcaggggactgtggtgctaacaattaaactgttcaagactttaaagagttgaaggggactaatgggtatccctagcatggcctcctagatgggaattaactggcaactcctactgtgccattcccagtatgtgtgcttcccctttagcctcccatagaattggctgaaaca

SEQ ID NO: 180240 - DNA, 3676 bp, Homo Sapiens
  misc_feature (1929)..(1939): n is a, c, g, or t
  misc_feature (2511)..(2520): n is a, c, g, or t
  misc_feature (2582)..(2871): n is a, c, g, or t
ttggataaattgcatcaatctggacaattccattgcaggaataatatgttaaaaaccaatggggagaagcacccacatctctcctgtagcactccgtgtctcataagcaatttgaagacacttacaagtaactgattccagtcaaattaggattaactgactcaaaaaatggtgtcaagtttctttaatgtttttatgttagaagtgagtttaacagacttgaagaaaactgttatcttttcctgctgtgagtttacacaaatgattccagagcagaatgaaagcagaaagctgttggttacaatattcttttaacctctctgcagcattttacacttactgggaaccttatgattcaccgtaagagtggaaatatacctgagttcgtgtcctaatggtctctaattcacattggatcgtgggcaaatcacctcacctctctgagcctgttccctcctcttagaccatctctaagaccacttcatctatttacacatcatttgcttgaacattgctgaacatctgcgtgaacttggcctctccagcccttgcaggtggaaacagctgtgtcaaggctcaaggctcacgctgaggggacttggagggagggggcttctgcattaagctttcctggtgaagacccttgatcttgtccaaagccctgtgtctttgactggcttctcttcagagtccccgttgtcatcgtaagacccttgctgtttggagggtggtcttgtgactgtggcagctgctggccgctggaatgaggagcctatctccatcctccagtgtgactcaggcagagcattgagaattcccagggcagaaatccttcctgctcaggctttcattctaaaactacagtcttcattaaagctgaactttctgggtagctgagcttatatgcccggcatctgaatgagagctctctttgtaactgtgtgacttgagatctagtttgccagctcctgggaaacaatacatgtgttcttgtttgtgtttgctcagcaagcagatgtctgagatgtaagaagcttttcttttcctgtggcattgattctgacttagagctgaagtaaagatcactgaaacatcacgtcaagttgaagtcactcataggtctttgtcctttaggcaggacaggagagtcattaagaagcatttcactgtagcattctatcacaatatcatctggaattgttttctttgcccagaaagccttaacttgcctctagagaatccctggtattacaacgatattgcggcattagaattccaactcttctgctgtggaagtttgaagcgaagctgcagcaaaaccagagaatttcctcaagtggcctgtaggctccttgttatcttatgcccccacccctccctcaacaatatgagtgatccagaactggcccaaacacctcagctctggtccctttttgcccttcttggccttactctgttgttcaaagccactttggattgcttggatgcttcgaacagccatgaaaagtagcctgcctgtggcatttagaggccaagcaattgacagaaagggtttcttctacctctgttatctaagcagagggaagtaaacttctcaccgccccccacccctcactgcccccgattacactagaattgctttcgccaaattgtagttgaagctaaggaaggggaatctggcccctgctgggagagggaactggaatgccacacaaggcaaggcctgcttccttccttcccctctgctgctgctgcctcggaacgctgcagcccaggcttcctcccacagtggcccttggaagcaggccgcagagtagacagctgctccttttggaagagtcagtcccctgtgttttctgaactgtttttcctagcatgtatgtgggtagagctttcatgcatctctagtaataataagctgaaattagnnnnnnnnnnnaattctccaatttaaaacttttaattaaaaagtaaattttaatgtcgaaaatgcaaacttggggagggcagaaagatcacacacaaggctgtcacttcatacttgcaggattgcacagcagccgggcagaggcgctcctcacttcccagatggggcggcgggcagcagagacgcacctcacttcctagacagtgcggcagccaggcacaggcacacctcacttcccagacagttgggcggccaggcaagcgctcctcacttcccagatggggcggctcgcgggaagcggggctcctcacttcccagacagggtggccaggcagaggtgctcctcacttcccagaacaattctttatgaatttgataaaggactgaagtgcaactgaaagctgctagtgatgatctggtaatatacaatttgtccagtagccagtttgtttttattgtgttttctaaccataagagatcattaaaggcaaagcctgtatgacgctgtacacacacaaaaaaatggtcaccgcaggccatactaccaatgaaatggtaggtaaacaaatcttctggtcaagagnnnnnnnnnngaaatagcactctgcatgctttgctctacaagatgaatttccctagaaagaatccaatgaannnnnnnnnnnnnnnnnnnnnnnnnnnnnnnnnnnnnnnnnnnnnnnnnnnnnnnnnnnnnnnnnnnnnnnnnnnnnnnnnnnnnnnnnnnnnnnnnnnnnnnnnnnnnnnnnnnnnnnnnnnnnnnnnnnnnnnnnnnnnnnnnnnnnnnnnnnnnnnnnnnnnnnnnnnnnnnnnnnnnnnnnnnnnnnnnnnnnnnnnnnnnnnnnnnnnnnnnnnnnnnnnnnnnnnnnnnnnnnnnnnnnnnnnnnnnnnnnnnnnnnnnnnnnnnnnnnnnnnnnnnnnnnnnngaaaaggaatccagtgaaaatggctgcaattacaacaagaagtgaaggaagaagactggtgacatctctgaaggatgcagttgaggttgatccaggtttatccgaatatgctacctttctgagccttaaaccttcatctctcaggtgttgattttcttctgatagcttcatcatttctccctgaagtcttttacactcttctgttagtttccttgtttcagtatcatgaagtgaagcactgtgtggttgtggcgtgggcccgtcttgcttagatgcattcagtgggacagctttgctgggttccatgtcattcaatttatcattttcattggggatctccatttggaatccattaattcatgaggttttgcctcattccacacagcttccatatctgaagtgtttagtggagcaaaaattgtaccataaacttgtgtttactcttttcattcggatcatagtcaaagggctgtagcattactgaaacagtcacagttgaccctgggtcaataattccactgttgggcctcacacagtaccggtgaggcacggtagtcttcactttgaaacacacttttctatccgatggatttcgcaatttaagatttgtagtgactacatctgtgaaggggcctttgaatttgaggtctatgggcgggtcgaggaccaggatctgctcgtgcttcgccgtggccccggaggcagacgccattggagagacagcgcagagcaggggcggcttgctcgctgggggcgggggacgatggcgagaggggagggggagcgagttcgcatctcttctttt

SEQ ID NO: 180241 - DNA, 801 bp, Homo Sapiens
gaatgtgtgtgcatgtctctcgtgggcatgggtccgggtctgtgtctgcagagggccctttctgggggaacagctgtgcatgcgcctgtctttatgcaggtgtctgtgtgcatgtgcgaccatatctatgcctacatggacccgcgtgtgcacatgtgtctgtgtgttccatcgctgcagtcctgtgtggccctacctcagggtgcgtgcatgtgtgtctcttgcttcttccactgtgtctccaagtgtgttcaagggctagtgtatgcatgtgtgcatgagtgtctctcaccccaccttgagctcagccatcctggggtggcaccctacccatacccggccaagtgtttggggagaaaagggctgttggttctaggatgtgccaagcatttgtgcagggcttgacctgaccctcggtctgcccccaggaagctccgtgtgcccagctggggcacagccccagctgatgccccagaggggccacccatcgcaagaggggctttgggctctgccctccctccccatggcgcatgggccaaagcctgagactgaaggactgttggacctcagcttcctgacagaggaggagcaggaggccattgctggcgtcctccaacgagatgcccgcctgcgccagctggaggaggggcgggtcagcaagctccgggcctcagtggcagaccctgggcagctgaagatcctgacaggggactggttccaggaagcacgctcccagcggcaccacaatgcccacttcggctctgaccttgtccgagcgtctatgcgcaggaagaagagcac

SEQ ID NO: 180242 - DNA, 2401 bp, Homo Sapiens
  misc_feature (2152)..(2167): n is a, c, g, or t
ttggactttatatttatacatgatacagaaattgaactatttctatcgttcagaatttagcatataacaggattttaaagtgattgaattgccatcctaacttggatttgtattaggttatgaatgaatactgttgttagtccaagctatttgaatgtaaagttaaaattctccagcaatccagaatgacttgtaacccttcagtggaatgggaaatttctggtatgcaaatagggtgggttccagacatttgttttattggtggtgtttgggccttgaaacacatttctaatagaatgacatatggcaaagggtatttagatggtcctatgggatcacagaagcccatatgatttaaaatatagataaaataacacaaaattgggtacataagggtttaaccaggctttcctgggttagactaagcctctaacctctgttcctatcctgttcttatgggaggaaaaaaaatgttccatgggatgaaaagaaaatgcattgactttgtagtctttattctcctagccgcacttcgggtatatccagaaggaagaggaaatgcaaagaggaagaagatgtaatagttcttctctccagctaggtgcacttgaggttgttcataaatgtaaaattatgtcaggtttctaacatgggacactgcacacagttgtctgacctgatgaaccatcccatttgaaagtatagattattattatttcttgtagtatttggttgttttccatctcattcatgaacaactcaacctgatagtagtatccaataaatgcctttcagggctcaggaatgaattgacatcctagttaagaaatgagacttaataatggagactgaatgaggcggtttgtattaaattatatgccatgaagtgttcattttagctttaacctaattatgactgtaccaccatgaagtacagaatgaaaaattatatatatgggggggaaacagaatgaatatctgattcttttgaatgcttgtggaaatctttgagatcgtgcagggcataccacaaaatagcctttagaacagatacccaattttacagttcataggacaacatcaaacattagtaagtctaaataagatgaatagaatttttgttatgtaaattttgctagaacagtctattttcttgcacccctcaagttaacctcttaaaaaaatgaatgtataatttctaccgaaagaatatcagagagaatctctctggcctatagtgttaaaatattgttcacaaatcctgattagttaagtgcatacattatgaaacttacagaataaaacttattatacatctctttcttaaattaatatctttacacattttcaactggctccccaagtctgataaggaaggattaaaagaaaaaagaaatgtattagttgggtggccaaggagtttcctttgtaatgttgagagacttccgctttctgaatttcgctggttctctaaggtaaaagagttaaatagtacccttgttcaccaaggaaagtgatccaaactatatatctagtgcagatatttcctttgcattatttagtcttctctggagagaaaatacagtttccccttcctctttctcttcacatttactcttttcaacccaaaataagagacatagaaagcaaaccacagccagtttggcatcttctcagtgctactagtataggcacatacacatacacagtctcagcaaggttataaagaaccctgtcaggtccacttgcaacatggccttgctacttggattagctcctttaagcctgaaaataactttcctggtcatggaagaactggacgcatcttttaacttatgaaatagaagttgaacttgaaaactctttttaaaaaatcctggttttgcaggacagctacataatgaatgtatatattaagactgtagctgaattgcacatgaaatcagattgccaacttcttgactttcaatgttagacatttatccttaagttgtgagcgatatatgtagcatgctgtgaaatgtctgttatagctctttaattcatcagtattaatacagaattatcatttgcgtttcttggtactttttattcaatgtaatcagaagctgtgatgttttgcctttgtagtcctgtgctttgttactgtaannnnnnnnnnnnnnnnacgaagcacgtgactggactaatgtaaggcagatgacgtgatctttaagactgctatatatatcagtctcttactctataaggttttaaattagaataagcttttatcaaaatagataattgatgcaatttaggattcacgcaagtttcaggtgtcaaaatggcggtcttatagtttcaattctgaaaatagcaaacttaataaacagccactttaaacttgttctggcaaacc

SEQ ID NO: 180243 - DNA, 2292 bp, Homo Sapiens
  misc_feature (950)..(1005): n is a, c, g, or t
  misc_feature (1837)..(1858): n is a, c, g, or t
ttggtgatgattatgctgtatatgtgagagagaatattcaggtgggaatgatggttagatgctgccgaacatacgaagaagtgtgcgaaggtgatgtgatgttggcaaagtcatcaagctggacagagatggattgcatgatctcaatgtgcagtgtgactggcagcagaaagggggcatctactggtttaggtacattcatgtggaacttataggctatcctccaccaagaagttcttctcacatcaagattggtgataaagtgcgggtcaaagcctctgtcaccacaccaaaatacaaatggggatctgtgactcatcagagtgtgggggttgtgaaaggtgtgatggatgtcagatgtttcctatcaatggatccagattcaaatgcagaaactgtgatgactttgatttttgtgaaacgtgtttcaagaccaaaaaacacaataccaggcatacatttggcagaataaatgaaccaggcttcagcagaagaaacacttcctataaatctcgcccaaacaggaaaggtaagtggcctaaaatttttctagtattttcaaaatgacccagttacaataggaaatttcttcttgtactattgtcactaatcccgactcaatatcctttaaaggacaaagatgcatgcataagtaaaaatatgacaggtcacaatcacgccggggtggtcctggggcgaggcccaagttccctgcacgcgccggcacaagcacacacactgtgacggggaggacgtttacgtaccatgtccacaccactccagacttggtgagcgccagtaggaactgagctccacactcaatctggcacaccccctgtccatttagtctctcaatgttctggggaatgttgcagccttcacttccgccccggcccaattttccaaagtcaccatcaccccaggaaaataccaaacctaggtttaaaaannnnnnnnnnnnnnnnnnnnnnnnnnnnnnnnnnnnnnnnnnnnnnnnnnnnnnnncccaacctccttccaaaatgtcatgagaatcttgagcacatatggtccttggcatgaccacatgacctgcagagcccctgttatagaactcatttttatattttccttagtataacagttaatataatatgtcatttttgttaatagtgtctttttgtcattttactttttaaaagattttattgaaatatacatacaggaaagtgcatctatcataagtgtgcaaattgatgaattctaaaatctttattgtacctgtttagcacctagattgacactgaacataactaacaaccagaaatctccgtgtactcccttcctgtaactacccctgcgcccgaccaaatcactctcttctaacagcataactttgtgtgactagcttttttaatgtaaaagaatgaaatctacagcatgtattcatttgcatctggcttctgccacccaacattatatttgtgggattcatttgtacagttgcatattagtttgcagatccctcactctcatttctatatggtattatattgcataaacgtaccacactttatccaactactgttaaatatttgtgcattttctacttgggggtgatttcaaatagtgctgctatgaacattcttgtaaatgtcttttggtgaacatatgcaacacatatatgcgttgttgttggttcccaggaggggcattcctgggtcataaacaatgcgtgtgttcaggtttagtacagtataatgccaaacaggtttccaaagtgtttgtgccactttacatacctgccattattgaaaaagagttctgtttgctccacattgtcaccaatacttgatannnnnnnnnnnnnnnnnnnnnnaaaccgtactagtgggtgtgcagtgatattgcaatgtggttttaatttgcatcttccttgtgacaaccttgattactgtaagccacttggaaatgtgatttaaattcatataaagatatagtagcaaaacgcatactaggttaccttcgtatccagaaagtttagatagaatgatttctatgtaagcttttactgtgtagtctgagtccatgaatattgattacaaaaaacacatctgtaggtgagttacaatacctcacttataattccaaattcatgttgtgttagctcaatatttttcaaataatttttgcatgcaattctcacctttcttttctgagtagtttcaggtatttggtatggttcccagcagtcagttaaggttgccattgtttggaaagcacacatccacgtatctgcaccatgatgatatg

SEQ ID NO: 180244 - DNA, 1088 bp, Homo Sapiens
gagcaatgcttttcttataatggccaactttgtacaaaaaagttggtgatatgacacgcccataccccccatttcacattttgtcagaagtgcatagttatcactaactttgccagtagaaatgtactcccaatttcccacggacttatcttgaataatctctccactgaagcataacaggttttgaattctgttagaatagttgtttttactatcttttaattttatacaaatttcaaagttacgtaatacttttatttaaaaagtgaaacaaagcttttcctctcctttacccacatgttagtccagcagagggggaaagcattggccccaggccaaaatcataaacgctttcaattaactaataataattgctggcatgttgccattaaatattcttgtctcattatctctggttgctttatcaaacccataggtcactgaagcccacttttgagacaaagactatttctcccccaaaagtcaagggaaatataaaaaatgaaattagtgattaagaatagaagtcaattaatacaatcattttgtcttaattatttaaagtccagttttttccctccagcaaacctgaaaatacactatcctccagctatcagaattatattgagatctactcacatttatgatgatgttcagagattctcattgggaaggaaaaggcacacgctgcggcggtcttgcatgactctgttgttgtggaaattcaatttgttcattgtgttttgggctctctgggtggtcagggctgggctctgggtccttggcaattcctcaggttcccagcactccaaagccagctcacctcctcatcacacaccctacaggagaagcattagggtgtccgactacgtgggtttcatagctgtggaaaagccaaaggggagactcctgaagaaaggcggtgaagactgtgaagagcgggtcaggaagatgagcacagcactgctactcctgtgggcacagggacagcatgtctccagccagcgccaccttgtttaatacatgggaactcactgaaattcattctgtattttgcccgcaaagttttaaagctttcatccacagtc

SEQ ID NO: 180245 - DNA, 1602 bp, Homo Sapiens
  misc_feature (306)..(327): n is a, c, g, or t
ttggcataaacgtaccacactttatccaactactgttaaatatttgtgcattttctacttgggggtgatttcaaatagtgctgctatgaacattcttgtaaatgtcttttggtgaacatatgcaacacatatatgcgttgttgttggttcccaggaggggcattcctgggtcataaacaatgcgtgtgttcaggtttagtacagtataatgccaaacaggtttccaaagtgtttgtgccactttacatacctgccattattgaaaaagagttctgtttgctccacattgtcaccaatacttgatannnnnnnnnnnnnnnnnnnnnnaaaccgtactagtgggtgtgcagtgatattgcaatgtggttttaatttgcatcttccttgtgacaaccttgattactgtaagccacttggaaatgtgatttaaattcatataaagatatagtagcaaaacgcatactaggctactttcgtatccagaaagtttagatagaatgatttctatgtaagcttttactgtgtagtctgagtccatgaatattgattacaaaaaacacatctgtaggtgagttacaatacctcacttataattcaaaattcatgtgttagctcaatatttttcaaataatttttgcatgcaattttcaccttctttctgagtagtttcaggtattttgtatggttccagcagtcagttaggttgccattgtttggaagcacacatccacgtatctgcaccatgatgatatggcacgcccatacccctcatttcacattttgtcagaagtgcatagttatcactaactttgccagtagaaatgtactcccaatttcccacggacttatcttgaataatctctccactgaagcataacaggttttgaattctgttagaatagttgtttttactatcttttaattttatacaaatttcaaagttacgtaatacttttatttaaaaagtgaaacaaagcttttcctctcccttacccacatgttagtccagcagaaggggaaagcattggccccaggccaaaatcataaacgctttcaattaactaataataattgctggcatgttgccattaaatatccttgtctcattatctctggttgctttatcaaacccataggtcactgaagcccacttttgagacaaagactatttctcccccaaaagtcaagggaaatataaaaaatgaaattagtgattaagaatagaagtcaattaatacaatcattttgtcttaattatttaaagtccagtttttttcctgcagcaaacctgaaaatacactatcctccagctatcagaattatattgagatctactcacatttatgatgatgttcagagattctcattgggaaggaaaaggcacacgctgcggtggtcttgcatgactctgttgttgtggaaattcaatttgttcattgtgttttgggctccctgggtggtcagggctgggctctgggtccttggcaattcctcaggttcccagcactccaaagccaagctcacctcctcatcacacgccctgcagagaagcattaggtgtccgactacgtgggtttcatagctgtggaaaagccaaaggga

SEQ ID NO: 180246 - DNA, 1203 bp, Homo Sapiens
  misc_feature (1010)..(1024): n is a, c, g, or t
ttggtactacatgtctgtctgatgcattttgtttactaggttgtaaatgatttcttttttcattataaggcacatgatacccttgcaaccaaggacagccctatggctaaatctttccatttatgttaactataactattgatccagaaacaatattgctttgcataggctggaggtgtggagcagacgctgccttcttttgatggcagctcaatgtagctgcttaacagagctgtttccttcaggtgctcttttctctgtgagagtgggagcaaaccaaagaactcactgatatctctggtttggctgaatttttgctaaatcaggttttctggaataaaatacttctggcattaactctgatgagtcactggtaagaaagttccatcacaccttggttcatattgggtatttcttaaggaaacattttcttaccatacaatagtaaattgtctaattttgagacagtggaggtgccacttaaagtattggtggctacctcaggagttgtatttgacaagaggggaaatatatttgttttaactccacactaggtccacaaggagaatccagaacaggtccaccagggtccacaggttcaagaggtccccctggcccccctggccgtcctggaaactcaggtatccgaggacccccaggtcctcctggatactgtgattcttctcagtgtgccagcatcccatacaacgggcaaagctatccaggtacgttgttgccattgtaggaaccccaactcacctgaagtaaagaactttacggaaatgaagttccttaggattgaaggaaggctgatttgaagatgtcttgaagataacaactctttcagttctgattatataataatagtgtttgctatcatagcacacaacattatttcactgttaggattgaattattttcttttttccccatgtttctgcatttaccaaatcacatcataaacctccccttacttctcttgggacttcaaagcatgctagtaattgacnnnnnnnnnnnnnnnccccaagattgggaacagggatttgttaaatacaactgtaaaatgccaagaatatgtatttaaaaattgttttgggaatctaatttatgggtaaactatgtaataaatatggtgtagacaactgaacatagttaactgtcccatactagccatggaattaatatttataaaatctggga

SEQ ID NO: 180247 - DNA, 1898 bp, Homo Sapiens
  misc_feature (267)..(284): n is a, c, g, or t
  misc_feature (410)..(434): n is a, c, g, or t
  misc_feature (590)..(664): n is a, c, g, or t
  misc_feature (1269)..(1321): n is a, c, g, or t
  misc_feature (1345)..(1419): n is a, c, g, or t
ttggcccctttcattttgagtacatatatgtgtcatttgtaactgcagatttttccaattattcttcctcagtcttttcctttgggtaagtaactcagcatacataattcagccacctggtgattgtaactccaccatctctccaccaaaagaactgtagtagcatcaagctacatagcattaagttatctaacactcacattacagtagagtaaaccaattccttcaggtatatctttctcttccatttttggcttctcgctctcnnnnnnnnnnnnnnnnnnatagatgggtcaatgcccattatcactctagatggataagggagccttaattatatacttatatttttgcactgtcagattggagtggggtaaaaatgtttcttcttttatgtgtaatactcttgnnnnnnnnnnnnnnnnnnnnnnnnngctgtgccctagaccattacataactgaagactcccaccttcaggcaggtttgggtagtacacgtttgtaactacctggcattgccttttgttgaagtaatttcagtttttattagtagtagtagtagtatactttgagttctacagtatatgttnnnnnnnnnnnnnnnnnnnnnnnnnnnnnnnnnnnnnnnnnnnnnnnnnnnnnnnnnnnnnnnnnnnnnnnnnnntcatacctaggtatatcacaataaaacttgacctcagagtttctagctctcaaggccaattcctcccatcctgccactaacagatttctccaaacatctctgcacctcagagtgcaaataccatcaaacatttcactccattgataggaagcatccttcactatcttctaccaaggcctttctcctttgttgcttcaaaattttttatgaaaggaacatccattttattcaaagcacctccaaacctgcagtcctaagttccaggcaactcaatcccaaaaatccactgtagatgcccaaagggtggggtgttcggtcttcaacatttttgcctttatggctcccagtcaagatagagctgcaccaagtccaattccattcctcatcacagatgattttttctactttaagatcagaactatacaagcttcttgctttgtgtcagcatgctgttgtacccatgggcaaattcttaggtaagacaaaaacacagccccaagggcaggtagtaattttttcagaaaaaggtaaggcaatcatttatctcagtctgcccaggacagtcccaatttacacatgtatattctcccaatctgtaggctgtnnnnnnnnnnnnnnnnnnnnnnnnnnnnnnnnnnnnnnnnnnnnnnnnnnnnnagagacagatctcattatgttgcnnnnnnnnnnnnnnnnnnnnnnnnnnnnnnnnnnnnnnnnnnnnnnnnnnnnnnnnnnnnnnnnnnnnnnnnnnntgaactaccacacccagtcaacgtgcagaaggttttcagtttgatgtagtctgatgtagtctcatgtatttatccttgttgttgttgcctgagcttttggtgtgatatccaaaaatatcattgccaagatcaatatcaagaaactttccccctatgtttcttacagaaattttatggtttcagatttttcatctattttgagtatatttttgtgtatgatgtaagataagggtccagtctccccagtgttggatatccaattttcataacaccatttattgaagagattattctttctccactgtgttttcttgatgtccttgtcaaaaattagttgacttttatatgcttgggtttatttctgggctctattctgtttcattgctttacatctctgttttcatgccagtgccacagtgttttgattactatagctttgtatataatttgaaatcagaatgtgtaataactataacttt

SEQ ID NO: 180248 - DNA, 1563 bp, Homo Sapiens
actttgtacaaaaaagttgggaatttaaagacctccactgttccaaggattctaccctagccgaggaagaatctgagttcccttctacttctatctctgcagttctgtctgacttagctgacttgagaagctgtgatggccaagctttgccctcccaggaccctgaggttgctttatctctcagttgtggccattccagaggactctttagtcatatgcagcaacatgacattttagataccctgtgtaggaccattgaatctacaatccatgtcgtcacaaggatatctggcaaaggaaaccaagctgcttcttgacattaggtgtagcatgtctacttttaagtccctcacccccaacccccatgctgtttgtataagttttgcttatttgtttttgtgcttcagtttgtccagtgctctctgcttgaatggcaagatagatttataggcttaattcttggtcaggcagaactccagatgaaaaaaacttgcatcttcagtatacttcctaaagggcaatcagataatggatatgttttatgtaattaagagttcactttagtggctttcatttaatatggctgtctgggaagaacagggttgcctagccctgtacaatgtaatttaaacttacagcatttttactgtgtatgatatggtgtcctctgtgccagttttgtaccttatagaggcagattgcctccgatcgctgtggttcttattatcaaaattaagtttacttgtatacggaacaaccacaagaaatttgattctgtaaagaatcctctttagctgtggcctggcagtatataaatggtgctttatttaacagaatacctgtggaggaaataaagcacacttgatgtaaaaataattgttttatttttattgacatgactgatgattgattgctattctgtgcacttaattaaactgattgtgatgacttttcatttgtttacatacgttgcttcagtcttctcaggtgaaagtagtgagaaaaccgtgaaagaggggggaaacatttatccattatatgctgtttcactggaagtgttaccagcagtccacagaactaatgtgtccccacagacttctcaatcctctccacaccgaagtgcaaaaccacagcagggagatgtgcagggagatgtggagcaaaacacagccaatttgccctcacctcaacatgctttggaatgcaatataccactgttttacgacctaagatatacacaccttaaaaaccctaaagtaaaataaaggaatagtgtcaacatgccatttattttttgtcatcttgaactaaaagtacagctgcaagcaagcttgctataggacaagcttcagcttgggaaacatcaactatctgcactcaggacttacctatttccagaggaatatcgatggaaggtcaggttaatacttaatttcaggttgtttgctacttttaaatcaatgcagtgtctagttataataaagagtcaaacaatgctttacattgtatatatgttcatagatttcatccaatgtaaaataaagccaacttttttgtacaaag

SEQ ID NO: 180249 - DNA, 1350 bp, Homo Sapiens
  misc_feature (1147)..(1187): n is a, c, g, or t
atgagccaccgtgcccagcctcattagttcttaaagtcactaatagcattattttatgcccacgaaccagtaagtcagaccaaagcctgaaatagtgttttctgaaaaatggaaaaggaaatataagaattttaaaaacaaaccttgaaatcagtttctcaagttaaaattctgatggatgtcacaaatagtaaggtcttccttactgagctctgtcatctgttttggcttttatgcatactgtgatttgggaggctgctgctcaacattctagcccatttccagagtgttccattattctaggacatggctgtcatgggagtctgcacaaggcaactaatgctctagatttaactgccttttttaaatcagtagatcattaattgtttcagttacataggagccataggcagtaatagaaacatcacaagtattgtttccaaaaatatacccaactagagataagaccactaagatgttccctttattacctttcagcatttaatgataccagcttgtagcttccaaggtgatagagtgtgctgtgtacatacaaggcatagtaaacgtgtatttaaaacttgtttttttgtcgcacatggcttaagagtttgaatcagtaagttaaagttacgagagtaaaatcatatgaaggccacacagttaactgaaggacagtttaaaagtgtgtgccgccgcctctgcatagttcttaccccatttaaagaagcacttgctttggaaatttcaactcggttggagaaatcagactgtaggttctgatactggcttatcaagtttgtaataagagtgctgatcaaattggcacagtttgcttcagaaaacacttgactttgaacctgaaaaagaagatttaaaaaaatctccaaaagaccagcataatgaaaccacaagcattaactaattggaaatgacacactgagtttccaaagtactacgtacctttagaaggaaatgtgtcatgaacgtgtagacaatgttgttgtttaaaaaagttctttcatccattaggatacatttaatatattctgcgaaaacaggatcttcacacaaaagcttgatgcagttttttgacatagcagactaaagtggggagaagatggttgagcacttacggttgagcacnnnnnnnnnnnnnnnnnnnnnnnnnnnnnnnnnnnnnnnnntacacttgtgtatgatggaatctgaagccactgaaaatcctacttgaaaagccatgtctaactcacctaattgaatttttagttaacagcaactatttttcatacagtaaaatgttactaattagattaagggagtgctggggggaagacactgatgcgaaac

SEQ ID NO: 180250 - DNA, 1791 bp, Homo Sapiens
  misc_feature (1657)..(1667): n is a, c, g, or t
ttggctcaaaaatacccttttcttggttgttgaaatctagatccaacattgcatttggttgatgtgtctcctttactctgtaaaatttacccctgcgttttagttcttttcggcttttatttgtcctgtggaatttcctccactcaggatttgactgagagtatccccagagtgtccagttagacctagaagctggatttgatcctggttcatttattttcccccaagaatactccataggtgatgctatacactttctcttacatcatttcaggaggaacatgatgtctgattgttccactttcagtgattttaatattgatcaatgagttctggtggtaccaactactacaaagtttctcatcaatctttcacctgatggttttagcagctattgataattgttgcctggatccattatttcatttcaggggttgtaaaatagtgattttctggttctatcaaacctcttgcatttatcatctatgattcttctttaaggaactttctctaaatctgaatgggaaagatgcgataaatatttatcaaattttagagtgagttagtgccctagcaacctccaaagttgacaaatgagtatttctttaaagcaaggtatggcccaaccaatactttgaaactagcatgtttagaatagagcaggaggaaactatatttgaaaggtcagaagtggaaagactaagagggcctgaacaataagaggacagaaccaagaggagttggcaactaattggatgtggggattaaggaaaggtaagcatcaaagattacctccaagtttgttagaaggttagtagcaggattctgatgccattcaagtaaatacaagtctcagtcggatgaaccccaagagccacatgtatttgaggggtactttgtctcacacttttacctgttacatggttttcagtaatttagaatttaagccagtagtggggtgactgtacatctatcgacatggtgaggtagagcatgtttgggaggaaagacgttgaatcccatttggtgacagtgagcttgaggtgctgccagaacactgcactgaagataggaggagactgtaggaaatacaagataggaaaggtctccactgaaatgttaactctttctctctaaacagccatccaggcctcaatgtctgcagtttctgatctgtgattatgacttatccaaatcttacatttcttaaaaatagtcatagatgaagggaatcacagttgatagttatatggtgacattagtggcttaaattctaaataactggaaactgtataataggcaaaactgtgaggcaaataaaatgcttctcaaatctgtgtggctcttatggggttaatttgatttggacctgtattaatttcttatggctgctataactaacaaattaccacaaacttggtggtttaaaacaacacacatttattctctttctgttctggaggccagaagtctaaaatgagattcactgggctgcagttcactgggcaaggccatgctcctctggaggcttccatgatgcatcccatattcagtgtttcccgagtaagccccacccatgcaggtctgcagttttacctcaacaggcttttgcactcagtggctctctcctgtggtttctatctgaaattctcttcannnnnnnnnnnaataactgctttattgagatataattcacatgccacacaattcacctatacagtatacaattcagtagtgtttactatatttcagagttgttcaactatcattttttctcacccccaaaagaaa

SEQ ID NO: 180251 - DNA, 1520 bp, Homo Sapiens
  misc_feature (993)..(1002): n is a, c, g, or t
aactttgtacaaaaaagttggcagaagtggaaagactaagagggcctgaacaataagaggacagaaccaagaggagttggcaactaattggatgtggggattaaggaaaggtaagcatcaaagattacctccaagtttgttagaaggttagtagcaggattctgatgccattcaagtaaatacaggtctcagtcagatggaccccaagagccacatgtatttgaggggtactttgtctcacacttttacctgttacatggttttcagtaatttagaatttaagccagtagtggggcgactgtacatctatcgacatggtgaggtagagcatgtttgggaggaaagacgttgaatcccatttggtgacagtgagcttgaggtgctgccagaacactgcactgaagataggaggagactgtaggaaatacaagataggaaaggtctccactgaaatgttaactctttctctctaaacggccatccaggcctcaatgtctgcagtttctgatctgtgattatgacttatccaaatcttacatttcttaaaaatagtcatagatgaagggaatcacagttgatggttatatggtgacattagtggcttaaattctaaataactagaaactgtataataggcaaaactgtgaggcaaataaaatgcttctcaaatctgtgtggctcttatggggttaatttgatttggacctgtattaatttcttatggctgctataactaacaaattaccacaaacttggtggtttaaaacaacacacatttattctctttctgttctggaggccagaagtctaaaatgagattcactgggctgcagttcactgggcaaggccatgctcctctggaggcttccatgatgcatcccatattcagtgtttcccgagtaagccccacccatgcaggtctgcagttttacctcaacaggcttttgcactcagtggctctctcctgtggtttctatctgaaattctcttcannnnnnnnnnaataactgctttattgagatataattcacatgccatacaattcacctatacagtatacaattcagtagtgtttactatattcagagttgtgcaactatcatttttctcacccccaaaagaaaccctatgcccgttagtattcactctgttttctcacaactctaggtaaccactaatctactctccatctctatagatttgcccatgctagacatttcatataaatggaatcatacatgtggtctttttcactgagtatattttcaaggtgcatcccagctgtggcatgaatcagcatctcattcctttttattgcccaataatattctatcatatggatatgtcgcattttatgtatccattcatcagctgatggacatttgggttgtttgtaccttttggctaccatgaataatgctactatgaacttttgtgtacaaatcttatgtggacttgttttcatttctcttggatgtatattcctaggagataggctggattatacagtaacttctttc

SEQ ID NO: 180252 - DNA, 1504 bp, Homo Sapiens
  misc_feature (411)..(419): n is a, c, g, or t
  misc_feature (1310)..(1319): n is a, c, g, or t
ttggaatatatttagaaatgtaagtgttaagagatgtgcattatgtacgaaattgaaaattggtgctaaagtggcaatgtcaatttaaaatttcttgtccagatctgactgactgactcaggagattatagttcctactcattctctttccttttatcagatctttcaaaagcgctttttaaaattgatcaatgtgcaattctgtttgagtctctacagtcctatcccttttggaatgaacagctacacaaataaatattcttggaacttcgaagttgtcttcaaactagctctagaaaatgtccctagttgacattagtgttggtctgttagaaggggaaattgatttgactgcttcatgttttgaaaagagcattaagagggatttgaggaaggtatatgtggctttcnnnnnnnnncttaagtttgaattacacttgatttcctttgggttattaggcagataaacccttgtcattagtaatacttagcactgtccaaaatgaaaaatgactgccagtgtgttgcacatacataagaaaattacatcttactgcgaagtctttggtttggttccttatttggtttgactttgacttactattttgctatggtcatatccttaatatctgcggtacatttcatatatatatatggggtgggagcataattgccattcccatgtgtctcaaggaagcttaatgaggaaactaatgagttaatattaactcttctgaagaaagctgacattttaggagtattaagtcatctgtcgttaaggagcagcaagaatatattatgattgtatcacatgttccagaagagcattaccccttacatagaaagctccttggagatttcatgatgttggatgaacatcagtttatccttatacatccctatgagctataattatcctcatttgatacttgaggaaactgaagtgacttgctccaaagtgactacaaaaacattgcagtttgaggcttaggttgtaatcaggtaattttggtcttggacagtaagggaaaatccataatacataaaacacaaaagtttagaaagggggggaagttgagctagcaatgggcatttctattatttaagttacatatcagtttccaggaatatttttcaaatgggacaaactaaaaagttgaggactagagcatcgtagtgtctaagtgcacctaataacttaatgcatgtgcacacaccctcagttaatttgtaagagagtgacttctcattgttatttgtggagaggctaattatagtagcttcattctttattttctgtgttcttaaannnnnnnnnnacatttgaaagtatgaaaatactatttttgacactttactgatactcagggattaaaagttaaattttactgactgtagcagcaggtaaatctcttaaatttactcaggtttcctatcctttgcctccatatttaagaaaatataaaatggcctgccagggaaatatataaaataaaaatttcca

SEQ ID NO: 180253 - DNA, 1587 bp, Homo Sapiens
ttggatatgactggacttgcatgtagtcgacatttatgtttctctccacccaaacatctcagtggagtaaagaataacatggcagcattactgcaacatgtctcgcctcccgccacagggcagcttttatcctagctcagacttgaacaaatgtacaatcgggtttacaccgagacattcaattcccaggggcaagcaggagacagtggccttcctccatctcaactgcaagaggctttcctcttttactaatccgcctcagcacagaccctttacgggtgtcaggctgggggacagtcaggtctttctcattccatgaggccatatttcagactatcacatggggagaaaccttggacaaaaccctgctttcaagggcagggctccctgcggctctccactgtgcattgtgcccctggtttattgtgactagagaatggcaatgacttttaccaactttactgcttgtaaacatttggttaacaaggcacgtcctgcacagccctagatcccttaaaccttgattttagacaacacatgtttttgtgaactccaagttgggtcaaagtgactggggcaaagtggctggggcaaagctacaaatgaacaacatctcagcaaagcaattgttagagtacaggtctttttcaaagtggagtctcttatgtcttccctttctacatagacacagtgacagtctgatctctctcttttccctacatttcccttttcttttcgacaaaaccgccattgtcatcatggcccgttcttgatgttcgctgtctcttcggagctattgggtacacctgcagaaaggctgtcacttcacacttggaagattgcacagcggccaggcagaggcactcctcacttcccagacggggcggctgggcagaggcgctcctcacttcccagacggggtggcggccaggcagaggcgctcctcacatcccaaacggggcagccgggcagaggcgctcctcacttcccagacggggtggcggctgggcagaggcgctcctcacctcccagacggggtggccgggcagaggcgctcctcacctcccagatgatgggcggccaggcagaggcactcctcacttcccagacggggcggctgccgggcagaggcgctcctcacttctcagacggggtggccgggcagaggcactcctcacctcccagacgatgggcggccgggcagaggcgctcctcacctcccagacgatgggcggccgggcagaggtgctcctcacctcccagacgatgggtggccgggcagaggcactcctcacttctcagatgatgggcggccgggcagaggtactcctcacttctcagacggggcggccgggcagaggcgctcctcacttcccagatgatgggcggccgggcagaggcgctcctcacctcccagacggggcagctgggcagaggcgctcctcacctcccagacagggcagccgggcagaggcgctcctcacttcccagatgatgggcggctgggcagaggcgctcctcacctctcagacaggcagccggacagagacactcctcacttctcagatggggtggctgccaggcaga

SEQ ID NO: 180254 - DNA, 1476 bp, Homo Sapiens
ttgggttttgagctgttgctgagtctggcttttgtgacgggaacttttagcactcaaggagtggccttgtctctggcctgtcccccagtgctcatgggcagccaaggcctggggactgctcaggcagggtagatgtatttgccaggccagctcccgtccctgggacctcagggagtagcttcatccctgaaggctgagtgtcttctgcctcatgtgggtggcccctctgcagggttctcaggcatccagggaagtgggtgccacagcgttgcctccagcctcactggggctggctggactttgctctgacaacacagcagtggctgggcccctgcaactctccagggctcagtttccctgttggccgcactatggcataggcccctgtgtggacaccgatgagctgaccccacaaatgccacccggccgctcccccaggcttcagtggcctaacagctgttgtgtcaggaaccagcttaaagaatctttcttgctttctcaaactctccaggaattcctggtgactggaagggggagtgactcaggccctcaacctctagcaggtaagggtgctacctcctgggtgggcatgcccagttcctcagtgggcccagcgcggcccagcctccgaggaagctctgagcagctggcttggctccgaggtatttttagctacagatccagcccccctccatcaccacaacagtcgagtccaaatcaaacgcgctccaggcagtggggctggggttctgccagcctcctggccagcaggggtgggtgggcagactgggggccagtatcagctgttctgcctggacccaggccgggctgggaaggcacacttgtgcttatttcccgcctccacttctgtgcaagcttgtgctgtcataagcagagatcacagccccatttcttggatggagaaagtggacactgaggtctgaggctttgaggacagtcaggagccctcctatgggctccagtgatgcactcaccagcttctggtcctcttcttccacctcttagagtgccttggctccctcctgtcgtcctggggaacctcggccccagccctgcctccccagccagtcacagctcctccctggtcaccctgagggagctcagggcccggctggtagctgggttgctttgcttctgtccccgactcctgtggagcctggcaggcaactccatgatttgaccccggttaccttgacagccctgcctggcctcccctctcatggcccagccaccccagaacctgaagaggttttctagctgccgtgcatttgccaggctgggttacccaccctactttccctgcctgccctccagtgctgccaggcctagtgtgccagccagcgctcagccttcagtaaagggttcccctgcttccaacctccattgcactgcttcccctaagactgtgacctcctggaaggctggagcacaactgcctctcaataaacgtgttgc

SEQ ID NO: 180255 - DNA, 1748 bp, Homo Sapiens
ttggctctactcacagtgttttggtgagtgagccaggtgaggggtgggcactacacaccctactgctcccttcccttcaccttcagcacagatccaagcctgagcaccttggagctggagcccatctcatgctggaatcccctcttctccccctgcctgacccacccagcaacagctaactgcccccttccccttcccagctgaagggggccagcccctccacacctgtgggtatttctcctcaggcaggaggagagactaagaaaagaaataagacacagacaaagtatagagaaagaaaggtgggcccaggggaccggcactcagcatacagaggacccgcaccggcactggtctctgagtttcctcagtatttattgattactattttcactatctcagcaagaggaatgtggcaggagagcagggtgatagtggggagaagatcagcaagaaaacacgtgagcaaaggaatctgtgtcacgaataagttcaagggaaggtactatgcctggatgtgcacgtaggccggatttatgcttctctctacccagacatctcagtggagtaaagagtaacagagcagcattgctgccaacatgtctcgcctcccgccacagggcgttttttctcctatctcagaacaaacgtacaatcaggttttatactgagacattcagttcccaggggcaggcagaagacagaggcctttctcttatctcaacggcaaggggccttcctcttttactaatcctcctcagcacagactcttcacgggtgtcaggctgagggacggtcaggtctttcccatcccaccaggccatatttcacgctatcacgtggggagaaaccttggacaatacctggctttccagggcagagatccctgcggctttctgcagtgcattgtgcccctggtttatcgagaatggagaatggcgatgacttttaccaagcatgctgcctgtaaacattttgttaacaaggcacatcctgcacagccgtagatcccttaaaccttgattccatacatcacatgtttctgtgagctcaaggttggggcaaagttacagattaacggcatcttagggcaaagcaattgttcagggtacaggtcaaaatggagtttcttgtgtctttcttttcaacgtagacacagtaacagtctgatctctccttcttttccctacaccagccccgcctcttctacaagtcctccagctgccaaccactatattcttggcaacttgagttcctcaccccttagcagatgtttggagtaaaacgataacttccatctgttttttcaaagattttctataataagcatgtgctaattttttagtcagaaagattaatgttcagtatttacatccatccatccatccatcaatatttggcccttggtccagaaaaatattgtgatttgttgttaacccacagacacgagagatttaagatgcacctccttgagtgctggtgtcaaatggctgtctcccagcccagtctcattggctcttatggacgccgatctgcaaaccacctccaaactctcaggcagctgcagggtctagcaggcttccctatccgtgtgttattatggtttgccctccaggtcagcatttatggggagatagatgggcaagctctagaccctgccatttccctcaaaccagtgcagccaaggggcacacagatgtcccagctgcttaaacagctgccatctttaaacagaaaagtcagttttt

SEQ ID NO: 180256 - DNA, 2069 bp, Homo Sapiens
  misc_feature (1127)..(1169): n is a, c, g, or t
  misc_feature (1309)..(1356): n is a, c, g, or t
  misc_feature (1381)..(1455): n is a, c, g, or t
  misc_feature (1731)..(1752): n is a, c, g, or t
ttggaaagaagttttccctaaaagacacttggcagatgacttgccaacataaagaacttagttctgttatctaagatctatctggatgttttctttacccatgtttgttggggttttttgtttttgagacagggtcttgctctgttgaaggggtgggttgcccctccacacctgtgggtgtttcttgttaggtgaaacgagagacttagaaaagaaaaagacacaaagtatagagaaagaaataaggggactcaggggaccagcgttcagtatacggaggatccggccggcttctgaggtcccttagtatttattggtcattcttgggtgtttctcggagagggggatgtggcagggtcataggataatagtggagacaaggtcagcagataaacatgtgaacaaaggtctctgcatcatagtcaaggtaaagaattaagtgctgtgctttagatatgcatacacataaacatctcaatgccttacagtattactgcccgcatgtcccacctccagccctaaggcggttttcccctatctcagtagatggaacgtacaatcgggttttataccgagacattccattgcccagggacaggcaggagacagatgccttcctcttgtctcaactgcaaagaggcgttccttcctcttatactaaccctcctcagcacagaccctttaagggtgtcgggctgggggacggtcaggtctttctcttctcacgaggccatatttcagactatgacatggggagaaaccttggacaatacctggctttcctaggcagaggtccctgcggccttccgcagtttttgtgtccctgggtacttgagattagggagtggtgatgactcttaaggagcatgctgccctcaagcatctgtttaacaaagcacatcttgcaccgccctcaatccatttaactctgagttgacacagcacacgtttcagagagcacggggttgggggtaaggttatagattaacagaatctcaaggcagaagaatttttcttagtacataacaaaatggagtctcctatgtctacttctttctacacagacacagtaacaatctgatctctcttgcttttccccacataattgtcttttgtctctgtctgcnnnnnnnnnnnnnnnnnnnnnnnnnnnnnnnnnnnnnnnnnnnatgtagctattcatcatccttgtttattgtgctctcaaactataacatgacactgatgcctaaatgttatatttatgttccttttttcgagttttaaaattagtttaaccccatattcacacccacctcatcaagccagnnnnnnnnnnnnnnnnnnnnnnnnnnnnnnnnnnnnnnnnnnnnnnnngagatggagttgccctcttgtctcnnnnnnnnnnnnnnnnnnnnnnnnnnnnnnnnnnnnnnnnnnnnnnnnnnnnnnnnnnnnnnnnnnnnnnnnnnntgagccactgcacccggcctgcattttatattcatgtggttcattattgactttttatgattcatatttttcagtagactaaatatttctcactctcgctttaaattatactcctgttattatggtagacttttaatgctaaatcagtttaggaatatttcaaatattaatctattattttgcattattctagggagaaaatgtgtaattcaaagaagatactgatgtattgaaaaaatggaatttttggaacatcaagtataacgactgtctacnnnnnnnnnnnnnnnnnnnnnntcttcgtacaaaccaaaaagcaggtgagcattcccaatacctggtttttaacttcatactgctgaaagaggcactgaagagggtgggaaagatagtcttgtattgctgatgccactcctctcccatctccaggcagaggctgcatggcacagggagaatctgtgctcttgggggagagaaggagaatgcagtgattctggggctttgcattggaactcagtgatgccagcaccagacagaattcagccaatgcccacaaagggagtatttagccctaaccagatgggaatcacccatcccagcagttggaagctgag

SEQ ID NO: 180257 - DNA, 923 bp, Homo Sapiens
  misc_feature (675)..(741): n is a, c, g, or t
ttggtaagataatactgtgtttttactgtacctttgtcactgtgtttagatacacaaatacttacattatgttactattgcctatggtattgagtatagtaacctgctgtacagagctatagcctaggagcaataggctataccatacagcataggtgtgtcacaggctctcccaccttggtttgtgtaagtacactctgtgatgtttgcacacaacgaaatcgcctgatgacaatgctcagaatgtgtctccatcattaagagatacatgactacctaccccatcaatcttgcctattccagaaacaaagtgaaattaataatataaaattggtttgatcaatttatgaattacattgtcattgaaagtaggagaactagaccaggaggcactggtgtgaccctggagtagatggaactgtttgtgcatgtgtctttcttaccttccattctcataaagaattagcacattccccacatacaccctggccagactgtgtctttgggactgcagcactaaggtgtgtttttgtttgttaacttattcccagtgcctgtgttgaccaggaggctttgggaataaaggtacataaaggtcttggagcctggatgagcctgtggtcaagagatggcaggcagtgtccttgaatttggaatgtgactcacactctgccnnnnnnnnnnnnnnnnnnnnnnnnnnnnnnnnnnnnnnnnnnnnnnnnnnnnnnnnnnnnnnnnnnngcattttgaaaaagacctgcactttaaacaattgctttgctgagatgttgttaatttgtagctttgccccagccactttgccccagccactttgacccaacctggagctcacaaaacatgtgttgtatgaaatcaagtttaaggaatctagggctgtgcaggacgtgccttgttaacaaatg

SEQ ID NO: 180258 - DNA, 2941 bp, Homo Sapiens
  misc_feature (476)..(495): n is a, c, g, or t
  misc_feature (1700)..(1940): n is a, c, g, or t
cacgttaattttggaatggatctctataggaagtgtccccagcatatgctcaaagtcagaatatatagtttataaggaattctttaaccgtacagttatatggcacattacgtttttaaagttccataatcattagttatatctaataacatccctttgaggcaggtcagcaacatttttccctttttatggtcgaagaagcaggtgtaaagatgttgagtgatttgcccacaggcacacattaaactgatcacagagcctgttcttttgttagtaaactgaaccatgctgcctctctactagttattataaataaataataaagttgttgccatttagtgactttttgatggctttattgaatagtaagtgtagtttacaaaccttttgcctacttactttgttgaaaaagttttaaatttagaatttacttgtatcatggtatgaaacatttttatgtaaatttccctgtttcnnnnnnnnnnnnnnnnnnnnattgatcattcttgggtgtttctcgcagagggggatttggcagggtcataggacaatagtggagggaaggtcagcagataaacaagtgaacaaaggtctctggttttcctaggcagaggaccctgcgtggccttccgcagtgtttgtgtccctgggtacttgagattagggagtggtgatgactcttaaggagcatgctgccttcaagcatctgtttaacaaagcacatcttgcaccgcccttaatccatttaaccctgagtggacacagcacatgtttcagagagcacagggttgggggtaaggtcacagatcaacaggatcccaaggcagaagaatttttcttagtacagaacaaaatgaaaagtctcccatgtctacttctttctacacagacacggcaaccatccgatttctcaatcttttccccacctttcccccctttctattccacaaaagcgccattgtcatcatggcccgttctcaatgagctgttgggtacagctcccagacggggtggtggccgggcagaggggctcctcacttcccagtaggggcggccgggcagaggcgcccctcacctcccggacggggcagctggccgggcggggggctgacccccccacctccctcccggatagggtggctggccgggcggggcctgaccccctcctccctcctggacggggcggctggcctggcgggggctgaccccccacctccctcctggacggggcagctggcctggcgggggctgacccccacctccctcccggatggggtggctgcccgtcggagacgctcctcccttctcagacggggcaactgccgggcggaggggctcctcacttctcagacggggcggttgccaggcagagggtctcctcatttctcagacggggcggccgggcagagacgctcctcacctcccagacggggtcgtggccgggcagaggcgctcctcacatcccagacggggcggcgtggcagaggcgctccccacatctcagacgatgggcggccgggcagagatgctccgcacttcctaaatgggatggcatcctagatgggatggcggccgggcagagacgctcctcactttccagactgggcagccaggcagaggggctcctcacatcccagatgatgggcggccaggcagagacgctcctcacttcccagacggggtggcggccgggcagaggnnnnnnnnnnnnnnnnnnnnnnnnnnnnnnnnnnnnnnnnnnnnnnnnnnnnnnnnnnnnnnnnnnnnnnnnnnnnnnnnnnnnnnnnnnnnnnnnnnnnnnnnnnnnnnnnnnnnnnnnnnnnnnnnnnnnnnnnnnnnnnnnnnnnnnnnnnnnnnnnnnnnnnnnnnnnnnnnnnnnnnnnnnnnnnnnnnnnnnnnnnnnnnnnnnnnnnnnnnnnnnnnnnnnnnnnnnnnnnnnngtgttactcaagaaacattgagattattttcagaatttttgtattcatgtttttaaaatttgaatgtgtttctttaatttcttacagggctctcacctttgtgtatccttttggtgccacattgagtgtcatgaaaccagcagtggcggttctgtctacaggttctgtctgcttcccacttaacagacccattttggctttctatcactcaaagaaccaaggtgggaagctggcagtgcttggttcatgtcacatgttcagtgatcaatatttggacaaagaagaaaacagcaaaatcatggatgttgttttccagtggctcacgacaggagacatccacctaaaccagattgatgctgaggacccagagatttctgactacatgatgctgccctacacagccaccctatcaaagcggaatcgagagtgtctccaggagagtgatgagatcccaagggactttaccaccctcttcgacctgtccatcttccagctggataccacctccttccacagcgtcatcgaggctcacgagcagctaaatgtgaaacatgaaccactccagctcatccagcctcagtttgagacgccgctgccaacccttcagcctgcggtttttcctcccagtttccgggagttaccacctcctcctctggagctatttgatttagatgaaacgttctcctctgagaaggcacggctggctcagattaccaataagtgtactgaagaagacctggaattttatgtcaggaagtgtggtgatattcttggagtaaccagtaaactaccaaaggaccaacaggatgccaaacatatccttgagcacgtcttcttccaagtggtggagttcaagaaattgaaccaaggaacatgacatcgatacaagtgaaacagcattccagaacaatttctgaagaccatgcctcttgaagctttttctgcctcctgattctctctttgtaaactattttcaaattgtttttcaactccttatcaaa

SEQ ID NO: 180259 - DNA, 1216 bp, Homo Sapiens
tttttttttaaatggaatcagagaaaccaacaaaatatgtaacatgtataaatgcctgaggagatcagttattgagaaatccatttacaatgctggaggagaggggatggccaggaaagaagtgcaacaaataaatggaagatgaccctaaaaatgcaccagtgacagtcagtcaatccatcagaccacctcacatgcagggtagaaacatggagtgtgcggcagcatcctcctcacatccctttgtgagcacggctgctccggaatactgaccatctgggctagcacgacttagcagagggttctgcaggatgtgctattttaaagcagctgggtgcaacttgtgaaaacgggaatctagagcagaacatgtaatcagcgatggctgggattggtggacaggattgacaggagtatttgaggctctaccaggcctgtctacaggacagcttcatcaaagggacattttttaacctgttattttaaatgccacatatatgttgtaatgctgaagcatacaggtagaatttctggatcgtaactactagtgacttctgaggtttacagttagaaaatgttctcaaaggtttatcagttatgtattgatgattggtaatctagaccctctggaggctgtagaatgtgaaaagatacagctgagctgacaagttttagggcactatcttctggaatgaaatcggccaagaaaatggttcaagggcatgggggttagagaatgtttcttttacctaaaaatgttaagccaactatggaagattggggtcgtgggggcatgaaatacaaaattatgataatttatacagaactaggtttctttatgttctgcaagaaggtttttattagctaatttggggaggggggcatgctgcagtattttttttcctgggaacatgcatttctgatgggaagttattttgtttacaagagttggttttacacacaaccctgaatgaatgtgtctatggcctaaaaatggtagacctgtatttccttcccgaggcaggctgattcgtttcctgattccttctgtctgaaattacctgatgctgaccagacttatttttcctttcctgaatcttcacagctgagtttatggcacccatccaagaccttcccatttgaatgactagatttctattctatccccgatcatccttttgaaatagttctagtgataaactcagagaaattcaat

SEQ ID NO: 180260 - DNA, 1506 bp, Homo Sapiens
  misc_feature (96)..(107): n is a, c, g, or t
  misc_feature (173)..(187): n is a, c, g, or t
ttggtttctttttaataaatcaaaccttttgatgatttgaggttttatctgcagttttggaagcagtcacaaatgagacctgttataaggtggtannnnnnnnnnnncttctggacagtatttaaaggatcttattcttatttcccagggaaattctgggctcccacaaagtnnnnnnnnnnnnnnntcatagaaaaagaatgagcaggaatagttcttattccagaattgtacagtattcaccttaagttgattttttttctccttctgcaattgaactgaatacatttttcatgcatgttttccagaaaatagaagtattaatgttattaaaaagattattttttttattaaaggctatttatattatagaaactatcattaatatatattctttatttacatgatctgtcccatagtcatgcattgttttgcaccccaaattttttattgttcatagcagcatggtcagctttcttcttgatctatagatgaggctcaggcactatcccatttataccaataaccagtgtataactacttaaggaaaacataaaaacttcatcttctttccttttatttcttatgtgaatctcccgtcttccattctcttttataattgagaatgtctcaatcatatgaaattagttaccagaattaacacaatttagactatcttcctgattccttaaacccctttactgaagtatactcatgaataatactttaaaatatgggggaatagaaaccatgaactttttacctttttaaactatttatccatatctccaaagtagaacattaaaccattttaagatatgtctcattcccaagtagtcagagctcactctccaactttattaaatactatttgagcacaggacacattcttaaacattttgaaaaacattaacccaagatgtagaggctactgctagtcgtcattctagaatctgatattttactctgtatttgaaatgaatgattaatgtcctaggaaattagctttagcagatgtccaggtgccacatcaaaaaagtgcaataattattgacagttttttagattaggcatattattggaaaacaactttataaagagtgaacattgtatactctagtaaaacagcatcactttaaaaatattcatttatgaaatctgttacctatagttgaagtcttgagtagtgaacaagggactctaataccaatactcttaatatctggctattttagatcccttaaagggcataattattggaaatttaggtatttcactaaagcatgtatataatattgccaacaagaaaagtaaatttgaagattaagggaacttacttctgcaaactgtcttgcgatagttaagcagaatttaaactctgttttaagcacgaaaccagaaagattattttgcagttgtagaagatttcataacttattaaaacttattaacattttgtgttgtttagatatacgcagttgatacatactaacatcccagcctttt

SEQ ID NO: 180261 - DNA, 1355 bp, Homo Sapiens
  misc_feature (1082)..(1091): n is a, c, g, or t
caaggaatttttagaaggtgctttttatattactcttcacagagttaaattttcagaggatttagtattattgaactaagtttcataagtgtattttaagcaagtaaatctctaatgtaggaaaatccccaaaatggtagcatttactaatgttttatatggtaatttttgaaaaatatatctgatatttcttcagtaaaaatggtgttgttttaataacttaataagaatgtttaaagattctttaagtctggcttatctagctaatgtgggcctattaaataataggcagacttctgccttccttatattctttagatcttttcaaatactccattccaatatccatcaaaagacttctctttatgccacttattatctatactagtttttaatgttcaattactacaagattataattactgtttttattcatgttcccaagaaaaatacataagattcacacccaacacacttcgaaatttatttcactccctttgactatatgtgattatcaaaaaagtatttttcaagatattaaaaataagtaaaggaaaatgaaatatttttaggacattcaaaatctaatgaagttcagtgtttctttaattgagggcaggcagaggtgggggagaatttcagaaggtagtgaacccaaaggtggattcttggataattctactattctgtactctcatcatcttaacccatctgtttactaccctaaccatagttactaagcagagttttatcataataatatagacagctctcaaagtattgacattcagaggggattacaaatattatttttctatcatattgacctaccatgtccacagtcttccttgaattaccttccagttttactgggctgcatctaccgtttatgtctagtttgactttttctgagttcaccaattgctgctaggaatgtgctggtcactcagcagcacacccacatcacaggggaagattttgaaatacctggacagtctgaacacactgctctgaatacactcaattctaagaagtaccagggaaccgcatcttcttgctgaaatcttgaatttttgtcagcnnnnnnnnnnactgtggacagtaaagctggaaagatctaaataacccaacaggaaatgcggatgaaagtgcaagagttggtttgtggtcatctggagtccatgtctccaagactgctggaccttcaaattctgcaacttgttagatcatctggatgatagcacaactgttagaagacctagaagaatacagcgttgctatgactcagtggtgttgaatgcagaccatctaccagctggggaaagaatcaattataaacaggtattttaaactcc

SEQ ID NO: 180262 - DNA, 1464 bp, Homo Sapiens
  misc_feature (1220)..(1306): n is a, c, g, or t
ttgggtacaactgttatttgtcagttttagaaaataaaaaagcagaagagatctgctaccaaatgcaggaattttctatagagtctgttatagctagccttctacaggcttaactcttctcatgatggagtattgaccatcaccaacaggaaatcttttgttttaggcactccaggaaattatcagggagttctctctgtagataaccaaagtttccctagttgtacttctacccatttttcttagtgtgatcatttaaagcagtgcctcaccaactatcagagatgggggccagtaatttttgtttcatttttttccagttcattacaaatcaatgcatatgtctgtaaaacacaaaatcacacccttaaatgtgatggcaacatcaaattgccataaaagtttctaaacttttcaccccaatttctgaatttatcacagactggtaaaaaacagctcacaagccagcaccacgggcagaccacactttgcacagtgctcaaacgtaggcctaacaacctggcttggcttggcacttctaaaaaccgatcctgaggcaaggcttcttgtaaaagagtttatactggaagttaaaaatcatcaaattattagatactgggaatggagtagtaaagtagacagagcagggaaggaataaagtatgaattttcaagctggttacccatctgggcaactggagctcagttttgctgggaaagtctggaagacagtgtcagatataactaagagttattcccatcaaggggaaaggaaactgtgcttttcatccaccaaatccttgcttaacattggaatacagatgcttccaagacattaactttgtggcacttctggcttttcctacacacttattgtgtatgccaccatgtctagggggaaaaaggcccacaggcaaagaggtaccagcattcataccaccagctttcagcttgtagaggtggccgccaagaggaactcgtagttggcagtgccaactacaactactacaccaaccagctggaaactatacaaagagtatgaacaaagttcacaggagaaacaaggctctgcaacatatgaaaatatattctacttcattcataatgagacgcatgaaaattgtaactgtatcaataccatttctcacctagtagatgggcaaaaatccaaatgtttgagcacacattctgtgggtgaggctgtggaaacgtaggttcacnnnnnnnnnnnnnnnnnnnnnnnnnnnnnnnnnnnnnnnnnnnnnnnnnnnnnnnnnnnnnnnnnnnnnnnnnnnnnnnnnnnnnnnagttttgatccaggagtctcactcctgagaatttatgctatagatatgcctacaagcatttgagatgaaaaagaagcattgctatttgtttttcttgtttttcatgaataacattgtaaaagtagaatatgggcagtgattcaagcattcatctttgg

SEQ ID NO: 180263 - DNA, 1059 bp, Homo Sapiens
ttatttggttgctgacggcttgactgaactggacaaggttcccattaggcaactgcactgcaccattcacggtgctatctatgctggtttcctctttcaagtccacgctgggaagcctctctctctctggagcttcctccaaatctccaagtttgaatgagactgttctctcctccaccacagcctggaggggcacagtggcaggccctacctcagaaacaggatgcttgttttcaatatcaccaacagacaactttgtttcttcatggtcttctttcaagctattctttttttccattaaggggctttcagaaggactacactttatttctcgttcaatttttctcttcatcctgggacatacaaagaaccagacgataagggcacagaaaactgcacatcccaccgagatgaggatggtaccccacagaggaagtttgtcaaagcccagcactaggagataaaatggtgcatcttgaaaaccccagggcaacagccccctgcaatattgtgtaaaccctcctctggggactgaggggttccccataccagcccatcacccctgacagctgctgccagatttaagtgcacaggattactgtgctagtgcctatacaaatttgggagaaaaactcaatgatcatctgaaaacccacaccagcctagcccacttgaacacctgcgggactcaagttcctatgcttctcaacatacgagccttttcctttcttcaccttggaagataataaagatcactacacgctaaggacctatgactagctatgaaaaagacagcaagtgttccactctcctagctcatgatcgttaactgccacatattccattaccacctacaaacttattttaatgttaacagaatgatgtctcagtagtcacatttgtcatgctgacacaattctgtgtaaaagtgattacattcactatactggcctttagtaaaatgctttaatgagattatctccttgaaagcagtatcaaagcaagatacagaaaacaaggatattatctatcaaaagttgataatttaagaatagccaa

SEQ ID NO: 180264 - DNA, 975 bp, Homo Sapiens
ctttgtacaaaaaagttggggccgaattaatcacaacttctaagtatctttcctaattatttttatcttttaaagaaacatatcccatagattcatttctaataataatttatttcaaaaaactcttttatatgtctgtcttagtaaaacgaattactttcattttatctcgtagctctaattacattaaaaaatttttttgtagagatggggtcttgctatgttgcccacgctagtcttaaactcctagcctcaagcgatcctcctgctttagctctaacttcattttatataatatatattaataataattcttggtgaatgcaaaaagaaagaataagttgagtagaatagaactaaaaatattcattgaataagacatgagaaacaaatgtaatttgaaaagtataatatacaatttcagatataggaaattggaaagtattttaataaattatgtcacaaagcaattaataggaattattttttttaaagccagggatataagaattaactctcaggaagatgtatagagattacaggataatcatgtttctgtgtatatatatttgcataaaattctcatcttcctttaaagaagcttttaataacagtatttgaaagaggtttaaaactgacttctcttttcttttttaaggttggcatggatcctattagctgtgtaatactggaattatcaatgatatgcactggtggaggtgttatttgtgctttagaagatacttgctgttgagctgggctactgtatacagtgtacaatgtgtatttcttcaaccatatattttaaaaagacgtacatagaaacttagcactttgctatttcttttctaaactatcaaaaactctagcagtttgaaaagcctaatatttatttgtatgtcaatatttttcatttgattccctattagaattaattttaaaacttgaagacttcagacttatccacttataata

SEQ ID NO: 180265 - DNA, 1907 bp, Homo Sapiens
  misc_feature (391)..(435): n is a, c, g, or t
  misc_feature (1640)..(1679): n is a, c, g, or t
  misc_feature (1840)..(1856): n is a, c, g, or t
ttgggatctatcttaggtggacaaagccatggaatttgctatgcctaagtccttcagggtcatagctgaaagaagtatgcattcatggtacgtttgttttttaatatgctttattctgcatattagtatcacattacacagtttggtcatggtatttgtaacctggagagaatactagtgcagtcggtcttcataccaccccattcacaaccagcttaaatggcagtatccctctgtgaactcaactacccctcctgtgggtccaggctgagctctacaggtcagcctcttcatctcagcccttctaggtcctgctgtcagggctgagctgtcacttcacttttttcccagagtagtgcagcatcctctctgaaacctgagctatcatgannnnnnnnnnnnnnnnnnnnnnnnnnnnnnnnnnnnnnnnnnnnngattttagagacagagtctcattatattgccgaggctgaccttgaactcctgggcccaagcagtcctcccacctcagcctctccagtagttgggactgcaggcatgcaccactgtgccaggctaaaccgtaacattttcttgtggttgattatgtcacccttcagactcagtagttcttgatgtctttccttgtaggaaagcagctgctgttttggatctcagtttgattgaggtggtgactatccctttggtaccattgagaccagaaaccagaccagttggacattgtttttttctggttatcctgtcctgccttactatgagatttacggatgtttggggacacaggtctctgggctcatttctttttctgaggattcatataattgcctagtttttggcttagaggttggtccttccctggtttaatgatgcttttgttcagactgtcctctaggacttgaatttgaagcagaaacagaacagcacctgatcctcagttatactgcaaagcagggcctcagaaagggtaactccaattactgactttcacctaaggtgaaaaagcatccggcttctttccccttggcatctttggatcttctgagaatggtggctgaaggcagagggcctggggacaagccagcctggacatgactcctctgctgcttattaattccttacctgaactactcttgggacctcgattccttcatgggcaaaatggtcacataatagcaccatcacaagacttgccaggaatctagagcaagaggataacgtctaaagcatctagctcaggtcctcacatctggaaggtattaaatacaggctagctccttccatagatgcccatccaaagatgcatacatgaggtggcaggggattaaactatatgacccctgagatcctttccagttcttagctttgaggggggtcaatggcagtaattcagatatattgtttatcatagttaattgagtatcaacatgtcaaattggcatttattgtgttaccttgggcaaatgatataacttaagtcttaattttcttcattcttgaaatgggatagtaagagtacctacctcataatgttatgaaggtttaatgagatagcctcatgccaggcacagagtacacagtaagtgctcaatacttaactattattgttagatgttggtttgcttattcttctggctctgannnnnnnnnnnnnnnnnnnnnnnnnnnnnnnnnnnnnnnngggtgaaacttcctacatccgagtttatcctgagagaagcaccagctatggctactcacggtctcggtctgggtcaaggggccgtgactctccataccaaagcaggggttccccacactacttctctcctttcaggccctactgagacaggtgatgggaannnnnnnnnnnnnnnnnaggttaactgagctgctttgtgctcagaatctacattccagattgagccaa

SEQ ID NO: 180266 - DNA, 1194 bp, Homo Sapiens
  misc_feature (204)..(217): n is a, c, g, or t
ctttgtacaaaaaagttggccatggttccccaaaccagtcccatcaagtgactggtaaccaccagcagcctcctcagcagaacactggatttccacgtagcaatcagccctattacaatagtcgtggtgtgtctcgtggaggctcccgtggtgctagaggcttgatgaatggataccggggccctgccaatggattcagaggtnnnnnnnnnnnnnnggaggttctaatgaccttttactagttcaaattattttttgatttgtaaaatatatcacacagtttttgggaaggatgtatctgcattagcctcctatgtgcaatttaaacaatgtatattttggtacaatttgtgtatttggtataatttgttatttaaataacagatcatggaatttttgttcatttggttatgtcaaattaatgtctaccactatctcctggaggataagtattttccacattaccaaaacttacggggattgtttattatatttgtacagatgtgtgtttacatgcatagatgggttaaaagtttatcttctgaggggcagttagtacttacagaaatttataaacagattggatcaagataggaaattggagattaatttgattaactagcctggcttataatttctagttcttcccgtcttcattaataaaaaagtaaaaattccttgtgaagataagaaaattatttcttttcttgtcctaaattttaggaggatatgatggttaccgcccttcattctctaacactccaaacagtggttatacacagtctcagttcagtgctccccgggattactctggctatcaacgggtaggtaaagtagttctaaagtgtaaacctgaactaaatataccaatgaaagtgacttagtgttgttgcttaatgaacctaagtaactaatttggcgttaactttgtggtgtccaagacactctgttgaaacaaaagcttttagcactcaacatcagtactcctttagtaaagcctgttaaagacagtgatttccaagagcagagaaatatatttcactgaatgttctttgagaatagtagaagtacaacaattacagaacaggtgtagctgtgataaactgatactgaagtgtctaaaagattaaagaagattctgtattgagtgttagactgaaagaatagatgggtaagcattttttaaaaagtacc

SEQ ID NO: 180267 - DNA, 1197 bp, Homo Sapiens
  misc_feature (303)..(340): n is a, c, g, or t
ttggggcaaggtagtcaccctgtgtgtggtgggaaaatactgcaagattatatgtcaaataatgggatactcaggaatatttacaaaaatgttgaatattttaatgaaataacaaatatttagacattcaatagacttgagagtaactttaccaagggtctaagtatgagagatatgtttaatatatttttatgggctgaaaaccctgagtgggaaaataggactaatttcaccaggatgacctcctggaaatgcattttccattttggaaattattttaaaagttcattttttctggatggnnnnnnnnnnnnnnnnnnnnnnnnnnnnnnnnnnnnnntttatgagcttgttaacactaatgtcatacaaaagtactggttagcaggaataagattttaaggtgtattggcattcccatggttcccaagaaaattttcgatgactttgattaaaaagtttggattttgtctatttaaatctagcataaaaattggtcatggtgatgatcctagttatgactaatctccctttaagatttaggcatttactgtgtgaaatatgtggcacattttccataacaaacagctaaagttactgaacacaaattatggaaaggtgaaatgaggaaaacattgcaaaacactgaaagagaatatgtctttatttgcatgctggcaaatgaaaattccggtttcacttctacttcagtatctaacaagtctctaacaagaacagacattgaatgaatgaattaagttgagctgtttgaaaattagaatgttttccataaatacattattgaactatcaattagcataaactgctactttcttgtttgacactggtcacagtatttgaaagtaaaaagaatgttactgcacattcagaaatcaggtgcacataaaatttaaggtcaggatattaaaggatcacagccagtgctgttaggccttcgtttattctatctttttgtctgttcagacatgataacttttctacccatcattttttccattctagtagtggttacatttgttcttgggaattttgctaatggcttcatagtgttggtaaattgcattgagtgggtcaagagacaaaagatctcctttgctgaccaaattctcactgctctggcggtctccagagttggtttgctctgggtaatattattacattggtatgcactgtttt

SEQ ID NO: 180268 - DNA, 1393 bp, Homo Sapiens
  misc_feature (282)..(305): n is a, c, g, or t
  misc_feature (1022)..(1035): n is a, c, g, or t
ttgggttcgcgtggggctcctgggcctcccgcagccgcgtaggtttcgggaaccgggtcgcctccctgcctccggattctcacgcgctggtgtccggtggccctgggaaatcttttcttttaacaatgtgtattccttgggtcctacctatctaacacttctgctggtttctttttcttctcttttagagttcaatatttgctctgctcttttttgttgtttgtttgtttgagacggagtctcacactccagcctgggcaacaagagcaaaactccatctcnnnnnnnnnnnnnnnnnnnnnnnntgctaggggaaaatgttttaactagtcattcttcccagtagctaatgaagctgacttttaaaaagaaggctgtgagctttgcagatgctgctgccgcccagggccccctgcttccagccatggtcaaccccaccatgtttttccacattgctgtcgatggcgagcccttgggctgtgtctccttcgaggtaaggggcctggaaagcaagaagtgactgctcatctaatccataaaactatgttaacagattggagctgtttgcagacaaggttccaaagacagcagaaaatttccatgctctgagcactggagaaaaaggatttggttataagggttcctgctttcacagaattattccagggtttacgtgtcagagtggtgacttcacacgccatacagcattggtggcaagtccatctgcagggagaaatttgatgacaagaacttcatcctgaagcatacgggtcctggcatcttgtccatggcaaatgctggacccagcgtgaacgtttcccagttttttatctgccctgccaagatgccaagacagagtggttggattgcaagcatgtggtctttggcaaggtgaaagatggcatgaatattgtggaggtcatggagcacttggggtccaagaatggcaagatcagcaatcagcaagaagatcaccattgctgactggacaactgcaataaatttgacgggtgtttctcttnnnnnnnnnnnnnntactgtgacagaccaaggagccatgtgttcacatgtcatgtggaccagtatttaactgtggaaaccgcgggtggcatggagaaggaggcagtgtccgtgactgtgctgctctccgcagccccctgcctgctgtcctgtttcctcggctcctcggtgtctggactggcgttctgggtttcccagcagaaaactaaagggccagagaggtgtaaaaacacacaccacttggcaggtgatttgaagatattaaagctagaaattggaactagaaaatcaaaagaattcaaggcatcttaacgtgacagttgaactcatttgattatacttaaaaaagtttattgcagttattgactctcaa

SEQ ID NO: 180269 - DNA, 1340 bp, Homo Sapiens
  misc_feature (56)..(65): n is a, c, g, or t
  misc_feature (1012)..(1020): n is a, c, g, or t
ttggctacgtattaaaacagtataaaaacaaaatatacatactttcacttgaatcnnnnnnnnnnccagggaaccaatccactctacagaggatccacaagtacttttaaaaatgtaacttataaacacagggaaaaacaaaaggtagacctttccacagattgctagaactactttatgcatgaaaaaagtctgtttcactgatatgaaatgttaatgcactatttaatttttttctctttgttgcttcaaaatgaggttggtttaagataataataggacatctgcagataagtcatcctctacatgaaggtgacagactgttggcagtttcaaaataatcaagaagagaaatatccttagcaaagagatgactttggggatcatttgaggaatactaactctgttgcattaatgcttcaaaaaatcatcaaatgattcatgggggcctgatttgcatttgaaaaatgtttgaaattagagtctcatttgtttcaggaatgcagctacctgagttttttgtctcggcaaagtcacaaagcccatatactcacattgtgtgtctatacttgccaattaattctaaacttgtaggaaatatgccctctcttaaaggagaattttttttaaatctctgagaaatgagattctgagtttatttcagctaaaaggttgcaattcttctgaagatatctcaaatataaggttgaaagttaagtgttaataatttttgtgaatttatacacacctaaacgttaagtacacaaatattttatttgttttacaaataaggaataagtaatttataaattaagaagttacctataaaaataaaaagataacaaccctatcatatagcttatttttaaattacctgaaaaacgatattctacactgtttcctttttgactctgagttttcaaactgttacttctcccatatttctcaatccatttcactcagttgcacagtcttttaaaccctgtaattgtcataccaaagtttctttttnnnnnnnnnttactttaaatgcttagtttattcaaagagcgatccaataatataaaaggaacatgtgttaaacacaataaaattttaaatggctctaaatcaagcacatcaagagtatacaagtcttaaaggctttttaatacatactcttttcccatctatgtaacccaacttgcacatttcagctgcatgtggtgaatatgcatcatatatttactttaagaggtaagattttacttgcaaaatacatgtgcaaattaggatccatcagttgatggaagagatggactctagaatattatttcttgtggttattactcctttacaaa

SEQ ID NO: 180270 - DNA, 1662 bp, Homo Sapiens
  misc_feature (190)..(198): n is a, c, g, or t
ttggaaaaataaaaagataacaaccctatcatatagcttatttttaaattacctgaaaaacgatattctacactgtttcctttttgactctgagttttcaaactgttacttctcccatatttctcaatccatttcactcagttgcacagtcttttaaaccctgtaattgtcataccaaagtttctttttnnnnnnnnnttactttaaatgcttagtttattcaaagagcgatccaataatataaaaggaacatgtgttaaacacaataaaattttaaatggctctaaatcaagcacatcaagagtatacaagtcttaaaggctttttaatacatactcttttcccatctatgtaacccaacttgcacatttcagctgcatgtggtgaatatgcatcatatatttactttaagaggtaagattttacttgcaaaatacatgtgcaaattaggatccatcagttgatggaagagatggactctagaatattatttcttgtggttattactcctttacaaagcactttcgtctcacttgatcctcataaggaaactaaggctcagaatgagtagagctgggttcagaatctagctcttctaactccaagccatctcctctttccactgcaggaaactgcctcttttgtcagtgaaataatagaaagattgtgttagttaagtgataactgtcatttgtttgaaaatgttcgagactgaacaaatagcatttaaactgctggcatatagatgagatattgtacttttgtgcaatgtttattacctttgattaaattgtaatgtgaagcttttactaggtgaatagttcattatgtagtggaggcttcgtggttgtccattgaattgtcacagcaaaatctataagtttcttcaattctacaagatagatccatatacctttgatcacttggagactctttttttgctggtttctagataactcaggtaaatcagacctttacagagtacagggctaggtgaaagaattactgaaaaatcaccttgaaaatccgaagggctgatataccctttatgttcctgactgatgcgcagaacctgggggaaatctacagcaatatacaggttgcaatgctgataacacaacagcaatcctctcctctacgtggacttactgttgtttttttaattattattggaatgggattttagaaaatagaagttacctttgtgtgtgttttagggaaggtagagaagaatctgctctttctctgaatactgttttgaccccaggcaggaccttggaaaggccaaaacattaacagtagtacttctgttcactgaagagttatgttacatgaagataaaatggttttgtcgtgtttattattgtattttgtgttgatataaataaacatggtaatttaaacaatgaaccttagatggatgatagtttcttttatttgcttggcacaaaaccctcttcttggatttctggattcttctgtgacctgttctgactgccttgatggtcttggtctggggccaaggagaagagcaaaaggaggcagccacagaaggcaagagacagcagggagcgggcctggacatcaccattttgtaaagtcaagttctttagagttagtgctataaactgaaatgtatcaccttccacctccaatagcccc

SEQ ID NO: 180271 - DNA, 1041 bp, Homo Sapiens
  misc_feature (917)..(943): n is a, c, g, or t
ttcatagggacttttgtgaaggagcacagacgcattttgttctctagaacagctaagggtatatcatgaatattcgtaaacagcttcaggaaagatctttcatttcatggtgttttttgaattctaatgatcttgttcaaatccttcagaatgtagaaggctcatatcactaattagctttctgtttatttaagaatcctaatcttaatctaactaatctaacctaatctaactgtcagagaagccactttttctcctttgtcattttcatctattcttctctggactgtttttagcttcattgtcaagtgtgaccatcagaaccatgcagtattcccaatgaagagaaacagatttcatatgctctatcatgctttgtattttgtttccaggaccctttctaatgctatcaccaaaatagtctttccaggctacaaataagctgtaggaagatgaaggagggggtaggctagctgaactgtaagttttttaagctgacctagtgtgaaaagcattaattcagacatttcacactattagaagttttgtagaaaggtcaaagttgttaaagaaaaataatcagactgtcttaagaaaataattgtccattttaatatatttatactagaataactatccatgaatagcaaatctacccacaaacacataaatttaattagctaaatgcccaagtgattttacaaaattagtctctccaattaactgacagataaaaataagcaaataaaatcagctttaagactttaatatataacatgaatattcaaggtcctaaccaacatcaagaagtcatgatttgtaggactaaaataatttcacaaggtcttccacagtcatatttcaaactaaattacaacaatttaccctgagataatcagctgcagctcagaagtttnnnnnnnnnnnnnnnnnnnnnnnnnnnccttatgatggaaatgctcccgttccttttaatcagactgaaattcctcaacggtgtaagcactcactactagatacaaagtcccaaaatatctccaa

SEQ ID NO: 180272 - DNA, 921 bp, Homo Sapiens
ttggtttcatctcaattatattaattaaaatgaaatgttctctggttggaacagatactctcttttttttcttgcaatctttaagaatacatagatctaaaattcattagcttgacccctcaaagtaacttttaagtaaagattaaagcttttcttctcagtgaatatatctgctagaaggaaatagctgggaagaatttaatgatcagggaaattcattatttctatatgtggaaactttttgcttcgaatattgtatctttttaaatctaaatgttcatatttttcctgaagaaaccactgtgtaaaaatcaaattttaattttgaatggaataatttcaaagaactatgaagatgatttgaagctctaatttatatagtcacctataaaatgttctttatatgtgttcataagtaaattttatattgattaagttaaacttttgaattgatttgaggagcagtaaaatgaaagctatatctattctaaaccttatttagacattggtaccagttacccaggtgaaaatatggagtaactttgttttgtatggtaaggtttaggaatggtggatgaagggtatctctatataaataaagtgctcaacaatgtgcaatgattgtaaatttagtaagatattacagccatttcatgaatgctttaccattcaacatagtatctattacaaaacacctttcttgtatccatatacttcaggtgttgctgttaacatttactatgatatttattttaaccaaaatgttactcacattaaatgtttattctttaaaatgaatgtattatgtttttaacccacaaatgcatacttaccctgtgcctcatatttcaatagtactgaatatggacatcttttgtgaaatacttttattttgttatgctttaaatatacatacaaaaa

SEQ ID NO: 180273 - DNA, 2302 bp, Homo Sapiens
  misc_feature (222)..(247): n is a, c, g, or t
ttggtgagatgaacacaattgtgaacttttgtgaagattttatttttaaacgtttgaagtactagttttagttcttagcagagtagttttcaaatatgattcttatgataaatgtagacacaaactatttgagaaacatttagaactcttagcttatacattcaaaatgtaactattaaatgtgaagatttggggacaaaatgtgagtcagacactgaagannnnnnnnnnnnnnnnnnnnnnnnnngatattctctttgcattgaaatggtataaatgaatccatttaaaaagtggttaaggatttgtttagctggtgtgataataatttttaaagttgcacattgcccaaggctttttttgtgtgtttttattgttgtttgtacatttgaaaaatattctttgaataaccttgcagtactatatttcaatttctttataaatttaagtgcattttaactcataattgtacactataatataagcctaagtttttattcataagttttattgaagttctgatcggtccccttcagaaatttttttatattattcttcaagttactttcttatttatattgtatgtgcattttatccattaatgtttcatactttctgagagtataatacccttttaaaagatatttggtataccaatacttttcctggattgaaaactttttttaaactttttaaaatttgggccactctgtatgcatatgtttggtcttgttaaagaggaagaaaggatgtgtgttatactgtacctgtgaatgttgatacagttacaatttatttgacaaggttgtaattctagaatatgcttaataaaatgaaaactggccatgactacagccagaactgttatgagattaacatttctattgagaagcttttgagtaaagtactgtatttgttcatgaagatgactgagatggtaacacttcgtgtagcttaaggaaatgggcagaatttcgtaaatgctgttgtgcagatgtgttttccctgaatgctttcgtattagtggcgaccagtttctcacagaattgtgaagcctgaaggccaagaggaagtcactgttaaaggactctgtgccatcttacaaccttggatgaattatcctgccaacgtgaaaacctcatgttcaaagaacacttccctttagccgatgtaactgctggttttgtttttcatatgtgtttttcttacactcatttgaatgctttcaagcatttgtaaacttaaaaaatgtataaagggcaaaaagtctgaacccttgttttctgaaatctaatcagttatgtatggtttctgaagggtaattttattttggaataggtaaaggaaacctgttttgtttgtttttcctgagggctagatgcattttttttctcacactcttaatgacttttaacatttatactgagcatccatagatatattcctagaagtatgagaagaattattcttattgaccattaatgtcatgttcattttaatgtaatataattgagatgaaatgttctctggttggaacagatactctcttttttttcttgcaatctttaagaatacatagatctaaaattcattagcttgacccctcaaagtaacttttaagtaaagattaaagcttttcttctcagtgaatatatctgctagaaggaaatagctgggaagaatttaatgatcagggaaattcattatttctatatgtggaaactttttgcttcgaatattgtatctttttaaatctaaatgttcatatttttcctgaagaaaccactgtgtaaaaatcaaattttaattttgaatggaataatttcaaagaactatgaagatgatttgaagctctaatttatatagtcacctataaaatgttctttatatgtgttcataagtaaattttatattgattaagttaaacttttgaattgatttgaggagcagtaaaatgaaagctatatctattctaaaccttatttagacattggtaccagttacccaggtgaaaatatggagtaactttgttttgtatggtaaggtttaggaatggtggatgaagggtatctctatataaataaagtgctcaacaatgtgcaatgattgtaaatttagtaagatattacagccatttcatgaatgctttaccattcaacatagtatctattacaaaacacctttcttgtatccatatacttcaagtgttgctgttaacatttactatgatatttattttaaccaaaatgttactcacattaaatgtttattctttaaaatgaatgtattatgtttttaaccc

SEQ ID NO: 180274 - DNA, 699 bp, Homo Sapiens
  misc_feature (44)..(59): n is a, c, g, or t
  misc_feature (542)..(592): n is a, c, g, or t
accacagcactctagcctaagcaacagagcaagactccatctcnnnnnnnnnnnnnnnngagtattaaataacatacacacaaagacaaatgcaaaagtactaacctgtatggactaggactataggaaaacctggaatttgagcattaaatttggctctgagcttactttcccaccctgaaagttctccaaggaaaatgcttgtgcagctgactgccaacccccccagattcctcacgtcccgcacccttctcattatctggcctgcatctctcctgcttcagcaccttctgactcgtttggcctcctggatgccattctccttgtcatttttcttggactgggtgacccatgtctctccctttccctcagccttccttcagatcaaaccaccctgatcctcatgtttcttcctatctcctagatatttggcatgatcttcagtatgatcttgtgctgtgctatccgcaggaaccgcgagatggtctagagtcagcttacatccctgagcaggaaagtttacccatgaagattggtgggannnnnnnnnnnnnnnnnnnnnnnnnnnnnnnnnnnnnnnnnnnnnnnnnnnccactaattttagtattcattctgcattgctaaataaaagctgaaattactttatgtttgtcttttaatgcttcattctatattgacatttgtagttgagcgggggg

SEQ ID NO: 180275 - DNA, 1111 bp, Homo Sapiens
  misc_feature (928)..(937): n is a, c, g, or t
gagcaatgctttttctataatgccaactttgtacaaaaaagttgggttttcaatcgtgggcttttctttgttgtggggagggggtcgggggatagtttgatttccattttctgaaaacgacagacttggattctgtttgtgtgtgcatattttatccagccttaagttataaagctcatctgtcccgctgcattccctgtgtattttcaggacatggctcgtgggtgtgtgtgttcattgtgtgcgtctgtatgtatttttctgtcatcactgttccctctcctcccgagtgtgcattcagttaatataatcagttgcttgcttctttcaaagtgctttgaaggtcttgaactcatgtgtgagcatctttatcaactatcccaattgcatgttctccatcacatattctcttatttgctctgtaccccctgagaatatgttttagagatattggaataaagctgtctgggtaaggagtaggcttagccgacctatgaataatacactttagtctagttctttattctaaatctggattgccagtattgtgtatttaaaccaagtctgtgaatacctgctttttttggccacagagtaacaagttttcatgtaagatcttcataccaaagtaggaagtaaaaatagcttagaaagctctgtcaggtgttttgtgcagctgacagaggtaatgttacatcacctaaaaaagaaagatacacggtcagttatcctaaaaataaattgtttggaaagtacaatgcaccacatttttgtagaagtctactatttgataaacagttgaaattcaagatgtgtttgacccttagtcatttttactctttggttctgagtatacctattttcttagcgtatctgccttgtttatctttttcttcaccttttaacaagtatgacataggaaagtcannnnnnnnnnagaattcatggatcagtctgatctactcttattcataatggaacatgtaaatatactgaaaactgtttttcacgagagaaatatgagttggagggaaggaaaagtggttctacttatgttccaaaatcctcatcagagaaggtatgatgttctcaggtgtggaaatatttttta

SEQ ID NO: 180276 - DNA, 1143 bp, Homo Sapiens
ttgggtctcatttttttactgatggtttaatacaaaatacacagagcttgtttcccctcataagtagtgttcgctctgatatgaacttcacaaatacagctcatcaaaagcagactctgagaagcctcgtgctgtagcagaaagttctgcatcatgtgactgtggacaggcaggaggaaacagaacagacaagcattgtcttttgtcattgctcgaagtgcaagcgtgcatacctgtggagggaactggtggctgcttgtaaatgttctgcagcatctcttgacacacttgtcatgacacaatccagtaccttggttttcaggttatctgacaaaggcagctttgattgggacatggaggcatgggcaggttctcctttctttggaaacacatccatgctgggatgcacagttcttttcctaaggattgtgtttactcctgactgcaacgtcttggccactgtttggagcagtttggtctgaaggtcattaaggatctgcttgcatcttgtttcatgtcctccgtgacagactgcagaccatgttagaaaagaaggaaggtttgtggatcaagagggttgacattaggtttggtgagatgagttgcttggcacagatcagcagaacaggaccctggtgataaggcatctggctttgctaaccacttatcatcttccattattctctttcttaactaagtagacccgaaagtgcacttttgaagtctggtttagatggcgagattccgaatctacaatgatcgagtactggtggccacttttctccaacattaagtaaagaggaggagattccaccttcagaaagtgctgggaagcattggctttcttcccacattggtagaagagatggaggaggaaaccagggtgcacatttctacagatcccctttgcctgctggtgtttgccttgtaagataagtcactggggggaaggggaaatctatgaaatccaagataaaggcatagtctttcagctctattggtgttaaaagtatatttgtgtccaaatgttaatcaacacaaatgtacagtactcaatactgacttttttcacttcaaaatgttttcaagggaaattcagcagacatcacaactgtattttattagtgaaaagatctataaaga

SEQ ID NO: 180277 - DNA, 2473 bp, Homo Sapiens
aacttgctgttggaacattgttttattctctagattttggtatgttataataatattgtgaagtaatctaacagaaacaaagctatgttttaaatctttagagctcttttaaaccaaaacaaatcagttgctgcttagcagtagatttaatgtatttgatgctgttatacataatttcatgtttgtttatcacttcagtactttgaatttctattgggaaatagctttcattgtatatgttattttaaaatcacataagagatatgctatgagcttgcatttcctagagcatatctcttgtgtgatttgctttttaaaagctctatctttttaaaagattattgagataatttccttgacacaggaacatatataattctgtgagtcttggctttgctttgtggggtgttcttggaatatcttgtgactgcgacctcctagggtcactggcattttgcttagctataaattataaacagatggaactttaccacgccttgccatttttttgctttttacttggcaagtgttttaaaaaaggcctcaaaggaaaggggtgagtgacttttaaacactagaatccaaaaatttacttcagataatttttttggcatacttacttgcagtaagatgatctttcactttgcctcccaagtagctgggacaacagggtgtgtgcaccttgctagttatttaatccattatataacccctagctcaggtggcattttttagtatgttccatcaataggtaatattcatgccatcatcagatccataattgaattatatgtttttgtaatgaaatagggtttgtaatgaaagacagcatgagaagtttcagctacaattttaacagctgtgtaattttttggtgtatattctgtttttagtcttaggaaattatttgtaaaactaataatcatgttgcttcaggaagatctcataatttcttatgagatatataaccttcatccatagtaatttttaatgagaatctttcatttcatttcatttaatgctagtttaatcactcttgttaaacttttattatgtgaataatttgatcatttagatttggtaattaaattaaaccatttttctgaaacaaaaaggccttttaataaagttagacagaaacaacatatttatagataatttgctagcatttcttttaaaaataattttaaaagcatattttcctaagttttgaatatataaatttctatagaatatctttcagtagacttataggaagatggaaccagcattttgaaagcgactaagatgggagtttggtgttgtgaaggaacagaaatgtgtgactgtatgtcaacaggatgatggtagtgatgatctaaataatcactattgttataaccaccacttagcaggtgccagacacttccatgtaattttatttgaactttacagtagctttgtggtagctattgtctccactttacagattagaaaactgaggtcaaagattcctataactagtatgtagcagaactgtgacttgaacttggaaaattgttttcctaacctcttctttatataaactctaacacttacataaagaaaagtttaactctctatgtaagctgcctaattatttgccttaccttccatttcagaaatggcatttatcatgataattataaaaatgagtatcagacatgtttgatggtgttgccagtctcttccattcacttcttgccttcaaaatctgaaaagcattttctttgatccagcagaggaaagtgggatgatatagttgtcagtgatagttacttttttgatgttaagtctgcacagctgtaagtcaagcagctgtgtagagaacggatttcaccaccaggagagctgtagttacaaacttaattttgaaagtgatcctagcacaactgctaatgtctttagactttgatttattagcaattagctcttgtcattgctagtagctagcaggttactctgttactctaagtaaattcagttgtgtgataaaaatgggtcaaatgtaatatgtattctataaattgtagaaaaaacatttcttagaaaaatttccaaagatgaaggactttagtattcagggatagtgcactgctctttgaaaactattaagtatttgggaatgtctggattatggtgggccaatgcttttgatcaactgccctgcacaaaaatgaaaaatgcttgagacagtgtatgcgtatatgtttattcctggaggatttaatctatttagttataattgtgactaaaagtttcacatctcaaaaagtttattagagattatgggctgtacttcatgggttttaatatttctttcaattataccagaatgtaaagctaacaaatctcttttatgataaagtagccaatatttggtgcagcttcaatgtctttctgagattaaggatattttgccacgtcacatccacttaataatgagcttttgttt

SEQ ID NO: 180278 - DNA, 2326 bp, Homo Sapiens
  misc_feature (511)..(523): n is a, c, g, or t
  misc_feature (547)..(573): n is a, c, g, or t
ttggcagcagcctcagctcataccagccatccaatgcaaggaaggacaacaccaagcccagaggacagttcctggactgatttcttcaacccaatctcacaccccatgggacgaggtcatcaagcaggaagaaggatgggtaatagcctctgagatttttatatattatgttttttgaaatccactgagtgactgctgactatttttctagaaatatgcccttggttttagaccaaactactttcctgaaggacctgaggttcttcaaaaattagttttcttggtaggagtgatactcatattcacctgaatatgaagttctgagctgaaagtaaggaatttagcaggagggttggcaaaagaaaaaacttattgtcaaaatatatctgtgtgaggcagtaagtaatagatatgaaatgaatgttgccaacaataaacgctaaagaaattctgagaacccctccctgcccaccacagcatcacagaaaggtgaattggacttggtttatgnnnnnnnnnnnnnccctggatagtcagagaaaggaannnnnnnnnnnnnnnnnnnnnnnnnnncagttttcctaagaaggagactcctgtaaggagaaacgtgaaggaagaaaagccaaggaatgaatatgtcagtgagtggatccatttttcacaagggaagatgtgtttgaatggctaggcaggggccattatgttgagtgactgaagtaccacaggcagacccagcacacatgagtttgcacatggcagctggagctctgaggacacccatgggggaaaaccaagccaggcaaagatcttcagaatcaatattaattctatgtactgatgaagagaaagagattccattaaattaatgaacatgtcaaggacaatacaattggcttcaactacacaatggtatgatgactcttgaaggactctacttataagagggaagatgaacaagagtctagagcccatcatcaagtgggactttttctgggagaatgtccatttgtggttttgattcaggttagcacttgctcttgtttgaaatctgggataacagggtcaccacatttttgtcctacaaagatctttaatattttagtgttgaatatttagtgttgaatcttgaatatttagtgttgaaaggctgcagtgcagacctgggtacccagtattctggtgcttcactgggactgattaaatctcccccagaggcagtgatgtggatagactttgactgaattgacagccagaaatatcgatggggtttatgaattgtttggcctctgtttcactcaagacttcttatttcagcagagtagatctgtgataactgttaaaaacaacatttacaagtatttcagtgaaatttctgcactactcaacattgtacatgttaaattttaaagaccgcttatacttgggtttttgggaagaataattcaatgacgtccactgcttcttatttcttgcccctgtatactttctgtaactccacctaggtggtcttggatgacgattctgtttatttgcatattcactttgtgaagaaaaaaagactaaaggggggaagagggctatttttaaaagtccctttggttggtaagggggaggggataaaatggtgcctgagccagcacactttgtcttttctccatgtgtcagattgcatgtttctataaaaaaggcaatgtttctgtctctctgcaagatttgggtgttccatcatgcactcatgtggagtccttccagactcagcaaaaacaaacacacagcatagctttcatataactcggcccttcaaggaaagccagttacttgttgtggtgctctttgatgaaacaataatctatctcagttcgggagatatagtcagtatgtgctttctttcctcttggccagatgtgaatatttaaaaaaatcagctgtagaccataagccaccttcaggtagtggtttgggaaatcaagcaataacactaatattgattccttcagatatggactccagtcatagtacaacgcttcagcctactgcaaatccaaacacaggtttggtggaagatttggacaggacaggacctctttcaatgacaacgcagcagagtaattctcagagcttctctacatcacatgaaggcttggaagaagataaagaccatccaacaacttctactctgacatcaagcaatagaatgatgtcacaggtggaagaagagacccaaatcattctgaagctcaactactttactgggagggttatacctctcattacccacacacgaaggaaagcaggaccttcatcccagtgacctcagctaaga

SEQ ID NO: 180279 - DNA, 949 bp, Homo Sapiens
  misc_feature (198)..(247): n is a, c, g, or t
atctaaaagaataaaattttttaaaaaatgagcttctccaattacaaaaagacatggagaaactttaaatgcacactgataagtgaaagaagccaattgaaaaggctacatactatatgactccaactacatggcattctggaaaaggcaaaacgacggagacagtaaaaagatcaggggttgccatgggcttaagannnnnnnnnnnnnnnnnnnnnnnnnnnnnnnnnnnnnnnnnnnnnnnnnnataaaagatttttagggaagtgaaactatcctgtatgatactggtaataggggatacatgtcattacacatgttaaagtccatagaatacataacacaaagtaaactataaaattagttaataataatatatccatattcgctcctttgtaataaatgtaccacactaacacaatatgttaatgagggggaaactgttgggatgaagaaggtatatgggaactcattgttttctgctcaattttctgtatatctaaaaaatagtcttttaatttagaaaaatatatctaagctatattttaaggccttaatactgtgacattaaagtgtttagacacctaaataggacacacgtattttacagttatcatgggcattttttcacattagtaaaaagaggtgtaattctggcagaaatgctcagcagaatgtcatctagaatttgctttaaaatactccagctggagatgaaaggatagcaaagaggcctagatgaaaccagatgggccatttgtttctaattatagaagctgagtgttaaatatgtacaaatttattatactatgctccctatttttatgtgcttcagaatgtccataataaaagtgaggggaggatatttatggttaagaaattaaaggaggccagccgggcgcggtggctcacgcctggcctaattaatatttctttttactgaagccaa

SEQ ID NO: 180280 - DNA, 1376 bp, Homo Sapiens
  misc_feature (427)..(466): n is a, c, g, or t
  misc_feature (1198)..(1216): n is a, c, g, or t
ttgggccagaattacacctctctttgctaatgtgaaaaaatgcccatgataactgtaaaatacgtgtgtcctatttaggtgtctaaacactttaatgtcacagtattaaggccttaaaatatagcttagatatatttttctaaattaaaagactttattttttagatatacagaaaattgagcagaaaacaatgagttcccatataccttcttcatcccaacagtttccccctcattaacatattgtgttagtgtggtacatttattacaaaggagtgaatattgatatattattattaactaattttatagtttactttgtgttatgtattctatggactttaacatgtgtaatgacatgtatcccctattaccagtatcatacaggatagtttcacttccctaaaaatctttgatgttctacccnnnnnnnnnnnnnnnnnnnnnnnnnnnnnnnnnnnnnnnnatcttaagcccatggcaacccctgatctttttactgtctccatcgttttgccttttccagaatgccatgtagttggagtcatatagtatgtagccttttcagttggcttctttcacttaccagtgtgccttgaaggtttctccatgtctttttgtaatttgagaagctcattttttaaaaattttattcttttagattgttgaacagataaatacgaaactgccatcatcatttgtagaaaaactgtttataccatcatctaaactactattcttgcgttatcataaagaaaaagaggtaagtaatacactgataatgaattttgacaacttgagtcactgaagagttggacctaatgttgcttaccccaggctatataagtgaaattgagtgaaatgtgaaatgtttgatttagaatatagtgattgtatttgttcttttaaatttatatttcttgataatcatactgaatactttcatgaatggtgtgccagatactcttttcagactatgcatcttttgctgttattaaatttattaaattttcataagggtaaaacaagttgacacatttataaagttataaattaagaagtactgtatatttggtaaacaaaaatgactggcttttcaaccaccccctagtcaaatccaccacagactttcctggtagatttaagaaaccccagtcttaaactgctgtttgcatatgtcttttgatgttgattattnnnnnnnnnnnnnnnnnnncggccattttggaaatttcctattgacagttttcatttatagtactctttatttgtgataaaacttaatagatttgaaatagcatactgatctgtgtcagttttctgattggtttttaaaaaattaaaatattaatgctacagacagtgaattgatcgat

SEQ ID NO: 180281 - DNA, 1403 bp, Homo Sapiens
  misc_feature (121)..(160): n is a, c, g, or t
  misc_feature (887)..(895): n is a, c, g, or t
ttgggtttactttgtcgttatgtattctatggactttaacatgtgtaatgacatgtatcccctattaccagtatcatacaggatagtttcacttccctaaaaatctttgatgttctacccnnnnnnnnnnnnnnnnnnnnnnnnnnnnnnnnnnnnnnnnatcttaagcccatggcaacccctgatctttttactgtctccatcgttttgccttttccagaatgccatgtagttggagtcatatagtatgtagccttttcaattgacttctttcacttaccagtgtgcatttaaggtttctccatgtctttttgtaatttgagaagctcattttttaaaaattttattcttttagattgttgaacagataaatacgaaactgccatcatcatttgtagaaaaactgtttataccatcatctaaactactattcttgcgttatcataaagaaaaagaggtaagtaatacactgataatgaattttgacaacttgagtcactgaagagttggacctaatgttgcttaccaggctatataagtgaaattgagtgaaatgtgaaatgtttgatttagaatatagtgattgtatttgttcttttaaatttatatttcttgataatcatactgaatactttcatgaatgatgtgccagatactcttttcagactatgcatctcttgctgttattaaatttattaaattttcataagggtaaaacaagttgacacatttataaagttataaattaagtactgtatattttgtaaacaaaaatgactggcttttcaaccaccccctagtcaaatccaccacagactttcctggtagatttaagaaacccagtcttaaattgctgtttgcatatgtcttttgatgttgattatttnnnnnnnnncggccattttggaaatttcctattgacagttttcatttatagtactctttatttgtgataaaacttaatagatttgaaatagcatactgatctgtgtcagttttctgattggttttttaaaaattaaaatattaagtgctacggacagtgaattgatcaatcttaaatttatttgtatcatcagcactaatacagatagtgatttattttccatataattttagaagatttattttccatttatcacttccttgaattttttgtttttcaggttgttgctgtagcccatgctgtttatcaagcaatgctcagcttgaagaatattcctgttttgggagactgcctataaagttaatattgggagaaatgacttgtgccctaaacaacctcctgcacagtctgcaacttcctgaggcctgttctgaaataaaacatgaggcttttaagaatcatgtgtttcatgtagacatgcaaaatttgtagttaaatttgacctcagtgccctgac

SEQ ID NO: 180282 - DNA, 1770 bp, Homo Sapiens
  misc_feature (410)..(418): n is a, c, g, or t
  misc_feature (481)..(521): n is a, c, g, or t
tggtcacccttaaaggtgggaagagttgaggtataagtagtagatatgatttaatagttattcttcttggaaaaaattatttttttaaaaagaaagattgtaccagttttttactaagttgttggattgagtaatatttttaagaagctttttcctgtttactactcagattattagtgatcctgtttttgggtagcatgatagaccaagtattaaatagttttaacttggaaggctgtagagatgaacatcaaaacactgggggaaaaaaaggtatatatatgtcacttgatagtctgtatgctaaggtctctatgaacagattggaaattaatagattcacttttaacttaaaatagatctcataattccaaatagagcattaataggaagaaattataaaagtcacnnnnnnnnngaacactgacagtcaggaaacctgggttctacttctggctctgttcctttctttctgcgtgannnnnnnnnnnnnnnnnnnnnnnnnnnnnnnnnnnnnnnnnaaaacaagaatataaaattctgaggcctattttagctctaagccagaccatgttataacttcttaactgaatacttcttatctatactttttttctatatctttccatctatctgtaagtagcttttcccatgatctgacttgtttatatttcctattaactgacaaagcatttaaaaacagttaaaaattgtctcgacaggcattttaaatgtcaagacattataaaatactttagatttatacagcaattgtgaacacctttgacaaatgaacatgtctgttcagcctttttggtacccctttttattttgcttaggtagatcaaattctaagttgatcttttctagcagcagggtcagagtctagtgatcgtttttaaaatggcttagatgctacctttcttttctgagaactcagtgtgatataatccttataagatattgacagctaattttatggattatcctaccgggacagtggaacctaagtagtttgaagacgagaaattgttttgattcagaagcaatgggttcactagtgaaaggaaagatcccacgatcgtaagtggtaaatgtttatatttgttgaataactctctgaaaaaaggaaataaagtagattagccttggtaagaggtggcttaagagtggttttatgatctaagttttatttgaaaaatgtgtgaaacttgtttaaggtaaatgtgagaattaataaaggaattgagaagaaagatatttgatcgttttttgaataacatttacctaattaagaagttaactacttttctgaggcatcttttttatccctctccgttttcctcctcccaaaagaagttgttcttgattttaaaagtttgataaattaacaaggttgaaatttgaatatgatatacattgaattaagatttgttcagggctttcttaattcagttctcaagtatgaatttctcaggtctgaattttttaggtagaaaattctcaagtatgaatttcttttctagcaattgcagagcctgtttttgctgtggtcaaagctgactgatagactgtggtttaagtcaacttattcaaaaatgtcttcaactctgctggtcgagacaagaaatctttatggggtagttggagctgaaagcaggttagggcacctattaaaacatcacagaacaggttagattgtggtttgaagaactggatattccccaatggttttaactgaggttatgtgcctaagtcttcaaaatgggg

SEQ ID NO: 180283 - DNA, 1825 bp, Homo Sapiens
  misc_feature (106)..(114): n is a, c, g, or t
  misc_feature (1644)..(1653): n is a, c, g, or t
cccactttgtacaaaaaagttggattacagacccagaaaactgtgagctattatatagtgtttcttttttaacacaaatcttttaactttaaaaaaaggcaaaaannnnnnnnnctacttcccacccagcttaccaccttgatctctttaacttatgttctaaactttggtgttaatggtggtgtctagcatgctagtagttagattttatttagatgccataactggtaatacagcttttattttgactatattaatttagttttttgaggggaagtttgtttattctgtgactctcaaagcacacagaggttttaaaatatatattattaagactgagagaagaggaaatgggagggagtaacatcacagaagtgctgttgttcaactgttcttcaatatagttgctagtaggtttgtatttactcagtaaggaagtcagtgacctgaactacctataaaaattcagcagtgctgcagtgttgcttaagtgaaaccctttggctatctagtagtttttatgctactgaaacttggattactgtatgatattcagcttgtcttgggccctctatgtagacaaacattcatattcatagtagtgttgtatactggcctgtttttataactttatttttcaaatattaacaaccactgctttcagagtggttattttgttatttttgaagcaggaaataaccatttgtatttgcacctgcgtattgcatatgaattatggtatacttggcaaatgcttttcttttacctgtgaaaattctgaaagctggtccaagctacattgcataccaaattgtgctcttatatattatttgcatcgtgtcctttttaatcaaatagcatgttttagttttattatagtagcttttgctgtaagaatgtcacttgcttatcttttattgtacttgaattcttaatcatgcttttaacattgtatttaacaaatcatttcgtattaggttccattaaaatgtcattcctttgaaaaggcaagggatttccactttcagaatttgaaaatgaaagtagcatgtttatctaaaggcagaaaatagttcggacttggtattatgaaaataagtaatggtttctggagaggatttgtttagatttgcacagatggcgatggcaccttttacttaaattaacattaatcaacagtgctaaggaaaatttacacaaaattacaagataaaacatggaaatgtgtgcctttcagtatacaaactcttgcttggtggccatttgggtaatcagaccatttgaatgcctgagagcatgtttaatttctgtggagtgccacatatggctaaaacaactctttaatgtgcaattaatttctagagtaaaatgtctgttatgtgagggggatctttatgttgggcttttctattttttaaatgttcacatttctttctgttaattaaaatgccatcataatgtcacatttacactgttgcctcttttaaaagcaaagccactttcttgttctaagattacatcaagacttgagcagtgtgtagtaattaaaatgtgtgcttaatgagcataatagattctggttttaggaaataacatatagcttttatatgaatattttcttttgctataatgaaagtcacagannnnnnnnnncctggcttttatggaggaatgaaaagagttgtctccctctaagagtatactatttttgattctcatagcaataatgtcaccattcttatcagagggtaaataccccttgtataggaaaacagacatatttcctcttgggagttctctttatgacttagcattttcttctact

SEQ ID NO: 180284 - DNA, 1372 bp, Homo Sapiens
  misc_feature (103)..(112): n is a, c, g, or t
tatttaccctctgataagaatggtgacattattgctatgagaatcaaaaatagtatactcttagagggagacaactcttttcattcctccataaaagccaggnnnnnnnnnntctgtgactttcattatagcaaaagaaaatattcatataaaagctatatgttatttcctaaaacccgaatctattatgctcattaagcacacattttaattactacacactgctcaagtcttgatgtaatcttagaacaagaaagtggctttgcttttaaaagaggcaacagtgtaaatgtgacattatgatggcattttaattaacagaaagaaatgtgaacatttaaaaaatagaaaagcccaacataaagatccccctcacataacagacattttactctagaaattaattgcacattaaagagttgttttagccatatgtggcactccacagaaattaaacatgctctcaggcattcaaatggtctgattacccaaatggccaccaagcaagagtttgtatactgaaaggcacacatttccatgttttatcttgtaattttgtgtaaattttccttagcactgttgattaatgttaatttaagtaaaaggtgccatcgccatctgtgcaaatctaaacaaatcctctccagaaaccattacttattttcataataccaagtccgaactattttctgcctttagataaacatgctactttcattttcaaattctgaaagtggaaatcccttgccttttcaaaggaatgacattttaatggaacctaatacgaaatgatttgttaaatacaatgttaaaagcatgattaagaattcaagtacaataaaagataagcaagtgacattcttacagcaaaagctactataataaaactaaaacatgctatttgattaaaaaggacacgatgcaaataatatataagagcacaatttggtatgcaatgtagcttggaccagctttcagaattttcacaggtaaaagaaaagcatttgccaagtataccataattcatatgcaatacgcaggtgcaaatacaaatggttatttcctgcttcaaaaataacaaaataaccactctgaaagcagtggttgttaatatttgaaaaataaagttataaaaacaggccagtatacaacactactatgaatatgaatgtttgtctacatagagggcccaagacaagctgaatatcatacagtaatccaagtttcagtagcataaaaactactagatagccaaagggtttcacttaagcaacactgcagcactgctgaatttttataggtagttcaggtcactgacttccttactgagtaaatacaaacctactagcaacccaacttttttgtacaaagt

SEQ ID NO: 180285 - DNA, 843 bp, Homo Sapiens
  misc_feature (718)..(731): n is a, c, g, or t
ttggcatcattgggaatggagggaaataaatgactggatggtcgctgctttttaagtttcaaattgacattccagacaagcggtgcctgagcccgtgcctgtcttcagatcttcacagcacagttcctgggaaggtggagccaccagcctctccctgacaagcaaagtggatcagcaaaggctgcagtcaccagcatcttttccaaccttaatgaactgtatcctcaaaagaacactatcagactggtaagacaagcattattgtcccacttcacagatgaagagcttgggggccctgtggatgtgtaggagagtcggccttcctttttataggccttttgctgagctcagaggacagagcagaagacaaagccgaatgcagccctaagcagacactatcccagcccaaggagctatgcagacagctcctgcctagaggagaaacaattctctccttcagccaggcatgtggcacagaggtgaacaggaaatgcttagggagacagttcacagatatatatgtacttcacagggcacaatttaatccataaatcaatcatggatcaccgctaaagaaaacaaaatatgctgccactaatttgccaccaccctgtgagcatgattggatgatgtttattttgattaggagattgctccatttataaatcttcaatacatcctgtccccctaaaacggcatctgggtcttttgagggttnnnnnnnnnnnnnngtgaaattggatgagggatgagagctggacttctgtgtgtcccggggtctctggatccacagcctggatgcctagcatcagttaagcccacgctggggtcgcatcacatctc

SEQ ID NO: 180286 - DNA, 1590 bp, Homo Sapiens
  misc_feature (1182)..(1230): n is a, c, g, or t
ttttggaaataaatacaaatatgaaactgtaacacagagtgctagaaaataattacaaagcaacatattagtaagtacatggaccacagtacaaactcaaaagataagtgctgaggcagcacagaatgagggaggtcatcgcatgaggtgatgtcaatcagggagagctcagtcagaagatataaaggaagaaaggctttgaagggagtgatgaacatgagctgggaccaaagagcaatctaagcaaaaagaatagcatgagaaaggcacagaggcaagagcttgtaagacatcagtagaaggctgtaggaagtttgaatctgttgaatcaaggtgaatatgctagagagtaatgaaggctgatgaatattaggcatagaggtaatggagaatttggaacaccactgctccataggaattatctactgggtgttacttagtgaaaatgaaattttacaatagagatattgtaaaaatgggtgtttgaggaggatcgtctttgaaaaattatctactgggtgttactgaaaatgaaaattttacaatacggatattgtaaaaatggagtttgaggaggagcaccttagaaactttatacaagatggggatcctgggagcaaggaaattggaaaaaaaagaattacagtaacctgggcctcagatctacatgaaaagctataatgggatgagagaaatgggagatcaagcctcaaggagaaaactgattaaaaactggactgacagcaagtttttggacatggagaatggagagcagaaaaagataactccaaggctggggtaaaaatataaaggtggtgacacttttcagggcaaaggaattacgcaatgaggcctgtttaaaaagaaaacgggggctggggatatatggtgatgaatcctgttttcaaatatcaagttgtacaggtacctgtggaaaattccaaaagtcacaaactgacccacagggtgggaaaaatgaagtcattcgaatacaaatagtaggtataaacaatcaaaatggataaataggagtatagaaaatgaagtgaataaaagacagggagattattctcagtggagaagaggagaaaggggagtgggtggaaagatcaactaaaaaaagaaagacagatattagagaaaaaggatcccacaagccaaaggagggagaattcaacaatnnnnnnnnnnnnnnnnnnnnnnnnnnnnnnnnnnnnnnnnnnnnnnnnngccttattatttgtccactggtgagtctaagaacatttcactggaatgctaagtatgaaagccagtaaaaagaagttttaagaacagattaatgaaaaaggggggttgaaaaatcaaagatatgtttgaaaaaccatgaacaatagaggagaaacagaatggtagttggaaatgggcaatgaggatgaaagcatttcacattttatgctgtagatgaacttactattgtcatcctaactgaccatctgcctggcctggtacatggatatttcatttccctccacaattctactttccctttggcagtttggagaaaaatatatttgaatttattattgctttatcctcccaattacccaa

SEQ ID NO: 180287 - DNA, 1156 bp, Homo Sapiens
ttggcacagccaaaccatatcaataggtattattttatcccccattttataaatgaggaaacggaggcttagttgagtgagctgaccaatatcacccagccagtatgtgataaaactgattctgacccacacagtttgattctagagcctgttctgactactgtgctaaggtgtgtataatgaacatggtaattctaaccagctttttaaaaatatgtagcgcttgtcatgagaggtactggggaaaagaatgtgcagtagagtgcaaatacattacaattactggaaaattggtggaaaatgctttttggggttacaattatatcatttttaagtgttgatgctttgtagtactacaaagctaaattgtgcaaacaaaacatatttaacagagtaattgggaggataaagcaataataaattcaaatatatttttctccaaactgccaaagggaaagtagaattgtggagggaaatgaaatatccatgtaccaggccaggcagatggtcagttaggatgacaatagtaagttcatctacagcataaaatgtgaaatgctttcatcctcattgcccatttccaactaccattctgtttctcctctattgttcatggtttttcaaacatatctttgatttttcaacccccctttttcattaatctgttcttaaaacttctttttactggctttcatacttagcattccagtgaaatgttcttagactcaccagtggacaaataataaggcctttttttattattatttcttgtcttttttgatctaatttatattttatattgttgaattctccctcctttggcttgtgggatcctttttctctaatatctgtctttctttttttagttgatctttccacccactcccctttctcctcttctccactgagaataatctccctgtcttttattcacttcattttctatactcctatttatccattttgattgtttatacctactatttgtattcgaatgacttcatttttcccaccctgtgggtcagtttgtgacttttggaattttccacaggtacctgtacaacttgatatttgaaaacaggattcatcaccatatatccccagccccggttttctttttaaacagcctcattgcgtaattcctttgccctgaaaa

SEQ ID NO: 180288 - DNA, 2464 bp, Homo Sapiens
  misc_feature (1364)..(1378): n is a, c, g, or t
ttgggggaaaagtggcttggaatttttttctgcaatatttgtatggccattaaagttgatttgtgtgattgaagcatggaagagcaaattatagcacttattcatttagttgtgttcaattgcttgttgctgcatgctgtcagacaacttttaatagtttttcttttgttacaatttaagactgactaatacatatattctttttctcctagagtcaagaattgaaggttggctttcagtaccaaatagaggaaatatcaaacgatatggctggaagaaacagtatgttgtggtaagcagcaaaaaaattttgttctataatgacgaacaagataaggagcaatccaatccatctatggtattggacatagataaactgtttcacgttagacctgtaacccaaggagatgtgtatagagctgaaactgaagaaattcctaaaatattccagatactatatgcaaatgaaggtgaatgtagaaaagatgtagagatggaaccagtacaacaagctgaaaaaactaatttccaaaatcacaaaggccatgagtttattcctacactctaccactttcctgccaattgtgatgcctgtgccaaacctctctggcatgtttttaagccaccccctgccctagagtgtcgaagatgccatgttaagtgccacagagatcacttagataagaaagaggacttaatttgtccatgtaaagtaagttatgatgtaacatcagcaagagatatgctgctgttagcatgttctcaggatgaacaaaaaaaatgggtaactcatttagtaaagaaaatccctaagaatccaccatctggttttgttcgtgcttcccctcgaacgctttctacaagatccactgcaaatcagtctttccggaaagtggtcaaaaatacatctggaaaaactagttaaccatgtgactgagtgccctgtggaatcgtgtgggatgctacctgataaaccaggcttctttaaccatgcagagcagacaggctgtttctttgacacaaatatcacaggcttcagggttaagattgctgtttttctgtccttgctttggcacaacacactgagggttttttttattgcgggtttgcctacaggtagattagattaattattactatgtaatgcaagtacagttgggggaaagcttaggtagatatattttttttaaaaggtgctgcctttttggatttataagaaaatgcctgtcagtcgtgatagaacagagttttcctcatatgagtaagaggaagggactttcactttcaagtggaacagccatcactatcaagatcagctcatggaaggagtaaagaaaatatctcaaaatgagacaaactgaagnnnnnnnnnnnnnnnaatgacttaagtttttgtgctcttgcaagactatacaaaactattttaagaaagcagtgatatcacttgaacttcagtgccctcactgtagaatttaaaagccttactgttgattgcccatgttggacttgatggagaaattaaatatctttcattatgctttacaaaatactgtatatgtttcagcaagtttggggaatgggagaggacaaaaaaaagttacatttaatctatgcatttttgccaagccatattgagttattttactactagagacattaggaaactaactgtacaaaagaaccaagtttaaaagcattttgtggggtacatcatttctataattgtataatgtatttctttgtggttttaaatgataaagacattaagttaacaaacatataagaaatgtatgcactgtttgaaatgtaaattattcttagaacactttcaatgggggttgcattgtccttttagtgccttaatttgagataattattttactgccatgagtaagtatagaaatttcaaaaaatgtattttcaaaaaattatgtgtgtcagtgagtttttcattgataattggtttaatttaaaatatttagaggtttgttggactttcataaattgagtacaatctttgcatcaaactacctgctacaataatgactttataaaactgcaaaaaatgtagaaggttgcaccaacataaaaaggaaatatggcaatacatccatgatgttttccagttaacataggaattaccagataaatactgttaaactcttgtccagtaacaagagttgattcatatggacagtatgatttattgtttatttttttaaccaaatacctcctcagtaatttataatggctttgcagtaatgtgtatcagataagaagcactggaaaaccgatcgtctctaggatgatatgcatgtttcaagtggtattgaaagccgcactgatggatatgtaataataaacatatctgttattaatatactaatgactctgtgctcatttaatgaagaattaaaagtaaatttatggatggatatctttaatttttactgcaatgtgtttt

SEQ ID NO: 180289 - DNA, 2697 bp, Homo Sapiens
ttggctcagtttattgctggggaaccaagttaatatttgtcaagccaccctgtgtaaaaaactgtaatgggtagaagttttctcttttgagaagcttattgaaatataatgacatctactgcaaaataggactactaaatacatatactttacatgcaaagtacatttcttaaagaattatttctggtaatttttgatgactttattacttgataataagtattagtttaaaattttccaaattattctttaaatagttgttaggtaagaatattcagtaagccagtaattcagaataactattgtagaaaataataataatctattaatttaatgaatcacctctaaattactaattaacttcttttacaacataaataacttgttatcaatagagcatttttgtaaaaaacaaaagaaagaataagtttaattattaaaatttgctctcttaccaaatgaatacaagggcttttgaataatctcattgcataagaggccctcatttcacagaaatggtaagaactaaatcaaaagattcaagggttttccctttataaagaatagatcagaaaatttgacaatccagacattcaaaaaaacattctgccagttgatttttttggactactatttgattagatgatcagttctgaaatttaagctgcatgtatgcccaaattaaattagcataggaaagtcaatgtgtgtggttttttaaaagtatattttagcatattaatggagcaatttaatttacattcagttacaaacctcattcttattaataggtttagggaatgttcttgctggtgtgctgattaccatattagagaaaaaataaactctccatattataattcacctgtttagtaaggtgagtttcttacttgtgatttgagtggattatgcctaaaaattacaagtatatttgcactaagcgacaaaatatgtccctgaaaaatcttagcgtacttgaatcatcaaatgtaatggattgtattgaattctaaatgttaagaagtaagtggatttagggttttgtctttcttttcttatgtcctctctcattcctttatacctttcttcctttctgaggcctatgtttatagcatgacttttaatgtgctgaaagattttccttctgttttgtgtacagagttgtttttgatgagtggtacgctcagaaggaactagttctgactacaaatcccactacttgaaatagcaatattgtacctaaagtagtcaaacagattttgctagacaactaagcaacatctgaatacaaatgtaaagtatgctggctcagtgtatcttttaggtcactaaagaggacacatcagtaaataaattgttttcagtgtaatatttttacataaaaatagatttcccccccaaaatttaagatttatttagattcttgagacatctttttatgaaaaggaattaataacatacatcatcaaaacttttcttaggagcgttgaaacaatataagaaggttacagaaggccttctaaaatatgaattcccatctgtatgaggtacttctttccaactcagtgactttttgcccagagacttggaagactgggcaatgttttctttcccctttcccaactcctggagacaaggccctaggagcaatttcctccagtagggcaggccgtagtcctgctctgtcttacttcccactgcagcaggaacatgtcctcgcctctgattccttctgtaccaagccattggtccattgaggtcaattgaggactcactgtaaattttaaatctgttaataaagcaaggatattggcatgttcctcttctcatcaatatcctaaaagacatttattttttacacactccttgggaaaaattaactttttttcactgaaaatatttccttttttggttatcttgatctcagattattttgtgaaagaattttactgtacttagttcaaaagagtagaaagaatgatttactattgcagacatatgtagggtaaaatcataatttatttaaactgactgtacaacaccatttagagttgatattgacataaatgttattagcctactaatttggaactgcatttctcaacaatgctggcaagcatcttccgtacttagcataccaagttgtaggggagagactgtgtatatattttttaaaagcaatccaatggatttgtttttgttcatattttgaaaacaactcgaaggatttttcttattttagaaggtagaaaatatgtggacctgtgttttaaattaatatgtatttataaattataacattgaatgatacaacagagctctaatattgatgttctcactttctgatatttaatttttataaatgtttttgtaagtaactaattgtagtattgcttttaaatagttttaaaatctatctcaaataagttctgcccagacctatttccttaggacagtattctaaagttcagtagtccagtgtgagcttgaaatactcctagatcccgtcagtgatttttatatataccaatacacaagcaaattattaatataccaaaaacctaatttctgcattgcattaataaaatacttgttattttgcctttatccaattcagttgattagtgaaatagaaaattaatcttttcaatgtgcatatgatcataatttttcaaatgttactgtgatcatttttgg

SEQ ID NO: 180290 - DNA, 1068 bp, Homo Sapiens
aacttgtagaaatgtaatttatttcatgcaaagctacattctttcctatattttaacaggtaatcaaataaacatttcaaaaaattcattacatcacaataagttaaaatactacaaaggaactgcaagtcaatcaatttatcaaaaccaaactgagcgaacgctatgcatagataaggccaaagttactaatttgcttataggtagcactttgcagctttttccaagtacatatttgaaaatgtagtgagaatctacagagaaaaaaaatagtttaatctacaacccaatgatcagatagtaaaacatttgtcattacatatcaggtggcaatggctaactaaagataaacttggcatcatgcaccaaaaatgaccacagtaacattttgaaaaattatgatcatatgcacatttgaaaagattaattttctatttcacctaatcaactgaattggataaaggcaaaataacaagtattttattaatgcaatgcagaaattaggtttttggtatattaataatttgcttgtgtattggtatatataaaaatcactgacgggatctaggagtatttcaagctcacactggactactgaactttagaatactgtcctaaggaaataggtctgggcagaacttatttgagatagattttaaaactatttaaaagcaatactacaattagttacttacaaaaacatttataaaaattaaatatcagaaagtgagaacaaaaaatattagagctctgttgtatcattcaatgttataatttataaatacatattaatttaaaacacaggtccacatattttctaccttctaaaataagaaaaatccttcgagttgttttcaaaatatgaacaaaaacaaatccattggattgcttttaaaaaatatatacacagtctctcccctacaacttggtatgctaagtacggaagatgcttgccagcattgttgagaaatgcagttccaaattagtaggctaataacatttatgtcaatatcaactctaaatggtgttgtacttgtcaggttaaataaattccaacttttttgtaca

SEQ ID NO: 180291 - DNA, 282 bp, Homo Sapiens
ttggctttatccactcctcggattcaggctatgaaggatgagtcttcatgtctttcatccctttgctccatgacccccttcctgtactagccttcccctctttatagttatggcatagttttggctagattcatatattcacattacatgtttacattatcatgactatacaaatgctatgtggagctgaagcttgtggtaaatttttatttatttttcccttcctgtatatccttttatttttttaggaagtaataactgtcctgttggtatgttagctta

SEQ ID NO: 180292 - DNA, 872 bp, Homo Sapiens
  misc_feature (153)..(164): n is a, c, g, or t
ttggccttctttccaaagttagtttcttccctagttggaattggatgtcctcaggtcttaaaacttgtgcagttgatgctacttctatctagactttgaatgatttttaactcggaccttggcagtaactcctagatagaaaatactgttaannnnnnnnnnnnaaacctcagggagctaattggaacctttccatttttcctatcctctgctgacagcttgtgatgtggaattaccttctctgaggaatgctaatgttaacatcatcaagagcaaggaatgtctctttgcctacttttatgaaacaagatttgctattaatttaagaccttagtctgaggttgtttagcctccccagttactctctggccttcaagctcttttcattgttagagattactgtgatactgggggagaagggtacaagtaaacttaaaaggagtgtcaagttatcagactttgtaaagatgttgaagttttaaatgggaaagcccttttgagctttgctgtaaagccgctgtattgtgctctctttcaggtgggatgtgtgtgggctgaaattccgagctgcggttgtgcatgagaatacacccttcgtggtaccccatctccgggacgttctcggctctgtgcgttcagtccctcaggaaccgtggaccttaatttaccttgctaagttcagaccttctcttcctttcctttcctttcctctcctgcccattttcctgttcttctgtccttcaatacttctgtagcttcccattcatgttctcttctcccagcaagcctcattgtgtgcagaaactgtggtgggggctgtgctgtctcctccctgcctcctgcctcctgcggctgttggatattgggaatga

SEQ ID NO: 180293 - DNA, 1205 bp, Homo Sapiens
ggcgaccttaggcaaacaaaaggtggaggggccgtctgggcgcgtttctgagcgccggcaagtcccaaagtatcctgggctataggtccgaggctgcggtgcgcagcagaggtggctcggaggtgagccagcaggtgcgggcggacaggtggggcgcacctgagtatatgtagggcgtcgggggcgcggcccgcgcgccccgggagcgcgggagggggaggcgggaccggaggggcggccgaggatgacctgacgtcaccgaagggacactcacctgaaccggaagtcgtggcccccacccctccttgcccaggtgaggaggaagaaacctgagcaccagggtcacgccccttcgcttgcccggttttgaccgccgctggggaggaggcggtggctccccaggagtcccaagctccgagtcagcccctccggactggatttccctcgaacaccgggaagccccttcctttcttcccaacaggtgcgcctgggacgctgcggggcgcccctgacaagcctcggcgccgccctttccccgccgggttctgtccaaagtgctctctcctcggccctgctttcgcccccacccgctgctctccttttttttcctgtctcctaccctggtcgatcccaccttcgggggccctggctcgatccctgagagtcgcccccttcagcaccctcttcagtgtcccggttctctggctctgctacagacacccggcttagcgtggctccccaacagccccaccttcctgtgcccccattccaacccaacatgacttacagccaaccctttgcactcaacctccccacctaccactgtcccctccggcatcaaggctcctaactggaggaagaaaccactgggacctaaagccggccgagggtggggagcagggtgagggctaggtcagagtcttggccacacccatcgttcccctcccttagagtcttttcagacctatcctccacctttcccacccctcccccacactcgcctgtttctctttccctcccgggcctgggcttggactgccaattgctgtgcactctgtcacgcctcactgttccgtcctccctataatctggctctctaaggtggtcgtccatggtccctcaccctgcagtcctgctatctctccccaaagcattgctccctccttcctcccggcaccccttccagccttttgctccttccccaa

SEQ ID NO: 180294 - DNA, 1963 bp, Homo Sapiens
  misc_feature (138)..(176): n is a, c, g, or t
ttgggtatacttagatgagtattttaagctgtcgacctttagtttgccatacgggtaggactgtatttcatgttaacaactggtggtaatgataagccttcttctagcgtattttctcttctttcctgtcactttccnnnnnnnnnnnnnnnnnnnnnnnnnnnnnnnnnnnnnnnggctttatcttgtcttaccgtagagatttgttcaaaactctaagccctaccacctcccctttaataagctctttaaatagttgaatcattaacaacctggtgggaggcaagtcatttaattgaaccactaggaagtgtattttcttttctttttctgccaactttttggtggcatttgtaaaagctgatataaaaggctctgagatgttattttcagttattccataggcaagcctttttacagagcatatgtctccagttggcagcttgagatatttccgagcatccggttctagctaccagtgcctcccaatgcttagtgcacagtactgtagactggccatcacccctctccttggaaaatgccactgtgctgtttgaaaaaaagcagccttttagggctagagtattttatataaacagaagagctaagttcctgaagactaagctagatagctgcagctatatgtaaattgtatatttttatgaacttttgaagcacacactcctgtttccctctgtgtagctttgtggggatttcatgtatatatgctgtctgaaagaatccagaggttggagtgccaatagaaaatgaaaacaaatgccttgtactacaggcagcctctgaaggtgaccacataactgtcttcactgtgaccaatcggagtccctgcttgcttgtgaagaaggggcttttgtaccttgttggagatgccacctcagaagttcacactgtgcaggaaaaaggttttattctctcctggcatacattagaatgtcagatgcttgcatccatgtggaccacgatgggcctctaaaaattggtgggcagggggtttgcttatgagttttctctggaaaccgattttactcctggatgtattgaatgccccttgagctttatgagatacgagtccacatggataaaatgttagagagtggagttctacagaggattccaggaagaggccatgtctgtgcagtcctagttccagacaggtgagaagctccaggaactactggctaccttgacaagctgggtaaatagttatcattctgggtaactggttgaaactctgacttttggacaagtaattcctggggttctgtctttggtagcatcaccagggatatttgggtgggacagacagaagacacacagctgcctgttctctcctgcccatcatgtttggcccactagatgaagctgtactcagcaatttagggaatgtaacccttctcagaactggccattttcaggggaagcttgggagagcaatagtatggtgagccccttagagatgagcgcctactccttcttggcgaatgctgccttcagatgcttaccaagtggtcactgcatctagtaagattatatttccagtacacttccttagggcagaaacaccatcctatcaggtttggtcagtcccttcttcatgaagggagtcatggggaattcctgaaaattttcttccttctgcagacagttggatgagtcccttagagaaggcatccagagacataactaaactgaatatcatcccatattgattttaggaattgactctaaaactctgtgcagaatcttgtgttgggattgtatcttgacattcctgttgtgttatttttcttaactggagtgtgtgctgcctttcaggtacaatttttgtgtaataaaagccagtgcataaagtttatatagactactttctatgcaagactgagatatgggaatagataggaagagatatgtactgctgggtacatggacagtaagtgtgttt

SEQ ID NO: 180295 - DNA, 1778 bp, Homo Sapiens
  misc_feature (407)..(422): n is a, c, g, or t
  misc_feature (569)..(627): n is a, c, g, or t
  misc_feature (638)..(706): n is a, c, g, or t
  misc_feature (771)..(895): n is a, c, g, or t
ttggcaatatttttcatctattaaattaatttctagtataaataagtagcttctatatctgtcttagtctattataattgtaaggagtaaaattaaatgaatagtctgcaggtataaatttgaacaatgcatagatgatcgaaaattacggaaaatcatagggcagagaggtgtgaagattcatcattatgtgaaatttggatctttctcaaatccttgctgaaatttaggatggttctcactgtttttctgtgctgatagtaccctttccaaggtgaccttcagggggattaaccttcctagctcaagcaaggagctaaaaggagccttatgcatgatcttcccacatatcaaaataactaaaaggcactgagtttggcatttttctgcctgctctgctaagaccnnnnnnnnnnnnnnnnactttcattataacatattatacatgacattatacaaaaatgattaaaatatattaaaacaacatcaacaatccaggatatttttctataaaactttttaaaaataattgtatctatatattcaattttacatcctttttcaaaggnnnnnnnnnnnnnnnnnnnnnnnnnnnnnnnnnnnnnnnnnnnnnnnnnnnnnnnnnnngagacagtctnnnnnnnnnnnnnnnnnnnnnnnnnnnnnnnnnnnnnnnnnnnnnnnnnnnnnnnnnnnnnnnnnnnnnaagtgattcttgttcatcagcctcccgagtagctgggactacaggcatgtgccactatgcccagnnnnnnnnnnnnnnnnnnnnnnnnnnnnnnnnnnnnnnnnnnnnnnnnnnnnnnnnnnnnnnnnnnnnnnnnnnnnnnnnnnnnnnnnnnnnnnnnnnnnnnnnnnnnnnnnnnnnnnnnnnnnnggccttacgtaatatattttcttaatggctgcataatatcacatcaaataggcatttttcaaacctctttccttattaaacatgtagactatatccattttttactaaaataaataacatttcagataatatctttgcactgataatgttgccaagccatttctaaagtgaccttatcaatttaattaccattggatgagggtgttgctttcatcgcaccattgtagattgtcttttttatttcaatttgcgtttatttataactggttgcaaaggtacacagaacacacgctccttcaacttatctttgataaacccaagcaaggatacaaaaagttggacgacattgagtagagtcatggtatacggtgctgaccctacagtatcagtggaaaagataaggaaaatgtcactactcacctatgttatgcaaaacagttaggtgtgctggggctggatactgctcttttacttgagcattggttgattaaagtttaggtaccatccaggctggtctagagaagtctttggagttaaccatgctctttttgttaaagaagagagtaatgtgtttatcctggctcatagtccgtcaccgaaaatagaaaatgccatccataggtaaaatgctgacctatagaaaaaaatgaactctacttttatagcctagtaaaaatgctctacctgagtagttaaaagcaattcatgaagcctgaagctaaagagcactctggtggttttggcataatagctgcatttccagacctgacctttggccccaaccacaagtgctccaagccccaccagctgaccaaaagaaagcccaagttctccttctgtccttcccacaacctccctgctcccaaaactatgaaattaattt

SEQ ID NO: 180296 - DNA, 1500 bp, Homo Sapiens
  misc_feature (950)..(1200): n is a, c, g, or t
  misc_feature (1219)..(1232): n is a, c, g, or t
taaaataatgatatagcattgacaagtagggttatttaactaagacctatttcaaggttaataagttggttactttaattaacccacattaatgtgtcaaagagtaatatataatcctctcaatggatgccaaaaaaattttgataaaactcagcaatcattactgataaaaacttggaaaaaaaccaaaatcatggttatatatttatacattatactcattcccattaatatcagaaataaggacgcccaccaacaccacttttatttaaccttgttctagaagtacccaccaattaaaaacaaattagacaagagaaaacagtacgaagttggaaataagaggagataaaatggttactaactgcaaatggtatgattgtatccctttaaaaccctaaagaaaaactactagaaacaagagaattcatcaaggtaactgattatgaaattaatatacaaaatcaataacttttccatattgcccagagttatgtaggtaacaaccagaataattaaaaataaaaagctaaaaattattgtatctgggaaggggacctgaaggtggagaaggggcaaggcagaggttgttgcttttatacttctgtactatttgattttttgctgtatgtgtgtatcactttgacaaaacttacgaagcttcataacattggtcattttatagaaaaatagaaaatcctattctgagaaaatatactagaaaaaagtcagtagttttcttatttacaaataataactagaatatagaagatcccaatttaaattgtagacagggataggctatatgaaaataaacttagaaagaaatgcgtaggaccacgtgaggaaaagtctactaaagaatagagcagaaaacattgtaaatatatttaaatgtaatgtggtctcactcaaaacctaccagcgtttggccaggcacagtggctcannnnnnnnnnnnnnnnnnnnnnnnnnnnnnnnnnnnnnnnnnnnnnnnnnnnnnnnnnnnnnnnnnnnnnnnnnnnnnnnnnnnnnnnnnnnnnnnnnnnnnnnnnnnnnnnnnnnnnnnnnnnnnnnnnnnnnnnnnnnnnnnnnnnnnnnnnnnnnnnnnnnnnnnnnnnnnnnnnnnnnnnnnnnnnnnnnnnnnnnnnnnnnnnnnnnnnnnnnnnnnnnnnnnnnnnnnnnnnnnnnnnnnnnnnngagtgagaccccaactcgnnnnnnnnnnnnnncctaccagcgttcattttggaccttgatacacgtttattgaagtttatctggaaaaaaaccctcaagaatagccaagaaaactgaaaaggaagagttgggagagcaagggtgtgctgctttactagagaacaaaacatactgtaaaactgaacttgtcagacaagttactgggccaggaatagtcagaggagcgaatagagaatccaggcgtagatgctaatccacataggaccatagtatatagcaacagtgagatttcagatccaa

SEQ ID NO: 180297 - DNA, 1067 bp, Homo Sapiens
ttgggagaaatatgccaattatcacaaatgtttttactacatttcttcttgctttatgaattgctgtattaactgcagtaaagctatgaaaatatttcctagaacactctattctgccatactcttttgtgaatttttttaaaaatctggtgtttgctctttagcaaaatgtgactggaaaatctctctaagattctgctgtggataatttttcccctctgtagatgaatagtaatgagttgtcagggcttctgactcttaagtgccgaagtctttatagtcctgtgttcaaaacaacctggcttttttgcctttttcacttgtaacgtgatcaattggtgttcataacaacaaaatacattattttagccattttcttaattggtactaaatacttatataatgccaagttaaaagataacaagtatctggtgaaaactttaattattaaatcaattttcttttattctgatatagctgaattttaagatcattctatttttatttacttacagtcattaattgaccaataatggtttgttgttgttgttgttattattgttgctactactcatgggaaagtatcttcaagctgggcctggttacactgagtgtttgtgtgctgagcagccctctgatttctatttttgtgatctgatgtgagctgtctttgcatgcctctatctaagtagaacttaggttaaattcctgcgtttcaaatagctggccgttaataggtttgttaacatgtttcacagtgttttagtccagaagtctgaggtgtgtttactgatgtgtaaattcatttttaaaaggcgatgagaaatgtccagagtgacattgagaatggcctaaatacaaatggtgcaaagatgtccttgtcttgccagcttagaaaagttattgtcatcgctgtgtacctgataccatacaaaacatgctcatcatcttccagaaaagaagctcttcatcagattcaaggccagctttcattctagtctttttgttgtgctttctgtctacctcagaaccatgggaagtcatgtgtaatcaaggggtgatacggt

SEQ ID NO: 180298 - DNA, 819 bp, Homo Sapiens
tgaggcaccgcggctggcctgagtttcttcttaatactgtatcacaattgtgggctgtcttatgtgttgatatcgattgagctatttgaaataggaatgttaatgggtgtattaaatttttgtaaggatataacaatatctaccttccaaggatgttgtgaggttttccatgattttgtatatgagctaatgttacctttgaggggtggtgtgcattatgttggatgattgtaaattttcagtggaaaatgtaccgtgtcctaaatttaaagacatgaaaaatatcccaagatcatactagatcataatagcaattcctttacaaatgaattatggaggtaactgatctctaacagtttccttcatgttgttttaatgcacaagggcagaggatctgctgacccttggaaccagcgtgagctaaccacgtgctatagacacttcatggtgtcgcacccagggaagtcaaagcgctttgctccctcactgtctgtgagtcctcagccattagtaccccaccccccgctgctccaaaacttgagttatttcaaatgtttctcactgttcatctctccactgaccccactccagaaagcctggagagagtcccaagatgccacccaccttccccaatccctcgccacagatctgtgtctatctcacactctgtaagtgccgctttgcttcttcctctcttgaaaagactgagaacacacattttaacatgttaggaaaatggggcagcctaaaaaatgactgatcccaccgccagtgactcatgtatactccaggctagagacagggccctttttggtgggc

SEQ ID NO: 180299 - DNA, 1841 bp, Homo Sapiens
tacaaaaaagttggtggcaactgcagagcataaaaggggctcggaaaagcagtttttacaaagtatttaaaaggagagtatttaaatcataggtacctaagttggagcctgaggttgaaatatttggggtggagatttctagctttcctgagagctgctgcttggtggtagtgttttctctggaagtacagattcctgacattctgggtggaggggagcccaagtgagcctgaaggagttctgattatagagtcccgagcctcagtttctgactgcagaagagccagagatgttcatttcattgttgaccaccctagtgcttggtggactgtgcccttagctatcccactgtggctgccattgccagaaacattttggagaaccttttcttcccattgctctcagagcctgttcgagccattcaggtaaattggtctccattattacctggtcacaccagattttcccccagactcagcaccatccagtctgattccccgtttctgggctcagtttgactctaaatctgttttgctattttaaaaagtcaaacctggtccccagcagagcttgccacccggagactttcaggagaccgtgcaggctctgaagggagctcccagtcacagcagccgcctacttggagcaagggaaggctcccaagatgcctcctttgaaagccggtgctcaccaagatcagttcaggatcaatcattatccttgtagtcatgccttgatcagttctgagatgaagcagggaatgcaggcctgggttagcatcctgaggacacagggcccctggccttgatggcactgggccgtgctcaggtgaagcccacccgtgtctgggagagccttggcttttcagtgggcagcatgctcaactttacttgaagctcccaggtgccaaaccatttagtgccttggctgtttatcccactgccttggaagatggactcctctcatctctgagcctttacctagctgcttcctcatctacctgtggtgttgggaccaagcctccaatatctctgaatagcccactcctagcttggaaacagctataagggctgccctgccccttgtcaaatgatcaccaattcttggtggcttggctggggacaatgaacagtgtctgctggggtctgtgacacactgtttctggaacaaggaagggatggaaggctctacccctccgtggcagcccagcatttggccaactctgtatctgaacttgagctttctatggaacaaacaatggtcttagttttttaagagcctctgggtctctgattccatggagagtcaggagtagaattagtggaccagaaaccatgacatttgccatctaggtactctgctgttcagggtggaggcaccgatgagcagagtggggtgatgttggttgtatgtgcatagaagtcccctggctccagagccatccagtggtgcttggttctctcttcctgcccaggtattgtgtgtggaccaagtgtttaggaaacaagcatagaagcattatgtcacaggaaggcctggcctctcactccttcacactaatgagccttctactgacccaagtttctttttctcgggcagcctgagaccactatgagcagagagatgggagtctgtgtaagaaggatgcaagtatcctttgatttggagtggacagagcaggtccttgcaaaggcagtggggttaaacaacgggatgtctgtgggacaggccagggaaggagggcagagacagggtctccagttcaccttgccgcagaactagcctaatcgtccctgcttctggtcttggccacttggcaatcatggggaagttgactcccc

SEQ ID NO: 180300 - DNA, 970 bp, Homo Sapiens
ccaactttgtacaaaaaagttgggtttgtggttcttgtatttcaagctggaacattaattactgtccattagtctcttttcccccattgttcagttgtggagtgatgagaatcagagtgagtggtagccgtttccaggtttgtgacctttctaattagcgttaacttccaaacttggattgttaaagccacagcatgtgttctatggctctgggcagggttgatagacaccccactccaggaaggctgtggaacagacagatttgtaagtcttctattaaacaagttgcaacatttaatagtactaactgtttaattcatttcttctgattgttcttctgaatattgctattattaaaggaatcattgctagtaaggatcttgccttacttggtaggtatgttaactgtgcaattatctggtacactatgtgcgctaattacaggagcagaaacattctcaattgtacttgggtgtgattatgttcttgtgctttcctgcaggaagcttattttcgatacatggcagaaaacccaactgctggtgtggttcaggaggaagaggaagacaatctagaatatgatagtgacggaaatccaattgcacctaccaaaaaaatcattgatcctcttccccccattgatcattcagagattgactatccaccatttgaaaaaaacttttacaatgagcatgaagagataaccaacctcactccacagcagttaatagatctccggcataagctcaatcttcgggtctctggtgctgcacctcctagaccaggaagtagctttgctcattttgggtttgacgaacaacttatgcaccagattcggaaatctgaatacacacagcccactccaatacagtgccagggtgtgcctgtggcattaagtggtagagacatgattggtattgccaaacaggtagtgggaaaactgcagccttcatttggcccatgttgattc

SEQ ID NO: 180301 - DNA, 1838 bp, Homo Sapiens
ttggcttaagtggtgctttgtggtatctgaacaattcataacatgtaaataatgtgggaaaatagtattgtttagctcccagagaaacatttgttccacagttaacacactcgtagtattactgtatttatgcactttttcatctaaaacattgttctgggttttcccaatgtaccttaccataattcctttgggagttcttgttttttgtcacactactttatataacaatactaagtcaactaagctacttttagatttggaaattgctgtttacagtctaacaacattaaaatgagaggtagattcacaagttagctttctacctgaagcttcaggtgataaccattagcttatacttggactcatcatttgttgccttccaaaatgctgaggataatgtatgtactggtgtcaggacctagttctctggttaatgtacatttagtttttaatggtggaactttgttatattttgttaattacagtgtttttggttcattgagtgaagattctgccgggtgggatcttgcacctttgaaagactgaataattacactaccaagtaagcctgcaaatcattgatggcatgcagtgatgatgtgctcttacacttgttaacatgtattaagtgttatttgcaaaaggtagattatgtaaccaatcaggtacgtaccaggcagtgatgtgctaatacactgatcaggtttagacaatgagctttggttgtgttcttgttagtcctaatattggttttcagtttggaattaataaagcagttgacattcactgttagttacagcaacatactgtgatttttaattagatagtaattcagatttattactctatgaaattctgtcttttgacaccatagtgccctttctatgattttttttacttaatattcttcttggccttatatttaattccctatgcaattaatattttatatctgcattttttttaaaaaaatagatgttatataagtgattctcgtatgtagcacctgttgcttttccactgaaagaattacggattttgtactgtgatttatattcactgccccaattcaagaaatattggagccttgctacaatgtgaaatgttatagtcatggactccttccaaccagatttctgaaaacaccagagggatggtataattctgtctcacctataacatggtcctgtgacatagatattaagaccacaagttgtagtgaggctacaattatattcgtctgtcttggctttgcaacataatttagaaagcacgtatagttgttttttaaccaagttacatacaatctcatgtactgatttgagacttataacaatttttggagggggcatagagaaaggagtgcccacagttgaggcatgaccccctccattcagacctctaactgttgcctgagtacacagatgtgccctgatttctggcccattggccatagtactgtgcctaatcaatgtaataggtttattttcccaatcctcaaactaaaaatgttcataacaagatgaattgtagactagtaacatttgatgcttttaaatatttgcttctttttaaacaaaaactaaaacccagaagtgaatttttaggtggatttttaaataaaaaagattgattgagtttggtgtgcaagctgttttataatgaaaccacaaaatgaaatctaaaatcctgaaatgtgcctaaactatcaaaacacacgatacagctaatgtgtaaagatgctaaattctgttacttggaggatgaatatatttaagatttaaaacacaataataaatacatgattaattcaaaaataaaaatctttacagctg

SEQ ID NO: 180302 - DNA, 1440 bp, Homo Sapiens
ttggcaaaaatgtatttttgtgcaagttgtttgaaaaagaattttaatgtgaaaatattgtactacttttgtggcctgtttaatccaatattcattgctgtcagtatttgctaaatagtttgagcatttattactgcagcctgtattacactgtcagatttttccagtgtgaatttttctaatgctacaattaatagaaatacattaacactgatttactgcattatgattttaacaatataacattgattgttacttggatacacttagtgacattattacttggatacattgaaaactttgtatctgcatcacatcttttgatcctcaacaatccaccgaagccagtaggaacagggcaaatgttgccgatgggttgatgttacactcacccagagttgctgtgccagtcagaggcagagctgggccagtgggcagtattcctccctcatagtgaagggcgtcaggtcaacattttagcaccttttgagagtagtaattggattgctcaggccaccaacagggatgaatttcaaactgatgaaactttgatacaatatgaggggtcttttaccttcctacttactcagtaaaggtatttttgtattctctgagcactgcatctttatcatgagtaaagcttagaaataatcaggtactttaacttgtactgtttctttcatggaaaaggaccaaactcttacccaggatctactggagcagctgttggagcccatgacgcctgtcgggatgcaaaagagaagcgctctaaaagccaagatgcagattcacctggaagttctggggcccctgaaaacttgacattcaaggaacgccagcgtcttttttcacaaggtcaagatgtatccaataaagtgaaagcttctcgtaaattaacagaactggagaatgaactgaacacaaagtgaaagaaaatgaggagaacactttgtatttaccccaaaatcttttcagttgtgggtttgtaggtgcgagtttgaagaggaaaagaggaagggggttatatttctaagtgatttacaatttctgtttctaaaattgttgggatttagaaatgtttcaattccaagaaattttattttactttaccatgagattgccatttatgtaatttaaacactgtctagtttcttaattatctaactcacacgagggtaagttttttgttggtttcttttttggagtcctgagttcaaaggggacagaactaagggcaggagaagagaatggatgtgtcttctctcccatcttcccctcatcatcgaccgaggagcacaaagaagttctgtttctgtttttttcagaaactttattttagctgtcaagcagagaatagcttgaactattcagactattgttggcactgtttagtagtgaccacacgctcttctacccgggaaggaacatatgacgacatgc

SEQ ID NO: 180303 - DNA, 1739 bp, Homo Sapiens
  misc_feature (166)..(185): n is a, c, g, or t
  misc_feature (283)..(293): n is a, c, g, or t
  misc_feature (819)..(867): n is a, c, g, or t
ttggcttggaaaagctacagggtccctgtagggcaaaattcccaggcgccttgctgcagacagagtaagacaaaaacaccaggaagcaggattccgtgcccatctctgcagtttgggttcacaaaagggggtgccgtcatccctgggtggaggagggagtgttggnnnnnnnnnnnnnnnnnnnnaacatgtatgaaactgacatcttctcaaatcttgttccacccccctctggaagcccccatcacccacccctgctatggacaccacacctatgccaggnnnnnnnnnnnaccccagtctcattctggggtctgcccatgctgtgggaaagaatagggaggcctcccaaatatatgcaaattgtccccattccgtgggggcacctgacaatgacccgggtggagatggggcatggaggagtaggaagacccagccctatttgactggggagaggaggatctggagtccttcatgcccaggtctggaacccaggttctgaccccagggccccaccctgggctggacaatcagatcccaaaggaatgccaaaggggactcggttgggagagccgcttaggggccagacctgggtccccctgcaggtccccaggcagcagacaattccaccttccctgccccaggaccttgagagacagcagcattccaggcacagacagacttggctgcaccccactgtcccttgcaagacaggttctggagccaggagcaactgtccagccctccagaagagacagcaagcagcccccctacccactctggcctccccaatggtactttgacctccagtgtagggcnnnnnnnnnnnnnnnnnnnnnnnnnnnnnnnnnnnnnnnnnnnnnnnnnattttggaatttgtttctcataatacagaatatatagtggctaccttgtatcttggtctggattctctctctgagaccccggattttactttctctttggagggcgctgggacatacatctctcaatccagcttcctccgcatcctcccatcttgccccatttctgccacgtcagacacttcctgagagtctcaccttcaaaatgacaccgctgcccatccattgctcaatggtacagagtgtggggtcagtccaccacccttgacctcccggcagggcaaggtgaggaggcggacccaaagcagtaccagcaggacttgttgccagtgataccaaaacagacttttcccaagcagtgcctcacatgtctgctggtgtggctttgggattctcctgccccacccccccgtccatggcagccccctccccaaggctttgctcacacctgagacaggaaggaggaaggggatccaataggaatatgggccccggaggggaagtcatgcacccccaagccaccaccccccagccttccacgcacatctcctggctggaagagagccctccaaaaaggggacacaggctgccccggcccctcaactgcatccacaccccatcctctcatcttgggtcccagccaggcccccccaaaaccaaagccccctcaagtcctggggtcccagcctgtgcccccagcttcctgcccacccagccctgagcattctcacacagagaaagaacaagcaagggctcccaggggacaggatggagcagggcatacactgaggggtgggggggcagctggcagagggaggggacaaaacaaaacaatttcctttgggttggttttttctttctttttctccccctta

SEQ ID NO: 180304 - DNA, 860 bp, Homo Sapiens
ttggaccagcttggttaagagaagaagacatctgaccagaacatagaggagaaaccccctgtctaagatatatcatacgaaaatgaaaattataattcttcttggattcctgggagccacattgtcagccccacttatcccacagcgtctcatgtctgccagcaatagcaatgagttacttcttaatcttaataatggtcaacttttgccactacaacttcagggcccacttaattcatggattccacctttctctggaattttacaacagcagcagcaggctcaaattccaggactctcccagttctctttatcagctctagaccagtttgctggactgctcccaaatcagatacccttaacaggagaggccagttttgcccaaggagcccaggcaggccaagttgatcccttacagcttcaaacaccgcctcagacacaaccaggccccagtcacgtgatgccctatgtattctccttcaaaatgcctcaagagcaaggacagatgtttcaatactatccagtttacatggtcctaccctgggaacaacctcagcaaacagttccaaggtcacctcaacttcaccaaaacccagcacaaccaatgttttcacttctgctgtagaccaaactattaccccagagctcccagaagagaaggacaagactgacagcctaagggaaccataagaagttgccctgatcattcagacattttgggaaaaagatgtggccatgccttggatataattttagctattagcttcctcaatactagtatcagttctttggaatacatgaaatatcttgactcttctcctaaatttgttttacttatacatgttattaaactctttaaa

SEQ ID NO: 180305 - DNA, 944 bp, Homo Sapiens
  misc_feature (714)..(722): n is a, c, g, or t
gtacaaaaaagttggcacagatttaaacaccttataaaaaaatgtatgcttttgtttgtttgtttgttttaattgaccaaagtgggtactgctatttttgcagtgtgatgaggtccttttgtgtactgagagatggacaggggattttttttaatatacatatatatatattctggggtgggtgggaggatttttaacactttgcagtgtagctgtgaagcagtgcaccctgagatgggcctgggctgcaaagcgactgttctgcctactgtgacaaacttcaacttacacaggttcccctctctaacttcccacctgggttgcaagctgaactcattactggttttcataacaacacaatagtaagaacaagcaaacacaacaaattctcctggaggcagacttggcttaaaaaggcagacttggcttggtgatagtttttcttgaaagttccagatccacagtggagagtgagcctgtctcatatttggcaaaaatatttgttgaaatgtccacataggggatgttggatgtttaacacttttgagagtttaacacatgaatattctttctcctagaaaacacattagacctgttggagggagtctcccgtattccttttctgccacttttcgtccccatttcatttcattaatgataggatatgatttacctgtgacttactacttcaaatggatggcagtgcacttggannnnnnnnnaatatccagaagattgaacagagggttgctattgttgaatgtatttggactgatagattaaaatcaaagttcaatttttaaggaacaaaaaagtaaatcctgttttcattttatctccccttttaaaactgagaaccagagcagaaggggaaatatagaattttaagcaattaatcttcctgtggatgaattaaacccattagatgctgatgggattttttt

SEQ ID NO: 180306 - DNA, 1683 bp, Homo Sapiens
  misc_feature (585)..(593): n is a, c, g, or t
  misc_feature (1237)..(1259): n is a, c, g, or t
  misc_feature (1270)..(1279): n is a, c, g, or t
ttttgaacttgcactgctaggatcccgctgtgctgttcagcatttgggctatcaaactgaatgggctaatcaaatacaattctccagcccataagcattgttctaaagtattcattattaaatgatatgctgtgagaacaattgacagtttattttattaggccatggcctaggggaagggggccaggggactccttaagacagcctaccatgtgtcaccaattctgaaagattttccttctagtaatgaatacactcaatgggactgggcggtgagggaaaggcaaaataaaaccagcctccattcagcctctagccctcaggggaaacgaaatcaaatatatagttaaggtaccattccttaaaaaaatcccatcagcatctaatgggtttaattcatccacaggaagattaattgcttaaaattctatatttcccttctgctctggttctcagttttaaaaggggagataaaatgaaaacaggatttacttttttgttccttaaaaattgaactttgattttaatctatcagtccaaatacattcaacaatagcaaccctctgttcaatcttctggatattnnnnnnnnntccaagtgcactgccatccatttgaagtagtaagtcacaggtaaatcatatcctatcattaatgaaatgaaatggggacgaaaagtggcagaaaaggaatacgggagactccctccaacaggtctaatgtgttttctaggagaaagaatattcatgtgttaaactctcaaaagtgttaaacatccaacatcccctatgtggacatttcaacaaatatttttgccaaatatgagacaggctcactctccactgtggatctggaactttcaagaaaaactatcaccaagccaagtctgcctttttaagccaagtctgcctccaggagaatttgttgtgtttgcttgttcttactattgtgttgttatgaaaaccagtaatgagttcagcttgcaacccaggtgggaagttagagaggggaacctgtgtaagttgaagtttgtcacagtaggcagaacagtcgctttgcagcccaggcccatctcagggtgcactgcttcacagctacactgcaaagtgttaaaaatcctcccacccaccccagaatatatatatatgtatattaaaaaaaatcccctgtccatctctcagtacacaaaaggacctcatcacactgcaaaaatagcagtacccactttggtcaattnnnnnnnnnnnnnnnnnnnnnnngcatacattannnnnnnnnnaaatctgtgtacttacctataataaccaatacagctaaaagcactacctacataggcaaaacttggtattgcataattcgtataaatttgaaacccctcccccccaaatattaattggaagatgaaaaacatgaaaggttaatagaaaaaaacaccaaaatactgaaaatattgctggtcgattacaatttttaagcggcaactatacacagccatgatatgctttataaatgtgagataaaggtataactgtctaaaaaatccatgatgtcacacatttttcttcgtctggagtacaaaatattttgtcataaaaatggtaaagatttaaaatgataataaatgcagcaaaacaagtgtagtgtatgtcactttgttgtatttttccaacttttttgtacaaa

SEQ ID NO: 180307 - DNA, 2981 bp, Homo Sapiens
acaaaaaagttgggttgtgccttgtggtgacaactggcggcagcgcgccgcgggcccgagacttagtctcgggccgccatggccagcgtccacgagagcctctacttcaatcccatgatgaccaatggggttgtgcacgccaatgtgttcggcatcaaggactgggtgacgccgtacaagatcgcggtgctggtgctgctgaacgagatgagccgcacaggcgagggcgccgtcagcctcatggagcggcggaggctcaaccagctgctcctgcccctgctgcagggcccagatattacactgtcaaaactttacaagttaattgaagagtcttgtccacagctggcaaattcagtgcagatcagaatcaaactgatggctgaaggcgagttgaaggatatggaacagttttttgatgacctttcagattctttctctggaactgaaccagaggttcacaaaacaagtgtagtaggtatgaaactcttctaagaagagcagagagtattttcattgaagtgagcagctttctaagtcatgtctatcattgttctgctatatctgtgaacagacacagtggggatgttggaggtgttgcagtttgtatttattgccttactgttttgatctatatttaaatcattaactgtggaaaagcaccttctgttttgtctacaatagtaagagtcagagcctggtcctggggtttttaggggttcccagctctttctcacagtcctctggatcacttgcctgcatggtccatctgtaagtgagggtcaccagcccagacttatgaagagaggtaagtaaaaatacattattgatatagtatgcaaagtgagggcatacgtggtgtttctttgatgcttttctattagctttatcccatgctctatccctctggcttttttgcatggtaatttttatgttattcagcgtgagctatttctctctctcttcctatgtgccaggctctggacgtgtaagatagacatggaatttcctcttatggagattacctctggttgggggagccagttggtaaaagtaaacacataaatatcatttcagatagtgtaacagccatgaagaaagtaaaatggaagccttcaggtggaggtggggtgggtagattgtgccctgtataagaagaaaccagctttgtaaaggactggggaagaacattccaggaggagggaatggcaactgcaagtgtctctttcttactcttctgaaggaagaattccagcagacagtcattgccattgtggagttgccattgcgtagcctgatgtcagttaatgctttccccttgtctctcgtcttattttgtaggtttgtttctgcgtcacatgatcttggcctacagtaagctttctttcagccaagtgtttaaactgtacactgcccttcagcagtacttccagaatggtgagaaaaagacagtggaggatgctgatatggaactgaccagtagagatgagggtgaaagaaaaatggaaaaagaagaacttgatgtatctgtaagagaagaggaggtatcttgcagtgggcctctgtcccaaaaacaagcagaattttttctttctcaacaggcttctttgctaaagaatgatgagactaaggccctcactccagcttccttgcagaaggaattaaacaatttgttgaaatttaatcctgattttgctgaagcgcattatctcagctacttaaacaacctccgtgtccaagatgttttcagttcaacacacagtctcctccattattttgatcgtctgattcttaccggagccgaaagcaaaagtaatggggaagagggctatggccggagcttgagatacgccgctctgaatcttgccgccctgcactgccgcttcggtcactatcaacaggcagagctcgccctgcaggaggcaattaggattgcccaggagtccaacgatcacgtgtgtctccagcactgtttgagctggctttatgtgctggggcagaagagatccgatagctatgttctgctggagcattctgtgaagaaggcagtacattttgggttaccgagagcttttgctgggaagacggcaaacaagctgatggatgccctaaaggactccgacctcctgcactggaaacacagcctgtcagagctcatcgatatcagcatcgcacagaaaacggccatctggaggctgtatggccgcaggtaggtctcccaaggccctgggggtgtgaattctttagagagaagcaggagctagcaagctggttctgtgaaaggccatacatacaagatttacctgccttggatagatgttgttcctgcaggggactatgttttagactataaaacattttgtattttgcacagactgaaaacttttttcccatgcatgttccttcttactcctcccaaccactttgtgaggtaatgggtgggtgatctccatgctgggagagtaaaccagggttcacacatctgatctacccgcgatcgcaaacgcagttaacaagtgacagagaaaggactcaaacccacgtcatctgactccaagcaccgggctcctctgctctgtgacaggaaccttcctgtttataggaggcatgatccatggttgctctagttgagtgtcacctgaaccccaaaactattgtgtaaaagaaagttgcttttctgttaactgaggtgttttctgtggaatattttcatcttattgtgtactttcacatttagccacttttagcctggaagtaaactttgttgccgcattttaatcctggagttctgtcgctacctcacccctcacttagacagtctgtttctaggaattcagtaatgaaaggaagtgccttttttaccagtcttgtttttgtatttcagataattttttggcacggtgtgctctgaaacagctgcagacactggccactgcttacattgccagagcagtctgtgccaggatggcatcgggtctgaattc

SEQ ID NO: 180308 - DNA, 1286 bp, Homo Sapiens
ctttgtacaaaaaagttggggacagcttactctcatttgaccagattgtttggctaacacatcccgaagaatgattttgtcaggaattattgttatttaataaatatttcaggatatttttcctctacaataaagtaacaattaacttatgtttttgtgcttcagagtgatccatttgatcaagcattgtataaacaggttaaaaaaaaggtatggttgttttggaaaggtgaaggaaaaatggaatttgagatatactgacactgatggtgtgtcccagttcacttttaattactccttgttttttatctgcctgttgccatcttccagaggtgttgtgaagtcatctctgttcttttggtgctgtctcaaatggggcaaccattcacttcctccttatgccctccatgcttttggctgaggataatgaagcctttgtttggagtaccaggttacactccaataaatgattacatttcccagccaccccaccctaccaatttcattgtgttggctgttcttttctgactaaggcaatacctaggaaaacgcttgaagcagcaattgttactgcaattttctgtgagctgagcctggtgttctaggtggcctagaaataatggtgtcatttgtgacacctcgagtgagggcaggagagtaaatactttggctaggagaagagtgatttattctttatcagaattctaggtgggggagggagaatctgtgaatgcataaagttttcttcatttttaaattttgtctcagtctttattgcttaggttagtggtccttgaacttgtcccctgaaagagcccagttctctatattctttttcttctcttgggttcttaattccccatatagtggaaattccttctttgctgttttggtatgggtgggtctgggggccagctgggcttggacaagccatttcctgctgcagcccagagcagcctggctgttccaccttgctctaaacagtcctgaaattgcccagtcctctgcttttgggaaatccatccccttcttcccattctttgtctaccacttagcttagggctttcttaccttttatttcgactgtagccgttggcttttaccaagtctctttgtttttagcatttctttcattccagtctgttctgcacactttgatcaggagaagcttctcacattccagccatgttcatgttttctctcttgctcaaaaacctgcaatagcttcccattgctgaaatctaaatttagcttttagtcagaactttccacttaagttcttaccc

SEQ ID NO: 180309 - DNA, 1441 bp, Homo Sapiens
ctttgtacaaaaaagttggctctttatatatcgtctctcccctcccccagagacgaatagcaaggggaggagcttgctcactgttctaaccacacttagtatgtcttaactggagagctttttggtttcctgtcggcagtaattcaaatctgtgtcatcttgactcgcctgaagggtggataaattggtaactgcactgagaaggggatattctcacagtctgatttgagcataaggcatcagattgaatttgtgaaagctttcaagacagcttttctcctgtgactttgactttcttcattatatttgtggatttttgtttctggaagaatccgtcatgactctactggaacctgagatgttaatgatggcagtacagtcaggtaattcacataaatcctaatttcctaacttgctaataatttcctacaaatcttatttgccacaggcttctttaaaaaaaatgggtcatatttgtactaggagtggacagaaatggggaggaagaaatgtactgcattttcagttttttattaatttttctctcattgcaaattctagttattctgacagctttgaattagatggttactggttttaagattattcagttgcggagacctgtttgagaaaaaaaactctttgtcttctttaatcaagtgttgtattgtctgtggcactgttttaaatgaaagacaattaaattgctttgctgttttatacattgttgtctttaatcactagtctagactctatgtttttatgaaagcatctttaaattttttttcttagctgttctttcttgtttgtggtataacctttctgtaccatcttttggttctgtggaaatgcccttaataacacataggattaggactaaattttggagatgggtaagtttgagcaaagagtcagtcaacacaggggaggatttttgaaattttatctctaaaaacagttttccaattcagagtttttaaaacccttttaaaaatatagttagttttcagtggtttcttttacttttagtgtttttacacttggaagtcagatatctaaaaatagggaatgttcttttgctatttttagatctctactaaaatgtaatctgtagtgttttcttgtttcagagcatatcttaaaagattcagacaagtggcatttggggacctcttccccatccactggctttcactcaaaggaaaataagacttcttggttctggcagatactgtctctggcagaattggtctcactgttttccttggggagcattttaggtagtatgttgaaagacagatatacatcagttgaagacaggatcagatgctatctggttaataaagcttatgatcagggaaggggcaaagaagacagataccactaccattttgttctttctggttttactaatatgaccataatgagtcattttttatgc

SEQ ID NO: 180310 - DNA, 1226 bp, Homo Sapiens
ctttgtacaaaaaagttgggacttgttttaccattgagtacaagaaagaactattttagtaaagttgcctgaagatctgctcatcagtggaataaaacaggaaggacagaattctgataagctctttcataatgactatgttggaatgtctcatccctctgtcagttgctttggcttgagcttctgattcagagagcatgaaaaggtgagactaaggaggaaattcttttcacagagaagctcagagccgaaccaatccttggctgtagagaaggaggagctttcagagtttgctggttccaagcttttttctgttccaacttgcgttttccctgattatagcattttattatttttcatatttagtatgtagtgcacatttttacactacacttctaatcctttgtgtaatgatcatggtagaaataaatggtgaaatgaggaggtcccacttagatgagtttcaggggtccttccagtcccaattttccaggattcttaaggggaaaaagtaattttacatgtctggaaggttccaggtttgcacagaagggaactctcctatcgagagtcctgaggacttcagcagacctccagggaggcctgtccaggatgttctcctacgtctgtaaaggagtgagcactttgtgctagtttagggaaagacagcttttctgttgggattttagacttaccctgcttgaaattggtggaaaaatacctgtctgggatggggctcaataatctgcagctgtattaggaaatgcaagtagttttgatgtgggtggtttcaagacatatttggaaaatgtgagggaaatgtgtatgtgcatttgctgagcgggggactggtgaaggatcaccgatccatttattcctaatgctcatctcagctttttattgtgccgagtaccttgataaggcttgggttattttatgagcgtttatatataaattgatagtgtccatcagatcatgtatatttagaggcatgctcctactttgagtaaatggaaagctttagagatatacactaaataaacatcagttactaattaaaaattccctcctcactttaccaaagacccaccatgggttccattaaatgtctatttatggtttgttttgacaaagacttttccaagaacacctctgttctgtaaagcagaagagctgtgtagatgttccagagtcgcttggtgtaaatttgggttctgatttgtgcc

SEQ ID NO: 180311 - DNA, 1895 bp, Homo Sapiens
  misc_feature (1277)..(1289): n is a, c, g, or t
ttggcctgtctcagcctccccagtagctgggtttacaggcgcttgccaccacacctggctagatgttttatattaaagccagagaattgaaaaagaaatgcctcctgtgattgaaattattttatagctcttagcccgttctaccaaagatcacattagcagattacccctccctcctgtgatattatctttcttaaacctgaaccaaatatcaaaagatacaagtttcatgattaggatgaaatatatacatagggattttggtttattgaagttattgaaagacctagaaattttctttttgagagaaagggtaaagaggtgagggttcatgtcacttaacccctacccttttgggcaaattttgtctcaggtagtgtttcattccctaaattaatacctgtgcttccttgcctctcaccttcccagttacttctttggggtattactgtggcacattgtacacccagaaaaggcacatacagtgattattttgtgggaaatacttgattcttttgaaatatatttggagggggtagctagctagccactgtcaaaactaatgctgtatttacaggacaaaaacaagtagagttggacacctcagtaagagacagcattaactaaaagtactgactgccttttaaaggaatttttaaaactattctcttgcaataagagatccgcatttattaccactggatgtcttccttttttgtggccaccaatatagcagctctctttagagggattccctttctgctatgccttgagccaaactggctgcttttagaacaaaaaccataagtatggttttactcgaacttctctttgtttttattgagagaaatattgccttctttttggtactccagctgctaaagagtgctgagatatgttaaattattttttaaaagaaaatctccaaatacttatttaacttgtcttctagattcatgttgcttatattttaactattgagcaagtttattataaggaatgctgccatatagagaaagctgaagagaaaccatgggcagaaggcttttttctgtcttattacactggaccttcactctggtaagggcatcagttacttttctggaataaaaggcggagttagagcacttatcagatgctgtttcatggcttgttttagttaatttatcatgcagataactaacatttgggtatctttttgttttaggtcttattttctgactgttaggcctatcttacacataagttctactatcagtatacttggcagcatgacnnnnnnnnnnnnnacagttaatttaatgaaaatcagcaccattgtaaatgatagtaattgtaacaacatagttactgggtgaaggagtaggggagacactcagtaaccatctatttacctagacacttatgcaggggtacatgctaggtggctttattcagattcgggtacattggaatcacatcatgactttgagtctgatggctgtgtagataaagatttaagcaagtgccttgtgtttgctggaaaatattaaaactcatttgggtgaaagcttcccagatgatgataattaatagcacttctgcctttttcctggagtaacttttagattgagtcacatatgatagtataaaagtccaaaattttctgggtttacctttgttttatttttcatatatatattcactgtctgcctggaaatagccttggtttaccttatttttttgtatatgtaaaactattcatatttgattttattccaatattatatatgatggaaaagccagaattgtctggcagaatttaattcttccttggatctctagttctgtttttaatatcaggttccttcatcaaattttactactgtagctctgtgatataatttcatttcttg

SEQ ID NO: 180312 - DNA, 1366 bp, Homo Sapiens
actttgtacaaaaaagttgggaagaaggtaaactaattttaatattttttgctgtaattttataggagcagtggctgtaagagaaatatctataaatcagagagtatttaggaaactttgtattttataggtggtcattaaagtgatcttcaggatataagatagtttacacaaactttattctcctgataggaaatttttattcattttcctaccactcagcacttttgttctgccttgtactgcttatgaggattaatgttttaaatttgctttatttgtgcttttcagagagttgtcataattgtggcagttgtgtttgtggcactgtaaatgctgaaattcatgggaaacttaccaaatgactgcttgagtgttatttcccattaaattgggtagctgtcacaataaccagaagaaatcttgtggcccttttgaagaaagccatgtatgttttgttacctaggttcatagtattttaatttaaaggcaaagagaagcattctacttatttgtcttataaaccattaatcgttttttgtgcagaagagagcttattttgttatactgctttgtataatggaaataagtcacattctgggggaaaaaaactggaattgtttgtattttgtttttttggggggggatctttatgtgaaaaatcagagctacttgttaccataagcccttactatcaacaagataattatttgtaatcacttttttatcccaggttggaattgctttccccttctaagttatcttcccttaataatatttatgataccaggacagtgagggtataagagcaaatgtagtgaggtattcaaaaatcctgcatatatggactcaaaagttctttagttatttgaattatatatagctatattattttattagcttgggttgtcagaagattgccaattttaagagtaaagaggagagagataagtaataaaaatagaggaggggaagaaaatggctcccttactggtcttagtaatcttctatatagttaatgagctaaaaaatgatacttaaagttccaggtttggtaccgctagcatagaaacattgcctttcctacacattcctcatcattgtttcctcagaaaattattttaagagtttgtgaaaccagattaaatatctatattcagtttggcctaatttttaaaaataaatatttatactccagcttttgtgtatttggtgtacatcaccacttatgcaaatcaaggatcagaaaactggaggttagccatctccattatttccttttgcacattgggtacagtgggtggcattagtatgcactagctgcaaagtcacagcaccttatggaaataagtatgtttattataat

SEQ ID NO: 180313 - DNA, 1292 bp, Homo Sapiens
agcaatgctttcctttaagagccaactttgtacaaaaaagttggatttgtaatcacttttttatcccaggttggaattgctttccccttctaagttatcttcccttaataatatttatgataccaggacagtgagggtataagagcaaatgtagtgaggtattcaaaaatcctgcatatatggactcaaaagttctttagttatttgaattatatatagctatattattttattagcttgggttgtcagaagattgccaattttaagagtaaagaggagagagataagtaataaaaatagaggaggggaagaaaatggctcccttactggtcttagtaatcttctatatagttaatgagctaaaaaatgatacttaaagttccaggtttggtaccgctagcatagaaacattgcctttcctacacattcctcatcattgtttcctcagaaaattattttaagagtttgtgaaaccagattaaatatctatattcagtttggcctaatttttaaaaataaatatttatactccagcttttgtgtatttggtgtacatcaccacttatgcaaatcaaggatcagaaaactggaggttagccatctccattatttccttttgcacattgggtacagtgggtggcattagtatgcactagctgcaaagtcacagcaccttatggaaataagtatgtttattataataaaaaaagttaagctgcatctctgtagattatttactttgcagactgtaaagctgccctatcttttccagcagaatttactcttccattcttaattcttttttgaaatatcttaaataatttaacattcctttataacctcttaacagtgtcaaaactggggtagaagggattttattttttcccaaaagggttccatctttgctatctgttgatcagccttagaaaatctaagtatgatcaataaattttaatggttgatggcatcctgtgtcagctggagtagttggttgtgaatattaaaacctagtactattttccctcagtaacatgtaattgctacattttttataagaaggtatggttagaaaaaaatgtgaaagatcacttaaaccaaagccagttacaaggagtaatctctcctgttggtttaccttcacctcagaactacaagaatattacaatacatagtgaatagttgtctgtgacatttctaccagttgttcagtagcatattggtcttggcatttcttggcactgtggttctgctgtattatttgtgatgtcttattgtttgtgagcttttgtttt

SEQ ID NO: 180314 - DNA, 2012 bp, Homo Sapiens
  misc_feature (111)..(122): n is a, c, g, or t
acaaaaaagttggctaacatttgggtatctttttgttttaggtcttattttctgactgttaggcctatcttacacataagttctactatcagtatacttggcagcatgacnnnnnnnnnnnnacagttaatttaatgaaaatcagcaccattgtaaatgatagtaattgtaacaacatagttactgggtgaaggagtaggggagacactcagtaaccatctatttacctagacacttatgcaggggtacatgctaggtggctttattcagattcgggtacattggaatcacatcatgactttgagtctgatggctgtgtagataaagatttaagcaagtgccttgtgtttgctggaaaatattaaaactcatttgggtgaaagcttcccagatgatgataattaatagcacttctgcctttttcctggagtaacttttagattgagtcacatatgatagtataaaagtccaaaattttctgggtttacctttgttttatttttcatatatatattcactgtctgcctggaaatagccttggtttaccttatttttttgtatatgtaaaactattcatatttgattttattccaatattatatatgatggaaaagccagaattgtctggcagaatttaattcttccttggatctctagttctgtttttaatatcaggttccttcatcaaattttactactgtagctctgtgatataatttcatttcttgtcaattatggtcacatatagacaagtacttggtcacaattagctcaaaagaatccccatttcttaaggtgctcagtcaatcacctttattttgagatggtagtttttcaagttagtattacttactagctttcttgatgaatataaaaatgttgtctccatcatacagagctgagcctcttgtggtatattaagataagtcccattcttaatcacagaagaacatggatattttagtttttggagtacccagaattgtaaagattttgtttcattttgttttaggatagcttctctgcctaatactataggatatgtcatgttcgttattgtagccacctccctcagatgtttttcactatttttaaattatataatgaccagtagattcacagtagcatgtacttgacaagtgccatggatatttaagaagaaggtaaataattttaatattttttgctgtaattttataggagcagtggactgtaagagaaatatctataaatcagagagtatttaggaaactttgtattttataggtggtcattaaagtgatcttcaggatataagatagtttacacaaactttattctcctgataggaaatttttattcattttcctaccactcagcacttttgttctgccttgtactgcttatgaggattaatgttttaaatttgctttatttgtgcttttcagagagttgtcataattgtggcagttgtgtttgtggcactgtaaatgctgaaattcatgggaaacttaccaaatgactgcttgagtgttatttcccattaaattgggtagctgtcacaataaccagaagaaatcttgtggcccttttgaagaaagccatgtatgttttgttacctaggttcatagtattttaatttaaaggcaaagagaagcattctacttatttgtcttataaaccattaatcgttttttgtgcagaagagagcttattttgttatactactttgtataatggaaataagtcacattctgggggaaaaaaactggaattgtttgtattttgtttttttggggggggatctttatgtgaaaaatcagagctacttgttaccataagcccttactatcaacaagataattatttgtaatcacttttttatcccaggttggaattgctttccccttctaagttatcttcccttaataatatttatgataccaggacagtgagggtataagagcaaatgtagtgaggtattcaaaaatcctgcatatatggactcaaagttctttaggtaatttgaatta

SEQ ID NO: 180315 - DNA, 2815 bp, Homo Sapiens
  misc_feature (238)..(256): n is a, c, g, or t
ttggcgaaagacttttaaaaatatttggtaactagtaaaaggactaccatcgaaaatcaactcaaaaaattgtccttttatgggttagctgtattataatacatatctatcatttgcccctgtgtcttagaggatataatttgaccagctctacatttaatctgtgtaattatgagactgttttacaacaatcttgatgcagagttggtaggttaagaaatttgtattacagaagttnnnnnnnnnnnnnnnnnnnctagatttttaggtttattttacaggcattcttatttaacacttaaagattttgatttccagttattaaaatggtagctttagaactctttgtaaggaacaactttacagtttatttatgactacttctgttggccccttagtggggaagcattgtattcaaatcatagcagaacaggcttgagttatgatatatcaaaaggatgataatatgtcactgtatctggaaaaaaagataatttggaaggaaaggagagaaagttggttaaaattcattgtaaaatgttcagtttgacttatgaggttacaggagcacttgatattgaaattggagttggaattggagtgttaccatttagtcattcattaaacaaataatttattgcatgtctccatgttccagggcctcttagctgggagaacatcaggaaagaacaaaatccttactcctggggagctagcattctaataaaggatgacaggcagtgaacagaatataacagtataaacagaataaataattattcagtatgttaaaagatgacatgtgctatggcaaaatagaacacaaaagggatttggaaatatgtgggaaaaggaatattggtggccataggttatgattttcaataggatacttaaagtaggtctcattgagaagacaccacttgagtaaagaatgtagttaaagactagacaaaagagttggccatatgggtaaatggggaggaagtcatttaggttggaaaggacatctactgcaaaggctctatggcgggagcatgcctgaaatattcaaggaccagtaaggaagccactgggctggaatggagggagagacgggaagttgggtatgctgttaaagacctactttgggagtgggactggggcaaatcctggaggactctaggcagaatgagaactttggtgttgactccagatacagtgctgagccctgatctggtcaccctggctgttgtgagaacagaggcagcagacaaaggtggaaactagaagactatggttaggaggttatagaagtaattcaggttaagtgatgattatgactcacaccagaatggtagcactgagcagcagctggattctggacatagtttgaaggaagaattcctgggatttcctgatggagtgtaaatgtacaagaattactctaaagtttctggtctgaggaactggaagtgtggatttggcattccctgagatgggaatatggttgataaagcacggttgcatgagaagatcaacattcctatttatttcagtctttgttccctccccttcttcctaggctttctacatagctattctgccattcattttactgcttccactttatttttcttccttgtgcctatgtcttcagcctgccactgagaaccagtggcatccattggacatctatgaaacctgtgtgtcagtcagggccagagaagttgctgacccctctggaaacatcctttactgttttacttcagagaataattactgaaagagatttttgttaaatgtttataattaaaacaacaggcaattgttcttgttccagagtcatttgatgtggtcacaaaatgtgtgagtttcacactaactgagcagttcatggagaaatttgttgatcccggaaaccacaatagcgggattgatctccttaggacctgtgagtactttgatttcaccaggacagttgggggaacaaagataattttatttgtctctttttggactatgtttttggaataagatgagttagtagattgtgccaacgtgaaataaaatctctaacagtatccagtgaactctattctgttgatattttagaaggtagatacatgcttaccaaatttcaaatgatttgaagttgacagggccaactacttcattggatgatgggatctagaccttcaaaagatgttattaatgggcccatttagtaaaaggaaatttagttgagataacttatacattcctatatttgaattaaacactttccactgcttgagttcaggtaagtatatgtgaaaaaagtttactgcaagctctaaatgagtcagtgagttgtcaggcctgtcaaaagtgtttatccagtcttaggtgatagtaacaaaagggtagatgtcaaaaaagatgaaagtatttattaggaacaacctattccctgatggtcaggcagcccatgaaatactgtcttcagatttgagcctcagttttcagggctatagggacttgcccagaagaatgaccatgttgtaagagaaaaggttgaataagaggtaggtattcagttttataaagagaatgtgtagcaagcagtttattactaggagagtttgaaagaaagtaagttagaaaaacacataagaagttccagaaagcaaaaccagcaccaaaggtgtaaagtttagtcaagattgatatgaatgcatttctaataatgaattttattggaaaatggaatggcatgttttgtgaggtcatcagttttcttcccatgttgatgagagatttatgataattaaaactacctttagattctctgctt

SEQ ID NO: 180316 - DNA, 1570 bp, Homo Sapiens
  misc_feature (1279)..(1359): n is a, c, g, or t
ttgggctcgcgagccctggcgtcgcgtaggagggaggatggagagcggcgacgaagcggccatcgagaggcaccgcgtccacttgcgctccgccacattgcgcgacgccgtacccgccacactgcatctgctgccctgcgaggttgcggtggacgggcccgccccggtggggcgcttcttcacgcccgccatccgccagggccccgagggactcgaagtgtcgtttcggggccgctgtctacggggagaggaggtggcggtgccgcctggcctcgtgggatacgtgatggtgacagaagagaagaaggtgtcgatggggaagccagaccccttgcgggattccgggactgacgaccaagaggaggagccgctggagcgggacttcgaccgcttcattggagccactgccaacttcagccgcttcaccctgtggggtctggagaccatccctggcccggatgccaaagtgcgtggggccttaacttggcccagccttgcggcagcgattcacgcacaggtgcccgaggactgagaaccagagcttgaaattcaaagctgcgatcccttcacagcagtaaaccagctctttggaaccgattccatcaccccaataaaggagctcttcacagcaccttccttgggagtgaagtgcagacacttggagtcgatccgcaggagccgcttgagcatggcccgctcatggccatccacgatgtcctctgacagtgtgaggatgtactggccctgggcagaggagatgggttcagcaggtggtcagcccacagaggactgcactctgcatcccacacacctgtctcccctgcctgcctccctaccttgtagtagttgatgagattgaggtactgcagagtggagatgacatcctccttcttgatgctggtgatttcactaatctcactgtgggagagcacaggtcaggttccctgaggacctttatctgtccccaggagccctgagagagaaagcccaggaacagacaagccatgccatgtacccccaggtagacagcgccaggctcacttgatggtgatctgtggcctctccccgctctccgacttcagccccatcaggatctccaggatggtctgggaccagtagcttcgataggataggaggccaaggtctgagaggggcttctcaggggtccctgttttcccttccactttggagagttcatagcctaaagcaatggagcaggagagggtgagtaagaggtcacagatgaacataagcaacatttaaaaacacaggttgccannnnnnnnnnnnnnnnnnnnnnnnnnnnnnnnnnnnnnnnnnnnnnnnnnnnnnnnnnnnnnnnnnnnnnnnnnnnnnnnnggaagaactgagtattcactctttccgtgcgctgagcacagtggagggcatgaggggcactgagaggagcagctgcagtcaaccatgagggtgatcagaggccagtgaaaacttatgggcaggggatgcagagaaaatggctcatgggaagaaggggcctccaattttcctttgctctcccgggctctgtgtctagccatgtaaagaagtg

SEQ ID NO: 180317 - DNA, 707 bp, Homo Sapiens
ttgggtttctccttttaactaatgagatacttttgcattccattttctacttcaaaatttagatgatttagacatttgaagtatgttttaaaaataggaacttacccactaaaacagtttgacatttaactttctgatgcatacatgcaaattcaaagtaaatacactgcttataagtagtaatttatttttatttgggaagggcttagcatatgtgttttggaaaagctcccatgtgcttctgatgcttacctctgcaaaagagaaaagtagcaataattttggcgaggaatatgttcagagtttatcattgtctgtcataatcataaaataattgtctaattttgaatatcctaacttacagataagcattctttttcaaaatatttgtaattttaatttttggctggtggttgcaattaatatttccagatgagcattctttgaatatcctaacttacagataagcattctttttcaaaatatttgtaattttaatttttggctggtggttgctattaatatttccagatgagcattctaagataaagtcattataaaatgtacttctaattaaatattggcagctatctgccaaaaaaaagattatgatttttagaatgattcctttaagttagtggttcttaaaactttgtacacattaaaataatcttgggagttaaaaaccatgcctgccaggtacagtg

SEQ ID NO: 180318 - DNA, 1783 bp, Homo Sapiens
  misc_feature (226)..(242): n is a, c, g, or t
  misc_feature (335)..(350): n is a, c, g, or t
  misc_feature (625)..(637): n is a, c, g, or t
  misc_feature (1421)..(1431): n is a, c, g, or t
  misc_feature (1667)..(1675): n is a, c, g, or t
ttggctccatctccgacgactgaggcaagagggcgccagtgaggaggaagggaaggcggttcagagatgttggaggacacccctcgccatctcgcccttgctgggggcacgggagtggggggggtgacatgggccctaggcagactgcaagcccgaccgagcacttggactcgaactctgtgccgggaggggcccccacccctcctttttcggtttcctcttgtcnnnnnnnnnnnnnnnnnattacgaagtttcattctttttgagcaaaaaagtcgaactttttctgttgaacaaaatattcacaacagggcagttgtgatacgaatagaacnnnnnnnnnnnnnnnncacttaaactttgttaggactccgatgagtttgggacttcaggaaaaatcaacccagcaccagcagctaccaaccaccattccatctcttcacttgaacagcattagttaagtccagatgtgggaacccttctcttggaagaagttcctaattgtgtctcagaccggtgtaaacaaaccagccagccgccaccttgctaaacctataagctttttaaaatccaatatattctgccaagaatatgccttgatagttagccctcagcccataggtgnnnnnnnnnnnnnaacagaattatatatgtctgggggtgaaaaaacccttgcattccaaaggtccatactggttacttggtttcattgccaccacttagtggatgttcagtttagaaccattttgtctgctccctctggaagccttgcgcagagcttactttgtaattgttggagaataactgctgaatttttagctgttttgagttgattcgcaccactgcaccacaactcaatatgaaaactatttaacttatttattatcttgtgaaaagtatacaatgaaaattttgttcatactgtatttatcaagtatgatgaaaagcaatagatatatattcttttattatgttaaattatgattgccattattaatcggcaaaatgtggagtgtatgttcttttcacagtaatatatgccttttgtaacttcacttggttattttattgtaaatgagtacaaaattcttaatttaagagattgtatgtaatatttatttcattaatttctttccttgtttacgtaaattttgaaagattgcatgatttcttgacagaaatcgatcttgatgctgtggaagtagtttgaggaacatcctatgagttttcttagaatgtataaaggttgtagcccatccaacttcaaagaaaaaaaatgaccacatactttgcaatcaggctgaaatgtggcatgcttttctaattccaactttataaactagcaaaaaagtgtttgcttattccaccagttctactgtgacatactcgagtataaagacatgtagcaataacggggagtnnnnnnnnnnnagtctcacagtgcctttggaagggcccgaacttgccttaaatcttcctcaaccaaataagtattttattagtgcttgagagaatctgaatgtaggatgggttcaactgcacaaaaggaaaagatttttaccactttttttatatagatataaagtgaagcaaccgccttagtgctgaaatatgtagtacatgaatatgccttgtttaattacagaaaattccaaaacttgtactannnnnnnnnccatgtagaaagcaggaatgtctcctaagctttcctggacagcagatgaatgagcggtagctttaagtttgtacgtagggtacagttggagcactatatgtactctct

SEQ ID NO: 180319 - DNA, 1615 bp, Homo Sapiens
  misc_feature (705)..(820): n is a, c, g, or t
ttggcataaagctacgcgctaggctcttggccctgacgtgaggcgcgcagagatggcgtaacgggaatagttttcaacgtctatttcattccctgcttcagaggacctctttaatctttgattttggtccctgtttctaagaaaagcaactgaaaaggtcgtaataccgcccctgagaaaaaaggagcagcgctaaataatcgagaaaatgcctcctcttgaaacggatatagagatggaaacaagatataagaaggattgagaatcatataatacaggagcttaaacacctatgcgcgatgataaagagggtactattagagcgcttggaaaataccaggaagttgagagagttaacagaagggcgcacgctggattggccacaaaatcgaattactgaagtaagtgcaaaacgacaaattgtcacagaatacagagaaaaggggaaaagaaattaagaggagaaaaagagagatctagagggccggtccaggagatacaatctatgcataataggaatacctgaaactgaggacagagcaagtggagctgaaacaataaaggatctacttgaaaaaattttccagaattgaagaacgaactagatctacaaatggaaaaggctcataggatacctttaaagtttaatgaaaagaaagcagcatctagacatatccgggtgacgtttttgaatttcaaagacgnnnnnnnnnnnnnnnnnnnnnnnnnnnnnnnnnnnnnnnnnnnnnnnnnnnnnnnnnnnnnnnnnnnnnnnnnnnnnnnnnnnnnnnnnnnnnnnnnnnnnnnnnnnnnnnnnnnnctagagtgttaagggaaaataattttgagccaagaattatatactctgccaagttatcatttctttacaaaggaaactggaagacattcttagatatacaggggttaggaaagtatatcaaccaagaactttccctgaaaattttgctgaaggatttactgcagctaacagagaacctgaattaaaataagaatagggaggcaattgtatgaaagaactgatggtatgcattaaaactagttaaggagcattaagtttaaattgttatgtatagggcattaaaactaaatacaaaaatagaaacataagctgggtgtaaaatttcagtttacgtttaaactggaagggcataccacatgttcaatatattggacaaatactgttttatttttagcatgtagtattgtagatacaaatacgcatgttcttaagctaaacctaagtaaaagggctttgtcactgtagatttgacaaataacattctaaatgtcaaatctgacaattggaaaacagtacagttttatttcccttatttttaagtatagcaggaaaaaaataacaagtttgtccatgttactactgatactgtaaagaaacttccaaatcactggtttgggagggggtggatacatcctcattttctgtacatgatgcatggggaaaaacagtagttactgcatcatatagtacaaagtaaatcatatagttccaagtaaatttgacatggaaataagtgttaactacaaaatagaatatatacattccaatgtttggaaaagaagtggtaaaagaaaa

SEQ ID NO: 180320 - DNA, 1119 bp, Homo Sapiens
  misc_feature (726)..(773): n is a, c, g, or t
ttgggagaaggtttgtgtttgtgaacaaggtgcccattattcccccaccacatgccatccaaagagatcgaggttaaaagaatcagacacactaaaaacacagtggaagcatgtctaggcataatatatcagccttttgagatatttattaaaaacttgttcttatacactattttaatatgtctaaagtgacacataccttaatttaagtgcctaagattttaattaatataatttttaattacaaacacttttactttttaataaacacgaatattttaacttaccaaaagatttagagatcacattaataatgtggctcatgtatagagaaatctgaatgtttagttttgaatggttaactgattaacattcagttatcataacagttaaccagtggttaactgaatggttacattactactgaatggttctataaaatgaaaaacatatttactttgtcttttcatttgactggcttttctctttcatctcatacacctgacagattacccaggtttgcaacagtctcataatctgatcctgtataacctttaaaataaaattctgaagccaaaaccatatgatttttagattgtattactatttttgatcctttttaaactttagaatttcaagctccttggtttaattaatagaagtgaattagctggaaaaagtccatttctgataggaaaacatgttaagggaagcatttcttctgtnnnnnnnnnnnnnnnnnnnnnnnnnnnnnnnnnnnnnnnnnnnnnnnnaaactatgtacatagaaatttatagatattttatatttcgaagagtttataatgcttcaagataatgaagcttcattataaacagcttaactcatttaatgcatcctgctcacatagaggttggttttatatctcaaatccttcctgccagacaaagattaaggtttcagagggcttaatactggactgttggtttaatactgaatggttggttgcagtttgtccatagaagacctaaataagcagaactgactaatatttaaagaatgaaatttgtagcaggtttcaatctgagtttagtataattatgtgtaagaggatggccactcaaagtatttagcacatc

SEQ ID NO: 180321 - DNA, 907 bp, Homo Sapiens
tgtacaaaaaagttggcaacaacactactatttctagaaataagagctattatgacccccattttatggattaggaaaccaaggaaccatgagattaagaaacttgccccaggacatacagctagtaagtgatagagctgaggctcaaacccgtgcaatctgactccacagccctcacttttagccccatgctgtgtacagagctgcccatcttttctgccacctccttgttccatggccctgtcctctcatgggctagagaggagcctccagggttattgagttcccatcccagtgctgttcttggtaactttggctgccagaccatgggccacagcacctgagacagtcacacaggcccttttgcctctgcagctctctgtctgaacagtcatagtcccagacacctcctcactccatcctcacctgtaacctcaccttagcgcctgtctgccgctgcaaagatctgtgtggcagcaaagatgtgggaggtggaagtagggagtgaagctgtctgcaggcgcagaagggtttctttagaggctgggctgcctcctgctggtgcttggtgcacctgccattggtgcccaggcctcactaggctgggccctgaccagagctctcgagccccagctgctcctctccagtttctgtagcgtggtttgggttggtccaatgaggtgatatgacatattcaaggtcacacagcaaggaaggggcagagctggaccaaagcctggaatctctgcccgctccttgtcttctgactgggctgtgctgctagggcccagggttgtcccaggtcctgctgcgaggaggcgggcaggtcctgctcggctgggacactccattaacttcccgtttttcctgatggggccgggttcctctacttccaccactacttccc

SEQ ID NO: 180322 - DNA, 1727 bp, Homo Sapiens
aactttgtacaaaaaagttgggaaatgttaagctgtatccagtgccattccatatactgtatacaagatactgtctcatatgtggaccccttcccatcttcagaaaggtacatgtcttccaggttgagaagagtggatcgtttaggacctttaacataaacaagttacctgtaatttaaattaagcagaattagctaggtaatgggaccatattaagtaatgaggagatattcaaacccttatgacctgaaaggcagaagagctagttttagttatgtggttcaggcctaggggtggtatgaagaatgcccttcaaatcctttctgtcagctctccaggaagctttccctgaccctcaggtcctcatgagctccttcccttctggtcgtcgtggttattttatactgtgaactacaagcattagcacttcattatgaatgatgttctatacagatatcacatgtttgatagtttaatcttactccatgggctatagctaaatgtttttgaatgtttattttacctttgttagcactgagttttttctctaacaaatttatgagtaagaactaagtaaactgttcttaatctatagcatgatgttgttgggttctatgctgtgttaaaaaatgtatatattatagatagattctgcttcaataagcaattttaagttacttttccagcttggattcctatccggtaacttctaagtaagaattgttttctatgtatgtcatatgttctgaaatataatttcaatcaattacacatatgattcttgatgcaaagagatggtttcaaattacctaaaattgtaaaataatatccagattctattaaaaacaaacctcacaatatatgaattttctaatctagatgtaatgtatttgctctttaattttcactgcatgccttattttccaatcatttttaatgaatacttaaaaatatattaaaattctgagtgatctcatgttgattacaaataattgagtttttaaaatcaatgagtaaagtaattgaaacacaaatttgcacaatccagattttcacagttcacaattggttacgatattaactaaaatatattcttttcacagaaatgatggaacaagacccaaaatgacaccggaacaaatggccaaagaaatgtcagaatttttgagtagaggtcctgctgtactagccaccaaagcagctgctggtactaagaaatatgatcttagtaaatggaaatatgcagaactacgtgataccatcaatacttcttgtgatattgagctcctggcagcttgcagagaagaatttcataggagactaaaagtgtatcatgcttggaaatctaagaacaagaagagaaatactgaaacagagcaacgtgctccaaagtctgttactgattatgctcagcaaaacccagcagctcagattcctgccaggcagcgggagattgaaatgaaccgacagcaacgcttcttccgcatcccattcatccgccctgccgaccagtacaaagaccctcagagtaagaaaaaaggctggtggtatgcccattttgatggaccatggattgcccggcaaatggaactccatcctgacaagccacccatcctacttgtggctggtaaggacgacatggagatgtgtgagctgaatcttgaggagactggcctgactcggaagcgtggtgctgagatcttgccagacagtttgagaaatctggg

SEQ ID NO: 180323 - DNA, 1449 bp, Homo Sapiens
ttggcgcaaaaccaaaaaagcaggccttaaagcactgcgtagcactgttttgaaaaagttgaatttatttcattttattgactgctttggattttatttctttcctctttccccatatgtgctactaaatgagtcatgatacagcacttgtgccctttgaaatctctgttatttacctcatgagctaaaacctcttgaatttactagttttcttattacttatgagggtgtgttttttgtgtgcttatagaacttttctaagtgttcttatagcagtgaagcctacaaagtaagagtttccagattccatccgttcttttagctgacttgaatgactctaatgcagtgggttgcaggtttggctacttacctatgtactctgtaaacatccagaggcccagggatattctgagccactgtgtgtgaatggagtttggccatctgtagatttccgcagtctctccaggtgatcgcactgtgcagcctcattgctcataaacaaaactttaatatgcttttaatgatctttcaagtgtgttgaggatttctttcttgattttgaggaatatatgtcagtatatttttcaactttaagtgttcgtatatatattagtaaaaacattgaaactgaagtctgggggaagtttgtggaactagaatattagaatcaaaagtttggatttaaaatctaatgtgactatcgagtggcatgctggaaatttttaatttatttggccatcttttagtatgccattcttaatctcatctgtcaaagaaacaaaaattatgtttttctagtagctgtttccggttttcaaacttatgcatgctttcttgcctctttagtcaatgttttcttcatgtttctggtttaaacatgcaaaaatgtgtaataattacagaggtcctgctgtactagccaccaaagcagctgctggtactaagaaatatgatcttagtaaatggaaatatgcagaactacgtgataccatcaatacttcttgtgatattgagctcctggcagcttgcagagaagaatttcataggagactaaaagtgtatcatgcttggaaatctaagaacaagaagagaaatactgaaacagagcaacgtgctccaaagtctgttactgattatgctcagcaaaacccagcagctcagattcctgccaggcagcgggagattgaaatgaaccgacagcaacgcttcttccgcatcccattcatccgccctgccgaccagtacaaagaccctcagagtaagaaaaaaggctggtggtatgcccattttgatggaccatggattgcccggcaaatggaactccatcctgacaagccacccatcctacttgtggctggtaaggacgacatggagatgtgtgagctgaatcttgaggagactggcctgactcggaagcgtggtgctgagatcttgccaagacagtttgaa

SEQ ID NO: 180324 - DNA, 993 bp, Homo Sapiens
gacctgttcgttgcacaaattgatgagcataggcttttctataaagccaactttgtacaaaaaagttggcttactgttataaggttttttttgtcatatggttgtctaaatgttgttaatatctatgtcattgtggtcattttaaatcctaaaatttgttggcaaaagaaaaaatttttatatggcttctactttttgtggaaatagtgattaaactgacaaatgtctacatccttcagatttttgaaattactgtttattttgttctatcataaatagttgaataaaagttactgtacaaatttgaactctttacaggaagaatataaatctagtaaataatagtagtttgttttcctgccgtgtgagtttattttaggttactgttacagtgatttgtgggaatctgacaggggtttgttgctggtagtggtggtggtagtggtatgtgtgtgtttgtgttggcaatgctaagaaacatcttaagggaaagacaattctaagaagtaacactctgaattttattaatttgtaggcaataaatattttcattttgttttaaatttactattagggacctttcttctttttaaaaaattattggggtatattttaggattaaaggctcttttcttttcccttgagctgctggtataactttccttgttctgtgtaatagctcagcaaaacccagcagctcagattcctgccaggcagcgggagattgaaatgaaccgacagcaacgcttcttccgcatcccattcatccgccctgccgaccagtacaaagaccctcagagtaagaaaaaaaggctggtggtatgcccattttgatggaccatggattgcccggcaaatggaactccatcctgactagccacccatcctacttgtggctggtaagacgacatggagatgtgtgagctgaatcttgaggagactggacctgactcggaagcgtggtgctgagatctgccaagacagtttgaagaa

SEQ ID NO: 180325 - DNA, 2400 bp, Homo Sapiens
  misc_feature (275)..(295): n is a, c, g, or t
  misc_feature (1109)..(1126): n is a, c, g, or t
  misc_feature (1149)..(1205): n is a, c, g, or t
  misc_feature (1295)..(1420): n is a, c, g, or t
gccaactttgtacaaaaaaagttggatttctattgggatataaaagccttccccttcagtgaagaaaacatttattttttatttgattcctaggatttagtaaactctagctgtctatttaaaatgtactgaggcacaacaagtattatactggaagacttgccaaactggcaaagctttaagttcatcagcattctatgtggttcagagctgtgatttttgcaaagtattttaccaacctcctcgatggctttgataaaggttagatttgatgnnnnnnnnnnnnnnnnnnnnncttactccactaaactataaagaaaataattacttagaaactccattttaaataatcatttcctagaaattcttaaatatatacagaattttaaagaaaacatttcatctgatttagttagcatccacatatcattgaggaattaaagtgtgggacagtcattattaaaaaaaagagagaaaagccctctattagacattccacaatccatgttttaagcttatccaaaggtccaaatgtcagccattctgtatgttcatgttgatcatttgcgaacaagaaagcaggtttctaggtatcacttaggatgtgaactgcctctcaactttaaaccctgttagctttacttttttaagtccacaagtgatgaaactagtttctcagctaggcttgtactttcctcattatttctagtatttcaaatattctcaaacaaaagagttaccacttttctccatttattttcagttatggaaatgttccctcttcaccactaagctccaaagcaaatgaaagacgatcacatgtcaggacagtagtaaaggcagcttataaatgggacataaatcagagatgtgttggtattttgagactcaagactgtccttttttaaaataaaaataaaaacattaccaggttcccaagccaatctggcttaaccaacagtgcactgaaatattagtgtttacctccaaggctagggagccaaggggaggaggagaattggaggaaggggagataatgggaagaggatggcgccttcctgagttggctagagggccaacctttgataacagtttgacgaaatcaatcnnnnnnnnnnnnnnnnnngagacagagtctcactctgtcannnnnnnnnnnnnnnnnnnnnnnnnnnnnnnnnnnnnnnnnnnnnnnnnnnnnnnnngttcatgccattctcctgccccagcctctcctgagtagctggaactacaggtgcccgccaccacgcccagctaattttttctatttttannnnnnnnnnnnnnnnnnnnnnnnnnnnnnnnnnnnnnnnnnnnnnnnnnnnnnnnnnnnnnnnnnnnnnnnnnnnnnnnnnnnnnnnnnnnnnnnnnnnnnnnnnnnnnnnnnnnnnnnnnnnnngcatgagccaccgtgcccggcctatagaaatcaatctttttgactcttctcacttttatctccccatgcccaaggtttgcctgttccataacactcactcccttcccccttgctaatcagaagccatctcctctcagtgtctgatctctgctcttcatacatgattacagtcatggggtagagagtgcttgctaaattatgcagttaatcctatggtgctttaattttcaggccttcaaaaaacacttgtacagtgatgtgcagatttttaaacagttgaacttccttgtactacagtttttgtattgacagccaaatttgtctttcattcttcagattgtgaataaagtgatttttacagggcttccagcaaagtttttcctttcatctaaggcttgtagaaccctagcttatatagctgcttacatgagaaatgcaaaatctgtattcaccatgactttagtaacaaaggtaaagttttttagtagtgccaaggcaagaggaacaatcttggtggtagtactaagttttgtcaatattgtggtttcctgattgtattgttggctttctctctgagcattgaggtatactagaagtagagcttctcaaacataatatcattacctcataagcattaacaaatcaggcccaaagagcgtaagtcctagaaatttgttttaaagcagccctagtcatggtgctggtgctaccgccttgttttaggagcctgcctcctgtcagtatgaaaccctcacctgaaaaatgccagcctggacaccaaacactgagccccttcaacaggcacattatttccccctgagatccataagggaatttagtttctactattgtagagttctgaaaagaggtaaaatagtagtcctttggtcatcctatttttgctttcaattttgatatttcagactgtaaaaggccttgggggatgatagtacatgtggtagcagtaatttttttgaagc

SEQ ID NO: 180326 - DNA, 1171 bp, Homo Sapiens
ttgggtctttatgggcttccgtttcctcacatgttaaacgagtaagatagactaacattctgtgagtctataaatcagaaacatttttaacctcaaaaattttattatctttgacccctttggtagattctactgtgtatgatattacaaatatttgggtttgtttacttatcttagagcttacttggctagtgcaaatgagcctatgagtttttaaactcttgcttgggcagttagaattccagaataatttagctgcctgatagataagagaacaaagttaggacgaactttttcactgatatctggggacttgaattcttgtcaaatgtcttcaaagtcaattttatgctgttatagttagcttgctctttaaattattaaggaaaggtgaattgtatgccagcttataatagtgtgacttggtttttaatgaaattaaaatttaaagacaagcaaaagtgtcttccattaaatgtgtcatgtttaggcattttgatacaactttgtgctttgtgattgaaagtctgtatgatttcaaagtaatttgagttttgactccacattggcatttccatcaatttactgtgttgttccttgcttgcttattggtctgtttacggtatgcttttaggagtaaacaatttactcctgacctgtaattatcaaagttgttggatattgagttgtttatttaaaaatattaggtttggctagatttttgaaaagtatgcagttgtatttcacaactactgttctgagtaactggtcaaagcaaaattattattttaggatatgttgattaaatatgtattttaaatatttaagttttttttctataattatatggcagtcacaaatttaaacttttatttttgcagaagaagtacatataaccacttaagcagctggttgacagatgcaaggaatctcaccaatccaaatactgtaagttaaatggcatcttattacacagaaaatttaagaactaagctaacccaaaaagggaagccatttactggtgagatttttgtcttcaggtactaagaatgagagaatttttattgtattcttcaattagttgaagaaaacctaacagttatttttcagttcttattaaaccaggttttgcattttattatacctaggttttttggttcatgtttgtcat

SEQ ID NO: 180327 - DNA, 1662 bp, Homo Sapiens
  misc_feature (412)..(440): n is a, c, g, or t
  misc_feature (449)..(736): n is a, c, g, or t
  misc_feature (1201)..(1264): n is a, c, g, or t
ttgggttctggagttgtgagccttggcgggtagttaagattgaggagccacaggttttcggggaacatcatagcagggttcaaaggggagcatgcttttcagaggtagcttcctggggtcagccagagtatgaagctgaatctttcaggggacacataacacttaggggctctggctgccaaggagtttcccgccatccaagaagaggttgtcagtttgctgctggcggctgacctgtttccctctccctcctccctgcctaagaaaaggaataggggcaggagaggcccttcctataccagtatctcctctggatccgcctaggtcttcgctctcatgctactactcctcagtttgttaaatactgccctttaaataggcatttatctgatcattgctgcttcaccttcannnnnnnnnnnnnnnnnnnnnnnnnnnnngagacggannnnnnnnnnnnnnnnnnnnnnnnnnnnnnnnnnnnnnnnnnnnnnnnnnnnnnnnnnnnnnnnnnnnnnnnnnnnnnnnnnnnnnnnnnnnnnnnnnnnnnnnnnnnnnnnnnnnnnnnnnnnnnnnnnnnnnnnnnnnnnnnnnnnnnnnnnnnnnnnnnnnnnnnnnnnnnnnnnnnnnnnnnnnnnnnnnnnnnnnnnnnnnnnnnnnnnnnnnnnnnnnnnnnnnnnnnnnnnnnnnnnnnnnnnnnnnnnnnnnnnnnnnnnnnnnnnnnnnnnnnnnnnnnaaatcattgtcctctctgctgttgaccattacactcatagcaaaggctgcctttctaattagtgccagtttcactaacgtggctaagcagcacgttttctgagtctgcatgtgctggccacacttgccgactgacacacagctgagatggaggacttcagagttcaatgactgccatttcttgggttttatcaccctatgtgtaatctggtatacctggttaataaatccaattaatgggaagtgtagccttctccttgttttcttcttaagttctttggaaagaatatttgtattattattttactgagcaaaaatcatgaataatacattgttattcagagcatgtaacaaggagcttcaccttgtttgatatgtattgaaaatccatgcctcctctcctgattgctttattggaattaagaacatgaataccaggtgacttttatatcatcatggttagagnnnnnnnnnnnnnnnnnnnnnnnnnnnnnnnnnnnnnnnnnnnnnnnnnnnnnnnnnnnnnnnncagatactagagtaaaaggatggtttcttctggacaattatatacccacatttatctgctctgtcatatatttactaattgtatggctgggaccaaaatacatgaggaataaacagccattctcttgccgggggattttagtggtgtataaccttggactcacactgctgtctctgtatatgttctgtgagttagtaacaggagtatgggaaggcaaatacaacttcttctgtcagggcacacgcaccgcacgagaatcagatatgaagattatccgtgtcctctggtggtactacttctccaaactcatagaatttatggacactttcttcttcatcctgcgcagaacaaccaccagatcacgtcctgcacgtctaccaccatgcctcgatgctgaa

SEQ ID NO: 180328 - DNA, 1417 bp, Homo Sapiens
  misc_feature (444)..(473): n is a, c, g, or t
ctggagcaatttggagacaagattaaaaaaataataataacattgtagaatggtggccactcacaaggttacagaatttcccagtaaatgttttcaagggtggggcaaaaggtatgatagacaaaagctttaaaaaagtcacacagtgcccatgaatgccagccctaggcctaagtcctaattactcaaactcaaactattttccatttcctacctgtgtggctctcaatctgtgctctgggctacccacattttttagtacttttattaattcttgagcagacacatacaatttttctgtgtaagacataggtaatactccagccatgtgcttcccctacagtttaaagaagagaatgcaacctcccccatctctggactaacctccatgccttctccaactacatccctttcccaactcccaagagatgaccactgtccaannnnnnnnnnnnnnnnnnnnnnnnnnnnnnactatatgtttgtggcctcaacatgtcatagttttacatgtgtaaatggatctatagtgtacatattcttctgcaacttgctatttttcttcggcattatattcttgagattcatcctcgtttttgaacctacctgtaatctatttgtttctgctgctgaatggtattcccttttatacatactaccaaaatatatgcatcccttctactattgaaggacatttgggtgatttacaggtttttgaaattacagtgttgctagaaacattcttgtggagatctcctgtccacacctccaagaatccctctaagtaaacacctagaagtaaaattgctttacacaataccactgtttgcagagtgctttacaaataaccactgtttccaaaagcaaatacactaattggcacacacacacagcagtacataagggttttgattgctccatatcagctgagcccttgatattgtcagacaacttggttttcctcagtttgatagatatgaaatgttatatcctatgcttttaatatgtacttcttatatatttttaggtgcttattcctcactcatgcttccaagaagtacctgttaacattttttgccatagttttaaaattttcattttgtcctttcctcatggatctataggaatgctttatgtattcaggattctaacattttgtccattatatattttacatatatctttgccaagctggtacttattgttttacttttattatgctatcttttttgatatacacgaattattaacaatatagtcaatttgatttttaacgtttacattggtcagtctttccctttatggtttacgctttttgtgtcttgttaaagacatctttccaggaacagcgtgaggaggacagaagcacctaacaggactgctcaagccacctgcgaacactgctgctaccatgccc

SEQ ID NO: 180329 - DNA, 2965 bp, Homo Sapiens
ttggcacttggctgccgccccgagaccccagcccgtacctgggcttcgcgcccgccaagtgggcccagccctggctcctgcgccctgtggcggccacctccatcgccttgctttcccttcgggcactgggggtcgctcagggcgagacatgggtgaacggaagtggaagctgtgagcgtcgcagcccgaggcgccgaggcctgaggcgccgtcggggccaccgcgacgctcgcatggagagcgctgggcgctgggctgtgcaccgacggctaacctggacccacggtctctgcggggcgggagctttgcagaaccgactggccgactggggcgcgggaacatgaggcttggctaggagcccgctgcgggccaggcgcgcggtgcgcaggcatacccgggtcgcgggtgaacaccgcggagccccgggacttgcctgtcgttgctggtggcggcatggtcttctgtctgtcgagcgaggagccgcgccgcccgctgcgaagcgacatggtccacttccaggcctcggaagtccagcagctgctacacaacaagttcgtggtcatcttgggggactccattcagagggctgtgtacaaggacctggtgctcttgctccagaaagactcactgctcacagctgcccagctgaaagccaagggggagctggctttgaacaggaccagctggtggctgggggccagctgggcgagctgcacaacgggacacagtatcgtgaggtccgccagttctgctcgggctctggccaccaccttgtgcgcttctacttcctcactcgtgtttactccgagtaccttgaggatgttctggaagagctgacatatggacctgccccggacctggtgatcatcaactcctgcctctgggatctctccagatatggtcgctgctcaatggagagctaccgggagaacctggagcgggtgtttgtgcgcatggaccaagtattgccagactcctgcctgctggtgtggaacatggcgatgcccctcggggaacgtatcactgggggtttcctcctgccagagctccagcccctggcaggctccctgcggcgggatgtggttgaagggaacttctacagtgctacgctggccggggaccactgctttgatgtcctagacctccactttcacttccggcatgcagtacagcaccgtcatcgggatggtgtccactgggaccagcatgcacaccgccacctctcacacctgcttctgacccatgtggctgacgcctggggcgtggagctgcccaagcgtggctatccccctggtgagccctaccataagtgggggggtagtgatgcactggggccctcagaggacagggctcagaaacagaatgggacgcagccactcaagggaagtagaggtcccttgaaggactcctgtggcttctgcatgcaccttcctcaacccctgaggagggttagatcatcggagcaatattcttgtccaagttccagttttctacagtctggctgtgtagtcatttctgtgtgcttgaaggagcttgtacaagtattgaccacataaggcagcatgttgcaagggtcctacccaacagattaacaggaaagaaatggggcatgggtgtgaggagtggaaagacagggaggaagggccatccaggcagtgtggcagaagcaaagaagcccacagctggggggcgggggtacagtcaactggcagggtgtggaacagggatgttgcatcgggaaggccagccttatggacttgggctcaatggacagtgttccataggcttcttagttcagcctcagagtcccactgtgactggtgcagcttggtgtagctctcctcgggccccatctctgggcctttggtggaggcttctgagggccccactcccccttgttttgaggcactgctccccatcacatctcaactgtaacactctgctgcagaacctctgtttccatgtcaacaccctagtccctgcatgcacacaaagagggcaccatggctgattgtctccatggctgcttctcccctgcatcgtgtccttaaagggcaagtttcctgctgcacttgttgacgactcacccctttcagccccagtgtctagcacaatttccctgtacacagtatcaacagaattgtatttgttgaatgggaggcacgagtcatgttagaaggccgattatggcagcacaagaggatgtgggggcacagagagtccaggaatatcatagagacagacctgtaacacttggtagccaggagttggagcatcagggaggtgaatacagattttggttaaacatccccattttcttgtttagatgtaataattgatccccagcaaatgatgggatgccctgaaggttgtaaggctagttttgatggcttaggcctttgaaatccaatttggagctacagaagttagggccatgaaaagggagagttgatttggggtggaaggatgagttggtgagtttggtcacagcagattgatttgaggttctttggaaatacagagtagatttgcagtcattggtacccagcagagagattaaaactgagggcacagtggcagctgtgagggagacagaacgatgctcatgctttggattggcaggaaagaggggctatggcggaaacaaaaggagatgagggcaggggcacttctaggaaggactgagactgctggcagtgtcacatgactgttgagaagaagggaatttgttagcaagtggttacatttagtaagaaaagtgttgagggcatgggtttggattaaaggagggagtgagcaattgacggaggaagtggaaattgggcaaaacattccttttgcgaagtttggatggtaaaaggaagttgttggggaaaggcaataacaggatcttatgtttggcttatttactggtctatggggaggagttgggcgaggaaaagctagatacaagacctggggcaaa

SEQ ID NO: 180330 - DNA, 1808 bp, Homo Sapiens
ttgggactgttgggtccccttgactaacgtgaactggcagtgttaccttgcttttgcagtaatagtctacagattgcaggtctcatcaattccatccaaagtttaaaagcatttaaaattaccaaatctttaaaatcactttggtggtgattccaaattggtaccaagcaaactttctggatgcccaacatgattttcagtaaccaccctttagagtatttgtttactaagttcaccacattttgaacatggtagttttagactgcaataatatttagacttacattattacttactgctaagtaaaatctaaatcctgcaaatgcacagaattcaagctgaaatataatgatttatgtttagctcacattgaagtattggttggttacttatgtattaatgcagtgtgcattcacatttaatcaggtttagtctgtttctattttaataattttaaaaaattatacaagcaaattagatattagacatgttagttacaatggtaacacatttttaggtgtcgaaacacaattttcaaaattcctaatgaaagttataaaaatgtaaacaagaattgtaaaaatggacaaagtagtcaaatatattttcaaagcacaattttattagacaggcataatttacattttgcttttctagtgggtttgaaaatgtttattggagattgggctatgtagtttataatttttaattcataaaaaagtaatcatacatgagaaggtagacctgtgccctaggatcatgtcacatatacagataatgccatttccttgtgtgtgtgatgtgtgttttgatgacctccacaggccttactgtatcaagcttttataatgatgactccttcattatttaaattcctatactttttatttgttatcacgcaactactttgttcaatgtgaaaatgtgctaactcatgggagaagagtgccaattgatagttcttttagcaattaagaatatggtatttgggaagaaaagtttgaaatgcaacaaatggatatttcaacacagtagtattatattatcagttctttagtaagtgattttagagatgttgtaggctacttttacggtggaatatatagtatagagatgcaaaacttaaatgtttacatcaatttatattgaatgtcacataatttcatggaaggaaaggtagcttgatatttagattctaagatataatctgaaaggaaactaattatgttctctacacttactgtaatactgattattcttacatatcaaattattgaactttaaaaatttcattgtatagtcattaaactgagttgggttttttcttaaagggtttagcatcactcatttgatttacacattcacattataatatttaattatcatgggtgtatgctttacataaaaaaggtttataaaagttatttatgctatattgaaagtcatcttaagaatctccaggttatttaagtagttataggagcatataacaagcacctttatcaaaatctggtcctatgtgccttgctttaccaatacctgatttttctggagggtgttccctgtaattcacaactgtagacacatgggcaaaattaggattttaagaataaatacatttctatttttttggttgtttcaacattagctcttcaaattcattaacaaaattaaaataggtatattacaaagcataaacatttgcgaacagacttaaataaatggggatactattgctccatcattgaacttttgaaactttaaccaattggataaactggcccttttgttggttccgttggtaatta

SEQ ID NO: 180331 - DNA, 939 bp, Homo Sapiens
ttggcgggatttgatggcgtgatgtctcacagaaagttctccgctcccagacatgggtccctcggcttcctgcctcggaagcgcagcagcaggcatcgtgggaaggtgaagagcttccctaaggatgacccgtccaagccggtccacctcacagccttcctgggatacaaggctggcacgactcacatcgtgcgggaagtcgacaggccgggatccaaggtgaacaagaaggaggtggtggaggctgtgaccattgtagagacaccacccatggtggttgtgggcattgtgggctacgtggaaacccctcgaggcctccggaccttcaagactgtctttgctgagcacatcagtgatgaatgcaagaggcgtttctataagaattggtaagggaggaggccatgcagtccctagcttgggagcttgggagctggagagcagggagcagcgtgtgcatggtttctcagctctgtagcaggcagggagctgctgtcttgggtttagtttgcctctcgaacagaaaaatacctgggatcagacttggccagccatctggtttcagccggaagctaacaccctcattctgagtccaggctagtgggtggtggctgaggacccagttggttgaggagtccaactagaaaccaggagaggtagcagaataattaaacccctataggggtggcaagggcctctggccctgggtggaatgtcccatttcctccatcactgagtgggcttccccaagcagaaagggttgtcccggagcaagaattttgtttgaatgcgtgtaacttaaattaacccttgtggacctctgctcagctccgctcggctctgcccgatgagctccatccaggctccgcttgccggtgggaaaggctccttagaagccggcaatgagctccatccccacgccgtgccagtgtgccttccgct

SEQ ID NO: 180332 - DNA, 1393 bp, Homo Sapiens
  misc_feature (1012)..(1034): n is a, c, g, or t
ttgggtcttttcacatttcaaacctccagtttaattcctctctggaagatcccagcaccgactactaccaagagctgcagagagacatttctgaaatgtttttgcagatttataaacaagggggttttctgggcctctccaatattaagttcaggccaggatctgtggtggtacaattgactctggccttccgagaaggtaccatcaatgtccacgacgtggagacacagttcaatcagtataaaacggaagcagcctctcgatataacctgacgatctcagacgtcagcggtgaggctacttccctggctgcagcccagcaccatgccggggcccctctccttccagtgtctgggtccccgctctttccttagtgctggcagcgggaggggcgcctcctctgggagactgccctgaccactgcttttccttttagtgagtgatgtgccatttcctttctctgcccagtctggggctggggtgccaggctggggcatcgcgctgctggtgctggtctgtgttctggttgcgctggccattgtctatctcattgccttggctgtctgtcagtgccgccgaaagaactacgggcagctggacatctttccagcccgggatacctaccatcctatgagcgagtaccccacctaccacacccatgggcgctatgtgccccctagcagtaccgatcgtagcccctatgagaaggtgagattgggccccacaggccaggggaagcagagggtttggctgggcaaggattctgaagggggtacttggaaaacccaaagagcttggaagaggtgagaagtggcgtgaagtgagcaggggagggcctggcaaggatgaggggcagaggtcagaggagttttgggggacaggcctgggaggagactatggaagaaaggggccctcaagagggagtggccccactgccagaattcctaaaagatcattggccgtccacattcatgctggctggcgctggctgaactggtgccaccgtggcagnnnnnnnnnnnnnnnnnnnnnnncacccagaggcaaaatgggtggagcactatgcccaggggagcccttcccgaggagtcccaggggtgagcctctgtgcccctaatcatctcctaggaatggagggtagaccgagaaaggctggcatagggggaggtttcccaggtagaagaagaagtgtcagcagaccaggtgagcgtgggtgccagtggggttcttgggagcttcaaggaagcaaggaacgctccctccttcctctcctggtctttctctatgggacctagtaaataattactgcagccacctgagggctggaaaaccacttccaggtggggggaggagagagtttagtttttcatgctcctattttcctcctcctgga

SEQ ID NO: 180333 - DNA, 1225 bp, Homo Sapiens
  misc_feature (256)..(266): n is a, c, g, or t
  misc_feature (590)..(652): n is a, c, g, or t
  misc_feature (1168)..(1176): n is a, c, g, or t
ttgggaaaactttaacaaaagctggcagctggctagatttggcttgtaaggtgctatatgctgacccctgcttattaactaaagtcagtattgcattctgttttgcctgttcatatctatgaagacttagaattcttattcatcctttctgggattcaggtgccacatgggcagagaaacgtggtttctatcaaatcatctatataaaatactttataagtgaaatattacttgaatcctttgagatgttacaagnnnnnnnnnnnccttgagtcatgctaatagatggttcaatacatgaatgagtcccttgctgaaatgctttaggacttcagactaccctgaacgttgattactctttatactgaaataggcattattcagtggaagagagggaagaccaaattgatagactggactttattcgaaaccagatgaaccttttaacactggatgttaagaaaaaaatcaaggaggttaccgaggaggtggcaaacaaagtgggtaacagtagcttcatgattacaaataacctggatggaaattatttttgataatgctaaaaatgttattcctgttactttaaaagnnnnnnnnnnnnnnnnnnnnnnnnnnnnnnnnnnnnnnnnnnnnnnnnnnnnnnnnnnnnnnnactccaaaattttcatattttcaggtttcatgtgcaatgacagatgaaatttgtcgactgtctgttttggttgatgaattttgttcagagtttcatcctaatccagatgtattaaaaatatataaaagtgtaagttaaagtatagataaaattattcagagacagtttcttattattctataccctcatttatttcatggtttggcatttcagtgtatcagtacaaaatgaaactgttagatctcttgtgccctcttgtaataaatgtaaactgtcttgtataaaaagtaaatagaaaatttatacttagaatgagataaagatcattttaggacgagccaccgcgcccggccgaaagccaactcttatgcctagaaatatgtgcacctatgaccaagcccatgaattatacaggaattatgtaattatgagtgatgtacttcaaagttattgcacatacacttgtttactttgtatgtttgcaggattaaactttgtataatctttttacaaaannnnnnnnncagtatgcaagcttgcaagatgaaaataaaacctgtttgcctgatgggg

SEQ ID NO: 180334 - DNA, 2390 bp, Homo Sapiens
  misc_feature (251)..(306): n is a, c, g, or t
  misc_feature (2141)..(2151): n is a, c, g, or t
ttgggaattgttctaattcacatcttaattaagaactttactaggttatatcttttgcaagtatgagaataatctagatagaaggactagaattggattaaaggtgatccagataaaaatagtaattctaatgaggaaattttttaacattgaaaatagtaccctgtttattttttttaatgttagagtcaaaccattgcacattactgtgtaaaaatacacaaagatggtaacttgctgccaaagccctnnnnnnnnnnnnnnnnnnnnnnnnnnnnnnnnnnnnnnnnnnnnnnnnnnnnnnnnatcactcatttgttttctatctttatttctgtttgggttaaagttacaaacagcaagtttttgtgtttaaattcctgaaaatgttgcgatggaattacagtaatgtgttatggcttgggcccctcgcaggagtgtatctcgcagtcagcagtgaaaacaaagttcgaacagcacactatcagagctaaacagatactagctactgtgaaaaacataatggattcagtaaacctggcagctgaagataaaaggtatgagttcattttgttgcaacataaaaatgttagtttttttgtcagacttttgttaagatgaggttttaaattgttgtactataaatactttttacactgaaatcaaccttgtgggtttaactgatgcctacttctatatttttaagtgcgtatttgaaagtgtcgatatttattctgcaaccttgcacacatcatttatatcccctggacctcactattcctgtgtatgaattgtgatttttaaaatgttttgtggctttaaaatatctttgaagcagtggaagaaccatttcttcaagcagatttttatgaagaagtccaaaacaggtgatcctctttctgcattcaacccacgacccattttttaatatggtcatacattggtattttgaaatcactattttatactagttgtgtttgtttattgcctggtgaacaaacaaggcgatgctacctgccaaccagaaagttgatttggtaagcagtaccctttatgttatactgtacggcattattttatactatttgttaccttgtaaaggtggcaatgaatacatgaaaataccagcattatcgatacaaagtataattttcacaaacttggtatgcttgaaacacagatcgggatgttattagatgtgacaaaagtaatgatgttaagcctcgataggaccttcagtggacttaagccagttgaaggaaacataaacgcatcaaagcttaagtccaagatgacataacattggaattttaaatgtatttgctctttcagggaacaaagaccccttcatgtccctgtctgttgctttataatggtactttcttaggaatgaattaagttcaaatgcagagaattgccagcatataaaacgcaaggatcagaaccctgagtttgaactcagcccctgtgtacagcctccgtgtggcctctgtttaattagatcgtgctgctatagcagttccttctagctcagttgctttgatgtagtacccaaattttggcctaaaagtgatttaattagtaataatttttaaagatataggatgttgaacaaagtatagcacaaagaagatgtgatttgaggattgtataatcataatgtcctgggaacttcttaagtaaaagatcttcttaaatggatctcaggtctttattttcctgtatcagccagagttgaacaaacttttgtttaaaaaaagagccagatagtaaatattctaggctttatgggccataaagtctcttggagctactcatttctacagttttagagcaaaagcagccatagatagataataggtaaatgaatgggtgtggctgtgtttcaagaaaactttaacaaaagctggcagctggctagatttggcttgtaaggtgctatatgctgacccctgcttattaactaaagtcagtattgcattctgttttgcctgttcatatctatgaagacttagaattcttattcatcctttctgggattcaggtgccacatgggcagagaaacgtggtttctatcaaatcatctatataaaatactttataagtgaaatattacttgaatcctttgagatgttacaagnnnnnnnnnnnccttgagtcatgctaatagatggttcaatacatgaatgagtcccttgctgaaatgctttaggacttcagactaccctgaacgttgattactctttatactgaaataagcattattcagtggaagagagggaagaccaaattgatagactggactttattcgaaaccagatgaaccttttaacactgggatgttaagaaaaaatcaaggaggttaccgaggaggtggcaaacaaagtggg

SEQ ID NO: 180335 - DNA, 1541 bp, Homo Sapiens
actttgtacaaaaaagttgggtccctcatcggccaccagattctaatgccataaggccccagctggttccccatcacagaaccacccagcaggaagccgggggtacaatgacctcggccacacagagcgctcgtgctttcagcagagcgcctccacagacaagcctgtggccagccctgccctccagcctcgagctggagttgctccagaggcagccccagcaggcctccctccacatagaggtggctgggccaattgcccaaacacgtgagacacacagggagctttatgtgttcatcttcctgctttagaacttgctcccggtcttggtttttctgaggaaaagcccacagtggttcccctgcccctcccatacctccctatctgccgtctgtctctttgggccctggtctgacagttttcatctgaggcctcctcgggagcaggagacttaagggttcatcccgaccttagttcacagagcctagctgggtgcatcccagccgcagggggtgagaagacacccagagatgggggacaatgctcaggtgggggcctcctccgagactctggttgagaggaaagcacatgattcaagcctaccccacaaaaaaggagcacaaaatgctcagaaatggcccttcctccctgcagtgacgtaggacaagggaaagggccacacccattttcaaaagagtggactgaggtgctctgctcaatttggggtctgctttagtgacccagacactcaagtccagatggagactccaggggggtccttctgcccctctggccagccccacccagcactccccatcaccccatgtaagtgtgtatgccagggctgagctgcctccaggctcacccactgcatctttgccccaaataggtctttgtccagtggtactttgttcatgagcagcacaggccatcttgttggacactgtcactttgggccttgccaggtctcacagaatcacatcgctgtatttattgtataatattgtgaatattggaagttttgagtgagtgctgtctagaaggttttggagtgtggatgctggtccaagaaagaagatgtgccctggcctgctggaaagattgtgaattctagagatagagccgttagcatccatctcctccctgtaactcttaggaaatgcatcaaggaccattatagaaaggatcccctgacctaaggatgaaatcgacctagggttaatcatgacagctgcatcagttgtattggatgcaagtcaactctggaggtgagtgcccgcaagcagttcccctgctttgaaagaagatggtcagcccgctgcctccccagcggccacagctcctttgagtgtggggggtcacagccaggatgtattcctgacaataaggatccttttattttcatttctgcataatgaaagagcctttcgatttattagaagtggtttttcctccctacatctttaaattcttggttctctttagtcctcatcccttgaatggacttgtcagctacctccccaggaggagttcaaagcttc

SEQ ID NO: 180336 - DNA, 1168 bp, Homo Sapiens
ttggtattttttctattgtgtccatttaatttaataattctgctcctaattaagctatgagcattaatataaaggagattaaatctaaaattcagctatactttccaggaaaacatttcaaaattgataaaaacaaaggcaaaattgtaattaattgccattaatttgagagcaagcgttttctgaggttttccacaaggtgtcagtatttcctcaagtttggcatttaaagtgcttaaagtaaaaatgtagctttacgcaatgagctgtgtaaaatatcacattgagttttatataacttggttttcagagttgtggttaaataaggataaatggctgggcatagcaatgtgttgtatttatagtctttttttatatttaatatcctatatgctgctaagagcagtcacccttaatatacagttaaagttgttcaacttttatgtctcagttacaaactgtctgtaaaaaaattctttttttgagaattattagtataaaactgccatatactttggacaaagataaatacttgcagattcttaaagtaaaacctttacagtaatttgttatggatttttaaaagactagaaacttaaaaatgtgttaaaaccaagatactgcaatttttccctttatttttattttaaagaaggtgagggaaatggtaaataatttcaaattttataggccgcaaaagataagtaccgtgaattggctgtggaagggatgcacagagaacttgtgttccggtttattgaagttcagacacttctcctcgctccattctgtccacatttgtgtgagcacatctggacactcctgggaaagcctgactcaattatgaatgcttcatggcctgtggcaggtcctgttaatgaagttttaatacactcctcacagtatcttatggaagtaacacatgaccttagactacgactcaagaactatatgatgccagctaaagggaagaagactgacaaacaacccctgcagaagccctcacattgcaccatctatgtggcaaagaactatccacctttggcaacataccaccctgtctgttctacgtaaacactttgaggcaataacggaaaactgcctgacacaaagtcattgctagtgaactaggcagtatgccagactgaagaaatacatgaagaaagtc

SEQ ID NO: 180337 - DNA, 1473 bp, Homo Sapiens
  misc_feature (445)..(687): n is a, c, g, or t
  misc_feature (715)..(818): n is a, c, g, or t
cagtgtcaccagcatcagccagagccaaacgcattccatctgctgaaaaatttgtcaatagcttgggtcaaagtgaggaagttgccctgtggattttgacatcttctcagagttcagggaggagatgtccatttgctctcacagctgtaggccatttgtcacttcacagataaatgtttaaagatagaaaataaaaaaacaaagatgatagttctggcttaaaattttgaggtaaaagctaatagactcataaaggcttgctaagataaaagtgcaaggatatacactatagtcctttttgtaatgggaagtgaaaacaaatcaaaggactggctacataaactaggatacaggtatacaatgacgtaactacttaggtggggctacacgtatggatataaaaagatcttaaaaatatatgtgaaggctgggcgcagtggctcannnnnnnnnnnnnnnnnnnnnnnnnnnnnnnnnnnnnnnnnnnnnnnnnnnnnnnnnnnnnnnnnnnnnnnnnnnnnnnnnnnnnnnnnnnnnnnnnnnnnnnnnnnnnnnnnnnnnnnnnnnnnnnnnnnnnnnnnnnnnnnnnnnnnnnnnnnnnnnnnnnnnnnnnnnnnnnnnnnnnnnnnnnnnnnnnnnnnnnnnnnnnnnnnnnnnnnnnnnnnnnnnnnnnnnnnnnnnnnnnnnaagcaagactccctctcaaaaaaatgtnnnnnnnnnnnnnnnnnnnnnnnnnnnnnnnnnnnnnnnnnnnnnnnnnnnnnnnnnnnnnnnnnnnnnnnnnnnnnnnnnnnnnnnnnnnnnnnnnnnnnnnngtgaaaacaagacagaacagtgtaaacaatgtggtatctttatatacattaacaaatagagatatcagatgctggtatataaaatcacaagaaaccaatagcatcatgatgaattttgggaaatagagtagtgtgcaggcaaggatgaaagttcacttttaactttttgcctttatgtattctttaaattttcaaactatgtacatgtcattcattcattctagcaatgagatcatatggggggttgagagcaagagttgtggagccaatctctctgggtttgcatacttgtactatcttcattagctgggtagctttggattatgatttcttcctctttattcctcagtacacttccctgcctacagacatggatattaaagaccttcctcgaaaagctatagtaaaaagagttattaaaagtgatttaaaaagtacctggcataagctcttgatgtcaatacttatttgtaatttttaaaaacctaacaaatgtgaaaaaaattggtgcaaaggaatgaagattcaacttattggtaaagaatacttctgagataccaatttgcctacaaatgcattgtaaacaatagagaaaaatactagggccaggcacggtggctccatatattcttagaaaatcaccaacttttttgta

SEQ ID NO: 180338 - DNA, 1379 bp, Homo Sapiens
ctttgtacaaaaaagttggagtgggtagtgtcgtgtatgtgtgtgtgtcagagggagacctggcaggcacctctttgagagtagctgtggtcagagctgtttggtcagtgcattatgttgaatgaggtccaggaacccagagccacccagcagacaccactgtggcttgccagctgccaagatggagaagcatgtgcccctgtagagcgtctccccagaaccagaccccgagccactcgcttcctctgtgctgtgacaacattggtgccaggggagatggtgtttttcaaagggacctactgtagccactttaatttacaattaagagccttagtttgacttaacacttttgtaggcttttcattgtgtatttttgtgtatgtgtgcatatagcagctactctgtagcagaggtgggtagagacacttaatagtatcatgtcgcatgcagatgtcacatcggcctctgcaaaaactgtactgtcttgtttctgcattagacttaagtagtcatgtgaatatactgctatgtcacttttaatattacgagttttatacttggaaaatggtacttgcttcttttaaatctctgtcttctctaacctcccccttcccatttcaatgctcccttcctaatttcagcaataatctcaaaaagcaattaaatagttaaatgaccctaattgtaattactgtggatggttgcattcatttgattacttgggcacacacgagatgacaaatggggcagtggccatgcttgaatgggctcctggtgagagattgccccctggtggtgaaacaatcgtgtgtgcccactgataccaagaccaatgaaagagacacagttaagcagcaatccatctcatttccaggcacttcaataggtcgctgattggtccttgcaccagcagtggtagtcgtacctatttcagagaggtctgaaattcaggttcttagtttgccagggacaggccctatcttatatttttttccatcttcatcatccacttctgcttacagtttgctgcttacaataacttaatgatggattgagttatctgggtggtctctagccatctgggcagtgtggttctgtctaaccaaagggcattggcctcaaaccctgcatttggtttaggggctaacagagctcctcagataatcttcacacacatgtaactgctggagatcttattctattatgaataagaaacgagaagtttttccaaagtgttagtcatgatctgaaggctgtcattcagataacccagcttttccttttggcttttagcccattcagactttgccagagtcaagccaaggattgcttttttgctacagttttctgccaaatggcctagttcctgagtacctgga

SEQ ID NO: 180339 - DNA, 767 bp, Homo Sapiens
gcaacctctgcctcgcaggctcaggcgattctcccccattagcctcccaagtggcatgcacctatagtcctagctactagggaggcttgggcaggagaattgcttgaactcaggagacagagtggtgaaaatgagcatctcttgttccagagcttagaggagaggctttcagtttttctgccattcagtaagatactatacttgtgggagtgtcttatatggcttttattgtgttgaggtatgtttcttctataccctgttttttgaagggttttcacaataaaatgttgaattttatcaaatgctttaccgcatcaattgacattattatataaattttgtccttcattctgttgatatgatgatcacattgatttgcatattttgaaccatccttccattcctggcataaattccacttagtcattatgaataattttcaatatgttgtggatttgttttgtttgtaaatttccttgaggatttttgcatcaatttttcatagggatattggcctgtagttttctcttttaatttgtctttggtttaagtatcaggcattgaaatattcctccctcctctattctttgggatagtttgagtaggattggtgttagttattctgtacgtgtttggtaaaatacagcagtgaagctattgcttccaggattttctttgttggtagtttttattaaggctttgatttcattatttgttattggtcggttcaggttttgaatttcttcatggtttaatcttggtaggtt

SEQ ID NO: 180340 - DNA, 523 bp, Homo Sapiens
aaatgaacacacatgctgctgagtccgcagggggggcagagcagaggacagcgtgcttttgtgtactgttggaagactggctcctcctgtacagcacctctgagcccttgtgcaccgccctgccacgggcaccatccagtcctggccgtgtgaccacccacagctgactgggcagcaggcacaggccctacccgaacaggccggagttggctcgcatgactccagctgaagctgcctgtgtacatttctccagataccctatggctaattttgttataactgcacagtggctgctgccattttgtattaaatatattgtgaaacaaacctatctggggaaaagcaatctacttgccgctgcttcctgtctggatccagcttgtgtccttggagagtggctggcccaggtcctattcctgtcctccagcccgttctttcatgagggacaggaaggtaaaatccgcccttaagagagaggtctcaacctccctttcccagatctccccagtgagttttaaaggaa

SEQ ID NO: 180341 - DNA, 1481 bp, Homo Sapiens
  misc_feature (72)..(81): n is a, c, g, or t
  misc_feature (906)..(924): n is a, c, g, or t
ctttgtacaaaaaagttggatcttatctcccaccttctctctaccctacctggtttgaaattgttcttgggnnnnnnnnnngtttgtagacaaaaaaagaaccagcagtttggtttctgcttttcgtcccccaagtttacctttcagaaaaattcatgtaatcaatcagaaattactttttctaaaataccccctgagggcatgacctagggatcctgcctgttctattattgtcacaatgtcagacaccaaaagaaatatttagagaaggaagccagtagtggggttgggagccagccagttaggcttcccaccttcctttgtagtgatcaagttatgcatcaaagctcctctgtgaagtagagctactgtggcttacttttccgggcaatcgtggggattactgttaatgtgtgtaaattaactagcctagtgtctgttgcccagcaaagtctcaacaacattagctgcttttgcttattaattacataaaagctatggtctgatgagctagaagctctgtagcactttccactcctttggtattaacttaccattttgttctattcaacaatccaatgtatgtaagaaggatttttcaacaaggttgtaacattcaacaagttcttaccagtttgaccttatggctggagcgtacttatttgtctaccagatataaaagttgaacatgaacactttgaagaatagagtgaatttacctatacggaaacgctctgtactgaatatggctttaaagaagttacattatgaattgagagaagtgattttcttaaaaggttctgtaggaatatatttccaggttctgtttataggaagttcgggatctgttcagggattttaatcagtgtgttaacaaagatgagtaagtgtgttttgtgggtttannnnnnnnnnnnnnnnnnnagctatatgatttgaaatatatacctctgaaattaagacttgtaacttcctcagaaagatggtgatagaacttccttttgttaaccatttgacttttgttattcatcttaatagatcaaaataatgaagctgatgtcccagaacattggcaacattaatgtgtattggcattttaagtgtgttctttctgcttattctcagtcgttgaagaaagttggaaaagattctactgtcttactaatctgcatcaccgtgtttctttcataccttcctgaagctggacagtattcaagtttttttctctatctcaggcaggtcataggttttggatctgttaaaattgcagcattcatagctatggtaggaattctgtctattgtggctcagacggcctttcttagcatcttgatgagatcattaggaaataagaatactgtcctccttggcttgggcttccagatgctccagttagcctggtacggttttggatcacaggcctggatgatgtgggcagcaagaccgtggctgccatgtccagcatcacgtttccggcaatc

SEQ ID NO: 180342 - DNA, 1627 bp, Homo Sapiens
  misc_feature (195)..(205): n is a, c, g, or t
  misc_feature (833)..(895): n is a, c, g, or t
ctttgtacaaaaaagttggcatggctagatttcaattacatacaaggtgtccttctctatctcctaatggctcaccttattgtattcaggaagaagtagacaattttagagggagaaaaattttttaatgcctaagagcccttttaaaagttttagtaaaaaactatattggaaaggatggtttattcattgcannnnnnnnnnnctatatcagaagttaggtatcttactcagattcattgttaaatattgtcccttgaagaccacacattctgtatgtcactcctggctacagtaactcagttggtttgcatccttagggaggtgctgtgtctgaagtgaatatgtgatgacccatccgtggaggactgtcactgccttggcatctgacagacaccgtcctgtcatttggggcatggattttcttttgactttttatacttattcatgtcaatatacatgtttctaaatgtcagcatataaaagttttggaacacattgtattaggctgaattatatactaccatttttgatttacagaaacattcatttcatacagttcaagctaactttttacttgctatgttagaaagcagagatatttaggaatttggcacttctgggtttttcagtgtaggtctctagggagataggctggaatacacctgtgaagatgaagtctgcctactggggactggtctgtattcctgacaccagggctgccagaggtgaagggcaagtttttgttgtgaaagcaccagtaaatgaccagagcagggaaatctcagttgacagaaaagtggacattgcctgaaatgggaagatattaaagnnnnnnnnnnnnnnnnnnnnnnnnnnnnnnnnnnnnnnnnnnnnnnnnnnnnnnnnnnnnnnntattttataatggataaagtcttcctaatctactttcattagcatgctttctcttttcctcagtcttgccgaattagtgtatcatggttatgagaaagtactgtgcagctccaaatcttgagatgcctttctgagaagactggcattattttctttgttctgatttaggagttgcccaggggatcataactggaataagaggactatgcaatggcctggggccagcactgtatggcttcatattctacatgttccatgtggaactgactgagttgggcccgaaattgaattctaacaacgttcccctgcaggtaatttggtcataagtctagttttgtaacaacaattatgtatgattatagcaaaatcttgtgaccttaaatttggagagcattctttcttgtatgttactatattttatttggcagcaataagtattgtgttcattgcttctcgggatcagggaggggtcattttagtgatttaatatcttatgtaaaagatatgtcttaactttgttcagattctgttttcacctacacaatcactacactattctctggataagcccaggctagttaaaatttgaaatgacctaaaaatccagctaaaaattgaggtagggtactttttgtactatttatttgaaatttcttcccttgttccctctaagccatatctatacaaagctggaattaatgttcatgtacaaaggtgcatgatctgaaccaa

SEQ ID NO: 180343 - DNA, 1387 bp, Homo Sapiens
  misc_feature (420)..(693): n is a, c, g, or t
  misc_feature (700)..(725): n is a, c, g, or t
  misc_feature (824)..(904): n is a, c, g, or t
  misc_feature (1015)..(1090): n is a, c, g, or t
ctttgtacaaaaaagttggagcagcgctgtcactgccctgtacttcctaagaatttttaagacaaagtccatccaagcttcacagtagaatgaacctttcaagacagtcatagacccagctcctcatagtgccaaaaagaaattgaggcccgaggagggaatataacaactggaactcaagaaaaccaacagggaacccagaaaaccaagcttatgacatgggtggggtccatgtttactgaacccaaggtggtaggtgctggatttctcagaagattctcaggttctttcccttctaggagagccagatcacatcaagccccaggaaagggtttctctgagttcaactttccaggcctcaatctccaacctgattcctctgccagaggcagtggaatatgaagcaatggaaagagcctnnnnnnnnnnnnnnnnnnnnnnnnnnnnnnnnnnnnnnnnnnnnnnnnnnnnnnnnnnnnnnnnnnnnnnnnnnnnnnnnnnnnnnnnnnnnnnnnnnnnnnnnnnnnnnnnnnnnnnnnnnnnnnnnnnnnnnnnnnnnnnnnnnnnnnnnnnnnnnnnnnnnnnnnnnnnnnnnnnnnnnnnnnnnnnnnnnnnnnnnnnnnnnnnnnnnnnnnnnnnnnnnnnnnnnnnnnnnnnnnnnnnnnnnnnnnnnnnnnnnnnnnnnnnnnnnnncattatnnnnnnnnnnnnnnnnnnnnnnnnnngaaaagaaaaaagaacaagcgtagcgttggagctaggaagacctgggtttgagtaccaactgtgccatttaccttgaacaagctacttcccactctgannnnnnnnnnnnnnnnnnnnnnnnnnnnnnnnnnnnnnnnnnnnnnnnnnnnnnnnnnnnnnnnnnnnnnnnnnnnnnnnnggaagttgccctgatcagagcatgcactgaatatagattttccatttccccttcccagcctgggttgtctcaacaatgctagtaccttgagtgctctggattccccttgtnnnnnnnnnnnnnnnnnnnnnnnnnnnnnnnnnnnnnnnnnnnnnnnnnnnnnnnnnnnnnnnnnnnnnnnnnnnngttagtgttatgcatcagctattattcctttgatgtccaaacatctagtaacagaataggaagagaaggttgctgctgccaagaagtttggggctggatgagaccatcaggagtcatggataatatcctggcctatgggagagctaaaaggagacacatgacaggccaggaatatgaacatctggtcacctgtttctgctgtgctctgctgatagcctgcagtgtgactctgggcaagccacagccctcttgagccttagttttctcaaatggcagaggaaactgaagaccagtgtt

SEQ ID NO: 180344 - DNA, 1767 bp, Homo Sapiens
ttggccagactcttcctacagtcggcttgggccactttaaaggacaaaagccagagctcagctttatccctctcccagtgctgggagccaaaaaactgttgacagttttttgtgcagctcaagaaaactttgaaaagaacatgctttaactgaagcattggactctgcagctttctgtgtaaggcccgtgtactcccactgggcagggtgaggaccaaaaatctgaaactcttatgaatctgacatattatatggaaattatatcttgtgaccgtcttcaagtgcatggacttaaaattcatgagagactaaatgtgagggagaggtggatttaaagaggccagaccttaaccaaagatgctgagatacagcattctgtcccccctgccctagaaactccataaatgctgtcacaaccctatcattgctgatgctttctgcatgtcagcagtccaggaggatgctttttgtctctctttgcctccactttacaaaagataatatgatagaggcaacgtttataacagtcacatttaattataatgtacatcaaaggcagaatttcagaatggtttcttaaatttccttgggaacggtttccacatatcagttatagacaaaggccatgggactatgctaaaccaataaaaccttattagcaaatctttagattctgacttagccagagcatctgagtgttcaagtacagttttacagtggctaaggttgtctcttgatcttttttctccgttgtgtgatcacagatgctatttctgttttattggtgattatacgagacttctaatacataaatgaacgggtattggtgcctctttattttaaaaaatttgaagaaaagagccacctcatattcatagggtgtgtattttttgagtgtgagcatttaattgaaaataagaaagctatgaagtaaatgttaacttctctgtagcagctaatgcatagagacactaaaacccacaccacattttgtgggaaatgaggatcctgatcctcttttgtcctctccaggtagtctcgcaggttatgcagcttaagttcagtcttctttatgctgcgattgatttccacctcagtggcttagcctttgggacagtggatactgcaacagccaagaactcttggttatccgcacaagctgctggtagactacattagccctctggttttccagctcaacctctgataaagtggactgagagccacgctgctcagtctgtttcgtcagccgactcaggttattttcagggaaggcatggaggcatagtttggttagtttcatcactaggatgtataaggtgacgacacaaaccaaatacctttctttcatcacttaactatacgtactttatctctggtaacactagaatgctgtggtcttgagggaatgttagcaaggaacacatagaagatttggtgtttcataagcctgtctaggtgtggcaggttttgtgtggtacactgatgtttaccataagcaggtacaagcttcatgaaccgttcttaatgaactataattgaatagataccaaaaatagaatgacaaatgtattttaatagcagatgaggcagttttaggatgaattttccactgttgattttacttcaagacatagcaagagaaacaaaattttgttttcagacatttccactgcagtttcaagctgtagtggggcatatgcttcatttacttccaagaggcaaaagcagctgggaattggcttacagcacatgctttgtttcatg

SEQ ID NO: 180345 - DNA, 1467 bp, Homo Sapiens
tgcaaaataatttaacaaattacaatttcactagtgactgcttcagaatctatctcagctaggtaatatattttcttcaacatatttcagataattttcttcttcaagcaatcttgaagaccattcaagtgaaaatatcagaaagtaaatttcaaaaagttagtttctgatcacatatgtgtgggagacaagtactggagaaaatcaacaattcataaattatctctgtgtttctattcataaagctattgatctgcgaaagtaaaatgcttcccccaagcatctgctgtctgaaattaaaaactgtgcaatttataagtatacttgaatttcataaggttacataatataccaggaagttaagctccattaaatactcccatgaggttaatacttctggcaaggacaaaattttaaacaaatacaattagctctaaaagcagaagtatatttaaaagcacacttactgattcattttgtgggctctaataacctacgtacacaaacattttatcaactgagataaaatgacataaaggatatgatagtgttctatctaaagcacgcaaagatttttaaatgtaattgttgtaaaattatttaggctggtctcacccaggaaaactgaaaatgatatatgccaattttataggaataaatacttggaaatggaggggggaatgatatgaatataccctcatgcaatatataatgagccaaaggaaaatttaaaatatttcattacctcctacttatcaggtggcagagcaaacactgctgcttcataacccagctaactatgtactcacatgttgatttgacttactaatgtaaattggtcatagacttgcatcaggtcctccattttgtactgttctagcaccacaaagttttccaagtttccgcttgtttttcgtgcacaatcttggcaatgtactatgtaggtctttcgtgaattactctcattagtgacaaaaagcagatcaaaaacctccacctgttttatacaagagaaaaacgtattcaatagagatagtggtatttactgtactgctttagtataatcatggaattctacttgaatgaaattgtggacagtgatctctggttaagagtaggtggtaagaaaaacatggctgtgtttgagaatctttaacagaccaggtttattttgcaccaaatccaaagacatgggtagtaatgcatatttaggggaataatcaaagggaatgacatactcatgacaaccactggcaaagcccagttcaaaagtttgataaaggtcaacctatttttaaatctaaaacattagtatacaatcagacataagtgatcatttttatgtattcatgagtacagcatgattttagaaataatacctctatcttatacagaaagattgatgagttgctagggttcaggtaggataaggaacaacacacctaactggaatctatctgatcccaa

SEQ ID NO: 180346 - DNA, 995 bp, Homo Sapiens
caaaaaagttggtggaattgcctatataaaaaagagaagttaattttttgtatttaaaatgcagtgtcatgcctataagcatttctcctatataggactgctttgctagtgtgccctcttgctgtgtcttacttcataaggagttgtatcttcccacctccatttcaatactgccggttaggacctaagtagaagagcagtaaaggctgattgacacacagggggatggagttggtccttgtccattctctcacccttgctgtgcatgtatcaatccttatcccagaaggtactatttagactgtatagactgatttagattacatactttagaggattaaggaaaccatagagtttgggccttggaactgttactgccttgtcctagagttgtcctgatcaggcttggggcctagttacagattagtcttaaagaattgcattaacttaaaaaaaatcaaaccttggcaagagctaaaataatttggagatatctttgcccttgacttgtagacgacatctaagaggatgaagaaaggagagtctaagtgagactctggcctacttcctaacaatgtcttggaagtgggatgatggtaaaggagaaaggccacagtccaatccctctgccttcagatagggaactcaaatcctgaaattactgttttctttctggccttttctcctggttagaggaggaagcggaaagtagttttgagtaatactttgttcatattaccccccttttgttttgtttctggcccctctaccaatagggcagtagcctcctgccctggatgggtataaggtgggcttggtccaacaggtgcccagagggtacatactcctttctggggagagaatgctccctaccatatagttgacagtggttaggaactctccctttccctacctaccttccttttaatagcaaattcctatttttcccttgattatgtgtattgatcacccctgcaatcctattatgtatctga

SEQ ID NO: 180347 - DNA, 1498 bp, Homo Sapiens
  misc_feature (335)..(362): n is a, c, g, or t
ttaaaaacaaagagggattttttggtgttgtttttcttcctcctcctaccccccttccacccactcagaagagggcagtgaggtgggggagagggttggggcagtagggggcttggagagggtctcacatttcaaaacagcaaaaaatccaacacttaaatgaggtaggtgtgggtgcggggtctccttgcccggcttgcgcagcttgccctcctaggcagctgggcgcctctttcccgtacatattgcatttgtcagagtggaaaacaaggaaacacaacccatagagagacagaaacacagaggaaaagagggaaacagagacagatcaagannnnnnnnnnnnnnnnnnnnnnnnnnnncaggacccggcaggcagggccaggtgtgggacccggcctttgggattgtcaagcttagtcaagtctctttgcagccgtgagttgggccggagaggtcagtgggagcagcagggctgtgaggcccggccacacatcctcttcccccaccctgctgcctcccagatgcttctgggtagttcccggcccatatccccctcaaacctgagatgcccaatggctgcttctgtctggcccctcctggagctgggggcagagatgccagcctgagggccggtggtggggaagaggattgtccctggtgcccagggtgggcttggcctagggccctctgccccagcctcctgctccaggggctccgggtcagccggcagccccaaccctgggtcctggctctggctgctacctctcttccccctcatccctttcagggaagaggttgtgggtagggggactcccctgcctggtagcctcaaagcttcttagttcatccatttccgacaattccaggctccacagtggcaggggatcttgtgctgatcgtcctcaaaatcaaactgatagtcataggttagctcctctcctttggggattcgccggctggagatgatgatgattttgtcctctttgtcaaatgtcacgacttcggccacacagttaggggcacaggaatggttaatgtacctggcagggccgccggtcaacgtagcatcaatcacatgttcattgtttattcggaacatgtagatgcctcgattaaagatattagtagattttctcccgccggttggccacctcgttccgaatgatggtgccaatgtactcgataaccattgtgtgcttttctaggtccttggctgcatagagccccaggccctggatacgggagcgagccaggtacacgttgttcttccattcggtgcgcagccgccggtactgagatgacttggagtgcacaaactgcttgctgtagggggtgttggtctcgcctgtgaaggtgctctgatatgccttagacatgctggtgctgttcagggtatggggccgtttgtagtgtgtgaggatggttaggctctgatccaacttttttgtacaaagttgttcttttatgttaaagcattgctcatcaatttgtgcaa

SEQ ID NO: 180348 - DNA, 1465 bp, Homo Sapiens
actttgtacaaaaaagttgggaaacccttagccatgtggaggttggctttgatctccctatatgttgttttgttgaagtctgtagacggttaaggacttggagccccaagaagcaatgtgatgccactcttcattagccggacggggctgaaatactggggaaaagcagatttggctggaagggccatgactagcacacattctgaggtctgggtacacaggagtggtcatcagtgaagaacaaacattccttcttgggaaaaaggccacagagatgctgaattgggggtggggaattgacaacctttcttttcttactgtcttctgtagccctgatggcagttacgtggcggcaggctctgctgagggctctctgtatatctggagtgtgctcacagggaaagtggaaaaggttctttcaaagcagcacaggtaagatgaaccctgtctcagccccccgttgcgttgtgagcaaggcctttgacttcatctcaggggtcatccggtttagacctcagtcggcgctgtgagggcactgtccgcccacctgctcggctggctgagctaggtcagtggagagaagctggggccactcacacagcacagcaggccacagtctacagagtacgccaggtagagcggttagagtggcagccgctggagaaagggttatagaaacacatccctgactctttggttatgtcccacgtcctctgtgtctccttccccttccctactctccttcctttctgcctccctgtctcccttggaagtccctgttgtcagtgcatttcagtgcattgacgtgtcctaaacactgatctccacacaccttcttttatcttccacctgataggcaggccccagacccccttttttcctagctttgttctgcccacacaagcccacctgctagttggaacccagataccattttccttcagaacctctctccctgtccttgggcagcagcaactgctcccagacctaaccagtgctgaccaccactgcccggctcttcagaggcatgtgtactgtctttccagctcactcagagctcctctcttagggagagtgtgataaggcctgactgccagaggggccaaactcccttcatcccagcatgacttaattaagtacaccactggattttttctgaggtcttttgcatgttagtgagctcctgccttgtcgcgggcacagtgccagagagtaaaatggaagttggaaaaattaggactccctgaatgcacaagcttctggtgtttggtttaccaagatctcatcccaaatgttctgaaacttggtgcttttctgatctctcctttgaagctcatccatcaatgcggtggcgtggtcgccctctggctcgcacgttgtcagtgtggacaaaggatgcaaaagctgtgctgtgggcacagtactgactgggctctcagggctgggaggaccccagtgccctcct

SEQ ID NO: 180349 - DNA, 1052 bp, Homo Sapiens
  misc_feature (125)..(193): n is a, c, g, or t
ctttgtacaaaaaagttgggttttggctgtttggtaccagccattggcgataatggccggccattatcagttcttcctgcggttcgggttttggcagtaacatatatattttaaacacacttatnnnnnnnnnnnnnnnnnnnnnnnnnnnnnnnnnnnnnnnnnnnnnnnnnnnnnnnnnnnnnnnnnnnnnggtgtgggtggatggggggagatgctaaaatattgctgctaggatccagaaataccacactgtttcatatattggaacttgttattggctagccttatgccagcctgccactgtcaatatattctgttccccttggttacaagcttaatatactcttgtgtttttggcgaaatgagctttttatcctattgtaatattttcaattgataatagatgtcattaaatctactgcttgtatagagacaggtgtacccaaatttactcttgacctttttataaagccaggtaatggagtctgttcctttgcatctcaggaaggaattgactttgctttatgtatcagacctcatcaattgcaccctctccatcatgccttattttcctaagttctccttaaagaaactcaacccacaaaacatttatggagagacatgttgctatctaatcctgttgcaaatatttcagatcttttgttttgccatacatctgggaaaatgtaaagcttctgaatctgtttcctcacttagatttattacaatatgaattacaactttttttaaaaaattaaggaccttgtaaacgcttctattgcttatttacctaatccaagctccttatccaaaatgctaaggacagttagtattttgctgttttcggccccatcttcagccttcttgtcccaagtttcttctcacctttttaccaccacctgactaggatgacttctcctttccctaccagtctttgttctttactatgaaaaatctggcttagaactcttcaaggaatattccttgattctctaactctgcctgactattctctcttaagcctttgttcttttagcacttatgtactc

SEQ ID NO: 180350 - DNA, 1532 bp, Homo Sapiens
  misc_feature (161)..(173): n is a, c, g, or t
  misc_feature (490)..(557): n is a, c, g, or t
  misc_feature (999)..(1009): n is a, c, g, or t
ttgggttttttaaaaggcacttcagttgtctgaaatatcttttctttagcttactttgtttacttttgtgcatttgtttttccgttattcctttatgaataaggaagtaagttggccaatataggtatctgatgtagagttcctctgataccatgcagggnnnnnnnnnnnnnctctctaataaacttttctccttaatggaaagctgctagtaaacactctctgtaattgggacttaaaaaccatcatctttagttttgggcagtatcattaggatataagctagacttatcaccaaatatcccagtaaaggaagtctttactgttggactcaaacacctatgccaggaatcctctctagacacattgaatttccttaaagtattgttttcagtttttagtctgacaaaatctttctagaaaacttctacccaaagagtgcatgatttctcaaaaaaggcttccttctagtatgtataagctctgaatnnnnnnnnnnnnnnnnnnnnnnnnnnnnnnnnnnnnnnnnnnnnnnnnnnnnnnnnnnnnnnnnnnnnggactgatttttaattcctgcccttttttggggctacagagtattgctttcttgggacccacatatcaggtaaatatttaaaatatttatcagatatcagacaaatatttaaaaggattattgttcaattttatttagcatttctaggtattttgaataggaaacttttttagtcagctgatctctcttagaagtcttttaaaataattcctcaaggaagatgttgatatttcacatttattgtttagggaaaagatagaatttccaggcttctaaagttaataaagtttcttatttatatcattattaaggaaacttattttttcattaatataagttattgtgtgtgacctaatttggaggtctttaattagaaaaaaattctagaacctgatagtaatgtagacactgaaaactagctgctttgatacatttttaaggnnnnnnnnnnngagcttaaatttttactaaaaacattgcttttatagttaaatatttcaaatccagtggaatagcctctaataaaatgctgattatattacaggtgcaaattgagcatgacccagaattagaaaaagaaagccctggcttgaaaaacagtccaattgatgaaagtgaggtgcaaacagcaactgatagtccctctgttaaacctaatgagcttgaagaagaaagtactcccagcattcaaacagaaactttggtacagcaggaagagccttgtgaggaagaagctgaaaaagcaacatgtgattctgactttgctgttgaaactttggagcttgaaactcaaggagaggaggtcaaagaagaaattcctcttgtagcatccgcttcagtcagtattgaacaattcactgaaaatgccgaggagtgtgctttaaatcagcagatgtttaacagtgacttggagaagaaaggggcagaaattattaaccctaaaacagcattgttaccatctgacagtgtgtttgc

SEQ ID NO: 180351 - DNA, 771 bp, Homo Sapiens
  misc_feature (112)..(137): n is a, c, g, or t
gcttgttgtaggcttctgttggacagtgctgaattgccacagctaacaccaagatgatagttgtttattatccattctcactgtcagaaaacaagatgcttggggctctggnnnnnnnnnnnnnnnnnnnnnnnnnnaaacagaagttttgctgccaattagcaattagagaattttcttaggtcagaaaacttacaatttgcagtaatcaaaagaagttagtaaattctatttgtgactctgcttatggaaattctaatttaaaaacacagtaagaaatacaggctagatttattgattctatgatgttcagttaaggtagtaaacctagaagtattcgcctaaagagaaaaacattcttgagtttgcagattgccatcttggtaatatagaaggcatgccatatgcacctgatgacactttattgtatctgtttctatctaaaaagccttgcacatttgcagttgtaacctaattcagttctcatgggttcttcacagtagtttaaagtcaaacagtgtgcacatagatacactacataataaaaaattgtacaaaacaggagaaagtagcttcatagtaaatataaaccaaaactgaaaagaagtttcttgcttgtatctttttgctattcttaattctgtgattgtaaagattttgtctttttgtatattttttatgcgggagtccaacctataccttctcaggaggcaaactagaatagctggcactgtggttggccattgggctgggagcagcgggccgtggggg

SEQ ID NO: 180352 - DNA, 1601 bp, Homo Sapiens
  misc_feature (691)..(700): n is a, c, g, or t
ttggtgacgccagtaagaacgaggaggatgaagggtcatggatcaaaaagaacataaattgaatgggaaggtgattgatcctaaaagggccaaagccatgaaaacaaaagagccggttaaaaaaatttttgttggtggcctttctccagatacacctgaagagaaaataagggagtactttggtggttttggtgaggtggaatccatagagctccccatggacaacaagaccaataagaggcgtgggttctgctttattacctttaaggaagaagaaccagtgaagaagataatggaaaagaaataccacaatgttggtcttagtaaatgtgaaataaaagtagccatgtcgaaggaacaatatcagcaacagcaacagtggggatctagaggaggatttgcaggaagagctcgtggaagaggtggtggccccagtcaaaactggaaccagggatatagtaactattggaatcaaggctatggcaactatggatataacagccaaggttacggtggttatggaggatatgactacactggttacaacaactactatggatatggtgattatagcaaccagcagagtggttatgggaaggtatccaggcgaggtggtcatcaaaatagctacaaaccatactaaattattccatttgcaacttatccccaacaggtatgttctaaaaatagnnnnnnnnnngtcatttacaatagtagtttttataatctatattgttcataaaataatgcttaatttaagagtttcacagcacccagaagtgcttaccatattataacatagtgactttcaaagatatgtaacacaggtgctcttaagcttttgcctttttgtcctattattaacaagtcagtaaagttaacaggtaaagtactgctaatgggtacaaattaaggaattgcagcaaaaaaagtattgcctactaactctgacattataccttgtttgtacccgccagcgggaacttcattgcaggccctgtgtcgcgctgacttcacgattctcacaggcccgctcaatgcggacagggtacgagatgctcacgctctcgaatgctgccgtttggtatggtctcttccaacatcctgtatcagcattataaaataaaatggatacttcaagctttgccttcacttatttctttgctttttaaaaactatttgtaatgtaattttaatgcattttttacaggcccagtaatggttaaatacgtcagcttactgaataattttaactatttattcttctaaggatacagcttgtctctggattttccagtcttaattttatattttattaatctattttaatgcttgcttttcccatttatagacgttgtagcagtaattgcaagaagttcttgagctgaattcctgttgtgacaacttcctataattacagtagataactttttcttttagtcgtatataactttttctataacttgtgatggacaagagatatgcttatccaataaaataaagcttaaatattagatgctcttggggtcaaaatgtccttttaccaattgaccctttttatgagttccttggggtaaatactttaaaggctttttatattt

SEQ ID NO: 180353 - DNA, 999 bp, Homo Sapiens
ttggtggggagttaatttttgctccagggcagctgccaagcccagcaccggcatcaatagaaggttttctctgattttcttctcttcctctcaggctaggctttcttaccaatccccaattttcttctgtagggcgccaggagactggccagagatctttagactcttacttagtttgaacatctcttgctgctcacacccaggcttcttcagcagaaagcatgacccatagtaggtactcagaaactggttgaatgaaaagccttgacatttaagggctttattctgtcatacggtagcaagaactggcctattggcatcgtattcctggcattgagctgtattgaccctgaatgtgtcctcctgaggtttttgagggtgacctgggagaaagggtctgaaaaagcactgggatccaagtgactttaaatctgcccgtggcatttcctgctgagaggcgagaaactagcatctctcccaacaggctcacatccgccaggaaggacagagcccaaaacgggggtagactttgtgggaaattcgccagttagtccgctgagattttaatctgcctcaagcacaggatgctgacaagaaaggtagaccactcccccgatcccagacaaaccccaggggtgacaacttctccatcagtatcctgagaagcaacatcaaatgcttaccaagtcagcacgtttactgagtgagtactctgacggaataaaccagcatttggagctgaacttgagaacacagggccctctgacagcagcttagggaaacacccatcccttccagattggcagaatccttccatttcatgtccttcggagacgctgtattctctttacaaatcattcatgaaactgaagctcagtctcccaggggtaagtcctgggccacgtgcaaacaatggcaaatccagctcttccatgatagagaaggcaaacacacccaccttcatcctgagcctaaaaggccacctctgagcacttgggc

SEQ ID NO: 180354 - DNA, 531 bp, Homo Sapiens
actttgtacaaaaaagttggatttgtatgcctgcatttttaaaaattctgtgcatgtactttatggagtacattctatttttgttttcagataccctacaaccaattttttttagtaatcttttagaattgaaattatcataaatgatcgagaataatcatcacatagtttaagattgtatatgttgagtagtttaaaacaatctttgcattttacagtaagaatcaaagtcccttcagtgtgcctttgtcagctaatatgtgaccagcaatgacaaccttgggagtatttattaaatattatgctatgaatataggcaacacagaacagggtttgcagtatagcgtcttgatgctaaattctcatatacctctacacgagaaatatggaggagaaaaacaagcatttacatatattcttcgtcactttgaagatgcatgacctgaactcgactgcttgtgtttgtttacatatcaggcatacccaggcatctcctgcagccagaggttccattgctgtctttgctcagtc

SEQ ID NO: 180355 - DNA, 1186 bp, Homo Sapiens
ttggcttggaatatattgcttcagaaaactgaatgtgtatgtcggtcatattgcctttataaccatgctaatatctatgctttatacatactcaaacttgccttgccttaaaaaaatacatactacatacttaaatcaggaattctagccatctcacagaataccaactaaaactaagtgcattgagatctgagattggtaaacccagattcatttaccacagctgtaattaagtttttagaaactattctctttttggggaaatccattgaagttaatttctgttatcttattagaagaaaatgatgttgatatgtgtttcagattttccatttgaaatcttataattaatttgatttatttactgtaagtaggaggtataaatgacactcttaaattggaaggaggggtgttttagtgtctgttttaggtcaaaattagtgattctatttttatcaaaagttttatcctgaagtttcaggaccactcttccttaataaacttgttaatggaaagcgagctttatgaacatttaaaaatgttgctgctgctttgttacttaaaaagaaagttgccaagagagacttcttagggaaaatatttgggttttttttccaaaaattgctgaaatattgttttgccatttttaaaaagtctcaggttattaccactctgccattaaatatttgtatgcctgcatttttaaaaattctgtgcatgtactttatggagtacattctatttttgttttcagataccctacaaccaattttttttagtaatcttttagaattgaaattatcataaatgatcgagaataatcatcacatagtttaagattgtatatgttgagtagtttaaaacaatctttgcattttacagtaagaatcaaagtcccttcagtgtgcctttgtcagctaatatgtgaccagcaatgacaaccttgggagtatttattaaatattatgctatgaatataggcaacacagaacagggtttgcagtatagcgtcttgatgctaaattctcatatacctctacacgagaaatatggaggagaaaaacaagcatttacatatattcttcgtcactttgaagatgcatggcctgaactcgactgcttgtgtttgtttacatatcagcatacccaggcatctcctgcagccagaggttcattgctgtctttg

SEQ ID NO: 180356 - DNA, 1465 bp, Homo Sapiens
  misc_feature (442)..(451): n is a, c, g, or t
ttggtgatgctcagggccgtctccactcagggcttaggggagtctgtgagtagaagagctttaggtgatttgtttggtgggggaaggcaagtacacagctatgcactttccgtttctgacttttgccaccctgtcagccatggggagcccactgtgggactgaaaccctgagctgaatgcggcctcatgtctcagagaaacactggcaagttggtcagagccgccgtctgcatcgaggcgtagctgagcggcaggatggggggctgcctgcccagggtctctcaccgtggtgtaagcagagccatggcttgcctaggaccctatagataccatcactctttctcagctcgactggagtttctgcacctttgcaggggcaaagtaactccctgcaccctgaaccaccccccattcctgttcatttcagcagataatgatggannnnnnnnnntgtccatcgtgctgagggtgtgaccgcaagagggtgaaaacttccagccaactttctcagtcctttctcttgcgagagggaagccacctgctatacaaactaataccccctgccttgaccccttccccacgactcagttgacagaaggatatactttgttataacttattattttgttctctgtaaatacaagatgtttataggaaatatgtattctgaactctatctgcagaatgagtcactacaccaaaatagttctattatttagaatgtgttaattttaaagggacctgataggtatttatttacatatgcgatccacatttgtgtgaaagcatgtgatcatactaacccagcctcctggaatgtcgctgtacgatgattgatgtctttttctcagtccatagttacaattgtttagtatgctaatcagtccagttccctgaggtttaagatcaaatataaattactctgcttttcgactcattcaggtagcattgtacctgaacctgattgctactttttcatcttaaatattatatttcctcatctaatctgccttcccctcatccacagacatttggagaaggaaatgggagggtgtctgttatccctttctctttgctttgtccccgttgttagactggcagcgtcagttgctcggtgggcttggttagagccgtgggtgaggcaggtggctggcggggacagggagaggctgagagggaagtggtggcatttactgctctgacacttccactgtccctgctggggatgctggggccaaggcctgtggggcctgtgaactgcacagccaggagcaaggaacccactaaatactccgtcacctccatgtcctctctacagtgttaaattattacataagcacgtgaaaggtagaacgcgaattatgtgagtaaatatggtctgttttctcttcagcaaaaatgactatttttgtgtgtgactaatttatttttattattgtaaagatacaataaacgggttgaatat

SEQ ID NO: 180357 - DNA, 1577 bp, Homo Sapiens
  misc_feature (1135)..(1144): n is a, c, g, or t
tattttggtcactgaatttggatacatgagcatcattaaatgatggctccacagtcatcttggggtgatgaattcatctgggaaagtgtctgcttctagggcgtctggaggctcaggaaaatcagatgactgaatatcactatcgactgtcagttctgcttgggatatggaagaagtgatgtcctctgtggcaacagtctgaatgatgactcttggtgtgtgacactgcactgtaacattatcacttgtgttcaacaaatgttctggctataaaacattaaagaacctgttaaagttgtaaatcaaatgacatttatgggggtacctcactgtctccccccacatctcttacctctcaaactgtaaatacttttatcactatttttctagaacccttgtcctttacttgctagggcctttgttcttctaatgtccctattctaatgtatagccatcttacataaagagaagggatgaaacatacactccagtgaaggcagagtgatggtgtataacactgtgcctggaacagcagcagtaggaagaactgtttagataactaccttctattttggtccttatcaactaatcctggtctataacaggtactcaaaaatcaagtaatttatgtaacatacggataaagcatgaacaataatctgttcaggagaagcaggagcagcagctgtcagggttactgtgggactagcagtcagagttaggggaaggccttggcttgagcttgtttgaagtaggtaggtgcctggagtgccagtgggctgtagatggaaagactaaaggaaaaaggaaagatagtttaacaatgattaagtctacttttatatacaaaaacggactgagtttagtttactagacacaaatgtacttacccattgtgaaggtgcgaacaagtaatacaatgtagggcataatcgtctcaagtcattacctagcctgaaggtttaagaggctgctctttgctcctgtgtatttctatggtctggtctcagctatttgtttcagggcaccaagacagttgtatgagccactgtttccagtgcagtaacccacaacacccaatcacccctctttttctttctttgtagcacgtaaaaactggcaggcccccagtttnnnnnnnnnnggcacaatagcagtgtttacttgaacactttttcacggtataattttgggaaattttttgtagaaagggacagggtacagaaatagtaattagcaatgttctgctgaaggagaaagatgtttatctgaaaaagctggttaactattaaataacacattttcttttgaatttttaaaggaagtataataaaattgaccaataaacttttcacgaccataagcttctatataaaaaatttgatttaggtttatcttaatattctaaaaaagtatttgcactctaaaataggtctgggagttaaaatcatgtaggctgtttttcagtcttgtgtacttagctgaaacaactctcctgggtactaaatccccaaatataggtttccttattgctaaagtggagacagtaactacttctcatggaaagtgtttgccaa

SEQ ID NO: 180358 - DNA, 1605 bp, Homo Sapiens
  misc_feature (304)..(313): n is a, c, g, or t
ttggatcctatatatatttctaaaactgtttgtagttttcttgagaaaaagcactttataatttactcagttttcagtaataaaattaacactgacttgaatgtatttaaaaaaattctccacagttttgtcttcctcagattgtttttatccttattctctgaaattcctgttttattgtctaagacttaagagattcagctttatcaagttagagtacagtgtaattcaaattctccctcccttgggcatagttactgaagttcaaatttccttaagtattttttaaaaacctgattttagnnnnnnnnnncctgcagaatcttaacttttccattattctggatgacaaataaacatttattaaaatgtgttagaattagtatttactaggttcctaaattgtcagtataggtactttgatcacacatcaaaatggaatttctgcaacttaaagcattttgttacaaattgtagttgaaatagaattttatctatttgtctggatgaataggttgttgggaatgaaccagttatctgttcttttcttccaaatgcaaatggtgcagctagttgataatagtatattctcatcctactataaagtgcaaatttcaccttaattttgcatattttaaaatttttgtttaccctttgtagcatatttacattttagcatttgctaacattgatttaatgtgttaaagattaattttggatatagggttgacttgttggagatactagttcataattttaaaattcccaagagaagtgtctttgaagtggtaaacacagtgcactttaagccacttctcttcccacagagtccagctgaaggaggtaagggcatgctgcatgagagtaatgccgtgatgagtgtcttactctggtaaaatgccatttacaatgcctggagactgaacactgaacaaaacatagtgcccttagaatttcactggaaaaacatgtgaatcacataagttagttggcaaaaggaactgatgtgtatgtggtggggttgctttgaataaagtatttcctaacctattctggggagaacgctcaactgatcttagagaagtgtgaaatcagtttcatagacttagggaaaaatctgaagtgcttgcactgtgagggcagaggcctgcctcattagtctagctgtatgaacatgtcagtccacagaagcagtttttacctgtactcatctgcccttcagtcagctttgtgacagaagggcaaacatcttcacagaagaaaaagttcagaaggttggcattggtagtttcattgctacagaataatagtgttacttgatagtatctgactaaaagagctctcattttctagtacttagtagtaaaaagaatgtggtggagtcctctagatgtctagtgtgggtggaggatatcaactggttatttcagtgatctacagccttaccttttgaatgctaagtgtctggaaacttcagcagggtcctacaaaacaaactgccatcaagattggtgtgtaccatgaaggcagttttagatagtttgactgttcatggctgcaagaaagacctaaaattcaagggcccgtgaacttcagatacgtaaa

SEQ ID NO: 180359 - DNA, 1210 bp, Homo Sapiens
ttgggaaacacacacaggaaatgttgttaagacagcaactatatctaaaatgattctgttctcaaattgtatgtttacagataatcaaagtagtaggaagaggggaacttaaacatcatagtgatagatggttcttttaaacatgaaagcataaactgacctaattgattgttcctcttaaataatttttggaataaattagaaagctaacgtacatactctatataagaactatggctcatagaaatagtcatactcaatagtagtttgaaacctttggagttttttgaaaagagtgagtaagatccttagaaactaactttttggaagatcaggttattgattgatttgagatctttacatttttttctttgaatgctaaagcaatcaggtacctaagtaagaaaacattcaataatactttttctgggtagacattttttaatgatagtgataggctttaaattttagaactatttagaactatttaagatacttttttaaatctaaagatttttaaagctgtaaaaagcatgatgaaatcttagatcactgctgtatctaagtttaagtggtatagttatccttctaataagtctgcttttctgctaatttcaaaacactttttttcactgaccattaatcgacagttcttaatgatcacaagtgtcacttactcacagctgtcttagcaattctttttagtggaactacagctactaattccttgaactcagttgacacacatgagttatactttcttgttcatttttcctttcactatgttaggcaccccctgtaatggcctatcctgctactacaccaacaggcatgataggatatggaattcctccacaaatgggaagtgttcctgtaatgacgcaaccaaccttaatatacagccagcctgtcatgagacctccaaacccctttggccctgtatcaggagcacagatacagtttatgtaacttgatggaagaaaatggaattactccaaaaagacaagtgctcaagcagcaaaatccttacttccagcaaaatccaaactgctgtctcttaaatctcttaaactctcttcttccattagaatgctacaagtaactcagtgaacgcccatgaaggaaattgggactagtttataggagaacgtatcaatacagtttataaagccaagaattgctatgatttaagactaagatctgtcttttt

SEQ ID NO: 180360 - DNA, 902 bp, Homo Sapiens
  misc_feature (58)..(99): n is a, c, g, or t
ttgggtagagatggcttttcaccatcttggccatggtggtcttgaactgctgaccttnnnnnnnnnnnnnnnnnnnnnnnnnnnnnnnnnnnnnnnnnngtgtgagctaccacacccagccttgtgacagtgattcttatctcatagtgcaaaagatggcatttggatgggagataatagttcagaaaagttccattctacagcaactcacaatttgaggaccatagttctaagaaatatccacaaagtcagttgaactatgatttttagctacttggcatataaagttttgctggtaagtaatgacttaaatccataacttttcaaaaacataagccttacttcaaaagcattatttgtacattgtagaaaattagaaaatacagataatcatctgcggtaactttcccaaaaaagagaaaatacagataaaatattaaatgaaaatattcttaccacctacaggcgaccaattttaatatctccataagtcttccccagctctatcttttgacttaaataggatcatatttaactattgtcttgtaacttgccattttcatttaataacctccatccttccgtgtcaaaataatttttcacctcttctcttacttagtctatattcagatgtaaattgttcatctcttatatttcccataagtgaaagttagtcctagacttgaagcctttattagctgtaagttcagcaaaatgcctttcagagccagtttgtcaaagccagcatccagtctggagaatgcacctggcatatggttgtgtcctttaattccctttcaatctagtggagttctttttttcatgatactgactgaagagattgcacagttttggttttaagtacagagacgtagtacatttcttaataataaatgtttaac

SEQ ID NO: 180361 - DNA, 2061 bp, Homo Sapiens
ttggccacactgtcagccccttctccaagatcagtacgtgggcctgactcctcctcggtgcccagctcagtattggcaactaggagagtagtgagattgaacttggccttgaggaacagctgcctctagagttggatcagacaagggtgctgagagccgggactcacaaccaaaggagaaatgagcaatccgcggtctttggaagaggagaaatatgatatgtcaggtgcccgcctggccctaatactgtgtgtcaccaaagcccgggaaggttccgaagaagacctggatgctctggaacacatgtttcggcagctgagattcgaaagcaccatgaaaagagaccccactgccgagcaattccaggaagagctggaaaaattccagcaggccatcgattcccgggaagatcccgtcagttgtgccttcgtggtactcatggctcacgggagggaaggcttcctcaagggagaagatggggagatggtcaagctggagaatctcttcgaggccctgaacaacaagaactgccaggccctgcgagctaagcccaaggtgtacatcatacaggcctgtcgaggagaacaaagggaccccggtgaaacagtaggtggagatgagattgtgatggtcatcaaagacagcccacaaaccatcccaacatacacagatgccttgcacgtttattccacggtagagggatacatcgcctaccgacatgatcagaaaggctcatgctttatccagaccctggtggatgtgttcacgaagaggaaaggacatatcttggaacttctgacagaggtgacccggcggatggcagaagcagagctggttcaagaaggaaaagcaaggaaaacgaaccctgaaatccaaagcaccctccggaaacggctgtatctgcagtagaagtagaaagaccaggaggagctttccttccagcattctttctgtctcacagaaatttagaggcagctcttacctctccccaagatcttctgttcccaaggccaaatggcacccagtttcttttccatcacacccttcatgcaggtcctcctgtccttattagagcaagccagccaaaacttagcacgaggcatggtggcaacattaacatcacctccctcaggctgtactttctatctttattaacgcaaccgaagagacctaagagtgcattcacttatcccactttctgttcctgtggtcttctttctcccatgaagcagaaactggataaagctcaagattttccatagacaaaccaaagcccactcatcccctcctaccccaatccaacctctgctggctcctgcatctcacttggaggtaaaacctcctcctgaggccaatgcattcccaacttccagttctttcctttaccctggagagttagtaaggtaagaaccattctttctctccaaaaccactcctccttggctggcaagttggtgtcctaactccgttctcttcctagctcatggcctctctagataataaagttgtctcctcctttctggatctcttcctcctaacacccctcccctgaaaccctggactctgccctctctccaagaaaatccatctattcaactattcttgcattcaattactctaaatgagagcgtgttggagctatggcaaattccctgttgtcaccttgctattttgcagacaacataatatttaacctctcataaccagagaggttaaataatttgtcaaatgcaatacagtaagacagaggcaaggacaaggtttgacttccagcccagcctcttttccacaacctgctaaatcttgatccatctgaaaacttttctaattagtgaagatgactaataaaaattttccctatctccaaggtagagctttctggaagtttctagaaattttcaataaccaccagccaaggttacctccaggtaaccttgcagcaccaggctggaagtcagatcggcttcactatcttccaactctacagcctgtatctctccatccccagctttgacctttcctgctcaagtaacctacaggcacatccagcgtcactaaaaa

SEQ ID NO: 180362 - DNA, 2887 bp, Homo Sapiens
  misc_feature (2144)..(2157): n is a, c, g, or t
  misc_feature (2752)..(2773): n is a, c, g, or t
ttggaccggatgaagacagtggagcggaacttggtgcgggttgccgaggtctggctggatgagtataaggagctgttctatggccatggagaccacctcatcgaccaagggctagatgttggcaacctcacccagcaaagggagctgcgaaagaaactgaagtgcaaaagtttcaaatggtacttggagaatgtctttcctgacttaagggctcccattgtgagagctagtggtgtgcttattaatgtggctttgggtaaatgcatttccattgaaaacactacagtcattctggaagactgcgatgggagcaaagagcttcaacaatttaattacacctggttaagacttattaaatgtggagaatggtgtatagcccccatccctgataaaggagccgtaaggctgcacccttgtgataacagaaacaaagggctaaaatggctgcataaatcaacatcagtctttcacccagaactggtgaatcacattgtttttgaaaacaatcagcaattattatgcttggaaggaaatttttctcaaaagatcctgaaagtagctgcctgtgacccagtgaagccatatcaaaagttgaaatttgaaaaatattatgaagcctgaagtgtaactgatgtttttatatagtaaacccattaaatactgtgaaaataacactgaacttggaaactatatttctcagcggtagtttaaattttcaattttaataacatttgaatggaagattttttataaatcacaatatttggaataccaaaagatgactcaggaaaacagtccaacattggactgaagtccttcttcggaactgggtggcctttgaattgcctgctttccaccctatgctagacctcatcatgcaaatttccctgtgaaagctaacaggtaactggaaatgaagacagaaggacttgagaaagcatgaggatattcccaatgactatgtttggtaataatcagctcttctggcccacaagtaggaatgatcaatgagaacttaacttagtcctttatttggggattttttcatcaaacaaaaatttcttgagttcttatggctagaagacctcagatgcccacagctgtcacgtttgtgaaatccctccagactacatgcatgcttacctaacagtttgaaatagtattgatctactgctggtaaccctgcttgatggcagcattttgatctaaattacataatggtttttcccaatctgaatcagtggaaaaaatttaagtgaggaagaagaggccttcaaatgcttatttaattctaggtatgaacactatttcagttcattttgtgcttttaaaactacagttttaaagatttatgataccaataacttcctagattcatgtggattttttttaaggcaatgaaaaaaggctggattataacacactgtagtaatcaaaaatgcatttaagcattgaatgcactctagtgcagggccaagtaagaggagttgaaatgagtaaagcagaaatagagctgctgaaagtttcttttatataaaaataataaaatactactttagatatagtagcattcacagggatgaaatatgcgaaaaatgggttctaaaatatttcaaagggaaaatgaagtgaaggaaacatcatgaaaggggaaaggaatgaggtaaacaagtcttaggaagagagttaagaaaaaattccgctggacttggccaaagaaagaaggggatctagtatctctatgaaggaaaaaagagtaaagccctcagtgtgaacccagtgagaacactgacaaatttgggaaaagttaaatactgatttcatccaaataaagcctctaatcttaagcataccaatactttggcataccagaagacaccttagaaatcaggatagcctttgcattcattttggtaagaaaactgatgctgagaggataaattacctaaaaatcttaaaacccaggcaagttagtcaaagaatcaagattagaattcaggtttccagagacagggctcattctaatgcctcaggtcactggcccgaacaaatctgcttcacagaattccttagaaagagatacacaattctttgctgggattgggtccctggaggacaaccatactatattcttgttaatatgnnnnnnnnnnnnnnaaatttaaacttttgttcagttgagatgattgtgaaactaggtatctttcattctgactcctagtttaacatttaattttgactcccaatgagttacgtaaaagcaaaactataactaagaatgggaaaaagaactatttctgcacatttgtaacatatttaagatgttttcttcatataattgaaaactgcagatgagtaagagaatgactaggaaatgagatacagttatatgacacataatgatgttttagtcaacaatgaaccacatatttgacattggtcccaaaagattatattaataatatggtatctttagtgtgcttttctatgtttagacacacaaatactcaccatgatgttacaatagcctacagtgttcaatacagtaacatgcacaagtttagtaacctaggagcaacagggattccatatagcctaagtgtgtagtaggctacctacaccatctaggtttgtgtaagtacactctgatattcacacaatgatgaaattgccctattgacacatttctcagatgtatttgtggttattaaatgatgcatgactctaattcttttcaaaacagagccatatnnnnnnnnnnnnnnnnnnnnnnacgcaagtcagttgtcaaaagactaattgagttactgacaaactgaacatgccaagttgctccatgtaatttctcatggtaacttaaaaatgttgaaaggtttttttcccccgg

SEQ ID NO: 180363 - DNA, 1438 bp, Homo Sapiens
  misc_feature (347)..(362): n is a, c, g, or t
ttgggccttgataaattcctctgtgcttctgagcagcatccttctgcctctgcttagcagctctgcatttggtggattgctgttgtgagtcattcatccagcactgggccttttaagctgaagattcacccagtgtctaaagttgtccttttcttatagctagctttcaagcatctttcctcctaaataaatatgtgacttgagaaaaaggtaataatgattttgtcagaattctttgaatttatatttactagctacttaaccataaactgctgtccagattgttaatttcatttatatttattttaattaatttgtcatgaatatggacaaagccttttctgggnnnnnnnnnnnnnnnnatgtttgttttttaagtcgtcattattcattcgtattctttttctgtgtaatgtaatcatataaagttactttggacagagacccagttaattttctcttttgataggatacatggtttagataaggtataaagtgtccctttttattctagaggcttttcctttaattcagagattagtggagataataacgtcagtcaaggctaatgtggtacatggaacttgctaatggaggttggacattctgtttcagtcttacatggatattgtttcattggtgttgaggaagaaaaaaattagatactaccatgcattgggacagcataattctaatattacattgaatatggctttttaaaaataagtattaaaaagccaatcgttttctccatttatctatcttttttgtttgtttttaatttggttgattgatatgcacccaggccgtcttatttttacttgttaaatgtctgtctaggaagaactgtgattggaaaggaattaattattatacaaataaatctggtaggatatgagtggagtaagtttgcttgaaacagaagtatattttctactttgaatcacctcaccagagtcatctgtcaagaattatgtataacaatttatctttattgcctacatacaacatactttttctgaattaagataacttctatttgtgagttgaacttcattatctgccactttgtggaatcaaccttacattctttggtggaactagagctgattgtcaccacaaggttatatgacaactctgttctaagacttatacctattatatagggttatacctttttttcttatgcctcagctctgtacctgacaatttatgattcagtggagccaagctagaaggaacaaaggtcatctaacactgtgatggggatgaattcctgagttttacctgcacaatgaggtggtgccccggaattcacaacagagtagtgatagagcataagatggctgctccagatgactcttgggtttagtgtacttgtgattgaacaagattttttatctatgaagcttgattctacaaccaaaataatagaaat

SEQ ID NO: 180364 - DNA, 1029 bp, Homo Sapiens
  misc_feature (900)..(909): n is a, c, g, or t
ttggcgcactttaataatctggactgctccagatttgactttagatactccatggtatctagtctttatgatcagttgaatgatcagtgtttaagtctaaaaataatgctttcctgaaaatgtttatatttcattgctgtttccttattgcctgctagccaaatggaatttgggcaagcaactctttgaagacttttttaccctagaaatttacttttgtcctaaaaaccctaactgtaaataagcagtcgaagcaagttgccaccttgaagttgagggatacactttgcttcatcagtattaaaaaccatggtactcttattttgtcttttttaattcaaaacattttctaaatgtggtactttgaaccttggagtatttacatgtttctgttcaaaactgtgacttattaatgtaagtctgctagtagtactttttttgtctgagcataagctatatttcaagatatactttgccaattttgttattggtgggtaatcatttttaaattatattgttattaggtaattatttttaaagactactggcatacaatcaaagttgttccataaaagaatataactgagcaatgtatttctctaaatgacttgtaaaaatcaatgaattatgtttaagtctgcattatggtaggttattactcccagctcattttaaagacaagtttgaaagagtcctttaaattttataagcttgtagattccataaactacactgatttatacatttgaaagaatttagccatttaataaatttcttattctcaaattgcatttagattaaaattccttttaagagtgtctgaaatgtctgcctgcgaagaacatgtaaacattgccagataccagtcattattctttagtggctttttagtcctctgcnnnnnnnnnnaggcaaaagaaatatgcatctagcatttctaataccaaatccccaattgtgattgttttaaagatcatggtatgatcacagggaccaacgctgtgtgcatatatactctggatttgaaag

SEQ ID NO: 180365 - DNA, 1368 bp, Homo Sapiens
ttggcaccatttattttgttgctccagttcttccagctgtggccaatccttcagttggattcttgtgccccatcaacattctccatcctggctttttgttttgagcacttccttccttcctagcaccaccaggctcttgtattatccctgtccctgccctggaatcgactcctcctccagagagccctggtttcttttgttagaggatggtatatagaatccaacatgcagacacttggtggacttattgttactggggttttgttatactagggtttcagtggtcagtgctagtatttatgtatgttaacccacgctgtgctttggattcaggctatttcaaattttagataatatggtacatatattattaataccactagttactacattggtacttttcagcaaaatatatctaagtgggatcaaatgagactgtaaatagctttacatcagttcaggtcagttatgttgctaaattacttttggcattaagtttagggaaaaaaaattgggtttgggattttttggtttcaacatttgtgattgagagactatggacctgtaataagtccaagaacagcagttgcagtgtaacaggactgttaatggaatcgggtcatttagaaacagtcaagacttcgctgttgtgcatgtggttaggagccagtgcacacgtcagttcttaggaaatgtacagtctgagcaatagcatttgaaatccaagactcttcccattgtgttgctgttgagtgtagaaaataaaatgtgtgaatttctttatcttgagtattgagattctccccttagaataaaacaagaatttttctctcagtgtaaaaatgtcaagttttattcttgaaatgaatagcaaagttaagcttaaaaacgtgaacagcttcagaactataaatgggtatgtatacctttctgctgtctaagggcagagaagggaaagaaagtgtggtgcttatcagaggagacagcagcaagacacattgtgacagaaaaccaagggtatcctgtgtcacagtgaaatgtaatgagggcacctctcctttcaagagacgaagattgaatacatgggaagcacactctccgctgtgtgttgtctaggagaggtgcaccctgtatggaaatatttgggaaggttaagattaagacagggtaaaataaagcaaaggcaaatcacaaagcaagggctaatgttaatatgaaaagtgcagaattcaacgaaaaagcatggggacaaagaagatttttcctctttttggttgctgttcatgtgtagcctacaacagaactataagacctatagacatttatatgaatatttatttgaaaacgtataatatcaacaatgtaaaa

SEQ ID NO: 180366 - DNA, 1591 bp, Homo Sapiens
  misc_feature (410)..(554): n is a, c, g, or t
  misc_feature (596)..(608): n is a, c, g, or t
  misc_feature (1528)..(1536): n is a, c, g, or t
ttgggtttttcccttgaactgagctgtgtgctgtgttttcgcgtctgcaggacaaggtttatagctcggtgctgcggcagtgctacagcatgtacaaggtaagcgtggcgttctttttcaactcagagtccagccacttacccctatctctaggctccagggttgtttaaagaaaaatctgtaaatgactgcaaagtgactctgtatttgtcttagagaagaaaataatgaggcctttgaaacaggtagtgaggtttatgcctacatttattcagtaagtattgaactcccttctcttttctcagccttatagtaggaatgtgtccccattgatgaaaaagtgtgtctatgtgctcaaggaatgtacagaatgcagataattttatgatttaaaagtttcagtgagggannnnnnnnnnnnnnnnnnnnnnnnnnnnnnnnnnnnnnnnnnnnnnnnnnnnnnnnnnnnnnnnnnnnnnnnnnnnnnnnnnnnnnnnnnnnnnnnnnnnnnnnnnnnnnnnnnnnnnnnnnnnnnnnnnnnnnnnnnnnnnnnnggataaaaagtttggtgattccatttattaacagaacactgnnnnnnnnnnnnncagaaatgtgggtgatattatgtatgtaaattgaaacttcagggtaagttgaaatttttgaaagatgcctagagcaattaggtggtttcataaataaaacagcatcacttaacagtattttttgtaacttacatttttaactcaagttttctcatgtaaatattctctgttggaaagaactgggagatttaatgagctgaattaataatctaaaggaaaaaaagaacttgttatactgaaaaagtgagcataggaaactgattttttttcctgcaatcttttacctcactagctttttaatggtacatttctgaaagccatggagacggaggcgtcaagcttctgaaagaaagattagagaaattcttccatcggtaagtattttgaatttcatttataactttagtaagcattcatcaggtttttagagaaatatagacagacaagtttgtttcttatctacaaaaaacccagaacttgaaagtggcaaagagcctgagacagaccgtcgcaaaactggagcagcgaggaaacgcatgaggtgtgtgctctggaaccttccctccagctgtggtgtaaggcagagcttcctgcgtttgccaggggctcttaaagggtcctggagacatcgtttggcctccctgtgttttacctgcatctgtccttctgggcttactcagcagccatcttttgtgtgatagattagttgataaggaaaacttaattattggagttgcacaatctcagggattggttctgttcactaaacgggcgtaaactgtcttgatgtaggtaagagttattggccttgacagactttgtcagattagcgattggggagatttgttccaagtgctgtcctctttcgttgtaattgaattttgcatgtttcaccctaccttgtcaagctcagtttatcnnnnnnnnnaaaaggaaacaaaagagacagggtcttgtcttggctgttttgcccaggctggttt

SEQ ID NO: 180367 - DNA, 496 bp, Homo Sapiens
gacccctttcgcttgctattctgtcctgtctttgcttagagttcgggggctaaatactgggcacctgtcggccagttaaaagtgactagcgcggctgccggactaaagacaagggtgtcaggctttctgggaaagggctttctaacaactcccgactcttcggtgttgagaccattggtttgcctagaaccagcttttgcttttcctgtacttctgggctgagccgagggtcaacagagaggaaagccatgcacctccggggtcccgacaacaagttggttgaccctgcgaccatgagcggaactctcaaaggcatgtcgcccaagcgagactcgcccatctatcctatctatcctgagccttgccccctggttcctaatgcctgccagacaaacttcctctctcctctcttctctgagtttagtcccgcttctaaaaattgctacctgtctctggtgcttttctagtttctcctataagaatgatttctagtata

SEQ ID NO: 180368 - DNA, 1655 bp, Homo Sapiens
  misc_feature (173)..(181): n is a, c, g, or t
  misc_feature (1569)..(1579): n is a, c, g, or t
ttggcatagccatggccgactcctgctgtggttctctgacgattgtgcttcttgttaatcctctgtcgtgctttggtaatcgtattgattagagttggtaactgtcttgacttgaattttgtccctttaaaactgctgtacctgtatgataaagatgcagtacctttctcttnnnnnnnnntgctatggaaagctgtgagaattgaagagacaaattggctgtgtcagtgtggggttatgtcatgatttctagaagccctgaagttgctcttttgagcagctttgcatgacacgctctggtaaaaggtgtgcatctttaaattatttcatggatactttgaaaaatattgtatcacttcaaatacagcaataagtttatatgttctcaagatttcatttgtttttaagaattttaagttcgtggattaatatcactacttgaatactgacagttgttgattagacaccgaaaggttactgattgttgaatgtatctgtgttagagctgtgcactggcacgcttgcatcaggggctggggccacacggccgccacacagattcccccgtgatgcctggagctgcttccagagccgggtgtctccaagaggcacctgtaggacttcccatttagaaatctcttgagtgggtttgtatgttaccttctccaaggtttatttaggacagagatattgctggaaggtcatgggtcagattccctcacaacccacctcgtctgcgggtgcagccccactccaaggctccccgttattggggtatgtgaggagcagtaaatataaaaccagttcaactgtcctcatggaatcaccctttctgtttttgcagtattcataaagctagtgtaaggtctggttttagtctattaaatcttagagatctaaaggaaatgctcaaaatgtagccaggttttaaatgctttaacttttaaaaaatgtaaatttttgtatgtttatagcttctaaatatgaaagttaaagaatgtactgtgatgaaatgttcagtattatgttgcttctcagtatcatgttgcttctcagtattgtgttgcttctgattctatgaatgttcattttaagaccccttgttgaaatgggacagttggcagcggctctgatgagcccgagaagaggcctgcccttgggtgcggagtctccctccgcacgatgctcccacgcgtccaacttgcacccaaggggcttttccctcttccaagtggactccttcaaggaagctgcagctcggtcagcagagaaggggcctgccgccagcgccctggaggaagaggaagaggaacccaagaggatggcttgtctcccagcagccacaccggctttgtgctcagccagttcatttgagtttgcatgtttctctgcactatggattttgagcatttagatttctttaatcaaaagcgttttagtgactccagtagacattttctttctgaggcatcgtgctttgcatgagagcaggccaaggttgaggggaaaagtaaagttaaagtcggttctctttcatagcaacacgtattgtctgacattcagccagcnnnnnnnnnnnctaataatttctgtgcctttctgtcctgtatttactgtatttagaaaaagcagctagaatatttctccattaactc

SEQ ID NO: 180369 - DNA, 1290 bp, Homo Sapiens
  misc_feature (942)..(950): n is a, c, g, or t
tggtgctgcagggtcggcagctcccgcggcagcggccggcgccccgggatctgggggcgcaccctcagggtcgcagggggtgctgatcggggacaggctgtactccggggtgctcatcaccttggagaactgcctcctgcctgacgacaagctccgtttcacgccgtccatgtcgagcggcctcgacaccgacacagagaccgacctccgcgtggtgggctgcgagctcatccaggcggccggtatcctgctccgcctgccgcaggtggccatggctaccgggcaggtgttgttccagcggttcttttataccaagtccttcgtgaagcactccatggagcatgtgtcaatggcctgtgtccacctggcttccaagatagaagaggccccaagacgcatacgggacgtcatcaatgtgtttcaccgccttcgacagctgagagacaaaaagaagcccgtgcctctactactggatcaagattatgttaatttaaagaaccaaattataaaggcggaaagacgagttctcaaagagttgggtttctgcgtccatgtgaagcatcctcataagataatcgttatgtaccttcaggtgttagagtgtgagcgtaaccaacacctggtccagacctcatgggtagcctctgagggtaagtgactaagacttctcctctgctgtccaagcgctttggtgcagggacagcggcatcttcagccaatccagtgcaggctctccaccgaaggctggctctagactggtggtacgcacatagcatagccatggccgactcctgctgtggttctctgacgattgtgcttcttgttaatcctctgtcgtgctttggtaatcgtattgattagagttggtaactgtcttgacttgaattttgtccctttaaaactgctgtacctgtatgataaagatgcagtacctttctcttnnnnnnnnntgctatggaaagctgtgagaattgaagagacaaattggctgtgtcagtgtggggttatgtcatgatttctagaagccctgaagttgctcttttgagcagctttgcatgacacgctctggtaaaaggtgtgcatctttaaattatttcatggatactttgaaaaatattgtatcacttcaaatacagcaataagtttatatgttctcaagatttcatttgtttttaagaattttaagttcgtggattaatatcactacttgaatactgacagttgttgattagacaccgaaaggttactgattgttgaatgtatctgtgttagagctgtgcactggcacgc

SEQ ID NO: 180370 - DNA, 942 bp, Homo Sapiens
  misc_feature (138)..(154): n is a, c, g, or t
  misc_feature (172)..(249): n is a, c, g, or t
ttggcttgaacatagaataaatgtctctgtaagacgttgttagctagtcacattttctgatgtagcattagacttccagagtgacaacttagtagctattctctgtgtcacttactcttggaagttccttaaattaannnnnnnnnnnnnnnnngagatgaagtcacactcnnnnnnnnnnnnnnnnnnnnnnnnnnnnnnnnnnnnnnnnnnnnnnnnnnnnnnnnnnnnnnnnnnnnnnnnnnnnnnatgagccactgcgcccaaccccttaaatgaaatgtttaaaagatagaagacaataggccttccttattcaagacttcactgtcctcagtttcagttactcatagttcaaaaatatcaaatggaaaatttcagaagtaaacactttgtaagttttaaatgctgcaccattctgagaagcatggggaagtatgtcctgcttgcaagataaatcatcccatggtccagtgtgtacacactgtagactctaccagcccattagtcacatagtagatactgcagttaccagacggactgtcatggtgtcccagtggttatgttcacatgacccttattttacttataatggcccaaacctcaacagtagtgaggtagtgactagtgatagattgttataattgttctaatgtattattagttattgttgttaatctcttgttgtgcctgatttataaattaaactttatcataggtatgtacatataggaaaaatcatagtgtatatgtatatgtattctgtgtaacagatgttgccatgaacacactgtaagttgtattttgtttattactaagtagaattttgtcaaacttcttaaatgattttttgtttctgaatattaacatgtctatccacatttattttatagttgttttatcacaaaaatcaattgtttttcaaactttatatccttagtg

SEQ ID NO: 180371 - DNA, 923 bp, Homo Sapiens
  misc_feature (400)..(409): n is a, c, g, or t
ttggctcctcttttctgctgggattacaggcgtgagtcaccatgcccagcctcaagtaggtttttaatgaatttcttatacttttaaaatacaacattatggcaataaaagactattccacttcttttctaatctggagattgtattgatttttctagtataattttctggctcatacctccagtacaatggtgaatagtggtataagtagaaattctcgtcctgttttcaaacttgcagataaagcccctagtcattcaccattaagtatattagcttttggtgtggagtttttcatcttggctcactgcagcctcaacctcttaagctcaagtgatcctcccaccttaactgcctgagtagttgggacaataggcatgcaccaccatgcccagataannnnnnnnnnaatattttgtaaagatggggattccctatattgtccagaatggtcttgaactcctggctttatgcagtctttccacctcagcctcccaaagttctgggttacaggtgtgagccactgcgccgggccaattttggtttttcatggaggacttttagcaggtctcaaaagttttcttctaatagttttcttggtgttctatcattcgtaggtgttgaatttaccaaactttttctatttcaattattacatttttactttgttcaagtaatattgtatcatattaaatgaacattgcattgtgaaaataccctgcttagtcatggtatgtaatcatccttatacctttttgtattctttttttaaatatttctgagaatttctgtgtctaaatttaaataggatgttgttttgtaatcatcttgtgattcttttgtctcctttgggtattattggccaatagatgaattaagaaatgttacctcttctactgcttgaagtttttgtgagaaattga

SEQ ID NO: 180372 - DNA, 1330 bp, Homo Sapiens
ttggctaggatttgaattcccagcctggccaacccttgcagccatgtcttggcctcaagtggaacaagggctccttgaggccagcagggttgggggagttggggtgggcctgagcctctttcctgctagagctcttggtcctccctgcctccaccacccatccctgctctgcagaacccctgggtgctgagtggcaggagccccagggttgtcccatctgggtatggctggctgggtcactaacctctgtgatctgcttccttcctttccagattatgcggatcaaacctcaccaaggccagcacataggagagatgagcttcctacagcacaacaaatgtgaatgcagaccaaagaaagatagagcaagacaagaaaagtaagtggccctgactttagcacttctccctctccatggccggttgtcttggtttggggctcttggctacctctgttgggggctcccatagcctccctgggtcagggacttggtcttgtgggggacttgtggtggcagcaacaatgggatggagccaactccaggatgatggctctagggctagtgagaaaacatagccaggagcctggcacttcctttggaagggacaatgccttctgggtctccagatcattcctgaccaggacttgctgtttcggtgtgtcagggggcactgtggacactggctcactggcttgctctaggacacccacagtggggagagggagtgggtggcagagaggccagcttttgtgtgtcagaggaaatggcctcttttggtggctgctgtgacggtgcagttggatgcgaggccggctggagggtggtttctcagtgcatgccctcctgtaggcggcaggcggcagacacacagccctcttggccagggagaaaaagttgaatgttggtcattttcagaggcttgtgagtgctccgtgttaaggggcaggtaggatggggtgggggacaaggtctggcggcagtaacccttcaagacagggtgggcggctggcatcagcaagagcttgcagggaaagagagactgagagagagcacctgtgccctgccctttcccccacaccatcttgtctgcctccagtgctgtgcggacattgaagcccccaccaggcctcaaccccttgcctcttccctcagctcccagcttccagagcgagaggatgcggaaaccttccttccaccctttggtgctttctcctaaggggacagacttgccctctctggtcccttctccccctcctttcttccctgtgacagacatcctgaggtgtgttcctcttgggcctggcaggcatggagagctctggttctctt

SEQ ID NO: 180373 - DNA, 1767 bp, Homo Sapiens
  misc_feature (1266)..(1274): n is a, c, g, or t
ttggggaaactttttaacatgctttgtcgcatttatatgctacaggttacaaagtgagagccttgtatacacttcaatacttaaaaagtacccgtactcagtactcagccggcagcataatgaaaagtgggactagacacggtgtccatatggagaggaaaaatatacatagaatatttttaacaaaatgtattcattgtataaatggaatccttctgtaactttggtaactgcatacttgttgtttggtaatgaaccagaggaggtataatactctagaattgtgtaacattaaagtgtaaacttttgtgtttaaagagagagaacattttatggtgtgtacttttaaaaaggaaacaaagctgcatgcaacagcttgaaattgtatattcaggtattaaaggtgcaatactggttagaaaaaactcagggcctcccactggggagctgcctttatttaattttaaagaaaacaaaatctaacccaaaaagtccaattcatatttccctctcccctctttaagtaattttacatggccatagtcattattctaactgatatgtctataaagttgcacccccagtccgttgagccttggtatttgttgtaaattctcctttcacagcgattgttaaatctattcgtgccctgagatgtatggctttatgctgaagattggctggatgcgtcctctgatgtgtgttgtaggaatttaatgtggttgtctcctgcttttattatactgtgacttgttaggaaaccctgggcctcatttggctctcccttgggagaggttgagggtgcacctttatgaacatggaaaggtttatcacagcagttaacccccacttgctcctcccctctataccaagctcttctggtttttcacctgacggggtgggtgtttgggatctattttttcttgctaatttgccaagtattgcactattaataccagcccccgaaatgaaaggaaccaaccacactggtgtgtacaatcagacaagcaaggttgtatattgaggaaatttgagcaagctgccctgaagaaaggcatagtgacaagatgagagagatgcattgtttggagatgtgtttagccagtgcccttcttccccacgagcccccccaaggctcagagcggtactggcttttaaagggaaaggccttcatttcttcgtttatccccccagcagcgctggagagcgaggtggcttcaataagcctggtggtaagtttttgagtattaccatagatagtgtttnnnnnnnnntgcagtcagtttttagaaaactataatttttttattagtttcataagtggtttaaaaatgatctatacaaaagagactaatgggtactgccggcattgtcttaggggttaataaggttaacctatggttacaaaacaaagggtaacttgaagtattgagtaactgcttctgtaatatgggggagaataaatttttaaatttggtttatttagaggaaaaattttgacttaaatttaacactgatttggcacataagcattgagagtgtatttggttaatggtttagaagcaaaccagcaaaggaaaaaagcaaaccctagcaaacctttcacaaatgttaaagagacactgctccattttagcagtgcgggtcattttgagtttaatgaatccccatcaaatggtggtatagtagatagctatgtgtgtttgtaacgtttgtagcttgcaagacgtgcactaataatattttatatgatctttcctggttggc

SEQ ID NO: 180374 - DNA, 963 bp, Homo Sapiens
cttttaaaagccaactttgtacaaagaacaagctttgtacagagaacaagcttggctttttctcccaacgccgaggatgctgttgatgctgccacgtaatagcataattttgggtgtcctcaaggacagaacttccactttgaataatggaagttagaacaatgaatttcacaggggaataaatattaatgactgacgtgaagaaaatatgccattgtttattccctcctgcatcatttccataatttgcttttgtactgtcaatttagaggaaatgtgtgatgctggtgttttgtttggcctgtttgtttgatgctgggggttttatgtgttgtaccctttaccccttacattgtgtaatttgaaagtggcaaacaaacctgcagtaaaagtccttgattggcatcttcattcggatgatggagagcctttgtggtagtgtttgcttatgtgaacagcaggcctttcagataagagaagtggcttttccttggtgatgaaggggtagagattgagccatggggatggtttaggttaaagaatgcttttttttggccatcatgaggatctaacaacagagtagaaggaaggatgccctaggtcagcatgcagggtggtgggagggctttcatcttccttacccaagcctctcttttcacttttctagaagtccagaagttgttatatgatgaaatagcctcctttaacgtttatttctgggtgccaagggaggcccattcctctaacattctcataatttttctcaaaggcctatgatctaaacatttcaccacggcatccactcagctgtgaggctgcgtacacagtctccacctctgaaatctgaacttcgtttaccagtggtgctgtttgaacttcataatgtcagcacttcctgaacacttactgtgtgcttggcttgtgctcctggaatgccttatatcataaggaaaccggcaaaat

SEQ ID NO: 180375 - DNA, 956 bp, Homo Sapiens
  misc_feature (529)..(537): n is a, c, g, or t
tgtacaaagaacaagctttgtacagagaacaagcttggctttttctcccaacgccgaggatgctgttgatgctgccacgtaatagcataattttgggtgtcctcaaggacagaacttccactttgaataatggaagttagaacaatgaatttcacaggggaataaatattaatgactgacgtgaagaaaatatgccattgtttattccctcctgcatcatttccataatttgcttttgtactgtcaatttagaggaaatgtgtgatgctggtgttttgtttggcctgtttgtttgatgctgggggttttatgtgttgtaccctttaccccttacattgtgtaatttgaaagtggcaaacaaacctgcagtaaaagtccttgattggcatcttcattcggatgatggagagcctttgtggtagtgtttgcttatgtgaacagcaggcctttcagataagagaagtggcttttccttggtgatgaaggggtagagattgagccatggggatggtttaggttaaagaatgcnnnnnnnnnggccatcatgaggatctaacaacagagtagaaggaaggatgccctaggtcagcatgcagggtggtgggagggctttcatcttccttacccaagcctctcttttcacttttctagaagtccagaagttgttatatgatgaaatagcctcctttaacgtttatttctgggtgccaagggaggcccattcctctaacattctcataatttttctcaaacgcctatgatctaaacatttcaccacggcatccactcagctgtgaggctgcgtacacagtctccacctctgaaatctgaacttcgtttaccagtggtgctgtttgaacttcataatgtcagcacttcctgaacacttactgtgtgcttggcttgtgctcctgagtgccttatatcataaggaaacggcaaaatcacgggactgg

SEQ ID NO: 180376 - DNA, 1504 bp, Homo Sapiens
aatttcatataattccaagagcaagaaattaaaatagggctgaatctcatgaaaactaggcttgtaggatgattctagaatgattctagaccttgaggtgaagagttttgtggcccttccctccagtgctctgctattaacaccactcagttctacatcatgcattaggtttttctcatcgtttcactcatagtttcttctcccataattttagtttgtacatggtttctcatgacctctccaactttgattctccctccccgcccccacaatcagtgtgatatgttcaggaaatgccaacaactaccaccatagtcaactgtgataacagtgaaaagggagctgggaagatatgcacagtagcaaaccactatatagtgtttctaccatacagatatagtagatataaagaaattcaaaagcatagataattgtaaaatgtgggcaaataattaggaaataatttgttttgagtatttatctttgtttttattaaattattatgcaacttaattcttaaaaatggctgtttgacaactcacaaaattctcgaaaattcaacaattggtcctgcaaaagaatacagccaactcacttcaaaacctctcagctgaagctcccacccccaattggaaattctttcctttttgtcccagttcaaaagacaataagccccactcatctttttaagctacagaaatcacaggttgctgaccagccaataaactggttgctttgggtgaggtgctctccctgcctgtggcttgcaggggaggttgacgtcaaatgatatcaaacatagatgtctcagcagcagttatgggaggtgggagagatacaagctaacctaggacaaaaagttactacagatgttaaaatcccttggccctatgattattccaactacaggccattatgaaaagagaagctcacagaaatgacaatgagccatcaagaatgggctaaattgtaattaatatactatgtttaagaagatgagtgcctgggaaaggatcagctatcactcagcgacttcctccttgtagtatgccttcctgaaacgcagaagttggaaaactaaaaactgtcttttccagactcctttatagctagtattctggatgcaaatctgattccaccattaagatgcaggacacaagatatggaaggcagaagtaaagcagagccccattggcctgtagctttcagcagctttcagcttgtacacaaggtcatgaacatgtcagtatccagtctccagctttgaactaaaacaaaaaagagagaattttcaatcaaggagtagaaccgtcagctaggaggttttacagtgatgcaatggagttggctgtactctcttgcaaggccaaccatcaaatttctatgaatttcacaaatcagttgtcaaacacagccactactaagaattcagttgcataaaattacaattaaattatattaaaaacataattaatcattttctaattattttagagacaaccaa

SEQ ID NO: 180377 - DNA, 1245 bp, Homo Sapiens
  misc_feature (130)..(164): n is a, c, g, or t
ttggggcagaatgtcttacagaatgtcctagaaccagattatcatttaatctgaaacagctgaggaagggacagagaaggtacaagggcaaggcagcacaaaacagatcaggagaatgaagagggaatgnnnnnnnnnnnnnnnnnnnnnnnnnnnnnnnnnnncaagtaactaaaacagcatctacatgtagagtgttgtggagagctgagaccagggtaaagtcaagtgcagcatcagtactgcgagacccaccagcccctggagagggtcagccgagaatctggtagtgaagcctgtctagggtcccggcaccctcaccctcagccacctgcagagaggccagggccccagagactagcctggttctgaagtgggcaggggtgctgccagagccctctgccccttatgttgagaccctgctttcaggacaggccagccgttggccaccatgtcacattctgagtgagtgtcacaggtccctaacaataattttctgatctggagcatatcagcagaatgcttagcctcaaggggcctggcagctgtaatgtttgatttatgatgagaactatccgaggccacccttggcctctaaataagctgctctagggagccgcctactttttgatgagaaattagaagagtacctaatgttgaaaacatgacatgcgctcttgggatctgctgttctctccagggctccagaacctgatacctgttaccaaagctaggaaagagctttatcacaagccttcactgtcctggcatgagaactggctgccaggctcagtgtaccccattaactgtgaatgaatctgagcttggtttcctttattgcttcctctgcaatatgattgctgaaacacattttaaaaattcagaagcttgtcactcctgttaatgggaggatcagtcacacatgtgtagtacaaggcggactttgtgtttgtttttggtgttaatttttagcattgtgtgtgttgcttccccaccctgaggagaggacaccatggcttactactcaggacaagtatgccccgctcagggtgtgatttcaggtggcttccaaacttgtacgcagtttaaagatggtggggacagactttgcctctacctagtgaaccccacttaaagaataaggagcatttgaatctcttggaaaaggccatgaagaataaagcagtcaaaaagaagtcctccatgttggtgccaaggacttgcgaggggaaataaaaatgttat

SEQ ID NO: 180378 - DNA, 2441 bp, Homo Sapiens
  misc_feature (405)..(427): n is a, c, g, or t
  misc_feature (1966)..(2000): n is a, c, g, or t
tttgtacaaaaaagttggcataaactaaagggggattttctttcttcttttgtttggtagaaaattatccttttctaaaaactgaacaatggcacaattgtttgctatgtgcacccgtccaggacagaaccgtgcataggcaaaaggagtggagcacagcgtccggcccagtgtgtttccggttctgagtcagggtgatctgtggacgggaccccagcaccaagtctacgggtgccagatcagtagggcctgtgatttcctgtcagtgtcctcagctaatgtgaacagtgttggtctgctggttagaaactagaatattgatattttcaggaaagaaatcagctcagctctccactcattgccaaatgtcactaaagggtttagttttaaggagaaagaaaaggnnnnnnnnnnnnnnnnnnnnnnngtcctgttttgctttgcagaacaaatgaacttacaggtgagcattaagcttgcagtgagaaatgtgtgaagagtaaaaacccaagtcaatgctgaggcagttctaacttcactgttttcctaaatacacatccttgattattttcagccttgctatataatctgatctgctagaagtgtatgagtgagaggcaatagcatacaaactgattttttaaatataagcttaggttgtaattgtacaagtgactcaatggaagtacaaaatagggcagttttaacttttttttctgcttctatggatttcattttgttgtgttttcaaaaagttatggtgctgtataggtgctttctgtttaacctggaaagtgtgattatattcgttaccttctttggtagacggaatagttgggaccacctttggtacataagaaattggtataacgatgctctgattagcacagtatatgcatacttctccaaagtgatatatgaagactcttttctttgcataaaaagcattaggcatataaatgtataaatatattttatcatgtacagtacaaaaatggaaccttatgcatgggccttaggaatacaggctagtatttcagcacagacttccctgcttgagttcttgctgatgcttgcaccgtgacagtgggcaccaacacagacgtgccacccaaccccctgcacacaccaccggccaccaggggcccccttgtgcgccttggctttataactcctctgggggtgatattggtggtgatcacagctcctagcataatgagagttccatttggtattgtcacacgtctcctgcctcgcttgggttgccatgtttgagcgatggccctgttgatttcaccctgccttttactgaatctgtaaattgttgtgcaattgtggttatagtagactgtagcacattgccttttctaaactgctacatgtttataatcttcatttttaaagtatgtgtaatttttttaagtatgtattctattcatatggtctgcttgtcagtgagccagacttgcttactatattcctttataataatgctagccacttcctggattctttagtaatgtgctgtatgcaagaactttccagtagcagtgaaggagggttgcctctccaagcttcctaagggatgctgccctgggtggggatgcattgcagaggcagtagtagcatgagggtcctgagaacttctgtcctgagttcagagaaacatgcaaagtaactaacaaaatcgctacttgcctttgcagttttacagacccagggagctgctttgggagtgagaaaggcaaccctccaatgtgtttcaactttaaaatgttgaattcttttcagacatgtggtatctcatttattctccttttctagcgtttgttgaatttcaggcagaatgtcttacagaatgtcctagaaccagattatcatttaatccgaaacagctgaggaagggacagagaaggtacaagggcaaggcagcataaaacagatcaggagaatgaagagggaatgnnnnnnnnnnnnnnnnnnnnnnnnnnnnnnnnnnncaagtaactaaaacagcatctacatgtagagtgtcgtggagagctgagaccagggtaaagtcaagtgcagcatcagtactgcgagacccaccagcccctggagagggtcagctgagaatctggtagtgaagcctgtgtagggtcccggcaccctcaccctcagccacctgcagagaggccagggccccagagactagcccggttctgaagtgggcaggggtgctgccagagccttccgccccttatattgagaccctgctttcagacaggccagccgttggccaccatgtcacattctgagtgagtgtcacgggtccctaacaataattttctgatctggagcatatcagcagaatgcttagcctcaaggggcctggcagctgtaatgtttgatttatgatgagaactatccgaggccacacttggcctctaataagctgc

SEQ ID NO: 180379 - DNA, 913 bp, Homo Sapiens
  misc_feature (91)..(100): n is a, c, g, or t
  misc_feature (631)..(639): n is a, c, g, or t
ttggcaaaaaggaaaccctaacagctctgaactctggttttatttttcttgctgtatttgggtgaacattgtatgattaggcataatgttnnnnnnnnnnttttttttttggtagaaatgcaatcaccagtaaagaggtacgaaaaagctagcctctctcagagaccggggaggcagagtactactagaggaagtgaagttctgatggaatcatgcctgtcaaatgaggtcttgaagcggatgcccaaataaaagagtatattttatctaaatcttaagtgggtaacattttatgcagtttaaatgaatggaatattttcctcttgtttagttgtatctgtttgtatttttctttgatgaatgattggtcatgaggcctcttgccacactccagaaatacgtgtgcggctgcttttaagaactatgtgtctggtcacttatttctctaaaattatctcattgcctggcaatcagtcttctcttgtatacttgtcctagcacattatgtacatgggaaatgtaaacaaatgtgaaggaggaccagaaaaattagttaatatttaaaaaaatgtattgtgcattttggcttcacatgtttaactttttttaagaaaaaagttgcatgaatggnnnnnnnnntctgtatacagtatctgtaaaaactatcttatctgtttcaattccttgctcatatcccatataatctagaactaaatatggtgtgtggccatatttaaacacctgagagtcaagcagttgagactttgatttgaaagcacctcatccttctttcaatgcgaacactatcatatggcattcttactgaggattttgtctaccatatgttgccatgaattaactctgccgcctttcttaagatcaaaaccagtttgatttgggaatcttccccttt

SEQ ID NO: 180380 - DNA, 1722 bp, Homo Sapiens
  misc_feature (510)..(825): n is a, c, g, or t
  misc_feature (1358)..(1378): n is a, c, g, or t
ttggataagagagctgcagaaaagactgtagcttctgaggaggcaggagtaccttgttaatatccaaaccacccctgagttctaatgttccaactccacctaaacgaggaattggaaactttaaatggaattatctaatttaaattcttagttttttctttgtctttctcagctgatacttgtagttttgttttgttttttaaccaccaagaacacttgcaagtttgttactgaaaacatcactaaaggaaaagaagagtttcaaaatgcttgaaaagtagtatgtggttggaatgtttttgttcaagtccctggaagtcctcttggcttagctcccttgttcctgttcccacttcatttccttacttaacattcccctattttgagcatgtcaataagtgcatgatgaatggcacagttgaatgatcatgttaactttaattgcttcctttgttgctgtaaacagtttcttgttaagtttcagccaagtctgtgacaatctcaccaaannnnnnnnnnnnnnnnnnnnnnnnnnnnnnnnnnnnnnnnnnnnnnnnnnnnnnnnnnnnnnnnnnnnnnnnnnnnnnnnnnnnnnnnnnnnnnnnnnnnnnnnnnnnnnnnnnnnnnnnnnnnnnnnnnnnnnnnnnnnnnnnnnnnnnnnnnnnnnnnnnnnnnnnnnnnnnnnnnnnnnnnnnnnnnnnnnnnnnnnnnnnnnnnnnnnnnnnnnnnnnnnnnnnnnnnnnnnnnnnnnnnnnnnnnnnnnnnnnnnnnnnnnnnnnnnnnnnnnnnnnnnnnnnnnnnnnnnnnnnnnnnnnnnnnnnnnnncatgaatgaatgaaatggctcaccttccctattatgaactagaagaaaggatgaaggaaggttggcaggaccccagccttactctgtagtgacaacccagaggtacttttcccggaatgcagggtcaagtttatgtgtgaagggactctagaatagctggtaaaaatggctacatggtaaccattcttgacttagtccagtattcccataatttgtaattccataaatttattctcagctgtcccccagccatttctaatagaaggatgtgtaccccagttttgacaatgttcttgaaatcaagttagtgttacctgcattgcattataatggaactatatgtacatgttaaagggatccgtttgattcctttcggcaaggaattgcaaaaatagtttttaccaataccagttaaaataggataggttagactttgggggcagggtgagacagtgcagccttttcactctgaaatggcaaatcagctgtactctttgagtctaccagagattcctatttgagtgtgaatgggnnnnnnnnnnnnnnnnnnnnnctcattcatcttcatgctttcttccatggtgttaattcaagctctcctaataaaggtatccaaagagtactgagaagtgaccataggtatttggcatgagtaaatgtagttccttttgccaaaaaaactctcaaaagttacaactggagttcttcgcgataaaaggttggggaaatcagccatggctttagtcttgttctcaagtacacatcttcttatccacaaggatgaaactctgtagggctcactctgagggctcatgtgtggcattgagagggtagcagtgaccagaacaccacaacgcccacaagatgttttgaatgaggaacatttaatgtcatttg

SEQ ID NO: 180381 - DNA, 740 bp, Homo Sapiens
  misc_feature (138)..(158): n is a, c, g, or t
gtacaaaaaagttgggttaaaataggataggttagactttgggggcagggtgagacagtgcagccttttcactctgaaatggcaaatcagctgtactctttgagtctaccagagattcctatttgagtgtgaatgggnnnnnnnnnnnnnnnnnnnnnctcattcatcttcatgctttcttccatggtgttaattcaagctctcctaataaaggtatccaaagagtactgagaagtgaccataggtatttggcatgagtaaatgtagttccttttgccaaaaaaactctcaaaagttacaactggagttcttcgcgataaaaggttggggaaatcagccatggctttagccttgttcccaagtacacatcttcttatccacaaggatgaaactctgtagggctcaccctgagggctcatgtgtggcattgagagggtagcagtgaccagaacaccacaaggcccacaagatgttttgaatgagggaacatttaatgtcatttgttaggagatagaaaccaaataataaaggacaaggaccacgctcattccgtggagaagaggtgaactccctctgctgactatttggaatggactgaatgaggaggtctctccagccagaaggagtattgaggtcatcaggcctcagaaaacaatgtacacataatctcgggctgtgaacaagagaaaggagggggggaaacatgaaagtcaatcttaacaatttttgcatacttctta

SEQ ID NO: 180382 - DNA, 2486 bp, Homo Sapiens
  misc_feature (524)..(534): n is a, c, g, or t
  misc_feature (1063)..(1083): n is a, c, g, or t
ttggcttagtcgcgggctgactggtgtttatccgtcactcgccgaggttccttgggtcatggtgccagcctgactgagaagaggacgctcccgggagacgaatgaggaaccacctcctcctactgttcaagtacaggggcctggtccgcaaagggaagaaaagcaaaagacgaaaatggctaaattcgtgatccgcccagccactgccgccgactgcagtgacatactgcggctgatcaaggagctggctaaatatgaatacatggaagaacaagtaatcttaactgaaaaagatctgctagaagatggttttggagagcaccccttttaccactgcctggttgcagaagtgccgaaagagcactggactccggaaggtaacccctcgccctttccagaagccagagagaccaagtgttatgtaagaagtagtgtcggctgtgtagaaccactgactacacaggccgaagttactgagaacttggacagaaaaaatagccagcaagtgttcaaactactgaggnnnnnnnnnnnttagatatgctgcacttaagaatactagggcaggttaaaagagctgtttaagtaagtatcagagtgctgtggagactcggaagtgtttaagctgcttaagtaagtataagtgctgtggagacccggaagagttagatataatgtcatttgttgtaattcagtttcataaaatggttcttgtttgaccctaacgtaacagtttttgtaattgtgttaaatcacatttttttctttaatttgtcccaatcttcaggttacagtctctagcttcgccatgtacatggcccttccgtgtacatggatgggcggggaggtaactaaaagatcctttacacaataaagtagatgatcatgataaatgaggtaaggtcctattatcacacacttcaaacacggtagatcagaaacccactatgatactcgcttcctgtctgtttgctaaggaatataaaatggctagaaagtttaatttgaaacctttgcctccatttggaatagtagacaccagttaagagggtgtcagatgccnnnnnnnnnnnnnnnnnnnnnggctggtccctgttgattggtcagaaaacagctcagctaaaaggggaagttgtctgggtggttgctttttttctgacgtctgttcctcaggctggaagaaatgagcagaaaacaagggatgagtactttttaaagtatgtgcatgttacgtaatacctgtttctgggcaatgctgcttcttctgactccacaaatggggagagcaaattgaaaatgcgtaaattggaaggccagttctgaaattaaacgttgtactttggtgatgttctgacctttaaggaagcaagagtttgtaaacttccaaatatttactattctgaactgccgtgtaaacctgacgtattcccaagtcaacataccagtataccaataggatgtgaataatgtgtgtgttgagtttaaaaccatagcagttttgctctggcaagtaatgaaagcgttctcgcttcctgagtgtgagctccagcagactgcagagtggccagtccacagttgtagcctgacttcagtgagttctgatgtgtgctttttgcaaatacatgttctcagaacagtgagatcatccagcagtggcctggactgcactcacataaaaatcatgagacagccatggctacttgtttctgtaatacatgcatgtgtgttttttaaaacctatgataggcctctgattctgcagctgcaacttttatggaatgttttccttctccacatctcatgtgatgctcttattacaggacacagcattgttggttttgccatgtactattttacctatgacccgtggattggcaagttattgtatcttgaggacttcttcgtgatgagtgattatagaggctttggcataggatcagaaattctgaagaatctaagccaggttgcaatgaggtgtcgctgcagcagcatgcacttcttggtagcagaatggaatgaaccatccatcaacttctataaaagaagaggtgcttctgatctgtccagtgaagagggttggagactgttcaagatcgacaaggagtacttgctaaaaatggcaacagaggagtgaggagtgctgctgtagatgacaacctccattctattttagaataaattcccaacttctcttgctttctatgctgtttgtagtgaaataatagaatgagcacccattccaaagctttattaccagtggcgttgttgcatgtttgaaatgaggtctgtttaaagtggcaatctcagatgcagtttggagagtcagatctttctccttgaatatctttcgataaacaacaaggtggtgtgatcttaatatatttgaaaaaaacttcattctcgtgagtcatttaaatgtgtacaatgtacacactggtacttagagtttctgtttgattcttttttaataactactctttgatttt

SEQ ID NO: 180383 - DNA, 1476 bp, Homo Sapiens
  misc_feature (405)..(427): n is a, c, g, or t
  misc_feature (956)..(967): n is a, c, g, or t
ttttaaactcaacacacacattattcacatcttattggtatactggtatgtgacttgggaatacgtcaggtttacacggcagttcagaatagtaaatatttggaagtttacaaactcttgctccttaaaggtcagaacatcaggccaaagtacaacgtttaatttcagaacttgccttccaatttacgcattttcaatttgctctccccatttgttgagtcagaagaagcagcattgcccagaaacaggtattacgtaacatgcacatactctaaaaagtactcatcccttgttttctgctcatttcttccagcctgaggaacagacgtcagaaaaaaagcaaccacccagacaacttccccttttagctgagctgttttctgaccaatcaacagggaccagccnnnnnnnnnnnnnnnnnnnnnnnggcatctgacaccctcttaactggtgtctactattccaaatggaggcaaaggtttcaaattaaactttctagccattttatattccttagcaaacagacaggaagcgagtatcatagtgggtttctgatctaccgtgtttgaagtgtgtgataataggaccttacctcatttatcatgatcatctactttattgtgtaaaggatcttttagttacctccccgcccatccatgtacacggaagggccatgtacatggcgaagctagagactgtaacctgaagattgggacaaattaaagaaaaaaatgtgatttaacacaattacaaaaactgttacgttagggtcaaacaagaaccattttatgaaactgaattacaacaaatgacattatatctaactcttccgggtctccacagcacttatacttacttaagcagcttaaacacttccgagtctccacagcactctgatacttacttaaacagctcttttaacctgccctagtattcttaagtgcagcatatctaannnnnnnnnnnncctcagtagtttgaacacttgctggctattttttctgtccaagttctcagtaacttcggcctgtgtagtcagtggttctacacagccgacactacttcttacataacacttggtctctctggcttctggaaagggcgaggggttaccttccggagtccagtgctctttcggcacttctgcaaccaggcagtggtaaaaggggtgctctccaaaaccatcttctagcagatctttttcagttaagattacttgttcttccatgtattcatatttagccagctccttgatcagccgcagtatgtcactgcagtcggcggcagtggctgggcggatcacgaatttagccattttcgtcttttgcttttcttccctttgcggaccaggcccctgtacttgaacagtaggaggaggtggttcctcattcgtctcccgggagcgtcctcttctcagtcaggctggcaccatgacccaaggaacctcggcgagtgacggataaacaccagtcccaa

SEQ ID NO: 180384 - DNA, 1228 bp, Homo Sapiens
  misc_feature (489)..(499): n is a, c, g, or t
  misc_feature (1028)..(1050): n is a, c, g, or t
ttggcgccgaggttccttgggtcatggtgccagcctgactgagaagaggacgctcccgggagacgaatgaggaaccacctcctcctactgttcaagtacaggggcctggtccgcaaagggaagaaaagcaaaagacgaaaatggctaaattcgtgatccgcccagccactgccgccgactgcagtgacatactgcggctgatcaaggagctggctaaatatgaatacatggaagaacaagtaatcttaactgaaaaagatctgctagaagatggttttggagagcaccccttttaccactgcctggttgcagaagtgccgaaagagcactggactccggaaggtaacccctcgccctttccagaagccagagagaccaagtgttatgtaagaagtagtgtcggctgtgtagaaccactgactacacaggccgaagttactgagaacttggacagaaaaaatagccagcaagtgttcaaactactgaggnnnnnnnnnnnttagatatgctgcacttaagaatactagggcaggttaaaagagctgtttaagtaagtatcagagtgctgtggagactcggaagtgtttaagctgcttaagtaagtataagtgctgtggagacccggaagagttagatataatgtcatttgttgtaattcagtttcataaaatggttcttgtttgaccctaacgtaacagtttttgtaattgtgttaaatcacatttttttctttaatttgtcccaatcttcaggttacagtctctagcttcgccatgtacatggcccttccgtgtacatggatgggcggggaggtaactaaaagatcctttacacaataaagtagatgatcatgataaatgaggtaaggtcctattatcacacacttcaaacacggtagatcagaaacccactatgatactcgcttcctgtctgtttgctaaggaatataaaatggctagaaagtttaatttgaaacctttgcctccatttggaatagtagacaccagttaagagggtgtcagatgccnnnnnnnnnnnnnnnnnnnnnnnggctggtccctgttgattggtcagaagaccgctcagctaaaaggggaagttgtctgggtggttgctttttttctgacgtctgttcctcagctggaagaaatgagcagaaaacaagggatgagtactttttagagtatgtgcatgttacgtaatacccgtttctgggcaatgctgcttc

SEQ ID NO: 180385 - DNA, 1363 bp, Homo Sapiens
  misc_feature (444)..(454): n is a, c, g, or t
  misc_feature (983)..(1002): n is a, c, g, or t
ttggcgctcccgggcagacgaatgaggaaccacctcctcctactgttcaagtacaggggcctggtccgcaaagggaagaaaagcaaaagacgaaaatggctaaattcgtgatccgcccagccactgccgccgactgcagtgacatactgcggctgatcaaggagctggctaaatatgaatacatggaagaacaagtaatcttaactgaaaaagatctgctagaagatggttttggagagcaccccttttaccactgcctggttgcagaagtgccgaaagagcactggactccggaaggtaacccctcgccctttccagaagccagagagaccaagtgttatgtaagaagtagtgtcggctgtgtagaaccactgactacacaggccgaagttactgagaacttggacagaaaaaatagccagcaagtgttcaaactactgaggnnnnnnnnnnnttagatatgctgcacttaagaatactagggcaggttaaaagagctgtttaagtaagtatcagagtgctgtggagactcggaagtgtttaagctgcttaagtaagtataagtgctgtggagacccggaagagttagatataatgtcatttgttgtaattcagtttcataaaatggttcttgtttgaccctaacgtaacagtttttgtaattgtgttaaatcacatttttttctttaatttgtcccaatcttcaggttacagtctctagcttcgccatgtacatggcccttccgtgtacatggatgggcggggaggtaactaaaagatcctttacacaataaagtagatgatcatgataaatgaggtaaggtcctattatcacacacttcaaacacggtagatcagaaacccactatgatactcgcttcctgtctgtttgctaaggaatataaaatggctagaaagtttaatttgaaacctttgcctccatttggaatagtagacaccagttaagagggtgtcagatgccnnnnnnnnnnnnnnnnnnnnggctggtccctgttgattggtcagaagacagctcagctaaaaggggaagttgtctgggtggttgctttttttctgacgtctgttcctcaggctggaagaaatgagcagaaaacaagggatgagtactttttagagtatgtgcatgttacgtaatacctgtttctgggcaatgctgcttcttctgactcaacaaatgggggagagcaaattgaaaatgcgtaaattggaaaggcagttctgaaattaaacgttgtacttttggcctgatgttctgaccttttaaggaaagcaagagtttgtaaactttccaaatatttactattctgaactgccgtgtaaaacctgacgtattccagtcaac

SEQ ID NO: 180386 - DNA, 1588 bp, Homo Sapiens
  misc_feature (698)..(761): n is a, c, g, or t
ttggatactccctctcttatttttaatgtatttcgccactttaggattaaactgcaaatatctcatgaagctgctgcctgtatcactggtctccgggcagccatggaggctttggttgttgaagtaaccaaacaacctgctatcatcagccagttggaccccgtaaatgaacgtatgctgaacatgatccgtcagatctctagaccctcagctgctggtatcaaccttatgattggcagtacacggtgagtaccaatatacttcttactgaaccaagtagaggggagagatcttatgtaggcctagaattcctgaagttagtgatagaagccctattacttaagtaaaattctagatatagatagagctatatagatagagagtttgatgttctgagttctaacatactcagaacaaagaatgtcatttacttttttgttagtagttggtctgctgcatcagtgcatgttggtagtgttagaaggaacttacaaatgcacatacatagttcagagtgggtcacatgacagggaagtgacacagcccagatagccctttttccatggtactgttttggcatctctaaagaaaaatattgatgagatgttaaattgtttctgtatcaaatgtatatgtgtttttgtttatcttaaacaactagagcatggatatcttaaagaaatgagaaatttatcttnnnnnnnnnnnnnnnnnnnnnnnnnnnnnnnnnnnnnnnnnnnnnnnnnnnnnnnnnnnnnnnnacatatacttgatacttaccaaaaaggcaagaagagtgatacaatgtatagccatatagtctttatttaggttcactaattttcagcattttgtatttgcttaatatttgtgatgaagtagcaggcattaccacattttacatcaatacacttcatgtcttttaagaacatggccacaataccacaatcacaccccaaaaccttaagtgttttagtaatactataatatactaaggtactaaaattcttccagttatccaaaaatgacctctaattcctcatcaaaaatgatgtattggcatttgatctatctgtaagatgggtagattgttatcctcatcctctttaatataaacaaggaaaccaggcacagataagacccaaggtcatacagctaataactgatagaaccaggttcaaacccaggcaacatggctcctgaaacagtgctcttactatgctattctgtggccctcctaggtggttaaatgcatagaataattcaataaccgtcataggcagataacaaatgaagtattcatgggtgtttaggagaagagagattatttttggtaggagggctggtaagcaaggagccgctgtgtatataatctgtttctatgaaggataacagtccggaaactagaaagaaagggatatatgcaagagagtttaggatgtatgaatatgtggtggcttaaattacagtagtagaattgcaatggggagatgtgactggattagacagatttgtggtagaatcaataggaattggtgatggactaaaatggaatagtgcaatgaaagaacgaagacagattacagtc

SEQ ID NO: 180387 - DNA, 1237 bp, Homo Sapiens
cccatagagcaggcgggtaactaggatggaacagtaaagagagaaaaccctgtgacttgaagggagcccagggaaagaattatcagtggagacccagtcatggggcaggaaccagactggccagatagactggagttgggagacagtagctggctcataagatgcagatgaggcccacccaagagctctctggggcatgaggcattctcaccggcatcaacagtcatgtggaattccaaggtttgggacactagggcaagggaggatagggacagcttgctgtgtaaatagaaagaaggagctagggcccatctgcttaccgtttggggatcagcctgaactgtgtcgctgaagttggttcctcctgcaagctcatacagagcacgtcccagcaccgtggccacatctgccagggcctgtggtaggtgaggagggggctgaatggcccacctctcctatcctcaaatgctagcatcttcactgtgtgccccaggctcccacccagcctggctcagtgctaccttggcagtgtctgttacaaagttcaggtcctcttcagggctcagccattcgggatagctcacattaatgttctcagcagtgtcgtaaatactctggtaatatctgccaggaaagccggcatgagccttggctacatttagccagggctctgcccctttcctccctcaaatgctccttatgcagggactcagtatctcattttcagcatcagaagaaaggggtgagagacaatcaggatcccatattgcagaaggtgtggagaacagggaggtaggagtgagggtgaggtggttagtgaaaattaaagactttcctgacagacaaggtagaaaagctgaatgagctcagatctttaaacaaaggagagactcttctacatcatttgggctggagatatgggggatggctaagatgattttcagagaactctgccatgtatcatgagatcagttgtataactgttccaatgaacatttatatttagggtagctgggagcaggaggtgattagcaggtcttaggatcaggtctgctcactgatatataagaatacactgataaaatcaccatgatgatccttatggagccccaaggagatagatcttaaaagagaggctgagctccacagtcttaccatcagtaaatccctgtcccacacaaagtcaagtcagctacataatcaaatccaaaatgtgttcaaatgatgaatcttccaa

SEQ ID NO: 180388 - DNA, 968 bp, Homo Sapiens
ctttgtacaaaaaagttggattgaatgtttctcaaaaaattgtattttaaagcatcttgcagttaaatatattttattatgagaagtgggatgattttgtttctatcttttagaaaggaatgtatacttttgagaaatataacttttgaacttaaaagctgtgtgaaacttaccagagaatctttactaggaactgtcacatccattttgcaagtatttcagactaacgtttaaagtaaactgggaagggaagtaggccaggaagataaattgtattttactcaaagggtggggttttacagcttttctcattgagttgaaatttctgttaggagaaggggttgtgctagcgtttattcttttggtagttcctcacagctctgtacatacaggtaagttcacgctgttcgtaaagcttttaactggcagtagtgaatagttgggatatgaggagaattacatttgagacaagttcagaatatgcactacataagaataagcattttaattgtgccaagacctttggtttgaaaatcaagaaggagttatcgttgtccagcaacctgtgagtcttgtacattggttagtgtagaagttaatcccagtgcctctagagcacctttctgaagagttttctttttcttctttttaacataatggacaatcaacgaagtatgtaagaaccattactgtttgctagcctcctttaaagggaattctttattgagggctacaataaatatgcttattcaccttgggctgcttttaagctgtagatttaatattataaacgatctttaaggtgggtaatttctcagttgttcactgggtatgcatcaagagttttaactaaattttctattttccttaaattctagaaagcgaaattattattgacgatggacaatttggaatccacaatggtgttgaaactctggattctggatggctgacatgtcagactgaaa

SEQ ID NO: 180389 - DNA, 2620 bp, Homo Sapiens
  misc_feature (1966)..(1989): n is a, c, g, or t
  misc_feature (2082)..(2125): n is a, c, g, or t
ttggcttctttcctgcattatttagggtgtctgatgccatcaagtgttgcaggagaaacttcagtcttggctgttccttcttggagggaccactcagtagagcctctaagggacccaaatccttcagaccttttggagaacctggatgacagtgtgttttcgaagcggcatgcaaaactggagctggatgagaagagaaggaaaagatgggatattcagaggatcagggaacaaagaattttacagcgactgcagctcagaatgtataaaaagaaaggaattcaggaatctgagcctgaggttacctcatttttccctgagccagatgatgttgaaagtttgatgattacccccttcttgcctgttgtagcatttggacgaccattaccaaaattaactccacagaattttgagctaccctggttggatgagcgtagccgatgcagattggagatccagaagaagcaaacacctcaccggacgtgtaggaaatagctgtgctggcaagaaccctgtcttcagatagttgtagcatgccattcccgagagtggcagagacctgtatatgtgacctttgtcctcacatatgttatcactcgctgataataccctttcatacttccttgactttgttttcattactctgatttcacaaaaactctttcattcggctaattgtgagttatggagggtgattgggatttcttttcccttttttgggaaatgggctctcaagctaaagctataggatggcagattcagaagtttcaggggtctgtttctatacatttgcctatgttaaaggggtaaaagggctctcttcattagacatgtggaagatgaagcagccccttcctttagagctgtgcctgcatggcactcttctcaccctggtacaccctccttatagtgggtatagtgatttttaaccctaaaataaaacaaacaacctcaccatgagctttaggaccagaagaggaatgacaagtgaagcgatgaagcaagccatcttcacagagtagaaaagacatcggagagttggtagataactgtctgaaaagatagttgttcatttgaaactattctgtgatacagtcatgtgggaagggatgtttggctgtgattattttttcagttaatggataacaatttctttactgctcaaaaaccaaaatctttggaaaagaaagtggggatggttagtttcagaacaagttacagctgtaaacaaaagcacttagtatttgggatggcatgccaaaacctgtataaatgtccttgtatcacatcacttctcaagtattccttcattgggcttcatccttttagcagaactcttggtggtgggatagagacttagggagggtagggggagagtgtggaaataggtgcttcctttggctggcaaatgtctacatcttgaaacaaacagatgtacctaatgagcttctccattcactttgtaaaaataatttgtatgtgtaccatcttggtcctctcccctcccgttttgttaaaatatcaggatagcactcccaggccactttggtctcagtgtaagatccctattaactatctgaaaggaaaatagagccaagacctctggtctcaaatatataggaattgcctttctttagtcttcaggactattgtgtgaaaacaagtaggggtctaatctcctagaaggtaggggcttttatccttaaagagaatatgtccccagattattagcacttttagaggagaagccaaggtatgtagggtgtgtggctggcccatcagtggagcacgaagagagaatgggataccattgtgggaagagaagaaaagttcctcaggggcctcccactgctaaagttttttgtgagatgttgatctgtgcttcctggatttgacttttaaaggaattattctggcagcacatgtagtattcttggatgatcttgctgctcttatttctcctttnnnnnnnnnnnnnnnnnnnnnnnngctatgggttttcatttgtaactccatctgcttaggagagtgggctctctataagggaacctgctgtaaacttcattgcagcaaggatgtagnnnnnnnnnnnnnnnnnnnnnnnnnnnnnnnnnnnnnnnnnnnnttaaggaggagatttctagaaaaactgggccagattttctttgttctccatcattttaatgtggcaggctgttcagttttcttactcttacctatgtgatatttcttcgtaacgtgtccaaaaagaaaaaagacccaatcagtgtctcttgactttgttctttgatccctcagtttcttcttgatttcagcatgtgtcgggttcctaattttgggtatgagttagcaaatttaaccattgtgtttgtgccctacccaggggactccccagtttctgacttgaagtagactgagaagaatccacgaggtgctatctggccagatttaagtagattctatttcctttggttctccctctccctgaggacctcttattttattgtcccctcttctaggttaattctcctttgattgactttgttgagaaggaggttggacagtaaattagcaaggtttcaagtgcaaattacagtgtgttaaagtgtgggggggaaaa

SEQ ID NO: 180390 - DNA, 2234 bp, Homo Sapiens
ttggagaaaattttgtttagtgtcagtttaataaacataatttttttgttggtgtagaggatctttagatcctcagattgatacaccaggttttaaaaagaaaacatcacctgctgcagtaaaactcattgcatgaataaagaacaggttactttgcgggatcccaaacaaggtgtccaaaacaggcaccctgttttaagtaaattaccatattaatgcttttctttattgggagtgccgtttcctgatgggacacactaaatcttgcacacagtaggtgcccgataaataaatttgacttgatcaagatttttttgttgttgtcactaatctattttggataggatttgtacatttctgtagtcaatatttgtttaatgaccttatggattttacaacaaaaggagctggtgctgatgtaggagggctttatctttggattaataggcagccaaatgtacacggggcccagactcttgcctggtgccacgtcctccctccagcctgtaatcagaagcccttgtaaaccctcccttgcagtgagggctgaaaactccgatctgcctttgttccatgacaaaggagagattatcacgtgccctactggactgtgcatttcgtggcttgaaaaatcagtggtgaatgatgccactcagacgctgggacactgggagaaccttggttcttggccacagcactgagcttggcgaccagtgaggctgctgctggtgaaacttaacaccataacctctcgttgtcttttgtgaaatcgttccgacttcatggtgttttcttgaagtcattctgccttaaaggaaaaactcattttctttttcaatttaacacaaatattgtggccattttttagaagagttactatttcaaatttcaagggagaagataagactgcatttcccccttaaggaaaaggctaagttaccaaggctgtattaaattgagtatgtgaaagttacctagcaaatccaggatagacagtgacccaatgaattctagttccataagtctcagttacaatatttaaaaatccccatttttttgtgcaactttaaaatctccccctttctgggaaaatagaccttattgcaatgccattaagtcaatataatcttggaaactgaattagttaacctggtccttttttcctttgcaaagaaataaaaacaggagttatagttattgaataacttttttgttcttgttgccacttggcatttttgaggcatctctaggtagtttgttttgaaactaaagagaatgaccttggtgggttgagcaagaattcagaagttaatgatgttgggtaagagaacaatggtaagagagcaatctaagaatatatcacctactttaattttatatgagagtacatggaggtagctgtgatgtggaaatgtatccatgtaactttttatgtattttagatttattccagtgaaacaacaactggaacttcaagtaactcctcccagagtacttccaactctgggttggccccaaatccaactaatgccaccaccaaggcggctggtggtgccctgcagtcaacagccagtctcttcgtggtctcactctctcttctgcatctctactcttaagagactcaggccaagaaacgtcttctaaatttccccatcttctaaacccaatccaaatggcgtctggaagtccaatgtggcaaggaaaaacaggtcttcatcgaatctactaattccacaccttttattgacacagaaaatgttgagaatcccaaatttgattgatttgaagaacatgtgagaggtttgactagatgatggatgccaatattaaatctgctggagtttcatgtacaagatgaaggagaggcaacatccaaaatagttaagacatgatttccttgaatgtggcttgagaaatatggacacttaatactaccttgaaaataagaatagaaataaaggatgggattgtggaatggagattcagttttcatttggttcattaattctataagccataaaacaggtaatataaaaagcttccatgattctatttatatgtacatgagaaggaacttccaggtgttactgtaattcctcaacgtattgtttcgacagcactaatttaatgccgatatactctagatgaagttttacattgttgagctattgctgttctcttgggaactgaactcactttcctcctgaggctttggatttgacattgcatttgac

SEQ ID NO: 180391 - DNA, 1283 bp, Homo Sapiens
  misc_feature (601)..(664): n is a, c, g, or t
  misc_feature (1142)..(1159): n is a, c, g, or t
actttgtacaaaaaagttggggcttgagaaatttggacacttaatactaccttgaaaataagaatagaaataaaggatgggattgtggaatggagattcagttttcatttggttcattaattctataaggccataaaacaggtaatataaaaagcttccatgattctatttatatgtacatgagaaggaacttccaggtgttactgtaattcctcaacgtattgtttcgacagcactaatttaatgccgatatactctagatgaagttttacattgttgagctattgctgttctcttgggaactgaactcactttcctcctgaggctttggatttgacattgcatttgaccttttatgtagtaattgacatgtgccagggcaatgatgaatgagaatctacccccagatccaagcatcctgagcaactcttgattatccatattgagtcaaatggtaggcatttcctatcacctgtttccattcaacaagagcactacattcatttagctaaacggattccaaagagtagaattgcattgaccacgactaatttcaaaatgctttttattattattattttttagacagtctcactttgtnnnnnnnnnnnnnnnnnnnnnnnnnnnnnnnnnnnnnnnnnnnnnnnnnnnnnnnnnnnnnnnncctgccaattttcaaacataccgtaaagattattttcaggtgccattttatagtatagcagcagggcttttactctgtgtatgcacagatgcagtctggggcatggtttgtgtgctggactttctcatggccatcatcagtatgcttatggatttgatgacaggcatagcctgggcatatcacctcattggtaaagggctagagcctttcttttttatggcacttctttttttgagatagggtcttactctgtcaccctggctagagtacactggtacaatcacggctcaatgtaggcttaacctcctgggctcaggtgtatgtcactatgcccggctactttttgtattttttggtagagacggcttcgccacgttgcccaggctgcaagcgatatgcctaggctcaagcgatctgcccacctcaacttccggaagtgctgagattacaggtgtgagccactgcacccagcctttgnnnnnnnnnnnnnnnnnngagaggtatgattctttctagagattttttctcatggctactattagatcagaatgggtgattggagattattagattctaggttaacttctaccactttaccctaatacataaaaccttttcc

SEQ ID NO: 180392 - DNA, 1138 bp, Homo Sapiens
  misc_feature (92)..(148): n is a, c, g, or t
actttgtacaaaaaagttggggccgagtcgtcgtcgccgcggccatcaggcacttctccttcctgcccttgtatgaagaaggatgtgtttgnnnnnnnnnnnnnnnnnnnnnnnnnnnnnnnnnnnnnnnnnnnnnnnnnnnnnnnnngctagagcaatgtatcttaggctcacttaaggaagctgtagagatgagcccaaggagggaaaccagaagagccccccaggctcaccagttgtttgttggctccctacaaacatgtcattcaagtggctaatcttacaacagcacaaattcatctaaccagagatactctattatagcaaagaagaatgataatttcattgagccatcctgttttacagcacccaacagaatcccttcaaagcctcgtggtctgacaccctatgctacgtgacttgtgacccatccatttgtcatgttcttcgggaatgtggctaaggggctaagatgtgacttgaaaagaaaggtagaacaagatcatctcaaatttattatcaaggaatagttcagaaaacgacttcagaccacagagacagcagaacagatggtccggcatggatagagcatcagacactcacagactgtgccaacaagagccatcgagtcaaaacagccaaaggaaggagggtcatggaatgggttctctcacaccaaactgatgcccagaggccctcagcatgaataacaaaggcaaccagacccacaagccatactgagtggatacaaaacctatacctaggctgacatcccaaatgtgtgtggcaagttagatgatgatggcacaaaagacagaacaccttgcttctggccattgtcagctcttggaagagagcacacttttagaggagcagctgcaaggagcctgagaacaaaactggaaatgtctgttatgaaagccttcacaggaaattctgcaagtggcaacgtgggtccattccgtgtgtgtcactagagctggcgcaagcccatggccatggtgaggcagcgtttccactggaactaatctgatacctgcaccagctcttgcaactgtgcagtgttcccactgcaaactacggatggggtaaaagactgctcacctcctatttctcatctaatctcacacactctgtt

SEQ ID NO: 180393 - DNA, 941 bp, Homo Sapiens
  misc_feature (353)..(367): n is a, c, g, or t
ttggctgaatcatactctgatttctaaagttttattagttcaacgaactttgtaaatattatatttatgtgggactgtattctctccaccccgaccaccaagaaattaggttggctttgtgttttctattttagacttctggaggagaaggagcagggagaataaagaggaagcagaagggctagagggatataatgtcaagaggagagtattggttctagactgattatgatatagctcctggagagcccttgtgtgccttattctgactgtctttaatcctagctctgcctccatttatttggggctttctccatgttccaaccaggtacagttaccatatttgcctaagnnnnnnnnnnnnnnncagaggatatttgaaattgggattattccagtttcaggtgattattaatctatgagcctttgcttttgtgtcagtctttttccccttcttgtcttgatgaaactgtatagacatgtgggttatgttttcagtagctaacatgacatactagtcagtattaatgaactaataggggctctgactcctcccaactggcttacatgtcaatagctttctgcagatagtatctttgcctgctgtttaatccaggggtcttgtccaatggtgggactgtcacagggagatggggaaagaggttgttgaagagttgtttaaaggtgcacagatattgtatggaatgatgacacaaaggtagttacttagtatatcctgatttccagtatttgttttacttttttttaaaaaatttatgctttaaaaggtactcttcattttcttgtgttgtacagatttcaaatgaagtttttctacatatcccagctgggcttactggcttcatgcttttcctgaactctacttccagaaaaccaaaaagtaagctgggattttggtagtgttaaaaaatgtccttgtc

SEQ ID NO: 180394 - DNA, 1105 bp, Homo Sapiens
  misc_feature (108)..(126): n is a, c, g, or t
  misc_feature (1025)..(1035): n is a, c, g, or t
ttggggcgcggcccctgagaggacgaacggtttggggccgcctcctccccctccattcgattggggggagaaggggcgacaatgggacgaacgatcattatttggcannnnnnnnnnnnnnnnnnngttcgttgattaaacgtatatttagaagtgcacttagtccagaaccgtcccttctctttctattccccagtgaactgaggtttttaccgatttatagagcagtcaaatccgaagtgctcgagtgcttagaaaccccctctggtgcttggttgaacaagggaatcacaagaaaacgaaaatgcaaaaactgaacttcgggggtcgttctgtgccttccagcatcttgtacagcaaatcctgactcgtgtctttttacccccaagatatctgtcttcagtagcgactgaatctgccactctcagaataagttccttgcatttattccaaataatctcgtttactctcacctgtttatgcaaattgtataaggtttcttatgcccaagcttgaaaaatgatttcccagtagacaagaggcggctacctatcctacagttacggtatttatttacataagaagatcttacaggagttctttgcttgaatccgttctaacacccgcggcagctgcacgcgctcacagaaggtggaggttacttgcccaggtacagacgacctcggggcagtgacgagcaaagaccagagactgctgagccctcgcatctgggtggcggaattgcctgcggggttttgcccttggtttactgaggggggtcttggttgctgctgaagccccccaccccttctaaagtgcaatgcaaaagggacatcatgtatatgcagcgtttgtttggaattttctttgcttttgttttctttgcggttgttctgtgtgcatggattccacacctctgccgtacgtagatccgtcagcgggcattattaccgtgtcttgtaaagggtcggttttgttatgcaacacgcagaatgctgtttttagccttgttttaccagagttgnnnnnnnnnnncagttatttcttcaagggaaactaaatgatttagttggagcaaagctttaagtgtgttgggcgtgcttct

SEQ ID NO: 180395 - DNA, 917 bp, Homo Sapiens
  misc_feature (559)..(571): n is a, c, g, or t
ttggccttcgtctcagctgtgcgggaacggccgagggtaacatcccgggctcgcgggaggctgtcggggtaatggccacacgctgacagaaccagccgagtggaaaaggggagcgaagccgttcctctgcacccttccccaggcctgaggccttcccgcttggtgctgccgccgccactgccggctgaggaggggcgatgagttggttcaacgcctcccagctctccagcttcgctaagcaggccctgtcccaggcccagaagtctattgacagggttctggacatccaggaagaggagccgagcatctgggccgagaccattccgtatggagagccgggaataagttcccctgtcagtggaggatgggatacttcaacctgggggttgaaatcaaacactgaacctcagagtccaccaatagcctctcctaaagcaatcacaaagccagttcggaggactgtggtcgatgaatctgaaaatttcttcagtgcctttctctcgccaactgatgtccagaccattcagaagagtccagtggtatcaaaacctccgtctcnnnnnnnnnnnnncaaactcttatttaatttttagttaaaattaaaacactagtacttcagaatatagatacaagtacaccatcttgaagaatttggagtttttcagggcaattcaaatgacctcattttttgttctttttgtattccagacagtgtttctgtcattggatctctgattggtagtgttaataaatattctttcagtgtgagccagattcataaaattaattttcttcattttagtagtaaaaagtagtctaatagctttttgtcagcttgatttttttgtgtgtgtaatattcaagggcagaatgacaggacagataagcaataagaaatgtatagaattagaaaatat

SEQ ID NO: 180396 - DNA, 1200 bp, Homo Sapiens
  misc_feature (533)..(545): n is a, c, g, or t
  misc_feature (801)..(840): n is a, c, g, or t
ttggatctctccccagatcagctggaccagctgctgcaggaagctgttggcaaaaaagaatccgagtctgtttccaaggaggagaaggagcagaactatgacttaactgaagtctcagagagcatgaaagctttcatatccaaagtctcaacccacaagggagcagagctgcctcgagaaccttctgaggctccaatcacttttgatgcagattcttttcttaattattttgataagattttagggccaaggcctaatgagtcagattctgatgatctggatgatgaagactttgaatgtttagatagtgatgatgacttggactttgaaacacacgaacctggcgaagaggcttccctgaaaggaacacttgataatctcaagtcatacatggcccagatggaccaggaactagcacacacctgcatcagcaaaagtttcaccactaggaaccaagtggtatgtgtgtttttaacctctttctctttctgagtctagtatgtcagatagctaaaaccatattttatcatagnnnnnnnnnnnnnggtgtgtgagatttgaaataaataagaatgttaattgttttcctaactctggtaggataaaggatcatagacttaattttccaaaacataagcttcattatattacttattctacgttatctatcaggatttaaaataaaaagtcatataatatgctcaaattagaatgcgattgtacactactacttcttaaatacattttttttcaaaagtagtttaaaaaaactacagcttaaatggattttaaaaaagagannnnnnnnnnnnnnnnnnnnnnnnnnnnnnnnnnnnnnnnccacagtggattaaaacaaaataacataagtaaataaacaggatcttaaacattcaaataactttccagttttaacagtttattttgtatttttccctaatttagagccaaatttaggattcaccttccgtttatgttttcatcctagtttttaatgccaccactgtctaatcctaaacagaggtattatggaaagagcaagaaccctggagtcttatgggttagggtttgaagtctagctcagctgtccactgtgaatgtatctataaaccagtaatcctcatatcataaaattaacatgagaaccaaattagacagcagtaaaacctacaataggcccttaattaatgttaattctcc

SEQ ID NO: 180397 - DNA, 1126 bp, Homo Sapiens
  misc_feature (118)..(161): n is a, c, g, or t
ttgggtacagactgcgagcttgcactcaggcagcctagatttcctgcttggcagctctgtggccctaggcaagtccctcaggtcactgagcctcggtttccacaattgtcatttgggnnnnnnnnnnnnnnnnnnnnnnnnnnnnnnnnnnnnnnnnnnnngaatgtgcataaatgtgccactactctaagcgctcaggagtgactcttaggactcttatataactttccaaaataaaagcagcaggaaagccctccaaatatcatttgcttgactttctctggaaaagagttttaaagatcaggatgcagatattatggggtaacataggggacctgatgggacaaacttgctctttggggtttacatcttacgtggccagcatttcattcttcagcccacctgagggactgccttagcctacctgtgagtgcaggtgtgaattatcagcactgcagggatggcgctactcatggccagtcttgcctgccttttattgtagggttttctagccaaggcttccttgaactgcagttattcctgagcttttattcaggacctcctgttggagggcctgagcctggagaaacctaagatgtgatgcctgccctccaggagccctggccactctgggggatgagtctgtagccttctacaactccaggaggcagcacacttaggggagggttgaaattgcagacgctgcagctggctgcctgggcgtgagtcccaagtggccccagtccttagcttctttgttcctcattttcatctgtaaaatggcagtagggatgtctaccaggggatgagttaatgcatctaatgtgcatttcactgcctagcccccagcaagggctcagtaattgttcactattcacatagtaaaaggggtggattcagcaaatattcacagggatggtgaacaagacaaagcccctgctattctgggcgggacagattgtgattgtgatacaaacacagtcattttgagttgtgagatgtgttgtgaagtcaggtgacagggaagacctagaaggagagagaggccttccaggtgggaggagaagacaaggaaggggccacgggtacaaggcttcccaggttgagacatagaaagaggcgctgg

SEQ ID NO: 180398 - DNA, 686 bp, Homo Sapiens
ttggtacaggcatgagctccatgaccggccctttctagctttttgatgtggacattagtgctataaatttccctcttttcttggtttctagtgattattttattctatcttggtgagtagtcagggaaataatcttaaatttacaatcaacttatagtttaaatctaaataattatgtgagaagaaccctttgttatttgaaggggatgtttgaagattttgtaaccgtgccttttaggtagtcctaaatttctaattgtagttaaaaacatgccattttcatttctaacattttaagtatatggtttagaagtggtaagtatagttctattttttttgcaataggttttagataatttttgtcttacaaaagtaaaagtgaatactcattaattctgaaacaagttagttagcttgctttagttagatagcaagagaagggtccctggaaagtccctggcccttgggtcagtgtctcatccctgcataacataaaaggaatcctggaaaaaatcaagctgcagacactaacaaggtagctagcacatggtgttgtgcttggagacctgcccatggctgcacagacagaaaaacctctggcacatttggataaaaacttgtacaaacctccagctcactgagataagggaacaagaccgacctggcatagaaatgcctttgtttgt

SEQ ID NO: 180399 - DNA, 760 bp, Homo Sapiens
gcattatccaccccggccggcccaacaaaggcatttctgggctaagtcgttcttgttcctttatctgagtgagctggaggtttgtacaagtttttatcccaatgggccagaggtttttctatctgtgcagccacgggcatgtctccaagcacaacaacatatgttaattcccttgttagtgtctgcagcttgatttttccaggcttctttatatgttatgcagggatgaggcactgaccagggactttccagggactcttctcttcctatctacctaaggcaagctaactaacttctttcataagtaatgagtattcacttttacttttgtaagacacaaattatctaaaacctactgcaaaacaatagaactatactaaccactttaaaccctatacttaaaatgtcagaaatgacaatggctgggttttactacaattagaaatttaagactaactaaaaggcacagttagaaaatctttcaaacatcaccttcaaataacaaagggttcttctcacacaattatatggatttaaactatatgttgattgtaaatttaagattatttccctgatgactcaccaagatagaataaaataatcactggaaaccaagaaaagagggaaatttatagcactaatgtccacatcaaaaagatagaaagggctgggtgtggtggctcatgcctgtagttccagcactttgggaggctggggtagtgctaaagtgcacttaaggccccaacttttttgtacaaag

SEQ ID NO: 180400 - DNA, 1457 bp, Homo Sapiens
  misc_feature (560)..(606): n is a, c, g, or t
ttggagctcacttcattccaggtgttgtctggtacatggtgaaagatgctttctgagacttgaaaagagtcgtatctcatctacagcctattttctttttcaggtacagcaatcatttgaaactccaagggccaaagctcaaatgcccaccatagaacgactgtccatgacaagatatttctacctctttcctggcaattgaaaatggttaagtattgagagttgttggtggtatgtgaaataaataagagagtgatattggtggttaagttcaatgacaaatgacagctgagtacttggatggtcaaattggtgtttttgttgatatagtctggtgattatctgctacttctttccgacttacatgtatttggattcctccaactctacaattaatcaggcaatcaatcaatcaatcaaggaggtaaggaaaaccgcagcagaatgtgatgatgaaaaaccaaggatagtaattattaaaatagaaacatgctcatgcttccattactatttatattcatttatctctcatagtctttctcttttattcccctttcttnnnnnnnnnnnnnnnnnnnnnnnnnnnnnnnnnnnnnnnnnnnnnnncactaagtagccaaacattgcatcaaaccctaaacaaaacagagtaaacaaaggagctaactctggagaaagcagcattttgatcctctgagtgaggatgtcacagcaaataccacattactgacatccagataccattaccagatggtacagaatacatcctacactgtagagtttgtgttgatccaggctctggttctcagactgttctcacaatgcagatcaccaatcactcagggttggcttttgaatcttcaatcacagtccagaagttccttcaagctcccatgtaacttttgttattattttgaccaaaatattatagaatgggtacattgagtctggactaaatgattactttcttcactcataatagctttatttaacactagactataagactattatcaatctccctctaagatacatacttaaaattatattttatagtgaaatgtataaagttgttctcaatacttccaacatttaccacataatttttactcttggtttctgacacttcagtcacaatattgcatcatttcagcataacagctttcagtgcctaatccatccagtggggctgcatttggacattgaattgtttgttgactaatatttgccaacactaactgtgcaccaggttttgttctagatgcttggaatatgccaattaacaacgtaaatagatttcttacactctgaaagcttatattctagtgagtagaaacagactctgaagacataaagtggtaaatatatcacaggccagagagcaaaaaaaggtaaaggaaaataaaggaagacaaggaaaacacagaatgatggatgctgtactcctatagatattt

SEQ ID NO: 180401 - DNA, 2365 bp, Homo Sapiens
ttggtgaaagccatttattttattaaattggaaaaaagggtttacttttaccaactttgtgaatattacttggcagatttttaatcctgggctagttttatccagctgctatatattgagacaatgtgtttaggttttaatgatagtctatcccatacataatgctggttattgtctgcccttattccacttgccttcagttagtccacaatactgctgttggtttggtaatttctttgctgtattgcccctagaatagagtccagactcctttcatggcatccaagtcccttcataagctgtcttcaaactgcctttgaggcttcatctccaccatgccgtgccgtgcaccagccccactggacttctcacctttccactgactgtgctgcacccttcaactttgccattcctgtgtgctttttctgtgaaggcttccctcatgccagtgtttatcttccttcctgtgttctcttagcgttttgtgctttcatctcttaaacatgaccatggccttatatatttacgtatacatgtctctctcccttgtttcgacctacctgggataagtgctttgtatagctttttatttttgtattctcagacttctaagtctgtctagccaccaaattgaatttactaatcactgggatattagctgtaagatcattgcagccttttaacttgtgaccctaaaataggaaacctttaatattttgatttaaggaattgattttaattgttttagaaaccactcaagaaggttattattgaagaaactggtaatttgatacagactattgatgtgccagatagcactactgctgctgctccagagaataatcctattaatctagcaaatgtaatagcagccacaggcaccacaagtaagaagaattcaagccaagatgacctttttcccacaagtgatactccagagcaaaagtattgaaaatagaagaagtcagtgatacttcatccctgcaacctcaagccagtttgaagcaggatgtatgtcagtcttacagcgagaaaatgcccatagagatagaacaaaaacctgctcagtttgccacaactgttcttcctccaattcctgcaaactcgttccagctcgaatctgatttcagacaattgaaaagttctccagatatgttgtatcagtatttaaagcaaattgaaccatctttgtatcctaagttgtttcagaaaaatctggatccagatgtattcaaccagatcgttaaaattctgcatgacttttacattgagaaagaaaagccattactcatctttgaaatcttacaaagactttctgaactaaaaaggtttgatatggcagtgatgtttatgtcagaaacagagaaaaagattgcacgtgcattatttaatcacatagacaagtcaggattgaaggatagttctgtcgaagaactcaagaaaagatacggtggttgatttccatttttgctgaaataattgtttttgactttcatatgtaaattttttctactgaaagtgttttgctttttaagaaaatgaaattatatagcaggaaaggactatctttgaacataagttaattaactataaggtgaattgtgatttaactagtgagaattgtattcaagtgaactctgtttttctgaaaataaaaatataaacaatgagatacatttgtaaggatcagcattttattttatgagtcattttaaatgttaaatttagatacattcttcagtgacccataaatgtaacattatttttatattttcatgagtttttgtaaccacttgccaaagctgcttcattagcatatgaataattacctttgtaaagaggaagttaaatagatagtgagatcctttctttataaaacttttaaatgttattgtgccaattcactaacatgaagttatttagttgcagggtatgtatgtatttttagtatttatgttgaaagaaagaagacttttaactagactttcaaactaggttaattgaagtatcacagtattcttacattttaatgccatagggttttttcccttaagatatccatgttacataccagttaaggacagataatctaatgcaaggtgtaaaaatgtaaaaattagtaatgtttaaagtactaattagcatatagcccatatgtatttgttggatgtgagtgtagcgtttgtaaacttttgaaagtagggctagaactctgctcatccctgtactctgcatagtacctagcacagacgtttgcacatagttaggtgctcaactgatacttataaaatttaattgaatttgacgcaagaatcatattaaggtaaatgtttaaagtagcagcctagcaaatttttgggcatgg

SEQ ID NO: 180402 - DNA, 1955 bp, Homo Sapiens
  misc_feature (864)..(879): n is a, c, g, or t
gccccaaagtatgactttcttgtctatttcatttggttaaaaaatgcacacacagaggatgaagagatgatttgggggctagagatgactgtgccctggaaagtccatggaagaagcttgaagtgagcaggaacacaaaagggaggagagcagaaacgggggaccgactgactcagggcagcgctgacgggaacatctgcttggggtggggcggggcgggggtgtgctctctgttccatttgttagttacaggaagctaccaaggatgcacatggtcaagtcactttctacttcccaagttcctccttataacctgagccaaacaatttcaacaatgacaatccattgccccttcagcccagcaggcgactctgacagggaggtgtgaccaccagtctcaaggctgagtggggccttcttgctggctctcgcgctttctgggagtcctgggtgccttggcccagggcagtggtgacagcagggtggaggcagaggtggccccggggacagtgaccctatataaggaagggggcagtgccaggagagattcgtttggagattggttacaaggaagcgagggagagcagaggcagagccctttttcagatacaacatacttacttttcaaatgaacaaaaggcaatttctatgttttaaaaatataagccccaaaaacaatgacacaaaattcatttggttaattcatgtaaaggaaaaaacagcaacaccaccacacaaacaggaaagtgggagtatgattaggaggggtgagatgaaaactattttacagtaacatttccaccaaaagactgtcctaagaacacgctgtcaatacagttcacagggaaaaagcaaatgtggtannnnnnnnnnnnnnnnaaaagctccctggtcccaggtgttttgcagttttcaaggtcttatctgctaaaggaatgccctttaggtcacagcaggtcctctgcagtttggtggtggcacaagagaaaacataaaagaaaccaagactcagggaaactgccattcccccagtctgtttctgcatgacagtggggcccattcctgtctcgaagcatcttcttgttccaaatatgatgtctgtttagagtgggtctcaatggaccaggctgagctgcccctctgtctctgcctcctcctgctcagccctgaccatctctgagaggatgctaaggtccccctcccaccgaactagactttgagtctaagctggacaatgagtaaaacgtaaacatagccttttacattgattttgcttttaaggggaaaacgaataaatgacagcagatatatggaaaacccagccagcgaccatgggaataggggtatatggtcctcccctacaaaacgctgatcaaaatatcacccccggcccagaagtagcagctgtgccttcatggtcacctgaatcccagtctcttctactgcctggtgcctggaaatcagtggatctattaataagttaaatattcaaatcaagacaaaaatcaatgaaccaggttatctgttctcaatgactcttccaagatgtcagagagaaggccttgaagacaagtgtttagacgacacgcatgagaccttcgcatctggcccgggctgcggactcacaccttttccctccatctggattgcctttcatgttctcttgagttcacgtggaaagtaataatccagagggaagtgcgcatgctggactacagaagagtctgggacaacacacttgccttgggggagacacaacctccaactaagaggcattcactggggtttgcggatgtcagttataaacagaacttttctttaaaaagtaccagtctaaatgtaaactataaaacactttaactataaaacgtagccagaaatatgcttaagtatccacagtcaattgtttagtttactcatttaaaatgtgactgttttgatagcttagaagccaa

SEQ ID NO: 180403 - DNA, 1619 bp, Homo Sapiens
ttggcaaaacagtcaccttttaaatgagtaaactaaacaattgactgtggatacttaagcatatttctggctacgttttatagttaaagtgttttatagtttacatttagactggtactttttaaagaaaagttctgtttataactgacatccgcaaaccccagtgaatgcctcttagttggaggttgtgtcttccccaaggcaagtgtgttgtcccagactcttctgtagtccagcatgcgcacttccctctggattattactttccacgtgaactcaagagaacatgaaaggcaatccagatggagggaaaaggtgtgagtccgcagcccgggccagatgcgaaggtctcatgcgtgtcgtctaaacacttgtcttcaaggccttctctctgacatcttggaagagtcattgagaacagataacctggttcattgatttttgtcttgatttgaatatttaacttattaatagatccactgatttccaggcaccaggcagtagaagagactgggattcaggtgaccatgaaggcacagctgctacttctgggccgggggtgatattttgatcagcgttttgtaggggaggaccatatacccctattcccatggtcgctggctgggttttccatatatctgctgtcatttattcgttttccccttttgtgttcctgctcacttcaagcttcttccatggactttccagggcacagtcatctctagcccccaaatcatctcttcatcctctgtgtgtgcatttttttaaccaaatgaaatagacaagaaagtcatactttggggcagcagaatttctaatttagtagaatcactgtatagagatagatgttgatatatatgtttgtgtatatatatcaaaccaaattggataggagaagtatagctttacagatgaggagaaggagctctttagaggtcggagtcaagactggtgtcttggacgtgcatgggctgtgtcccaggccactccgcacacatggggctgaggcgtggcgccgggcccttgtcatccacctcaccacggcagagccagcaggccctgtagggtgctgctgctgtctcactgggtcccagcttcaagcgcatcagtgggtgacgggggcaacaaatcagagtgactggaagtttccatcccgttttgctttgaccacgtgtactgagctgcagcctctgatactctgtcacgtttccaaaaatggtatccattaggatagaaagagaatggatctgcagaaatgtttacctttcaactgctcatgaattcaggacactggatagaaagactcactccccaaaatgagaacagggaagaggagacccggcgacactaagtcaccaggtccaaggaacgtggctccctccccagggtcatctcacctagatctttctctcccaggtcatctcagctcaatctcaataaccctatgaaagccctggtctgttgtgttccttcaccgtacagtttctgtaataaaaagtgttaatccatgttaatctgtgtgaaaattattgcgtgcaacagtattttctcgtgtacctctttttcctatgtgaattgtccctcttttttaatttataaatgtctacttttgttttttt

SEQ ID NO: 180404 - DNA, 112 bp, Homo Sapiens
ttggttaaagacctgatctgtgagtctccaagctacaaaaatcttagaataacacttagataatactggcctctgtaaagaatttatgactaacatctaacatgagtgcaac

SEQ ID NO: 180405 - DNA, 945 bp, Homo Sapiens
ttgggtcacacagtggtaagggggagtgctgggatttaaaccagacctgcagggcagaaacttgtactctttctgccataccacccaaatgtggcagcttccccaaagctgagcatctcttatttcaggcatttcatgcttaatttattgaaaatgtccattctcatattgctaaaagttcaaatattgctagagagcagaaaatagtggccatggttaattagaagctggaagaacaataagaaatccaaaattagttgacaattcctaaacgtcacaacttgatgaagcctggagacactctgtttcttctaggcaatggctgtgccctatcttctgagaagaaagttcagtaattccctgaaaagtcaaggtaagagccctctgctcccccacccccatgggcctgggaaatgagcttcggggaggaaaatgaccagtcgcagctctgtgtgtttcttcattatctgtgggacatatctcatgtcctgactcccaaaaaacattcccagtgccgctcgggccaccctcaggacccagcaagttggtgttctggacagctggaacttgctgctttaagcgtgcaaagggggccctggtggcagcggtggtggtggtagtggtttccatggttttctacataaattgtcctaacgtggtacacagttcctggccttctagaaagtacggctcatcatttagccttccttgaaggcttggtggtgacaaggacattagctttgtcctggacgaacgggatgtgaggcctccccagcacgtggccgggctcttggggtatctgtgtgctcatctcattcactcaccttgtgacccaaccactgctcaccagaagctggtagctcctcccccattcagagtcccgtccctctgctgtcgagctgtttcaaggccccagacattgttggactgatctcctgttgtccc

SEQ ID NO: 180406 - DNA, 1633 bp, Homo Sapiens
  misc_feature (743)..(763): n is a, c, g, or t
  misc_feature (785)..(1042): n is a, c, g, or t
  misc_feature (1414)..(1427): n is a, c, g, or t
tacaaaaaagttggcaccttcacccaaagtgccatggttctgatggtggcagttccatctccctgacatcaggaagcttttctcgatcagagcagagcggggcctgcctgccctcgtgtcactggatttctttctcttataatcagctgaaacagagttctcaaagaacagtaaactcaggttcagaggtattatggaataagaatggtttcatagtttggcttttctatataattcctccctctcaaactgaaatattcatttttttagtggagtatttgactagagagaaggtaaggcagaaatacagtctacactggcttttaaaaatgtaaagccaatttccaaccggaccccaaatagtacaggttgaacattccgttccaacaatccaaaaccccaaatgctccaaaatcttaaactttgagttccagcattccgtcagaagtggaaaattttacacctgacctcatttgacaggtggcagttacagtgcaatcaaaactttgttccatgcccaagattattaaaaatattggataaaattaccttcaagctatgttgtataaggtgtatataaaacaaatgaattttgtgtttagacttgggtctactcccaagatacctcattatatatatacaaaaatccccaaatccaaaaacatttgaaacacttctggtcccacacattttggataagggatatttgacctatatctaattatataataagaaaaatgtannnnnnnnnnnnnnnnnnnnngagatggagtttcactcttgtnnnnnnnnnnnnnnnnnnnnnnnnnnnnnnnnnnnnnnnnnnnnnnnnnnnnnnnnnnnnnnnnnnnnnnnnnnnnnnnnnnnnnnnnnnnnnnnnnnnnnnnnnnnnnnnnnnnnnnnnnnnnnnnnnnnnnnnnnnnnnnnnnnnnnnnnnnnnnnnnnnnnnnnnnnnnnnnnnnnnnnnnnnnnnnnnnnnnnnnnnnnnnnnnnnnnnnnnnnnnnnnnnnnnnnnnnnnnnnnnnnnnnnnnnnnnnnnnnnagaaaatgtactttctttctcagaaatacttttaaaaaaaattgaagggtgaggagaaaaacatcttggagaagaggacccattaaaactttaaatatctgtgggaaccatttttcctgattttcccttttttaacatcatggcaaagatgggtttttttccaacaaaatttaatttaatatctttccacttgaagattttaggtttgttttcaatacttaatgaatataaaactaaaggagaaaagccaacctgaaataatttaaactttatatgaacatttcgataagagtttgtggattttttctgtagataatatatttgatccggaactcaagtgcatggaaacatgattttgatttttaaaatctnnnnnnnnnnnnnnttaaaatcatgcttccctctattgcagtatcagttatttagtcacagaatggtattttatgtaaattaaaattagtgaatgcaatgcacgtaactggttttggaatgggaatgtgcagtgctttatgtttgggggagttggagccggggtatcttttcatcaattagaagaaagtttgaacttctgattacctttatgttggtttc

SEQ ID NO: 180407 - DNA, 1066 bp, Homo Sapiens
ttggattttgttattgaaattgtcaagatagaacaggaggccatacttccttaccttgtggacttctccatagctacttagtgtccctgtgacatggcagccagcttcccctagggctagtcatccaaaaggaatcaaggaggaagccatgatgcatttaggaactagtcacacaccatcacctccactgcatgtattcattagaaacaagcccctatgtccagccaatagactgggtgcttttggagggaggaatgttgaaggatttgtggacatattttaaaaccaccacagcactcactggaaaatgctaaaaagcaggaagaaagagaacagaacccatccgcagtcccatagctaacataccagaatcttttcttctcgtcttttggaaagtgtaggtctgtgcacctacatattaaacagccatcttggtggcttctgagatccctctgcaggcttctctgaaatgttttctaaacaccagggacctactgaagctctcataccctggaaaggagcagtcattaccttcaggaactgcttcctcacagggatcattaatgagggctctgggtttctcccctcctggcctccatagcccagaacgtcatggccgggaatggccggggcatcagccatgagctcatcagcctggagatcacctcccctgaggttccagacctgaccatcattgaccttcccggcatcaccagggtggctgtggacaaccagccccgagacatcggactgcagatcaaggctctcatcaagaagtacatccagaggcagcagacgatcaacttggtggtggttccctgtaacgtggacattgccaccacggaggcgctgagcatggcccatgaggtggacccggaaggggacaggaccatcggtatcctgaccaaaccagatctaatggacaggggcactgagaaaagcgtcatgaatgtggtgcggaacctcacgtaccccctcaagaagggctacatgattgtgaagtgccggggccagcaggagatcacaaacaggctgagcttggcagagcaaccaagaaagaaattac

SEQ ID NO: 180408 - DNA, 850 bp, Homo Sapiens
tccatggcgtacatcttggcctttgaagggcttcctgctgctcgggcgtcaggggaggcagccccagcttggcggctgtgctctgcccgttctccatcttgatggagtctgtgccctcccagagaacacaggcctctctcgggccacacgagccctgaagagggctccagctcacttccacacactcttgcatgggctttgcctggcccactgggagaagccaggagcagaccccactggcaccctagccaggtgggcctggggaccaagaggcccttgggcagtcacagccactgcagacccaagctgatgccaaccaggattatgtttacgtccctcctgtcaaaatccatctctaagctttttgcagagggaagaacgcagctgtgtgagcagggaggcatggctagcaggcccatcagagtgtgggatgggcaaacagcatgcctgcgcctgtcctccagctcagcaagcacaaagatcactggcccaccaaccgggccctccgagacttccagacacagccttgagggacagcagagaagagagaagggtccccagcacagaagtgatgagcaaggacagagggacacaggaggcaggaagggacaggctggcccaagccccaagaaccccctcctgcctgccaagtgctgggatgctggcccaggctcaaagggcaggaagccctggagacccctccccaggcaaccagagccccaaccagtccctgaaggtcaaaggctggctgtgggtggcaccaggtgccccagtccggctcacaccaggcctgtcctaatcaccctcagcaccaggtgccccagtccggctcacactaggcctgtcccaa

SEQ ID NO: 180409 - DNA, 1379 bp, Homo Sapiens
  misc_feature (275)..(289): n is a, c, g, or t
ctttgtacaaaaaagttggcttatagtccaatacaaatgactatttttactttaaaaggcacagctgtcctggtgggaaatgaaacctgcagcagttcaggatgactaatgaaagcaattagcttgaacatttagaaaaaattcatatatgatctaaatttttatattatcatttctgtgccttctaattcctgcatcctgttcaaaacatctttccagacattaacttacacattgtataaaaccgaccaaaatgatttcctaaagttcatgcnnnnnnnnnnnnnnncaacctaattttctgttaatataaaagaaacttcagtttactgaccgtgaaacagactatgtactgacatccagggtaaagtaaaagacttttaaatattggtcattaaaggacaggagctaagctagcaaagcaaaacatctttagcactttgcagatctcaagcagttaaccaggctctgattcccttccactgttttatgaattaattccagttcttttcatgtatctttgaacctaagattatgaagtaatttccctattagggactagaatgacttcagttttttcatttgataaaaatcagaactgctacctttcccttttttaatgatgcaaaatgtagatgagtgcattaaggtttgtaagatctttatcattttatgtcattcattgaaaattgaaatgttcattctttttaatgttttcctatttccttttgcctagcatctgactttggtgttttaagttctgtagttccatgacatcattgtttgctgttgtgttacagagagagaaggaacctcacctgtggctcagctcaccccacatccgtttctcattacgtgtaaataaactgtcagagctgatgttacagcttttacagtttaaagcattcccctcgtctctagttccttttttcttgtttacatgttttgggcactttccctcattcaccaccttcctttgtttcatagaaaataacttgttacaaaatcagttcaattctaatgtggacatagtggcatgttcataattagacccatataggggacactgagctttaaatcgttgattctaaactctatacattaaaaaaattcagcccaggcccctcaaagcctgagaaaatttaatttgctcttaatttaatgttccaaaactcactcttggaaaaatgcctgttggaaaactacaggtgggtcacatgtgggggctgtctccgtgacactcaggattccagtcagaacctaatcctcatatctattgcctacaaaaatagaccaagaatgttgctgctcttttataatcctttaaatatttaacattcaagttttctttgtcttaaattcagcctcttcctaaaagc

SEQ ID NO: 180410 - DNA, 1544 bp, Homo Sapiens
tttcagccagcctgctattgaggctgacagtgatttgcctcaagaacaagtgttttaggtttggagagccctgggttaatgtacaggacccaccacttacttgttctgggaccctgagtggatttacctgtccaaatctgttcagctatgaaatgtatctaaggtagcactgacctcgtgaggggttgtcaggagtaaatgaatgaacgcagcaaagccccttgcattgggagtggctcatgatgccgatgcagttatgttccacttgctgggttagacatgtccctttgtggatggtaatctcctcagaaacacacagaaatagctgtgatactctgccctgtattacaggtgaggaaactggctcagacaggtcatgtaacttgtccaagttccacagctgtggggtgaatttcccatcattgtcccatactcttacttttgtgttttgtcctgtcaacacgtgatggcttttgtcttgagccaaactctcaaatgaaggtgaccacaggcacagccccccatggcctcgggtgatctggctccccagcaactgactgcattttctctccttgtctctcgcagccggccaagctcgctgaggccttcaagtacttcgtgcagggcatgggatacagtgagtatggcattccccgtgtgcagtgggtcggggcatgtgtcggaattggaagtgctctgtcctgagccaggtttggatgagcaattctgtgtccccctggccagcttcagctttctgggaggaaacagttaggtgtgtggagggcatgtggcagcctggaggatctagcctctcatttatcagtgaggctcatttttcctcctttgttgaacagaagttgtttcacaccagggattttggggggtttagatgaggactgtccctttaagcaccaagacaatgaccaacagtgaaacaataacatttttaaaaattttgatcacaagttttaagagaccactagctacagtgatgatgaagatggtgtcgatgatgatgaaagattactaacacattattttatctcactgaaccatcacagtactcctttgacatattcttagcccatcttatcagtgatgaagctgaggcttcggggttgtaagcagggagcagagggcggatctgtggaaattctttgaagactgtgaagctctgtggaagtggctaacaaagttgcttacattcaaggtggagcatgccatagtcaagtcatgagctttgggaagtggaggatacattggaagcatcattcaggaactcactcgttcttattttgcagttatagtttgttagacacatacagccttttttccagaagtgctgtcccaggactaggacagaccctggcgagttgtaactcggctgaacagcagccacactcagtgctgtgggcctgtcagccatggtccggccctgacatgactagtggctcttctgaccctactgcttggaactataatcgtgtgtcttcccttactaggaagttattgaacttctgatcccttttatcatttccttaaac

SEQ ID NO: 180411 - DNA, 608 bp, Homo Sapiens
gctgttgataatacttgtctaggcaggggtctcatatttttccctgtatccattactgtacaattcatctgtcccatgacattctaagattgttttagagtgagttgcttcagagttgaataattctaataatatattctcatgtttggaaacaacttggaattccatttagtgtagacatcaacaatgaaatcgctagaggatgagtaatttctacaatttttattcattatagagagaccaatgggtataatggtgaaaagaactgagtagaaggtcaggaggtcaaagagactgagtttaaaccctcactctgctgagtactgttaataatggtatgatcttaagagaactaatctttagtttttcccaccttaaaaacagagttgtcatgagtatttaataatagagggtagtatgtaaacttcctggcatatagcaactgctcaacaaatagaagttatagttttttcttaacttgccaaagagccaagggaaaaatgaagattttgtagccaaagccatttatctttctctgttatgtgcctatctgttccagaaacagaatcaattccttgaacctcatcaaaggaaggatttgaacattt

SEQ ID NO: 180412 - DNA, 2638 bp, Homo Sapiens
  misc_feature (2474)..(2494): n is a, c, g, or t
ttggtccagctcttctttctctggccggctctctttcctcttctctctgcatatgtgagaacgcctgggcatcctgggtaacagcagccccagctgccctctcctgttccctgttccaagtcccctgcactgacctttcttgagtctctctggctctgtgcatgtctttgggactctgctcatctggcttttcctctgtgtgtgcctctctgtttgcttatgtctctggctctgtcttccccacccctcccctcacacacacacatactcccaaatgtaaggctctgtggcaggttggaatcggagtaaggcttgagattcactgagttctgtaggtagggaaagaagtcaagggagtggaggttctataaggaattaacagctgaggacggaagggtttgtttcccgtttgaacctaaacgcaagtggaaaagaatactcagaatgtatttttctactttacatctgctggggaaggaaatgtgtcaggaagccgctgcatctggtcatttcatcgcatcagaatcacagcagacgtggaagattccatgtggtggggaataaagaaataactttatgctctcctgaaaaacagcgggagcctatgtgtgtgtgcgacactgtaatctcaaggagattcactcagagctgtctcagtccaactcctgcatgaccagatcttcccttagcatcttttctgtgatgaaatattatcttgtgttagagttaggaataggaactaacctgtaggagcatgtccccaaatggacatttgaatggactaacaaaaacaactggaaagactgaatttccgacacaaaggaatgatgggatcaaaaagaaagcagtgaggagttcttgagtcttgtagtacctattcttattttaacttgcttcatccttgatctacctgagacactaagaaggaaattagttttccaagagctctttgaacctgtctaggactgtagttaaacctatttgccctatgggggttcttcacactcgaaaaactatttccttatcaccaacgacccacccagaaaggccaatgaggccaaatgtaacaatttttaacatttaaatataactattaaaattgcattaattgtgaacagtgaattaaagggttgtcttctccaggagacagtatgtggcacttttcgtaaatttcatttaatatataaaaatttaaatcactcactgcaacatgcatttaaaatcttccaagaaggtagaggtatcattttctgttttgctttgttttaaaacagttgcctcaagcttctgtcttaagagtagtgacttagaatccagatatcttttgttttagaaaaacaagcaaaactatgttgcaagactgacagttgtaatgtttatttgccacagatcaaaggttcacaaagtatatcaaatttacatctacttggggtaccttgatagattattattgtttttcttttatctttcccttcaggaatttggaaactcgttgtcactttttttaattttaaaaatactaaattgtaatagttttcttttgccaaatgtgtgcgtacatattcaaagcaatgaaactatttcaagccatacaaccacaggggtgggaacccttttcacaaattttaatgtgtttgtatgtaaatagatgtttgtatgaaatattttcatgatagaatgaatatatttaaatgaagttgaattattccagtgctacttaaacacattacaaaaattttggtgagaattatctgagtctattgagatgtaatgcagatcaattttgatttttaaaaatcaaaagcctacaataactctgactctcagcaacttcctcggcgttgttgcacctgacgtggagagagctcgtaggcttccccagtgcctcagccgcttcctggtggaagttaggtgctaatggaggtgtgttcaccttttagtgatatcactgcaggcctttgaggggcctgagagtgaatcagaggcattagagacaccggtgcagttatctggagcacaatttctttgcagggcagcagaatcagaagccagacttggccatgtgaacctcgaaactcggtttcccggccgccatcaaccgccacccttactgcctagtcacacacgtcagggaggctgccctcagtggagttggggttgagaccccagggtgggacttcacagttttgccagcaatctctaccttctgacttctgcctcgcagagaggaaggagaggggagcatctggcaaggggcccatttctcagcacagtacatttcctgtctcagctctggaagactatgcacccaagcaccaaacttccaaccagagagagagacgtcctccgataacaaaaatccttgcttcctctgtctgtgactttacacacagttgttcaaagttgttaaatgtcaagagtcaatcacatccctaggacatacctcccaactctcctgactcttatgttattgnnnnnnnnnnnnnnnnnnnnntcctttatgatgatattcaacttgagtggggttgttttttccactttggtcctggatataatgaaatgatacatattaggataaattttcactgtgtatagtagcaatacgaacacacatgccaatgtatcaacatatctacct

SEQ ID NO: 180413 - DNA, 1553 bp, Homo Sapiens
attgatgagcaatgcttttcctataaaaagacaactttgtacaaaaaagttggcatagacccacaatactcagtccaattgtttgttcttcctattaaacatttcccctacaggattaataggacagatggccccagggctgcacttcctagaataggttttttgctcacataccaggactaaaacactatctccctatatccagctagttagtaaagtcatctatacagacagcggatgatgccatcagttgctaggttatgaccctgatgtcataagaattcccttgagtaaaaaacaatttgaagcagtcttgcccctatctctagaccttcagatagcactctctgattatgcaggccatataaaacatgcccttcctgctgacaaactacttcagttcttatctagtacttctgtagttattcctacaaaggtagtttcctcccccatacctaacgctgtaatgctttttaccgatggctctcgtaaaaatggaaaagcggctatctggtggaaaccacataactccctcactccatcgagatttactagtactcagagagctgaggttggagccctaatattggccctagaaactttttctgttcagcccatcaatattgttagtgactctgcttactctgtttatttattgcagaaccttgaaacagccctcattaagtccactctcgagcccgccctgtgtgctttttttctttgacttcagtaattgctaaatcaatgtacacattctatttttatcacacatatttcagcccatggctctctgcctgacccattggcttatggtaataatcaagcagaccttcaggttatgacgtcactgctgaccaagccacccaatcacatcaatttttccaccaaaattggagaaacttatctaaacaatttcaacttacccagaaactggctaaacaaattatcctacaatgcccagattgccagctcacaggcaatctccacacgtgttaaccctagagaattagaacctaatcagttatggcaaacagacgttccacacaaccctgaatttggaaaacttagatatgtacgtatatccattgataccaattctcacttaattagtgcccatgctttgcctagagaatcaacccggtatgtcattaaacatcttttaacttttgcgtttatggggtggcccaaaaaattaaaactgataatggtccagcttatgccagctcacaatttcaacaatttgtcactcatggcacatcgaacattccacaggcatcccatataactcccaagaacatgccatagtaaaatgtgcccactccacccttaaaaatatgctcagaaaacagaaaagggagagtatgggtaaagaccctgcaacactattggcacaagccttatttacccttaagtttttaaatttagatgacaaatttcaatcagctgtagaaaagcacttttctaaaacctctcaaggtataaaacctgcagtttcatggaaagatgtgaacagtaatgtacggtgtggtccaagtgaattactaatgcgccaa

SEQ ID NO: 180414 - DNA, 1609 bp, Homo Sapiens
ttgggttccggtccgcgcctggggaacccggcgaggatccaatccgggtcgctggcctgggggcggggcctggtttgttttgctccgagggtgcccggggcccgcctgtcgggcgcaaaggtttgggggcgggcaggtgcagcaaaagctgcttaattggacagaaaaagtaactcgtgggcgggaccgtgagaatccgaggagggacctaagtcaccccgtggccctggatattacaaccggtgccagcggtcggtcacagtgtcctgggcttccgcagttgcaggctgctatcagggggcctggcatgggggtagcctcttgagaggcgtctgggaaccgtgacctggtccttcccaagggcccggaggaggagccccgctgaggtcagggctgggcgcgaaggggctctcctgccctctccttgcacacggtgccctgtggcctggctccccgctgcggcccaccgcgtttgcacacttcatgggtgagggtgcttctgggctctggtgcctgggtcaggagtggatgggtctctgtgtgctgggctggcctcggctcgcaccatcggctgccatgagggagtgatgtttacagcacacgacttcaggagcctgtgaggacacccaagatgacaggggcactctgctcagcaggagcctgtccggggctcacccctgccctcttcctctgaactttctccctctcatggaggccttcagacaagcgcctcagtcggccccctggcttcaagatacatcaaggtccctgctacccgagccaaggacacctctcccacagtgcttccccaccctgctcccaacaagactccttctcacgggtggtcttgcacagctggagcccatagtgcagcaggtgctggctgaagagcccctggctccacactgccccactcctgaccagggtgatgcactggaggagggcttggacctcagctcctccctcagtgctcccgaccacttccagggactatccccaagctggccagcactcctgcgccccaagaggagtgtttggggtgcttcctcttggctgcagtgggacacaggtgtgccttcctaggaactgggccctgactacttccagcccaacactcccgggcctgtgaactgtgacctgtgtgccgggatgggttttgtgggtctgccccatccccgcactgctggatctggccaagtgggtgaaggctaaggccggtcagagttgagtttctgccttgtcccctctcctgggctagatgccacaccaggcccagtgactcatagggcaggcagttgggaaaataccaggcagagggcaggtcctggtctcagctggccagcctctgctgtctgccatcccaggggaggtggccaaaagtcccaactgtgagccaggccccacattcactgggcctcctccagggtctgtatgccatggaaccctggacatggggctatgaaggaaggtgggtgttgctaagcccaaggagcatgggcccctaacttggccctgtgccccggtgaggctggtgccaagttcattgaggtatctaaagaggcccggaagcggttcctgggccccttgcacccctccttcaactggtaaa

SEQ ID NO: 180415 - DNA, 1325 bp, Homo Sapiens
tacaaaaaagttggcccagagcccggcgggagccgcatctctatggtcggccgcggctggaacggcccccggggcccgctttgtgcgaccgcctccggctcagccgcctctaggatattggggatgtggaagccactctctcttcctcttgccggctgccggggtactctatgttttgtctctgtggtttttcccgccctccacccccactccagccctgaagccggagaagcaccatcgagagctctggggtagagtggcgtgggcttctctgtgggtgtggcgggaagtagatgaaaggacccggggcggggccgaacgcagcttccccaaggtgcaggcgcggtgaaaccatcgagacggagggccagagagtcacggcggtgagagggctgagtgacgggttaccccaaaccatgtggctggaggcgcgagctggggtgtgggcgaggttcaggagggggttcctgggtgtcgcggaggggccggggacgggagagctttgtctgtggccttccatgcataggtgttttggaattctggatcccagttctgaggctcagccgaggtcactgctgtcagctcacctccctgcatgccaggcgcagggcaaagtggccggggttcggggttggaggagaggtgtactagaaacaactttgctcttgtccctcaggatcttattgtctacgatgtgacgatccgtggagaaagtagcagatgggcagattttcatttggggagaatgagggagaaaagaacgggcattccgagccaagagcactgcatgagcaaggagttgggaggttgcttacttgttgaacatatttgttgcgtatttgcatatttgctaaacaggtagtgttaggagctaatccatgaaaggtaggtgggcgccgtattgtagagagccttgagtaccaggctgagtttatacccaattcaggggtctgctgggagccagccattgaaggtgctggagcagagagagatatggtattggagctgatccctatgatgaaagatctggacccttgtgtagatgttccgtgaagcaggaggtgaagacctattaaaatgccatttcaagaactacgattttaaagacagtttagtgggaggtaataaaggtctaaacaagacgttaaatattggggacgtaagggggaggatatttgaaggacattactcataacaagacatagggttactgacaagtcaacggacgcttctcccttgctgactgcagccaatggacccctttttatcatagctggtcccagggaccacaaaaatcctgtccatccattaccctgatgtgaagc

SEQ ID NO: 180416 - DNA, 941 bp, Homo Sapiens
  misc_feature (43)..(62): n is a, c, g, or t
aactttgtacaaaaaagttgggaagtttacttttagaaactcnnnnnnnnnnnnnnnnnnnngagaatttagattttaaagattatttctcagaggctggtgatagatactttaaccagggttagtggcttttatatgttttacctaaaggatcacttttctctgctgcacataacagaatgtggtttttggcttgctgtaaggagactagtttaaatgctagtatagaaaacttttaaaaacatcctagatttggagcttgtctgtgagcagacagcctatcatgaataggagcaaacctctaggagagttattttagagtggaagtggatatcctgatttagtcgaataaaatagcagccttggtattaatgggaaatctgcaataatcagggtttcagccccatcagcgtagtcaggagtttggtgagattatttgccagggtggtgtaggtctagttttctttgtgcccttgtttgggactatattttgcctgttgcaaggtcctcactaacttgtgggctctgattcttcctatttgagttcttcctgtccaagatccggtcccacgtggctacttgttccaaataccagaattacatcatggaaggtgtgaaggccaccattaaggatgcatctcttcagccaaggaatgttccaaaccgttacacctttccttgtccttactgtcctgagaagaactttgatcaggaaggacttgtggaacactgcaaattattccatagcacggataccaaatctgtggtttgtccgatatgtgcctcgatgccctggggagaccccaactaccgcagcgccaacttcagagagcacatccagcgccggcaccggttttcttatgacacttttgtggattatgatgttgatgaagaggacatgatgaatcagtgttgcagcgctccatcatcgaccagtgagc

SEQ ID NO: 180417 - DNA, 1489 bp, Homo Sapiens
  misc_feature (587)..(655): n is a, c, g, or t
  misc_feature (691)..(814): n is a, c, g, or t
  misc_feature (910)..(923): n is a, c, g, or t
tggaacatttccttattttctggcacaaaatcttccagactcatcttgtaccttctctgttccagttttagaactggccatttctcttataaatgaaaagctgagtgttcaggtgtgctcatggctcttagggtgctgttgcttctaggtcttttgagagcatagagccaggaagcatacacacatttttggctcctgactttttgctctttcccaggttattgagtttgccccttgctttccattcctcgtcacctcatcacagtccataccaccatcactttacacttcacagttagtgcgaaagactcctagtttgcctcttaacttggtcaaaattagtcttcttaaaacattttcatcatgctgtgtttaataatttctagagtcttctcactactttttgatatttgggacttttctagaaacctgcttcaacccatttaagctttccttctgcattgtcttatataaaccctctaaattagactgttttgtgccctaactgtccccataattattcacatcacccctacccactatctacttccttaattatttattttatattttttagaggcagggtnnnnnnnnnnnnnnnnnnnnnnnnnnnnnnnnnnnnnnnnnnnnnnnnnnnnnnnnnnnnnnnnnnnnntaggactattggctcacaccaccgtgatcagctaannnnnnnnnnnnnnnnnnnnnnnnnnnnnnnnnnnnnnnnnnnnnnnnnnnnnnnnnnnnnnnnnnnnnnnnnnnnnnnnnnnnnnnnnnnnnnnnnnnnnnnnnnnnnnnnnnnnnnnnnnnngcccagcccacatcatacagtttgaaatgaaactttgccacaaccagcctttgctgtagcacacacatatatcactgaacctgtttgaaataaagnnnnnnnnnnnnnncatgattcgtctttgagtacctccaggctgaaagactgttgtaccagtaaaaacttaaaggcacaaattctccttgaagaccttctcccttttatgtggccccatattttatgttgctttatctttgaaattttgcatgaaaaggaaatgaatggattcgaatgaaattgtcctttagagcatgattacttgttcccatggacaaatatttttctccccttgctcttcctggcctgaaacacgggaaaccagagtcaaaagttatctccctctccctgtgatgccttgagatttttttctgcgttgtttaatgcctgaaatccaagtcttcctccatgggaaaatactgttataccaaataattctagatgagtaacaaagatctttttaggccttcattttatgttttttcttaactgttatattatgattgtgacatagattatactactactaatttttggatgtttcaaaaggtcaagaagtaaaagatgttagaaagcaatgagtgagtccttttgatttttaacttattccccatgtccctatacttcgtgtgcttttcc

SEQ ID NO: 180418 - DNA, 1359 bp, Homo Sapiens
  misc_feature (1049)..(1061): n is a, c, g, or t
ttgggtttaattggctcatggttctgcaggctatacaggaagcatgatgctggcatctgcccagcttccaggagccctcagaaagcttacaattatggcagaaggcaaaacagaagtaggcgtgtctggagcaagagagatccagtggggaggtgctacacacttttaaacaaccagatctcatgagaactcactcactatcacaagaataggaccaaagggatggtgctaaactattcatgagaaacacctccatgatccaatcacctcccaccaggccccacctccaacattagagattacaattcaacatgagatttgggcggggacacagatccaatccatatcaggcatctaactcccacacctgtggctggagcccatgtcactcacctctcctactcaaaactagattgcaaattcccatccagagactctccaaatcagtgactgcaacccatgcttgttggcaggttcttatacaacccactatgagttagcatcaaaaatggctttctcctatcagcacccatgtttgggagtgtgtgtggggtacttcccagtgccgttccttctcatggtctcctgactgctccctgagtcagatcagggcttggtaaagtcaagaagctcctccatggcctggattgcctggctgtccagtgggaatgtgtatcacagagacagtttctccccgtctcacacactgaggattcactcacagtttcccaccagatccaccccgcaggctgctgcttgccttatttttcagagtatccaaagtttctttcacttttatgttgaactcccgtgttctttcttggataaaatttcacagtatgaatctctacacattattttgccttttccaaatgcatgaggcaagctggcaaagccactattctgctatgttggggagaaaaacagaaatggttgtcttaatagatacatgctttaaaattaatctaagctagatgtagttttcaatgaactaatgtatattgagtgtctattatatatggaatccagagaagactgtttctttgtannnnnnnnnnnnnatagtactatgattcatttgaaacctattatcagccttatgaccataccaagttgtgccagtcatttaaaatttttagtttttcattattcaacatacattgatatacagccttacatgcatgtctatgagaaagtggtaagagaaagctctcagctgatttttgtgcaactgaatgaccattaatgcttggcaatcttcccaactgaatctgactcaagtagaaatagttaacattaatcaaaagagattaattacctgccaccagtcttttgaaacagtctgtcctgagaaaaaga

SEQ ID NO: 180419 - DNA, 829 bp, Homo Sapiens
tccccgtggggagggtggggcgagggacggcgacgctccacaggtgagtaggtgagagaccgagagtccctgagagagtctattggcttccgggggctgcgggacctggggaacacagtaggacccaatagcaccacaccctttcaagcacacgggccagcactcaggaccacccgcccaggtcctgaccaccaaacctcacaccacacagggccagcctcagacccacctttgtccgctcactcacccatccgcccgcacaccatccaccgagtgcccagtgggcaggcacagggtgcagcgggggatgcaaagataaagacagtccctgcccttgaaggagctcagtggtgaagaaaggcacgcacggccccgtgtgtgggaagcagggctggatgtgcgtggctctggggacccaagggagggggacatggggcaaggcagggaaggggcagggcagtcttctcgaaggtgctgttttgagcggagtcttgcagaacgaggagttcaccaggcggacaaggaaattccaggcagaaggaacagcatgtccaaaggcatgggctctccttagactgcaaggcgctgggtgtggctggagcacagggcatgtgtgggggcgggcaggaggagaacacagggcgggcaaggcccgttggtgaagagcctcacacgccactcccgcagaggtggggctttgtcctgcaggccacagggcgtcccgaaggatttgtggagtggagggaagtagccagatgtgcgttttagaaaggtccctctggctacatgtggaagagaatggcgtggagacggggagacagggagccaa

SEQ ID NO: 180420 - DNA, 1097 bp, Homo Sapiens
  misc_feature (80)..(89): n is a, c, g, or t
cattccctcccaccccaaaccccccagaacacatgaaccaggaagaactcacggagattaacatttcacaggaacaaagnnnnnnnnnnggggagggaaagggagccctccatccaagggctgccaaggttcaaaggagagcagacaaggaccctcccacggctctgctggggaagaagggacactccttgtggctccagagcattgggtgtggtggaatcccccaaagacaatttatggagacctggaggagcggtgtctcatgggccgagggctaggtgtctccctcctgcgcttgtggctgggggagcggctgtccccacgctggcctctccgggaaccccgctcactgctgctgctctgctggtcccgtggtgagggctggggcgagggacggcgacgctccacaggcgagtagctgagggaccgagagtccctgagggagtctattggcttccgggggctgcgggacctggggaacacagtaggacccaatagcaccacaccctttcaagcacacgggccagcactcaggaccacccgcccaggtcctgaccaccaaacctcacaccacacagggccagcctcagacccacctttgtccgctcactcacccatccgcccgcacaccatccaccgagtgcccagtgggcaggcacagggtgcagcgggggatgcaaagataaagacagtccccccccttgaaggagctcagtggtgaagaaaggcacgcacggccccgtgtgtgggaagcagggctggatgtgcgtggctctggggacccaagggagggggacatggggcaaggcagggaaggggcagggcagtcttctcgaaggtgctgttttgagcggagtcttgcagaacgaggagttcaccaggcggacaaggaaattccaggcagaaggaacagcatgtccaaaggcatgggctctccttagactgcaaggcgctgggtgtggctggagcacagggcatgtgtgggggcgggcaggaggagaacacagggcgggcaaggcccgttggtgaagagcctcacacgccactcccgcagaggtggggctttgtcttgcaggtttgggcaaggcctgagccaa

SEQ ID NO: 180421 - DNA, 1716 bp, Homo Sapiens
  misc_feature (618)..(662): n is a, c, g, or t
ttggattttcagttattttcatagtgattaacgtgagattaaaattaatatcttaaagctattggaaattttcaaccattatttcttcaacttagttttccctctttgctcttctgggactccaattatgcatatgttagtatgcttgatggtgtctcacaggtctcttaggaccatttactttttcattctgttttctatttctgcccctcagattcaacaatctcaattgacctatctccaactttgataattttttctctgcctgctcaaatcaactgttgaaaccttatgaactttttatttcagttactgtatactccagttctagaactttatttgtttctgtttacaacttatatgtctttgttaatattctctatttgttcatacatgagtattttggttttgtttcatctttggccatggtttattgtaggtctttgagcatattgaagacagttgatttaaagttgtctagtaagtccaacgtctatgcttcctcaataacattttcttttcatttctttttcctgtgcataggccatacttccttgtttcttttacatgatttgtaatttttttgtttaaaactgaacattttaaatgttatgtaannnnnnnnnnnnnnnnnnnnnnnnnnnnnnnnnnnnnnnnnnnnntactctccaggtctttcctggttggttctgggttggggcacacctctaatatttaatcggggcatttacaagtttgccttagctttctctttcttcttgcactttgtgtaaggactagtcaaagttgaaagcctgtggtcttatcaggtcttttccaaccatgcatcctaccctgggtatgtgtaggttccctgttatatgtgagaactttttaaagcattgattccaaaacaaaattctcattcccagcttttccttctagattttggtgtgtttattattgcctcaattgttcttttttgtcccaggaatcagtgctagttcttttgcctctcaatgtttttgaggaacacttccctgccctgagagaattctgagttaggtaaaacataggaaagcccctctccttcagaaaacccacacagaagtcaaaacaaacaaaattccttgagaacaaggaccactctgctttctctaggatccaggaatcagaacccactgagaatgcaggctgccatcttcaagattgccatggtactggagagggatgtggggcaaagctaaattgcaatgccaccaatcttttctatcctttttcagtggcctttcttctgattaagtgtgcacctggttgctgtaaacaattaactgtcttccagaaatctgctaaagttgactataacagtttttgccagataatttttgtttttgctttgggaagggatggccctggacagttcctaatccaccatttttgctgatgtcactcttagacattattttttaggaccctggaatgtctagagtagaaaggctcacgcttattagccttaaatgtagacatacatacattctttccaaaatagttttggaaacatccttaacaattctatcaatctcttttacccatttctgaagaaatgccagaattatcttccaacaagtagattaggaggatgagaaagtggaattagttaagaaggggtcccaacttttggtagggaaaatagggaatacacttgtgcctttaagtggatagaggaagaggagccaa

SEQ ID NO: 180422 - DNA, 1437 bp, Homo Sapiens
ttggtaataatataatttttaaagccaagtatataatacctcataagctgcttaaaatatttttatttgatgatgctattgtttttaatagggccagcaaattaaaaaaacctttttagggcaggcaggtaatttaaattttttagaaccagtcaggtataaagcaagaggggacaaaggaggactggagagtggatgcccaatgatataaaagcattcacgttcaacaattaaaaactataaagacattacattggccctacagaacaaatgtgcggattgaattctgcctataggacacgaatttatgatccttagcaatgtgaagttagagaaggggttttattgtgaaattgacacaggttgttttatatcttataaatgaagtctcctcattttcctgtggtcagaagagagggggcaagcagaaaagcagaggaacaaatttggaggctaaaataacattctacataaggaactatactacagtagaattaattgatagcagggattaagagatgtaaatgaatttgagatacatattctagaggtagaatgtgcaatactttttgtatgtccatatacagaaattggttgcattttccttaaataaaaagattttttaaaagtcagtgagctgttatgttttcttccctctgacttcaattccttgattctttcaatttttttaatataaatttactgtctaaaagctggatcagcttatgctcctttgttgagagaagttggcatgctgtcaagtgggctgggcacactgagtttcagtttcctttctctgagtctttgaagcttcaaggctgctgaataatttccttctcccattttgtgcctgcctagctatccagacagagcagctaccctcagctctagctgatactacagacagtacaacagatggaagaaatagaaaagtgattatggacttaaagacaatggaaaatcttggacttgctcaaaattgtactatctctattcaggattatgaagtttttcgatgcgaagattcactggatgaaagaaagataaaaggggtcattgagctcaggaagagcttactgtctgccttgagaacttatgaaccatatggatccctggttcaacaaatacgaattctgctgctgggtccaattggagctgggaagtccagctttttcaactcagtgaggtctgttttccaagggcatgtaacgcatcaggctttggtgggcactaatacaactgggatatctgagaagtataggacatactctattagagacgggaaagatggcaaatacctgccgtttattctgtgtgactcactggggctgagtgagaaagaaagcggcctgtgcacggatgacatattctatatcttgaacggtaacattcgtgatagataccagtttaatcccatggaatcaatcaaattaaatc

SEQ ID NO: 180423 - DNA, 2619 bp, Homo Sapiens
gagccttagttgaactcacagatgcagaacccatggatacagaaggctaactgtctatctttacactgacatgggtaagttcatttattacaatttaattcaactagattcaattcaataaatgtttattgatattatctttaaggttgagccagtgtgttactctcttatcagctacacagatcatgaaaaaaattcccccgcactaaaaattttacaattttataaatagtggtgaggggatgggagtgtgggataagaaaaagttgacaagagattatgtacgattgagtgtgataaatataatgaaacaatgaaaaataaagtgctttaaaagtttagagaaggaaagtatagtgttaaaggggttcggggagatttcatcaatggaacggcacagggaaacggctttcaaggagaagaaatatttcacaaaatgaagagacaaaaagggccaacaaattcagcataagacaatatattaatggaggaaaagtcagcatgtttgggaaatgtgagttcaggttagtgaagggctggatctttgtaggcagagataaaatgggcaaggaacatttgcatgaagtaattttatttaattaggagcattatgaggaatcacagcaattttttgaaagagtaatgatatgatcaaagttaattaaagttatgatcttcagaaaaattaatctggcactgtgtacagaatagattggaatcaaaaggaacctggaggtgggaacaccagttgggagaatgcaatgatagcaagtatttgttgagcactaagtatgtgatagattttcttaatcagtccttataacaagcctatgaaatgggtactatcattactgcattttacaagtgaggaaacaaagaaaacagagtaaacatctgccaacgtttattgacagtgctgagcagtgacagataaatatttcgaacctatgcagtttgattctagaggtaaaatagtctaaacaagaattaaacgttaaactggtctaataaaatctacttatccagagaatgttttttaaaagaaacaggaaatatatggactgtatgatagggtgtcataaaaattttgtttctaaatcatttagaatccactgcatgtattccaaattacaattatcagtgacattagaacttgatatgtgaagttcttcaagagtactttgtgagaccagatctccatttttttccaatgggaaattattgcaagttcctacatcttgatattgctttcataatttatactaacataaaataatatttttcactgttttgcaatgtctttttaatttctgtattgcagctagaggaagtccaaagaaaacttggatttgctctttctgacatctcggtggttagcaattattcctctgagtgggagctggaccctgtaaaggatgttctaattctttctgctctgagacgaatgctatgggctgcagatgacttcttagaggatttgccttttgagcaaataggtagatggtttggtggtgtggaagcttggaagcggtcaggtagttggctactttctgcttggatctattaaatacctggcagctctctgtctttttgtgggttgttgccctgtgattagttctgctttttaacccactccctggatgcatttttccctccttgcatttccctcttttcctggagttcatactagagaatctgcactatgtttttccctttttgtcttgagatgaaagttttaaaataatccacctctgtcatttccactctctgaacatcccaagctgtatccctggcctcttttctcagactatgtttctttacttgggacctagaactggattggattggcattgctcctgatcagatgagacctttgattatttgccccttccttaggaccttacactcctgtctttctttgacttgcctttttgtttctttccttcatcttagtccctcttcatgcagtatggtcattgctaggtagaggtatgtccttttatgtaatggccaccgcatttagtattacataaactttcttttaacaatctgtgcatagtacatgctgctctgttccatttagagatttgacagaggtttcagtttagtatactcaaatcttattttagtgcttgggaaatcaattcagaatatcacatcctctccaattctctcttactcaaattgctgggaaactctcatgttactaactttgttgctctaactctgccatcttggtttccccatcccttctcttcctcatggtacgtgtgctcctaatattagcgttggttgagattttcagtggtccaatattcctcttccctctggttgcctttcctgagataatccactaagaatattttgtgtttcttttctcagggaatctaagggaggaaattatcaactgtgcacaaggaaaaaaatagatatgtgaaaggttcacgtaaatttcctcacatcacagaagattaaaattcagaaaggagaaaacacacaccaaagagaagtatcaaagaccaaagggatgtgttttattaatgtctaggatgaagaaatgcatagaacattgtagtacttgtaaataactataaataacatgattgagtcataattgtg

SEQ ID NO: 180424 - DNA, 604 bp, Homo Sapiens
tgatagcagtagggatgctggtaggatctatttctttttcagtactgggtggatcagcaactgctgatgctggtctgatgttgaagttgcttgtttcacttcactaggttccactgactgaaagaaacaacacatattaatttcaacacaatacacaattagagttttacttcaaaaatatttctgattttgaataacaactgttcaattagtctcctttgagatgatacccatctccaaaaaggccctactttttgtatttgtttgttttagaaatacagttattttatttttatatttgtttgtttaggaataactatatttaggaatatagttatagatatatagaaatagaatataggaataactatattgtatttgttttaggaataacaaatagaaaaatgctgagaaaatgtcaatcatttcttatgataagcatatttttcttaagaaattggtacttacgtgcctatactattgaaatatacatatatttcatatatctaaattctattaatcaaaacaagcttacaacaaatatccaacatttagttggccaatttaggtacgaaaagtaaattcaaaggttatctttagaaaa

SEQ ID NO: 180425 - DNA, 1081 bp, Homo Sapiens
  misc_feature (146)..(191): n is a, c, g, or t
ttggactatatatatgactaaaagtacttaaaatgatttgtctctcagccctacttaaaaagaaatcctaggaaggctgaagtggaaagatcacttgactccagaagtttaaggctttagtgacctatgattgggcctctgaatannnnnnnnnnnnnnnnnnnnnnnnnnnnnnnnnnnnnnnnnnnnnngtttaaaaaaacaagtccttaaattgttgtatgtcttaaaagccagtggtaataatggtaacagctcattttaaatagtgcttaagtgttcaacactgttctaagtgctttatatgtattaaccacaataaataaaatgtttaaaaacaaaccaaatctagaactggcttttccttaatgttagtaatgcaacctagtgtagcattgacaccaactttatagtttctcttcataggaatgtcccaaatgccatgtcacaattgagaaggatggtggttgtaatcacatggtctgtcgtaaccagaattgtaaagcagagttttgctgggtgtgtcttggcccatgggaaccacatggatctgcctggtaggttggggaaattaagggaagaatgtgtttacataagtatgtgccatgtattatgaataacatttctacctcatagatatcaccatctaacttgcaagctaaataaatacatagtgtgtgattaatgttataagtctatgcaagacatagagggattagttagatatatttcataaaggaggtaacaatttagatgaactttaaggggaccaagagttcattagttataaaagtagtaggaaaaacatttagggcaaaagttgcaacatgagcaaaggtagaatgttgtgaaaatacatgactttttcagagaataactgtattatcaaatgtgcctctctaggccaaaattgaaaactcagatgctgttggcaaaacccaacctgcaggtggttttactctgcatatcattagacattgtggaatgctttaaagccttgctaaaaggctttgtcatattttttctttaaataagcatatatatgttgctttccttgttttattgatgacttacttgaact

SEQ ID NO: 180426 - DNA, 1559 bp, Homo Sapiens
  misc_feature (928)..(937): n is a, c, g, or t
ttggtttttgttttgttttgtttcatttgcaaactgttctttgcatacttatgtttgtggtccttgtaactgacttctgctttttgtttgtttccttttctttcctttatctgttttacttcccccatactgtgttgttgctaccagtttctattgctccaccccctccccctatgcctcagttgactccacagatacctctcacaggcttcgtggccagggtgcaggaaaacagtaagtttggaaaaactgagctatggaagagtagaggctgtctccttatagcatgcatggctgacgatgagtcatcgttttccttacttttattgagaagctaatcttgaaaataggtgcagacatgttactgaaactgaagagcacggtcttcagttttttctctttgtgtgcatggttactgacccatataaatttcaaagctgcaattttcttatgtctttacatgatcctaaaacaggagatctgatctttacatattcttaaggaaagaataatcaaacacaaaaattcaaattatatggaaacttttagcttctaacagttactagaattagaagacatttttaattctaataaatttatcaagagataggtagatatactgtaagattaaatttaatatgaaattggggcagattttccccccttaatttcaaaattttagggaaagctttgtagcctcagatttttgtacatacatgatattgaacctacgtaaaggttcattgttaggataagattgaatgaccaggaataagtaaattacattcatgctatccatttcagtgtgagtgataagcaatttagcatccttttcacattttggctacatccaggcccacgaagattgttcctgaatatgaaaatcagttaacttttttagatcttctctcgaatgaagttcagggannnnnnnnnngtggggggggagaagttattttggatatatggctttaatcaggatagactagtttatattactgcctgattacttttgaaattccagaagatgtgtaatcctaactgcatgatcacagtgaatcttatataaagtgaaaaataccactattactgaattataatatgctagaaaagctgttgatggtaatgtggtctatttttaatttacttcatttggaccatcaccatgaaaataaatctcaggatggtttgaacaaatgaataacccacttgcccagcctatcctccaagaaaatatattgtggcaaattccattcttcagcttttgctgaccctgttgtgttattctccccattccctccctcctgccagtcaaatatttgtgtacccgatgttacgtgccagactccgggaagaataccagcagtttaagacaaaagccccttccttcaggaaatgtgtgatccaattggcttgttataaaatgttgttttgtaatgttgaaatttctgagtgtaagccatccttactgttaatatgtgtttgaaaaccctaatgtgtgcaaacatttaaaaagatatgaataatcagcctgggcaacatggcaagactgtctgtac

SEQ ID NO: 180427 - DNA, 1243 bp, Homo Sapiens
  misc_feature (1069)..(1081): n is a, c, g, or t
tttggcaagagcgagacttactttccagggaaatttggaaaatccacgctggcggtgttttgttcctcctgggtggcttgtttgtggcttcctaagctggaactgcattctggtggtggtgggggtcggggacagcaccagagccccgcaggctcaccccaagggcccagcctgcatttcccatggtagaaggaaaaggcgctgcacccgggcaacttttcacagtgaagagatcgcctttcctggctgcccctcgggtcctcctgcccacagacggcagccccccgacctcgatggccaggaaagggttccccaaaggggacctcacccgccccgagctctggagccgctgacgctcgcatccaggacatttgagatgggaatccaaataggctacttggaaaagacgtgctgcaggcagccctggagagactcatggagttcattgtacattactccatctaccgaggcagcgcatggcatgactgaacggcttggaacaaacacagaaattagcaccacaaacattcaggaaccaaatataatctgctatggtcacaccacagacaatgcaggaagaggctttttattgcttgtgtgtgttttcaaatcaagtaggcacaacccagtcctcataacagccctcgggagtggacgcaccggggcgggagagcgcaggagggagtgtgcttggctatcctgcccagtggaaaggaaagtgacgtgcattgatcttagagtccttggcaacagactgtggaggcaataacaggataaagaaagcagggagaacgaggcatggccagggtccccagtgcgccttcaaggagaccttaaaacagatagatagcaccacaagagagccacaagagagaagtgtaaaaaataagcaccaattttcattgagttatcacctacaaaaaatgtggtttccctgccctggacattctcccatcaggctctgcgagaagaaaagcggaaaaaggaagcaaataaaattaatccaaacctgtgttttagtcttaagtgcatgtagaaaaaagaaaattatcaaattttttccctattnnnnnnnnnnnnngtctagagcgaatcaaaaactgtctgaaaaggggcactggtacctgcttttcaatggcagcataaattcttgctgccccggggcaaacttccaatttattgcacgttcttggccagggcgggggtggggagacttcctatttctaatcagaacggtacccaa

SEQ ID NO: 180428 - DNA, 1455 bp, Homo Sapiens
  misc_feature (178)..(189): n is a, c, g, or t
  misc_feature (1151)..(1199): n is a, c, g, or t
ttggggattctgggttgcagtaccgttctgattagaaataggaagtctccccaccccagccctggccaagaacgtgcaataaattggaagtttgccccggggcagcaagaatttatgctgccattgaaaagcaggtaccagtgccccttttcagacagtttttgattcgctctagacnnnnnnnnnnnnaatagggagggaaaaaatttgataattttcttttttctacatgcacttaagactaaaacacaggtttggattaattttatttgcttcctttttccgcttttcttcccgcagagcctgatgggagaatgtccagggcagggaaaccacattttttgtaggtgataactcaatgaaaattggtgcttattttttacacttctctcttgtggctctcttgtggtgctatctgttttaaggtctccttgaaggcgcactggggtccctggccatgcctcgttctccctgctttctttatcctgttattgcctccacagtctgttgccaaggactctaagatcaatgcacgtcactttcctttccactgggcaggatagccaagcacactccctcctgcgctctcccgccccggtgcgtccactcccgagggctgttatgaggactgggttgtgcctacttgatttgaaaacacacacaagcaataaaaagcctcttcctgcattgtctgtggtgtgaccatagcagattatatttggttcctgaatgtttgtggtgctaatttctgtgtttgttccaagccgttcagtcatgccatgcgctgcctcggtagatggagtaatgtacaatgaactccatgagtctctccagggctgcctgcagcacgtcttttccaagtagcctatttggattcccatctcaaatgtcctggatgcgagcgtcagcggctccagagctcggggcgggtgaggtcccctttggggaaccctttcctggccatcgaggtcggggggctgccgtctgtgggcaggaggacccgaggggcagccaggaaaggcgatctcttcactgtgaaaagttgcccgggtgcagcgccttttccttctaccatgggaaatgcaggctgggcccttggggtgagcctgcggggctctggtgctgtccccgacccccaccaccaccagaannnnnnnnnnnnnnnnnnnnnnnnnnnnnnnnnnnnnnnnnnnnnnnnnacaccgccagcgtggattttccaaatttccctggaaagtaagtctcgctcttgccaaagaaaagtctggcttggagagtctctggagcccaggatgccagcatgtgcccatgactgtcaccttcatctcttcaaagaaaagccatagccgaggactgtcccgcgacccccgtggactgcgtctagtcatgtgattctgttttcatttctcatcccatcccatttgtccttttctcctgtcattttcttcctctgtg

SEQ ID NO: 180429 - DNA, 1467 bp, Homo Sapiens
  misc_feature (171)..(219): n is a, c, g, or t
  misc_feature (1181)..(1193): n is a, c, g, or t
gggggtcgggggacagtcttcagatatagctttcttttgaagagatgaaagtgacagtcatgggcacatgctggcatcctaggctccagagactttccaagccagacttttctttggcaagagcgagacttactttccagggaaatttggaaaatccacgctggcggtgtnnnnnnnnnnnnnnnnnnnnnnnnnnnnnnnnnnnnnnnnnnnnnnnnnttctggtggtggtgggggtcggggacagcaccagagccccgcaggctcaccccaagggcccagcctgcatttcccatggtagaaggaaaaggcgctgcacccgggcaacttttcacagtgaagagatcgcctttcctggctgcccctcgggtcctcgtgcccacagacggcagccccccgacctcgatggccaagaaagggttccccaaaggggacctcacccgccccgagctctggagccgttgacgctcgcatccaggacatttgagatgggaatccaaataggctacttggaaaagacgtgctgcaggcagccctggagagactcatggagttcattgtacattactccatctaccgaggcagcgcatggcatgactgaacggcttggaacaaacacagaaattagcaccacaaacattcaggaaccaaatataatctgctatggtcacaccacagacaatgcaggaagaggctttttatggcttgtgtgtggtttcaaatcaagtaggcacaacccagtcctcataacagccctcgggagtggacgcaccggggcgggagagcgcaggagggagtgtgcttggctatcctgcccagtggaaaggaaagtgacgtgcattgatcttagagtccttggcaacagactgtggaggcaataacaggataaagaaagcagggagaacgaggcatggccagggtccccagtgcgccttcaaggagaccttaaaacagatagatagcaccacaagagagccacaagagagaagtgtaaaaaataagcaccaattttcattgagttatcacctacaaaaaatgtggtttccctgccctggacattctcccatcaggctctgcgggaagaaaagcggaaaaaggaagcaaataaaattaatccaaacctgtgttttagtattaagtgcatgtagaaaaaagaaaattatcaaattttttccctattnnnnnnnnnnnnngtctagagcgaatcaaaaactgtctgaaaaggggcactggtacctgcttttcaatggcagcataaattcttgctgccccggggcaaacttccaatttattgcacgttcttggccagggcgggggtggggagacttcctatttctaatcagaacggtactgcaacccagaatccatgcctcgcccattctgtccgtgggactgagactgggtttccgtgcatgattgaaagccaggcacacttaacatttataacccaacttttttgtacaaagt

SEQ ID NO: 180430 - DNA, 552 bp, Homo Sapiens
  misc_feature (405)..(453): n is a, c, g, or t
caatgcttttttataatgccaactttgtacaaaaaagttggcctcggtagatggagtaatgtacaatgaactccatgagtctctccagggctgcctgcagcacgtcttttccaagtagcctatttggattcccatctcaaatgtcctggatgcgagcgtcagcggctccagagctcggggcgggtgaggtcccctttggggaaccctttcctggccatcgaggtcggggggctgccgtctgtgggcaggaggacccgaggggcagccaggaaaggcgatctcttcactgtgaaaagttgcccgggtgcagcgccttttccttctaccatgggaaatgcaggctgggcccttggggtgagcctgcggggctctggtgctgtccccgacccccaccaccaccagaannnnnnnnnnnnnnnnnnnnnnnnnnnnnnnnnnnnnnnnnnnnnnnnnacaccgccagcgtggattttccaaatttccctggaaagtaagtctcgctcttgccaaagaaaagtctggcttggagagtctctggagcccaggatgcca

SEQ ID NO: 180431 - DNA, 1860 bp, Homo Sapiens
  misc_feature (166)..(195): n is a, c, g, or t
  misc_feature (1468)..(1513): n is a, c, g, or t
ttggcccctccccccgagcgccgctccggctgcaccgcgctcgctccgagtttcaggctcgtgctaagctagcgccgtcgtcgtctcccttcagtcgccatcatgattatctaccgggacctcatcagccgtgagtcctcactgcactatccttactgccgcacannnnnnnnnnnnnnnnnnnnnnnnnnnnnnaaggcgcagccgtcgcgggcctaggggacgccggcggtcttagccgagcgcggaggggtcggtgcccggggctcgcgcccagctctggtgtgctacggaggggcagatcccgcgtgcggccgccggcgcgggaaatgcgggaaatggcggcgccgggcgcacggtgatgggcggctctgtgtatccggcagacgatgagatgttctccgacatctacaagatccgggagatcgcggacgggttgtgcctggaggtggaggggaaggtgagtcggtcgggcctgcgcgtgggggagtccgggccgagcgggctcgggtttcctccgctcccccgcctgaggttgtgcaatcctccccgccgcctcctggcggaggagacgctctttccgggcttgggtttttctagaaaactggaggcggagctgatcctggaaataggcccgccgcctcggcgcccatcctcctcccggggttgtccgggacatgatgcttccggcttaggagcctggagtcctttcgtgtttgtcctgtccccacttaccaaccgggaggcatcacatgcccgcaactggaaacaactttttaatgaccccattttttgttccggccaacagacaactcttttaagttaggtcgttttgagaaatccacgggtcacaactttattcccaaaatggtgctttttttattttcagcaagaactaagaatacttcttatccgtgaactattggcgtggaaggtgctttggatgcgtttgtgtcttttgcaattatactgctttttcttaatgcagatggtcagtaggacagaaggtaacattgatgactcgctcattggtggaaatgcctccgctgaaggccccgagggcgaaggtaccgaaagcacagtaatcactggtgtcgatattgtcatgaaccatcacctgcaggaaacaagtttcacaaaagaagcctaccagaagtacatcaaagattacatgaaatcgtaagtgatactggcagtacctagctgatgtctagaatcttacaggatttaaagattggctaacttttgaggttctttcgcagtgggtatacttttgtgaaagtccttgcttttttattaatgagttcacggaaaagagtggttgcttttctataatatgagcatactgaagcctgcagtctgtttccgtttagaattagaatagtattttgaaaatagtcaacaagaaatgtaaacattcttgaaagataccttctgtgaactattaatttcttaacagctggttgcnnnnnnnnnnnnnnnnnnnnnnnnnnnnnnnnnnnnnnnnnnnnnnaaaaattgattttactgaaaattcattacttcaaccctgttatgaaatgttgttttagaatcaaagggaaacttgaagacagagaccagaaagagtaaaacccttttatgacatgggctgcagacaattcagcacatccttgctattttcaaaactaccaggaaataccttaagtatcctggatcaaaggattgtacaatttttaactgcaagagcgaaaataaggtgatttaatcctccattctaaactagtttcccaggaggtagaagatgagcttcccagcctcccagtggttaccaaaatcctgatctcggaattgaaaatttgcttctccaaaatgacaatt

SEQ ID NO: 180432 - DNA, 712 bp, Homo Sapiens
tacagtagagtttaaatgctgaaggagatcagagaacaccattgatcttcctctagatatggcctcactttcacttcataatcatattttgctgtatacgtatggatcagtatcagtggttttcactttggtttactgataatgggcagctgatcattgaaaagcctagtgcagtactagcttagtaaatagagctgactgctgaactggtatgcaaattgttttactaataataaataacttggtgtcttctatggaaggaactgctggaagctgtacagaaacaaaggcattcattatcctagttttcataggcttctgtataaggaagaagagaaacataaagctatactgaacaagattagagtcaacagtagacagaaattacttagaacagtataagatgacttaccaaaggggttattcagacagtatctgagtttttgttggtagagcagggtgtgggtggtacatgccacagccttctgaaaaatgagctaccgctgatttggtaagggtgttctgcatccactgatagaccttgaacaatttactgttgttcttttggtttgcactagatgcaaaagaaagaaatccctgcgctttctgtctgtctttgtggcggcccagattgaattgggaatacatctttagcctggaaatgtagctgcatgttaatggtaatgtaccttttgcatgtatgtttgaaaaa

SEQ ID NO: 180433 - DNA, 1429 bp, Homo Sapiens
  misc_feature (399)..(409): n is a, c, g, or t
  misc_feature (466)..(479): n is a, c, g, or t
agttggagaagttttaggcgaatcccaggcgcgccaaggaaagtgctacaaaagccatccatcttgcaagcgttggtgccgaggcgcaacgctgagaacgcaaatactaaagggcgctgttctttcctcgtggagctcacagtccgctggggagaccgtgagatgacagcagagaaactagcgcgatcagtagtactcagcgcaaggacagcgagcagagaaggcaaacctagtgcttgctaaggaagacttcacagaggaggtagtgtcagggccgagactaggagaaggattgtaagtgactagattttactttatccttctcgttaaccaaaattaatttacctctcaccttttctcctgttgtcgtcccacccctatcgaggcagtcacaccttnnnnnnnnnnnggaggggttattcctgcttttgccgtgctgtgatccagggcagaggtgaagtatgannnnnnnnnnnnnnatctgtagccctagaatatgacctcggtgatgagggtaacggtgtctccttggagccctagtggtttagatccatgaagatgcctgtgtttggtgagaaggtgtcaatagctccaccttcagcaaagacctctctgttcagctttttcgtttactgttagttccaaagggctagcatgctctttgccctaatacagtgacccagcatagcagtcttcctccagggccacctttgaaaatgatgccttaattcctgtatttcagttaactgaacctgtccagaaaccttagcacctgacttcctccaggagtgatccaataagctttcatcagaaaccctaataatgaccccactataccttaattttattgtatgtatatatatgccatataattattatagcaattacactatagttatttatataactaaatacctacatgtaactcagtatacgttaactccagaaccatgctgatgaattttgagtttcatatctccatttttttattgtgacccagtttctcgtcaaccagtaaaacatccagtaacacagccaatggaaataaatgaatgggtctctgtttatagtgaagattctttcgttctccagctccaggcttcatacggtaaaactctctgggaaggaaaggaactcagagtcccatgcagaaaattgttcagctggaggggtatcagaaagatggatttccaaagccaactgtttcctgtagtgtgtggatctctgcaagcagagcctcatctttcaatttcagctacatgaaagaggaagaaagggaaagatatatgtcatacgtgatatactttatgtggctttgaagacccctcttttgtggggctacggctaaagaacatagttccctgggatggaattggctcttcctatttccctacttcatgaaaactccagtagaagaccttagaacctt

SEQ ID NO: 180434 - DNA, 1119 bp, Homo Sapiens
  misc_feature (847)..(855): n is a, c, g, or t
ttggcttaaaccttctcatacaaaccttctcgtactcctcaacgatgaaatggtaacatcctacacactgacacgtattagtgatgagtgaagacattaatatttaaatggctaaacttaacttacatcttacattagattttacctttaatatagatttgattatttttcttttgtatgactatatagataacgaaaaatactattgttacgtaggatgccgaatttttgacacagttcaactcagtgagcttggtatgggaagcttttctgtatatggcatgtgttaaaattatcaccaaatcctcattgctttgataactctaggatttacattttcttaacctatgaatgtcatgggtaaaagctaagtcaagttttatttcatttgggtaagaaaataattatttgtatatacctgctcagactcatcctttctggccttaacactgtaaagagataaaatgcattagcctagaacattcacattggcgtgaatcttgtgtgaatgtccccactcttactcagtttcggatctttagaagcaaagtaggaatgtatgtgttatttttaatgagttcgaccagtaaagccagattgagaaaaacttcaccacgtttagccccactgacatttgataaccaaaatgttaaacctagatgcagatagactgcttaatgttgctagaatccatttagtaaagtaagctgtaaacacttctgggttggtactgaggaaagggttttgggaaagaatacaaagtagccaaggaggaaaggcacagctctattcgatgcaagaatgatgcccgttttttgaatttcctcttttaatatagtagactgannnnnnnnnaacttagtactttgaaagagctttaactgattgatatttgtaattcagtgacatttccccagcagcagcagggactcttttctgtctttgaaggaaacttcccacaatgatgagtccagcgatcactgacgatggatcctcactgaatgctgagtggttaaatgagattacttaccaggcggggacaggtgctctcagagatcagatacacaagctgagcagtttgccaagtttttaaaatcaattctttctcctaatttgaaa

SEQ ID NO: 180435 - DNA, 1506 bp, Homo Sapiens
  misc_feature (354)..(363): n is a, c, g, or t
ctttgtacaaaaaagttggctgagaaccagaatgcaaacttaagtaagatacagttcccactgtaggtgttttaatcctggtcttatatagaataaaccagtactttgctgagtgaaatcaccatatagaattcagtattaacagatcatgcattcagatgcttgaatgtgcattcttgttgtgggcttgatttagatcctattgcggggtcattacgcgaaaattcaatcataccttccatagacaaatgtctgatttttgtttaaatctgtccgttaggtggcctttccttatctgaggtgtagtggtctaacatttaggaagccttgctttgactttatcgggcagcattnnnnnnnnnncaacaaagaaaaaccaaacatgaattatagtttttaacaagtgatctttatctcctgtcttctgttaggatcatttgaaagaaaaagggagaacttactttctagttgttactggctggcacagtacctccctttgtgtttctgcttatttatttagattatgtgaatcttaaagggctttttatatcagttgaaagtgtgttactgcgcatgcatttggtgattccagtgctagatatttaattactgtgtatttagtgttttgattttctataatttcagttccgcgtgtttttacacttgttcattttaaattgatgtttcattttcacttataatactgtttgacttgtctctatcatgtcaccataaactgtaatattttcaagggttatagatcaaagatatttatttagaaatgtacaagataatgaaatttagattccttatacttaaggctgattttattagaagattattttaatgttctattataaattttaagaatttgtattcaaattgtatgtaaaatatgtaaaatgttgacggtactatattaagtggttctataaaagctattcacaagttctactgtgatggacatcctcatcatagacaaacctcctctgttttatcctcaatttctagtttacagaaatttggtgatgcttatttttgccaattttatgtcaaaataagttaaaacttccctcctgttcacctcttgggtctctatcctgtgtaacctccggtgtagtatttgcccataggcaaccagagccacttcctctgaacccaacatctcctggggaccttcgcagcaagaggaaagcactgagacaatagcttgctaagcaggggcccagtggtgtctcagagaaaccatgggtgtcctcgccacttcccagggagggtgaggtaagctcgggaacataacgatgttttgacttacaataggcatgaaatcgcaactagaaaaattagggcagtttctaaaaatgtcatagttatctattgcatgaactggagtaattccacctggtggtgaaaggattgttatttcacacatgacaaactcatccagtcttactaaaatgtaatcttttctgtcatttgaaagcactgaccactatttgtaactaa

SEQ ID NO: 180436 - DNA, 2632 bp, Homo Sapiens
  misc_feature (177)..(190): n is a, c, g, or t
ttggatttattataaccctgcaaagaagctgttgcactcaggaatgaaaattcttagccaggaaagaattcagagcctgaagcagagcatagacttcatggctgacttgcagaaaactcgaaagcagaaagatggaacagacacctcacagagtggggaggacggaggctgctggcnnnnnnnnnnnnnngactctggagatgccgaagcacacgccttcaagagtcccagcaaagaaaataaaaagaaagacaaagatatgcttgaagataagtttaaaagcaataatttagagagagagcaggagcagcttgaccgcatcgtgaaggaatctggaggaaagctgaccaggcggcttgtgaacagtcagtgcgaatttgaaagaagaaaaccagatggaacaacgacgttgggacttctccatcctgtggatcccattgtaggagagccaggctactgccctgtgagactgggaatgacaactggaagacttcagtctggagtgaatactttgcaggggttcaaagaggataaaaggaacaaagtcactccagtgttatatttgaattatgggccctacagttcttatgcaccgcattatgactccacatttgcaaatatcagcaaggatgattctgatttaatctattcaacctatggggaagactctgatcttccaagtgatttcagcatccatgagtttttggccacgtgccaagattatccgtatgtcatggcagatagtttactggatgttttaacaaaaggagggcattccaggaccctacaagagatggagatgtcattgcctgaagatgaaggccatactaggacacttgacacagcaaaagaaatggagcagattacagaagtagagccaccagggcgtttggactccagtactcaagacaggctcatagcgctgaaagcagtaacaaattttggcgttccagttgaagtttttgactctgaagaagctgaaatattccagaagaaacttgatgagaccaccagattgctcagggaactccaggaagcccagaatgaacgtttgagcaccagaccccctccgaacatgatctgtctcttgggtccctcatacagagaaatgcatcttgctgaacaagtgaccaataatcttaaagaacttgcacagcaagtaactccaggtgatatcgtaagcacgtatggagttcgaaaagcaatggggatttccattccttcccccgtcatggaaaacaactttgtggatttgacagaagacactgaagaacctaaaaagacggatgttgctgagtgtggacctggtggaagttgaggctgcctgatgtaaaacacccctttcagcttcatttaccagaatgcctctgtgagaaatgctgtcattgccaggcccaccagggagagggagtctccaatccgtgctagacagctcagcttactcccccttggtgtctagaaaaacagacctcacttgtgcgtgcccacaggccactgaggtggaagtctgttttcatcatgtgctaaagttgcctgcctggcacctcagggaacaaagatctcaaagtcagccccgaaccagtgaacattctccagctggcctggaaactgttacagaccaggcacagagcttctggcctcccctgcgcattatggctcagtggctgcttcgagccagaatctggtgcatgtgtctgagaaatcctccagtgcaggtccaaagaagccaacatgcacagccatctgcatgcctttgggattggcgtggggcggagagtcttctcctgggcttgcttcagaggaaggagactggcttcccggccttttcggaatccagcaggagccctcagttcagccccagcccctgaaacttggcagtgtccgtacagacaaagtaagtcctcagctcgcctttgcctttgacgttgatcaggccacggcattcacaagagtacccgaggccctggaggatggtgcaggtctcctcggtaacctggattttcccaagttctccagtgctttccattcggctggccacattgacagtgtttccccagatgtcatactgaggttttcgggccccaatcactccagcaatcacaggcccatggtttatgccgacgcggaggcggaaggagttgaaggagtgcctgttgatgccgtccagcttactcatcagggcgatgctgaactccaccatgacaccaatgtgggcatgctgccgctccagctcctggttctcgtgccctgaggcgacgctgagccctgcagctgccatgtacgtgctgccgatggtcttgatcttctccacgccgctgaacttgggcttcagtaggagctgcaggcaagaaggaagcggtgaagcagccgccactccatagccgcagccaggctgcccctgcttctcaggaagggtgtggggttccctccacccatcgccgcctctcgcacacacgtctcatggctgccctgccagctgagcgcatgactaagcatggtgaggacatggcccttggcggctcctgctcttcctgttgtctccgtccccacactgtctccctcttcccttccatctgtgtctgcacagagcaaacacagcattatctacacaggaatgtagattctttgccaa

SEQ ID NO: 180437 - DNA, 1629 bp, Homo Sapiens
  misc_feature (480)..(491): n is a, c, g, or t
  misc_feature (678)..(828): n is a, c, g, or t
ttggatttgtttgaaccaaaatggactaacaattatttgtacaactcagtattgtctaaatatcatattgttaaatctaggtttcttgaattctccatcaagcctggtcatgtcatgtagcatttggtgtctcaccatgcccaacagatattttgtgggaggatggagttgatcttcctcatgttaaaagattgaagggagtgttctgacttaattgataacagtctttcataacttcacaaatttttgagaatgacccaaggctaactgtgggaaaaattcacataaaaacatagcctatctatgaggagcaaaactatatttcagttgtgggctttacatttcatttaaccctcttaactgtcctgtgaaatgggttacagccttattttatagatgaggaagctgaagtttaagggatttgcatacggtcacgtaactagtgagttgtgcagctagggttagaataaacagatttannnnnnnnnnnncttagaaacagcaattaacaatgtgactcctaatcaaaagaaaagagatgtccttggggcttaaagtactatggtgggagtcttggactgagtaggtttgaaaatacaattttatgatcgtggagtactaggatttagtcattttgatgcagagcatttcctgatcaactgctgttgtggagtgtannnnnnnnnnnnnnnnnnnnnnnnnnnnnnnnnnnnnnnnnnnnnnnnnnnnnnnnnnnnnnnnnnnnnnnnnnnnnnnnnnnnnnnnnnnnnnnnnnnnnnnnnnnnnnnnnnnnnnnnnnnnnnnnnnnnnnnnnnnnnnnnnnnnnnnttgcctgtgatattattggctgtgggtttgccaaaatttgtttttttaaagaggaaaagataacggactgttggctgctttattggacagcacagctagcatatagatgcagataggtagtataacttgtttgtagtttaatataaatgttgtattttgtaattaggccaaatttgagtttcatcatggtgactatgaaaaacagtttctgcatgtactgagccgcaaggacaagactggaatcgttgtcaacaatcctaaccagtcagtgtttctcttcattgacagacagcacttgcagactccaaaaaacaaagctacaatcttcaagttatgcagcatctgcctctacctgccacaggaacagctcacccactgggcagttggcaccatagaggatcacctccgtccttatatgccagagtagagtactgaccagcaaaatggagaagatcagagaatgcagcagcagttttttttcttgttttcttaccactttattctttcagagtttaaagaaaatggactcatgcacagaacactatgcattttgaaacttgttcatcctggatttttttaaatcatttttatctcagaacttaaacaaaaattagatgtcgtgcacggactgtgtgaaagaagatgctttgcatatttgctgcactgcatcagtatcttactaaaaatgtgaaatgaaaggactattgtacactgaaatgcttaaatgtatctgaaagcacaaggtgatactcatttttatggtcttcccatttgtgctggtttttgcctctttgacatctg

SEQ ID NO: 180438 - DNA, 859 bp, Homo Sapiens
cctataaaagccaactttgtacaaaaaagttgggtgatattattggctgtgggtttgccaaaatttgtttttttagaaatgaaaaaataacagactgttggctgctttattggactccacaggctagcatatatatgcctataggtagtataacttgtttgtaatttaatataaatgttgtattttgtaattaggccaaatttgagtttcatcatggtgactatgaaaaattctttctgcatgtgctgagccccaaggactttactggaatcgttgtcaacaatcctaaccactcaatgtttctcttcattgacagacagcacttgcaggtaagcagcttttttgaaaaccacttacaggctcgttcaagaacttattggttaataaaccttttatatacaatttacttaaatgttgtgtcccccaaacactgcattatttttgaagttatttagaaagcaaaaaataagctgggattactcgcgtgagccaacgcggccggctgactttttaaatctaaaaggatgagggacatatatttaccacatccacatttgtttcaaataaccacttccatttgggcaccgtgtctcacgcttgtaatcataccagtttgggaagccgacgtgggacccgctctggccggtctttgttctttggaggcaagggagcacccctgcaaaggggggatccccgactttgggatatccccctcgccacccgcagacccaccttccaagagctacagcgtgtgctccataagctgaccactttgcatgtctatgaagaagaccctcgggaagcagtcagactgcactcacctcagacacactggaaaaacagtaagagaggagagaaa

SEQ ID NO: 180439 - DNA, 2080 bp, Homo Sapiens
  misc_feature (1260)..(1271): n is a, c, g, or t
  misc_feature (1809)..(1821): n is a, c, g, or t
aagtgctggaattacaggtgtgagccaccgtgcccggccaagtatctcttttctacagccttattaaactaactacaaacatttattttccaatttagttttactttcagtgcatatcaaagttgttgtactcttcagaccaacaaattaacttgagggcaaattacatagctttccatgtacccttttttcctcaggtgctaatcaaaggctctgaaaatggatactgctttagtgatgtctgctttattcttaaaatgcttatttcttttgctagatgtaaagatttggtgttaacaaaagtggttttaatatgtaaatatgaatgaatgcctttagtttaccctgtttgtctattattaatctgttttcatttatccttcatagaggaggatcctttcatgatcttgaatacatttcattagatattgttgcattttaagaatgaaaatacaactgttttctgtcttagattaatcctgctgctatgagaaactgaaaatcaagaatgtgatgcactttttacattactatataccatacatataccataggttgctttgatacctttcctgtagcacagccactaacaagagtgaatgaattataaaattctttttgggagggaatcaatacaagtaactaattcttagctgatattgtcctatgaaggacaataacttaggaatataagaattctgttaatagtacactttttggccttaaatgtcttctactactgaaaatagtttaaatcttagctttgtttctattattccctctctctgcctcagaaagaggaattgggaagaatggcttaaaggacgtggtgtcattgatttgttgctgatcttttagaaaacatttgtctatgtaagctggggacttattttttgtttgtatatagaggggaaatagtgctgccctgaaccaatcagatttagtttaaatcaaatcaatcaaaactccagctgtttctcttgtctttttacttagcaaaggaaaactttagtgaatgctacttgacaagaagaaaagtcatttctcaagcacatacccaaacttgaaggtgattgaacccaaaataatgggtgggaaacaccaaatgaggtggaggaatgagaaagatgtgtgggccaaagctatctggttatattttgatgttgccaatatcgcaaagccaaaattttaatttgcttatttaatatatttgttggccagagatctatttttatatcaatgtgccttgcatgtatattnnnnnnnnnnnnttggaaacgccatgtagtaatgcctgagatagtcgatggttcttaccacctcactaatttttatgcagtatgaaatgctcattctattgcccaactggtgctctctgtttaaagttacagatcttgcgaaactggaactattttataagctggggaagtgatttactttttttgttgtatcttttttgttcttagtctgttagtggctgtcctgtagtgggaaatagtaaaaggattcttcactcccttctcccctcagcaccttcttcaagtaaacatttcttgtgtgctttgaaaaaagtttcagcttgctgtctcttttagtgttttaaagaagtgttatacaaagcattgtttgcaaaatatagggagataatggagtccactttaatttggaattctgtgtgagctatgatccaagttatcagctctttccaactttaaaaattttgttaaaagcaccttgcttagaaaattttaaatatttatgtctgcaacaattgtctcaaaataataaactgtgcaattcttgtcattnnnnnnnnnnnnngatctgaattttccctaatgtgacttgttagtttctctctgtatttcctgccagtgtaaatgtgaaagctttgcttgcattacgttttagaaatgcattttgcacactcgaattttgccgaagctccgtgaaaaggttagatctaagtagatgaataaagctatgcacatgttttgaaagtttaatttgtgtgtcattaccaaaagtgaccgatttgtccttactactttgctgttgttagctttaccatctttggaaa

SEQ ID NO: 180440 - DNA, 1056 bp, Homo Sapiens
  misc_feature (331)..(342): n is a, c, g, or t
ttggctgtagtgggaaatagtaaaaggattcttcactcccttctcccctcagcaccttcttcaagtaaacatttcttgtgtgctttgaaaaaagtttcagcttgctgtctcttttagtgttttaaagaagtgttatacaaagcattgtttgcaaaatatagggagataatggagtccactttaatttggaattctgtgtgagctatgatccaagttatcagctctttccaactttaaaaattttgttaaaagcaccttgcttagaaaattttaaatatttatgtctgcaacaattgtctcaaaataataaactgtgcaattcttgtcattnnnnnnnnnnnngatctgaattttccctaatgtgacttgttagtttctctctgtatttcctgccagtgtaaatgtgaaagctttgcttgcattacgttttagaaatgcattttgcacactcgaattttgccgaagctccgtgaaaaggttagatctaagtagatgaataaagctatgcacatgttttgaaagtttaatttgtgtgtcattaccaaaagtgaccgatttgtccttactactttgctgttgttagctttaccatctttggaaacttggctcaaagttacatagttctgggctagctcatcagtggaactaggagagaggaaaactggcacctattttaataaagttcaatttaaacgagagcttgacttgtatctattaaagagcttttcttgaaacagggcagttttatcagctttacaaatcattggatgctcttccttagtaatattttggtttatttgatcaaatagaaatggaaagtaattcaaactgaaagacccttttttgtcatatggaacttggtgacgattttttgtcttaaagctggtttaaaggtaggataggcttttacctttattgctttagcataaatttggtttactgaattgactggcttgagattagaattattcagttgtttgtaagatcaacgcactggttgttttgaagataacgtgtatctctaacaaattgcccaagctgattagaacaagttta

SEQ ID NO: 180441 - DNA, 1276 bp, Homo Sapiens
ctttgaaataaatggccagagtttctccattttagaattttgttgtcctccttaatcatctgcttacctagtcattactcaatctgcagaaacttcataaaggaaaagtgctgcattgtttttacaaataacagtttgtagggaaaatatgacaaacctcaactatgggagttgtccacaatacaaaattttgaaaaaacattacatagtgataatatcatacttggttgttaggcttgttgcttccccacatcagaggcatctaatgatttatcttttgtaattgctgtgaacttttttaaataagccatttagtgtgaaattgtcatgtatcaaatggctattggaaatggactttactcaattttaattccactgtaaataaggacggagtcattcctacaaggctctcttcagagaaatagattaaaagtccaatttccaggtattattagtatagttatgccgctgggccacatcctcaacaacagctgatccctcttgtataaatatgttaactgtgcagaacagttatgttatgggacaaatataatggtcattatggtcagattggttgatgccacaccagtcaaggtagagtctgatagggcagtatcttaataaccctacccatgacttaactgttggatttgaaaggaaaacgtaggatttgctcttgtccccttacccgccacaaaattttgataatttgtttaaaagggagaggcagaggaaaagactagaagcataaatagctgctttaggtttgccagaggcacatagcttaacattagttcttaatatcgatgttatttttactaatgtaattaatcaacagagcaccaagattctttcatggtgaaaagggtgggcttctgttttggtatcttaaaatgtttcttttaaaatatacatcacctgtgtgagaaccaggaccacctgggagagtgatgaatcattggctccactcaaaagcattgctttactgagttttaaatttcacgctgttttgccgctcaagaaaggtcttaaagtagttaaaggatgccagcaatagtgcgaatagaattttcggttgtctgcataataaaaacacccattgcagcatgattggtatgttgctcttgcattattgggaatggtaaatcagttatgggctagaaactatggaatggccgtcctcatatgtgatgggattgctgattcagacttccctattttccatacaattttgttatgtgcagagttctaaagccattttataatactgcagtat

SEQ ID NO: 180442 - DNA, 813 bp, Homo Sapiens
  misc_feature (459)..(470): n is a, c, g, or t
ttggctattgcccaactggtgctctctgtttaaagttacagatcttgcgaaactggaactattttataagctggggaagtgatttactttttttgttgtatcttttttgttcttagtctgttagtggctgtcctgtagtgggaaatagtaaaaggattcttcactcccttctcccctcagcaccttcttcaagtaaacatttcttgtgtgctttgaaaaaagtttcagcttgctgtctcttttagtgttttaaagaagtgttatacaaagcattgtttgcaaaatatagggagataatggagtccactttaatttggaattctgtgtgagctatgatccaagttatcagctctttccaactttaaaaattttgttaaaagcaccttgcttagaaaattttaaatatttatgtctgcaacaattgtctcaaaataataaactgtgcaattcttgtcattnnnnnnnnnnnngatctgaattttccctaatgtgacttgttagtttctctctgtatttcctgccagtgtaaatgtgaaagctttgcttgcattacgttttagaaatgcattttgcacactcgaattttgccgaagctccgtgaaaaggttagatctaagtagatgaataaagctatgcacatgttttgaaagtttaatttgtgtgtcattaccaaaagtgaccgatttgtccttactactttgctgttgttagctttaccatctttggaaacttggctcaaagttacatagttctgggctagctcatcagtggaactagggagagaggaaaactggcacctattttaataaagtt

SEQ ID NO: 180443 - DNA, 1234 bp, Homo Sapiens
ttggtgctgaggttgacccgatgggcaggtgaagaaaatcaccttctccattccccttgatttctttatcgtgtgccgcacgaggcatgctgaagggacacacacctttccccctttttatttacaaagtagagagctgagaaagacagctcatgttctgttttgttttgtacacattatctttctcaagagatgtgatgtccttaagtaaactgacctgccttcatggcttgtcctgtaatgaatgcgttcaagacagtgttttggggacaggaaagaggcattcttaggtaagcggcggtgggggatggggtggggtggagaggaaacccttctaggaagtagttcaatgaaaaacctaaaaatgcccaaataaacattcgcttacatattatatatcttgggcttctttttatgacagttcattcagggacccagtcagtaaacaggtagttaacttcgtgtaaccaagcaagggttttgtttatcttttttaaagtagaaaaaagtgaggctcaaactctctctttctccttgtcataactattggtttacagtctttatttgtttaaaagtaaagcacattgtatgtatttatttggcaatacatgaggccattaaaaccctgagcctaaggtaccacagttagtctcatttgcctcttgtcctgtgaactccacttagaatggcattgaacttgggcagacataattctagtgtctgttccaaacgcactgtgtcacagaagctagaattaccattagaggcacaaacccctgagaatacacaagggggcacgcttccagtaaatgtgttggggaaggaggagggcagaggggacaggggacaggattcagctttgtggtgggtcctgagggttcctaccaggggtagccaggatctgggaaacaaatcagcgactctagtctgaagtggctgcctggttcgggggctgccttcagcaagattcaggcaggagagacggaaatagccaccttccaggcgtgagtcctggagataaaaatggattttaacctaggactgccgggagctggccctccgcggctgctcagactagggctgtgtgtgctggctctcgcctgtttccggtgtctaactggcttgtttctctttatggcttggcttcattccgacctgaggtggggccacatccaacccactgcccactggctgtccgtctggcctgcctcgcggttccaaccacagtggtgaa

SEQ ID NO: 180444 - DNA, 1579 bp, Homo Sapiens
  misc_feature (886)..(898): n is a, c, g, or t
ttgggaaaagaatatgattgagctatttgttttcctgaacacctcaccttttatgatgcaataagttactctgagtttcttggcagagtttttgacagctgttgctttcaatggattccattcctgtattccttatgggaggttgtttttaaaatagactactgcgattgaaatgaactcaatatgtagttaagttatagttttcttcaatgtatttttagttacttgggtcacaaatgttcaatttcagcatattttagggtgagtaatcaaaaatgtgaatttgcctttgatttcctaccactgtctgagctatcataaagcattctctttagttgtgatttgattctatagtctgtttctaaatgacatttgtctgtttcttaaatgatctcacagccatggtaataatagatgtgtactcagaagatcaataaggtaatattggaattcatgtgttttttgcaattaaggcaggcatttgccaatgtcttcttttaagcagtagttggaaacatctcaattacagtgtaacaccttagagctaaaaacatttgttcaacacaaactagaatcacaccttctcactagatatcaccaagggaatgtggttttaaaaataaaaagaaaacaatataacgtatcatggcaaccagagcttcccatattattgacaagtagggatcattaggttctggtttgaacattctgaatgtgaacaaaatgaaatagtagttaagaggtgttttcccactgtgtttaaagagaacactagtaattctggtttttctttctaactgctttactgtttcaagggtattcttttaaaactctgatttcaaaggatcagttgaatttatactttagttatgggtgttttgttacnnnnnnnnnnnnngtatcatgactcagtatggttcaatttcctagtaagaagtggggatttgtgtttttggagtcctcagctcacatgtcttgttcctccttcagcacaagctaggggagatcctaccaacactgataggtcagtcattgatggcaatttgaatgtgggtattactctgtgagccaccctgcttcgcttgtttgtaaggagaaatgcatctggttatgtgaatttcccgagagcagcagacatggagggccagactttaaaagcaacgcaagcagattcgaagagctgttgccctcttctaaaaaaggcttttggaggctgtgttacatgcatgccctaaagcagtcagtctgttagtatgagcaagacatctgaagtacacagttgcttttaggcttgtatagttattttctacacatgccaacacacatgatgataaaggaaccttttctaggaggcattgcagggtttcaatacacaggacatgttctagttacagaagccttgctctgctgtcaacaattgggaaatgctcattttttcatgttttgtgaatactctggtcttgctgtaagctaatgtcatggctgtgggatattagagaagtgggtttatgactctgaagaccagcagacaccagactttaaaagtgcttaaattgggaatttgggaaactacagtaaa

SEQ ID NO: 180445 - DNA, 1627 bp, Homo Sapiens
  misc_feature (838)..(1125): n is a, c, g, or t
  misc_feature (1128)..(1153): n is a, c, g, or t
  misc_feature (1208)..(1217): n is a, c, g, or t
ttggccatgagatccataatgccactttctgtttacatgtcttgttgtttggttagtagtcatcagagactaatctattaaatatggagccctctccattttttttcaaaatgactgcattttaagtttcttaaattgtaaagtaaggtgggtacagtttcttctagttcttagatggtgctgtcacgggccagcataattgctaaaacatccatacgtatggtagaccttaagtcatgtgctaatcatgaaagctgggctcaccctgaatacaggcagttgcctggtctttataatgattactgaatgcataaccagttacgcttgcatgtgttcatcatcataacttattttctaattatcttaattttcagaggttggaggtttgcaatgtccactcaagttgcaatgcaaaactctggctcatattcaatttctcagtttcaatccagaatgatcaggtaaatcaactgttttctttttatacttcgttaaaaggaaagtggggaggggggtggtaatttttacaggtttaatgtagttaaatgaatgtacctaaaggttgaagatttttgtttagttgcagaaaatagagtttaacgtctgtgtttaagataaatttaatgtctaaatgtattttatttgctgtataacactgaaagcactcattagagaaatgttgagactgaattttttaatatgctgatctttattttctaactttctgtgctgattaaattttattatctgtattcatcagagcgtaggccatacaaatgaatttaaagacatttttctttgacatcctagacaaaaatagaaaagagagtcattaaannnnnnnnnnnnnnnnnnnnnnnnnnnnnnnnnnnnnnnnnnnnnnnnnnnnnnnnnnnnnnnnnnnnnnnnnnnnnnnnnnnnnnnnnnnnnnnnnnnnnnnnnnnnnnnnnnnnnnnnnnnnnnnnnnnnnnnnnnnnnnnnnnnnnnnnnnnnnnnnnnnnnnnnnnnnnnnnnnnnnnnnnnnnnnnnnnnnnnnnnnnnnnnnnnnnnnnnnnnnnnnnnnnnnnnnnnnnnnnnnnnnnnnnnnnnnnnnnnnnnnnnnnnnnnnnnnnnnnnnnnnnnnnngtnnnnnnnnnnnnnnnnnnnnnnnnnngtttaaagagaatggtctttctatcacagggtaaaaaaattgattatttgagggnnnnnnnnnnggatttgtcttgtagccaggatattgttttaaagaaaatcctttttgtttttccaggtggaccaaactacgaattaacatgcttcctgctacaataatttgtgagccaatttcagaatgctttgttgccagtttaattattggatgggcagcccaccatgtgttcagatgggatattatggtatttttcatgtgtcattgcctggcatggtttatatttgactacattcaactcacgggtgtccaggtatgtggataggcatgaaaaggttggcagtcccttggtggaactagaactatttcaatttagaaaaagttgaaggaaatgtatctgagccatttcttcagcttctcattgtagttagtctcgggtttgaacatgactttctctagtggaatgttgatgcaaaa

SEQ ID NO: 180446 - DNA, 1689 bp, Homo Sapiens
  misc_feature (349)..(362): n is a, c, g, or t
  misc_feature (784)..(800): n is a, c, g, or t
  misc_feature (1326)..(1361): n is a, c, g, or t
  misc_feature (1542)..(1578): n is a, c, g, or t
actttgtacaaaaaagttggcagggtggcacactgtgtttttcaaaacttgattatgcagtcgcctggttcatccgcgaatccatgacaatatacatttttttgtctgcattatgggacccaactataagctggagaactggtcgctacagattacgctgtgggggtacagcagaggaaatcctagatgtataactacagctttgtgactgtatataaaggaaaaaagagaagtattataaattatgtttatataaatgcttttaaaaatctaccttctgtagttttatcacatgtatgttttggtatctgttctttaatttatttttgcatggcacttgcatctgtgnnnnnnnnnnnnnncacatctgtagtcttggccaaatgatacactttattttgtggaagtagagaatcaagagaattggttctaggaacctgggttcgttcatcattgttgtttatttttttaaaataaataaataaatatatatatagatgctctgcaacaaactctgtgacagtatccttcagtagagaaagtttcttacttgtgagtacactcttttagaacatttacgggtggcagcagctttgctttagagtttagaagataatagaaggaatgactattcatgtccaaagtgaatggttttgtgcagtgaacaacacatggcgaggtactaactgagaaactttttcatgctttatgcctacctcttgtagttgttgcagagcaaatataaattgtaataagatagctaggccttgcagaaacaaacagnnnnnnnnnnnnnnnnntgatataagagctggagtctagtatttatatgaatctgtgagagataatttttttggtctcactgcaatgaaccaaaagcggctgagtttggtttttaattgtagccatgtattgaaggcatctttttgaccaactcttgttggttctgtcttgaaccattgttaatcactgtgctgtaattagtatagctaaatcttttccttccttgctcctcccccagcccaccccgtcttcccttaacattttttcagggggggttgggagtggtttcattttagtgtgagtggatgttttgatagttgtaaggaaaaaatgcatttcagacacatttcacacatgagctattttcttacacagtatgtcttattgttaataagaatgtaatttcatgatacaagtatttaataccttttttaagtcagtaaatattctagccatcaataaattgcagtagagtattaagaggggacaggatgagtttactcttaaaattaatcagtatcaaactaagtctaccgtgtgtgnnnnnnnnnnnnnnnnnnnnnnnnnnnnnnnnnnnnactattatagtaagtctagtcttatttaaattggatttttgtattcaagtttatatgacaaaatagactagatcagcgctggttgtaaatgcatgctgtacctcactgttttctccccatcatgccgctaaacttgctcgccaggttgtgcttaacttgtggtgaactggacttgattctnnnnnnnnnnnnnnnnnnnnnnnnnnnnnnnnnnnnntgtaagggacagtgcataagccttttctttgttaagtagtggtgttttgctttttcttcagggattggatggcatgttgtccacagggaatgcctactgcagggctaacac

SEQ ID NO: 180447 - DNA, 1384 bp, Homo Sapiens
  misc_feature (246)..(278): n is a, c, g, or t
  misc_feature (477)..(494): n is a, c, g, or t
  misc_feature (830)..(851): n is a, c, g, or t
ttgggtggatgttttgatagttgtaaggaaaaaatgcatttcagacacatttcacacatgagctattttcttacacagtatgtcttattgttaataagaatgtaatttcatgatacaagtatttaataccttttttaagtcagtaaatattctagccatcaataaattgcagtagagtattaagaggggacaggatgagtttactcttaaaattaatcagtatcaaactaagtctactgtgtgtgnnnnnnnnnnnnnnnnnnnnnnnnnnnnnnnnnactattatagtaagtctagtcttatttaaattggatttttgtattccagtttatatgacaaaatagactagatcagcgctggttgtaaatgcatgctgtacctcactgttttctccccatcatgccgctaaacttgctcgccaggttgtgcttaacttgtggtgaactggacttgattctgttttgttttgtttttttnnnnnnnnnnnnnnnnnntgtaagggacagtgcataagccttttctttgttaagtagtggtgttttgctttttcttcaggattggatggcatgttgtccacaggaatgcctactgcagggctaacactggcaatatggcagctttaaattctgagttactacagtctccatgtcaaagcataatgtgtagcatatcagcaataactacatatttatagaaaacactttttcactttactgagccaattcatttaattgtcaaatgtctatatccatggtttaaatggcaacatatctataagtatgtatacacattatatttaagcttttctctgggccaaactgcttcatccnnnnnnnnnnnnnnnnnnnnnnagccttatgatgaatttgtttgaagggcattttctttatgaacaaaggcttggatgcatattcctttctttctgtgaatgggtattattccctgaggaaagttgcacagtgaaaaccagtctggttgtgacccactacatgttttgtttttaatcactattacctgagttgaactttgctcaccatgtttgtacttgttggtctgtttaatgaagtttggttgatgccatcctttgcactgccgaagcgtaatcttgtgtattacttagctctctgctgatctcagtatggacagtgtaacaacaaaaccaaaatggctggacagacttcttgtgttttgtaaatataaactaggacagttctgtaggtttgttcagtgtgctagtggagtatttccttaatgtaaaacttcacttaacagagagattctttgtttagcaagcttggagtgatgataaaatggtaagaaataatataaatgttgaagaaagcatcacaacagaactataggagtctaaatttaataaatcttt

SEQ ID NO: 180448 - DNA, 1253 bp, Homo Sapiens
  misc_feature (64)..(77): n is a, c, g, or t
  misc_feature (499)..(515): n is a, c, g, or t
  misc_feature (1041)..(1073): n is a, c, g, or t
ttggcacatgtatgttttggtatctgttctttaatttatttttgcatggcacttgcatctgtgnnnnnnnnnnnnnncacatctgtagtcttggccaaatgatacactttattttgtggaagtagagaatcaagagaattggttctaggaacctgggttcgttcatcattgttgtttatttttttaaaataaataaataaatatatatatagatgctctgcaacaaactctgtgacagtatccttcagtagagaaagtttcttacttgtgagtacactcttttagaacatttacgggtggcagcagctttgctttagagtttagaagataatagaaggaatgactattcatgtccaaagtgaatggttttgtgcagggaacaacacatggcgaggtactaactgagaaactttttcatgctttatgcctacctcttgtagttgttgcaaagcaaatataaattgtaataagatagctaggccttgcagaaacaaacagnnnnnnnnnnnnnnnnntgatataagagctggagtctagtatttatatgaatctgtgagagataatttttttggtctcactgcaatgaaccaaaagcggctgagtttggtttttaattgtacccatgtattgaaggcatctttttgaccaactcttgttggttctgtcttgaaccattgttaatcactgtgctgtaattagtatagctaaatcttttccttccttgctcctcccccagcccaccccgtcttcccttaacattttttcagggggggttgggagtggtttcattttagtgtgagtggatgttttgatagttgtaaggaaaaaatgcatttcagacacatttcacacatgagctattttcttacacagtatgtcttattgttaataagaatgtaatttcatgatacaagtatttaataccttttttaagtcagtaaatattctagccatcaataaattgcagtagagtattaagaggggacaggatgagtttactcttaaaattaatcagtatcaaactaagtctactgtgtgtgnnnnnnnnnnnnnnnnnnnnnnnnnnnnnnnnnactattatagtaagtctagtcttatttaaattggatttttgtattccagtttatatgacaaaatagactagatcagcgctggttgtaaatgcatgctgtacctcactgttttctccccatcatgccgctaaacttgctcgccaggttgtgcttaacttgtggtgaactggacttgattct

SEQ ID NO: 180449 - DNA, 1205 bp, Homo Sapiens
  misc_feature (312)..(338): n is a, c, g, or t
  misc_feature (794)..(835): n is a, c, g, or t
ttatcctgcaaaatttgaaaaggaaattcaaatcaacagcttctaaactactttttaacatgactcataataatacattctatagtacatatgtatgttctataactttgaataaaagagttaaccacatcacatttattttataacatgtaatacatattttttattctccttcatttgttttgaatgctctgtgcagtctacaaaaagtccaatagtaataattaaattagtcattaagttgaacattatcttgtcttttaaaatgataatctcaaaaatgatcttttatttttgagatttatatagatnnnnnnnnnnnnnnnnnnnnnnnnnnngagaaactcaactctgaacacaggatatttaataccctgacatcttatttttgattagatacatcagtaaagtttttctgtaaggcagtatttgtttcaaagaaagaaaatatagatggtatttgtgtgttccttctctgagacctgattcacacctcttcacttaggtgaattatatagaaaacaataactaaatttatccccaaatagttttaacatagaaagccttgttagggaagaaagtgccacttaaccagaagtgataacatagatttgacaagagactgacatcagagcaaaatattttgttgttttgagtgttagttaaagcagttactggataaaaacataaagctttaccttggaggtgctggttagattactgggccatcaataggaagtgtatgatgaaattattttagaatctatctccttagatacttagatattaacgannnnnnnnnnnnnnnnnnnnnnnnnnnnnnnnnnnnnnnnnnataaaaactagtccttactttgattgaggttcttatgaagaatggaaaaacaggacaatggttctttaaacttatgaagcgaatttgcttgcacctgattgaattgaaacagcaattctgctgctttcaagctcctctgccattatcgctggtctgtaatgaaatcacgactgtgcatttgatagcatcaataacattcatctgattaggttgttatggttgttaacgaactgcaaacctactgtcattgcttgtcatttcttgacagtgttaagtccaaaagtgctgggcattgccatcgctcggtatgacttctgtgcaagagatatgagagagttgtccttgttgaaaggagatgtggtgaagattt

SEQ ID NO: 180450 - DNA, 763 bp, Homo Sapiens
ctactactgtcctttttgagctaatttttagtttttagacaatgaaagcatatttttctctctgctttattaaatctgtaaaatataagatacatatgcgtatgttccattcctttctgtggctggtataaactttaaattatcagtctagggcactgggcactcgcatgcacacacacccccctcgcagataaagatatggaaaggtcagcaatacatgaattcattatggtgttttgttacatctgaaaacacctttagccgagacaaatggaaatggaatatggtttactacccccacatttaaggcatcctggagctaagggtatggtatttcaacctagctacataaacatttttaatacttaccagggttggcaagaataatctactggtttgggcacacatgggcaaggcttgactgcatcacttggaaaaaatccaacctctccagatgctaaatttctgccctgccaaaacagactgtgtgcatctcctttcagaagttcaacggtatccccggcctggagctgtaaagggggtccttcatgcagagctgggggtggtgttccagaatagttcctaatgacctgcatctttggtaaacctggatccacctgtttaggagttcttcgcagtccattggtccgtttctctggtagtttgagtgtcccttgttctgaaagaaatgtaaaaattggcattgtcagtgtaaagttattttgtttggttagcaaccttagctttctctgcagagtgccaa

SEQ ID NO: 180451 - DNA, 1110 bp, Homo Sapiens
  misc_feature (336)..(592): n is a, c, g, or t
  misc_feature (594)..(620): n is a, c, g, or t
ttggatttcttttatcaacagacttgttttcttagcaaaaagggaggacgtattgatgtcactgctttccattcaactaagttggtatttgtgttcagatttagggattcctgcttgcccgaaccgttcatttatcttttaccttgtaattgtcccaacagccctgtgaggtaggataattatccctattttaaaattaggtaaggaagactaggagagcataaatgactatgtaagaccccttagcccaacagcagtggggcccaaggttcaaatctagacttcctgggtgaggactctgggtttgttgttaaacttaagctgtttatcctgagnnnnnnnnnnnnnnnnnnnnnnnnnnnnnnnnnnnnnnnnnnnnnnnnnnnnnnnnnnnnnnnnnnnnnnnnnnnnnnnnnnnnnnnnnnnnnnnnnnnnnnnnnnnnnnnnnnnnnnnnnnnnnnnnnnnnnnnnnnnnnnnnnnnnnnnnnnnnnnnnnnnnnnnnnnnnnnnnnnnnnnnnnnnnnnnnnnnnnnnnnnnnnnnnnnnnnnnnnnnnnnnnnnnnnnnnnnnnnnnnnnnnnnnnnnnnnnnnncnnnnnnnnnnnnnnnnnnnnnnnnnnntggggagtatgggagccagtgcaccacaggccaacttaatattatgatgattcctcctcgtagggagaagacctgggcaggatgcaggtagggtgactggttgtctgggtttgcctgtgactaagggggtttctaggaacttgggccttgcaaactagaatgaattggtcaccttcaagcggagtctggagaagtcaagacacttggcctgacactctaaaagggtcagcatcttccttgcccacctccaaggagatttaaatactccttcctgcgtgctccagaacactaacttcatacctgtttacattctgccttcttcatttaatccagctgctgggtaaacagccagcatggggccttgcgtgagcacaggccggcaagtgttaaatgagcaagtggctgctgaaggcaggtcagacagacccacagtctgtctgtctgtgcacccctctgggcttctatttggctattatttctgtgtctcttg

SEQ ID NO: 180452 - DNA, 1652 bp, Homo Sapiens
  misc_feature (985)..(1088): n is a, c, g, or t
ttggcattactgtatttgaatttgatgtaacaagggaatttgtttgcttactttaaaagaacaatacttcaaaaatgttaaagtcatgatgggatacagtggaccatacccatagaaagaggcaagggtattttcccacagggccagatagagcaagggagcactaatgaggtgagttctctgaattctaaagaatcagattactataataataataatatgctggaggctctgtcttttgaagctgaatagcaatattatttaaaattgatattagttcagtgttttggtgactgagtaggaaatgggtggggtgttttgcaggctgaattggccagtccactgaacgaggctgatgggcatcggggcataatcccagccaataccaggctccacaccacgctctcagtcagcctggggaatgagacccaaactgctcatacagaattacgcatttccacttctaatgcacccagtttcatgtatttgaatcgacaagacagctccctcgattctccatgtatgcgctgaccagcctggaccctgccagtgagccaatcagttatgttaactttaccattgcagaacgggcacagagggtgagtatctcgcttttctctttcaatgcttttacacagtagaatcctttagatgttatttcatagaaagggaaaattacattaatgtgttatattggtagcagtaaatatgatatgaaagaattctctaacttgggggtggcttgtaacctgtaataaaaatattgctaaaataccttctctcactttgaaaaagcatctgagcaatcctcagttattggtgaattcttaccagtgtttaattcctctctttccgttatggtcttagtgtggttgtcctggtgtagtatttcaagaggaacctgcagcaagatgaaaagagagtgggacttggagctaagaacgtttttggctttaagtgctacgttaactcattaaattcttannnnnnnnnnnnnnnnnnnnnnnnnnnnnnnnnnnnnnnnnnnnnnnnnnnnnnnnnnnnnnnnnnnnnnnnnnnnnnnnnnnnnnnnnnnnnnnnnnnnnnnnttggtgtaacagtagcaccttgtacatttgaaaggactaataccagtggactttaaccttggctgggctttggaattcttggtgggactttttaatcatgtagattctcaggcccctgcctggcctgtggaaccacagactctataggtgggcccttccagaaggcctcatgggtggttctcatgtggaacctgtgttgcaagccactgcatggtgttactgctattaacattaaaacttatattttccttattgtgtggatatatctgtggtgtttgcccatgtatacttcattttacatttcttaaagaatagaatggaatggttttaagcacgctacattgtccaggttatacccacagaagagctgttgtgtaacagaatcagcatcatacctgaatcatttgtacattgcatataagactatgtctaagtagaagatgctatgaaatcatgtctgctgtggggccaggcataattatgaatgttacttaagagcatagtgagtgagaaaaggaatgtgactagtgttttagtattttcttggtgtgggatgaagtataa

SEQ ID NO: 180453 - DNA, 1123 bp, Homo Sapiens
tacaaaaaagttggcccagcttctgtattaaaatagcctgaccttggcaaactctgggggagtggcaagtcccactgtgcccactgggtggcagtagtgcttcagatgagttgtatggactaggggttgctgggcctttctccaggtaattagccatctgtcctactccagagttgacctttggactccacagaagcacttacatgtgggcccctcaccttaactatgggggcaggagtgtgtgtcccatgactgaggctctggagctggagacagtgaagttgatcctggaataaatcagaggcaggctacagtcccaaaccctgctaggacctctagtcaagcagacaagttctttcctcactccatgctgcaggggcacaggcccagggtctggcaacaaacaggagcagctgtggtcactggggcctggagcctgctggacatgacatcatgcgggcatgcccctactgtgtccctctgtgctagtagactgtgcaggtgcctgtgtactcggagcaggagtaccagctttatctccacgatgatgcttggactaaggcagaaactgaccacctctttgacctcagccgccgctttgacctgcgttttgttgttatccatgaccggtatgaccaccagcagttcaagaagcgttctgtggaagacctgaaggagcggtactaccacatctgtgctaagcttgccaacgtgcgggctgtgccaggcacagaccttaagataccagtatttgatgctgggcacgaacgacggcggaaggaacagcttgagcgtctctacaaccggaccccagagcaggtggcagaggaggagtacctgctacaggagctgcgcaagattgaggcccggaagaagagcgggagaaacgcagccaggacctgcagaagctgatcacagcggcagacaccactgcagagcagcggcgcacggaacgcaaggcccccaaaaagaagctaccccagaaaaaggaggctgagaagccggtgcggaaggttccgccagcctagctcaggtggagggtcacctggcacaaggcctcaccccgagtggaagggttctgagagtacccagtgctgatggggtgctaggactaaccctgggg

SEQ ID NO: 180454 - DNA, 1246 bp, Homo Sapiens
  misc_feature (175)..(183): n is a, c, g, or t
ttggattaggcaaagattgtttaacagttggtgagtttaagttaagtgaccttcagattttagcaatttcatgatttacaaatcgtgggttatatttttttctcttaaatatatttctgtgtcatatttttagtctgtagattttcttatggtcccatgattattggtgtatacnnnnnnnnncttggtaagacctttaagttttatgattttcaattgagataatgtataatgtttgagttttaggctatataaggaattagctttcctgcatttaaaggaatcatttggcagtcagtagcatattttcctgattttttgttgttgttaaaggagataagttgataactgtatgttgaagggttctcatgatattctctaaaaagtgcaaatatcagtgcttgatttatagatgtgtaataaacagtggtctgtaaaagcatgtagtataaaaaatatggtattttcccttatatacagcctataaactcttcctattccttgagtttagggtagactaacaaattacagcgtagaagagagtcagctaccagattaaatgcatgcgtaccatacagataatttattaagtatttttgcatattgaacattgacttacattaattttcccttttcaccaccacgtctttgtcattttgaccctgaacacttaataaatcactcagattgatctaaaatatgcttatgtatactttaatagaaaattacattgcatggctttctgacttgggtttttgttataaaagtgcctgttttgttcatgtgtcctgagagagcaagcattgtgacatacctgactaacttaaaagcagattgcctgtgaagcacaatttgagtccaattttttgaggtatggagttttagctatcatggctgggtttttactcaatctcaaataatagggctctggttattttgcagagtgtctctgaagaatggacagaattgccctggctaactacaagctacggttcacagtggataaatgttggcgtgcttttttactttctgactttttaaaattttgcttttatatcttgtagttccaatcaattttatatgaatgctattataaaattcagtgtaaaatcttttcttgtctagcttaaaacttgtgtgtgtctagtatttttcttcaatgatttaacatttctgaaaatgtcaagttctcaaaatttagacaaaagggggggtataaattggatctgaaaaaattaaatagttt

SEQ ID NO: 180455 - DNA, 1791 bp, Homo Sapiens
  misc_feature (644)..(682): n is a, c, g, or t
gcaatgcttttttcataatggccaactttgtacaaaaaagttggcttaataaatcactcagattgatctaaaatatgcttatgtatactttaatagaaaattacattgcatggctttctgacttgggtttttgttataaaagtgcctgttttgttcatgtgtcctgagagagcaagcattgtgacatacctgactaacttaaaagcagattgcctgtgaagcacaatttgagtccaattttttgaggtatggagttttagctatcatggctgggtttttactcaatctcaaataatagggctctggttattttgcagagtgtctctgaagaatggacagaattgccctggctaactacaagctacggttcacagtggataaatgttggcgtgcttttttactttctgactttttaaaattttgcttttatatcttgtagttccaatcaattttatatgaatgctattataaaattcagtgtaaaatcttttcttgtctagcttaaaacttgtgtgtgtctagtatttttcttcaatgatttaacatttctgaaaatgtcaagttctcaaaatttagacaaaaaggggggtataaattgatctgaaaaaattaaatagtttaattagtttagggaatatacaacnnnnnnnnnnnnnnnnnnnnnnnnnnnnnnnnnnnnnnnaatgattaggtagaatatagtgtcaaataagttataaattgcatggttaaagaaagccattcatctaatgtcctgtgaactttataagtggttaagtagttcatgtgagtagctgctttcaccatgcttaatatttaaaagtttaaaaagttttttgaaagagagaggcaatttctgtacaatataaatatacatatatacttaagttattgatttgcatgtctataaaattaagcctcatttcctaatacatgataaattttgtagaataaaaggtgaatttgcattaaaggttcactttaatgaaggtgaaacatgagaatgagttgtgtgtgaaattcttatttgatatccagaggatagtttgcaaacctaaacttctgattgtttctgatttcagagatgcccgagtggtaaaagacatggcaacaggaaagtctaagggatatggctttgtctcctttttcaacaaatgggatgctgaaaacgccattcaacagatgggtggccagtggcttggtggaagacaaatcagaactaactgggcaacccgaaagcctcccgctccaaagagtacatatgagtcaaataccaaacagctatcatatgatgaggttgtaaatcagtctagtccaagcaactgtactgtatactgtggaggtgttacttctgggctaacagaacaactaatgcgtcagactttttcaccatttggacaaataatggaaattcgagtctttccagataaaggatattcatttgttcggttcaattcccatgaaagtgcagcacatgcaattgtttctgttaatggtactaccattgaaggtcatgttgtgaaatgctattggggcaaagaaactcttgatatgataaatcccgtgcaacagcagaatcaaattggatatccccaaccttatggccagtggggccagtggtatggaaatgcacaacaaattggcccagtatatgcctaatggttggcaagttccctgcatatgggaatgtatggccaggcatggaaaccagcaaaggatttaatcagacacagtcttctgcaccatggatgggacaaattatggagtgcaaaccgccctcaggcaaaatgg

SEQ ID NO: 180456 - DNA, 1354 bp, Homo Sapiens
  misc_feature (400)..(445): n is a, c, g, or t
tacccctgccactcgatacccagaaggctgattgggcaacatgctgccattttgcccttgaggcggttgcactccataatttggtcccatccatggtgcagaagactgtgtgtgattaaatccttgctggttccatgcctggccatacattccatatgcaggaacttgccaaccattaggcatatactggccaatttgttgtgcatttccataccactggccccactggccataaggttggggatatccaatttgattctgctattaaataaaatttagtattacttgaagttaactatatatatacaatcctaatatgctgataccacaaattcttagccaaaacacacagggccatcattacaattaaaatgacaggataaacaagagttgattggtnnnnnnnnnnnnnnnnnnnnnnnnnnnnnnnnnnnnnnnnnnnnnngtgaggttatactgctgtaactctacgtgatactctgaatggcatagtttttggaaggcatcagttgataccctagtaataaatgttaaacttagtagaatgtttaagtgtttggtatactatctacatgattgtttcctttagatagggaagatgtgattaattatttctatattcagcttacttaagacacttatatagtttaggatttgcttactcccatctctgtgctccatttacagtttcctcatagaaatctttgtggaatcaagtttgaaccactaaagctgcctggaaaaaaaaggcagcaaaatctggaagaaaaatgccaaggccataactatatttacagctttatttttgtttcagttgagtcaagcatgcttgtgagttctccaaatggtatgtgaataaatctaccaagtattaaaaaaagatgtaatacccttttaggtttctcggagcattttaaaatccactgtgtgagcatgagtcaattgaggcggtcacattcatcatgtcaccactgcaatccatgaaacaccattctggaactataatacatgtaggaagagcccttatatactatcattttagctagaaacttattaacaaggattatcaacaatcttcaccttaaaataacattattagcccaacaattacttctcaaagttaagaaccctctcacctgttgcacgggatttatcatatcaagagtttctttgccccaatagcatttcacaacatgaccttcaatggtagtaccattaacagaaacaattgcatgtgctgcactttcatgggaattgaacctattgaaaacaatattaagaatcaccaatacaaattcttttaaatatttatgaataaaacctatttttaaaaatcaaggtgagtctgagccaa

SEQ ID NO: 180457 - DNA, 1000 bp, Homo Sapiens
  misc_feature (849)..(849): n is a, c, g, or t
tgagcaatgctttttctataatagccaactttgtacaaaaaagttggaactttgctggctgctcctaggctcccggctcgccgccatcttgtattggggtttcattgttcccgctgggccgggcggtttagtgtaattgccgccggaggaggaggcggagtaacctctggtcagccgagaaaccccactatcctgtagccataaccgcttaaacgatttgggaggtagtgaagggcagggagctggacctggaggcgccgccgcgacagcagcagccatggaggacgagatgcccaagactctatacgtcggtaacctttccagagatgtgacagaagctctaattctgcaactctttagccagattggaccttgtaaaaactgcaaaatgattatggatacagctggaaatgatccctattgttttgtggagtttcatgagcatcgtcatgcagctgcagcattagctgctatgaatggacggaagataatgggtaaggaagtcaaagtgaattgggcaacaacccctagcagtcaaaagaaagatacaagcagtaagtatattttatgctctttgaacatttgtttttattgtacccagtagttttattgtaaagcctataaacatcatacatgtttgcagtaatgttttgatcgttatcctaagatatgattgaatgtgtttgtgttaataaatttaagaacaaatctaatctttgtcatcaggtagtaccgttgtcagcacacagcgttcacaaggtaattgtatcttcttaaacataaaatgaaatctcttgaaagggtattcactaaccacctgaagtttttttgtttgatatttgggggagngggggcgggaggagatattatttctatttgtctctctagcaatacttttctcccttctcagtgttgaccaagtataacttgtccgctactttggtgctagttcaagctttctgacccgtttggtagcagctgatgccttagaactactttc

SEQ ID NO: 180458 - DNA, 902 bp, Homo Sapiens
ttggatttcatgtgtcaacttcaacatttacatgtattatttcattatgtaaaatgttttagcaatttaatattttgcacagttagcaaactttgtatgtcatttccttcaaggcatcatgcagagttgacatgagatttataaggttttaagttgtttgcatgtgaaaatcaaatacatactttggtagtctttgaatacaaagtcatctgctcttgtttttcaagaattttgagacacaaagttgtatgtaaaggaatatattaatttgccgttttctaggtagatttgctcaaaaagagtgaatcaacttaatatgtacaaatgatagctgtgaaactgtagaatatctttgtgtcaggcttggagttcattgtgacctccaaattttgcctgaaggaccagctgggcaaagcatcttttaaatgttcagaggccaaaagataaacaaaagaaaaaccttaaaatcctacctctttaaacagccttcagataagagaatcctcagtgcaatcattattttgattcgtttggtacctgttttcctggagttcccgattttattattttggggtggctccaagcattaagaggtttaatctttgatggcattgttctagttttgaaatttctagtatatttcagagtctcttagaagacttgtgtgggaagtttcactttgttttcagtgaagatcacaaacctccttcttcctttactcaagaggaaaggtctccagtatacatatttgaatggttgatggttttcaagaccttcagggagctctctgcattttacctagaaacagaaaaggcccgcaaaatcttaagtttcctggcctgcatttcccgggtaggggcaatgactccaagctggtctctaagccaatacccttataaacc

SEQ ID NO: 180459 - DNA, 1744 bp, Homo Sapiens
  misc_feature (307)..(529): n is a, c, g, or t
ttgggaagaactaggtatatctgcttatattatggcatctatagtagcttagctgctcatatttgggtctctttagaaccagtgtctttcaaagagggttttaactatgctggtgtaaattttaagaatagatacattcaaagaagaattcaacattcatgtgacattcatactttggaactttgggaaagtataggaatgaccatagattggcttagggatagtcaatttacctgtctgtaaatggatccaatttagtattgttcctgtatttttctaagaccaacacttgtgtcattcacagttnnnnnnnnnnnnnnnnnnnnnnnnnnnnnnnnnnnnnnnnnnnnnnnnnnnnnnnnnnnnnnnnnnnnnnnnnnnnnnnnnnnnnnnnnnnnnnnnnnnnnnnnnnnnnnnnnnnnnnnnnnnnnnnnnnnnnnnnnnnnnnnnnnnnnnnnnnnnnnnnnnnnnnnnnnnnnnnnnnnnnnnnnnnnnnnnnnnnnnnnnnnnnnnnnnnnnnnnnnnnnnnatatgctctaatatattttaaaatacatattttaaatatattttgagtggtaaaatgtagcagataatgttacataaaagaagccatggtaatgacatgacattactggttttgagttgtttgtgtagtagttagctattaatattcaggtataatgatttgctatttaaactacacaaatgctcaaagtccagcgataccctgcacccaaattcagtggctagattaccttcttaggaaagcacaacacttcaatggagtgacactggcatgagtccactagagggtgtgtatacatggcctgagttcaaattgttcctgctgtgagtactgcttttcagcttcaagttattcttatcggccacagtactgtttattccacttagtaacagttctgtttacagagcactttaacataaattctgatttttaacatgaaagctgtctgatgttggtatttttattttaatctttagagatcaagaaatttttttagtgacagaatagggactttattgatccttaaatccgcccctcaccacaataaaggaaaaaagcaaaaacatccttgactcatgtattgaagggtcttttttgagaagggtcagtttttgaaaaattatccaaaactgaaacatctgtcatctgtatcacatctaaagattaacagtgactgatgaccaccagttacttcatatgaaagtgggaaaccgtatcagttatttgtccactaagttggtaggtgctttttgtacaaaagcccaggagaatatgatctgtaaattctagttgagtgatgaagatggggctttgaattaatctacagtcttggaattaattctgcagcattttaaccagggaattttcagtagtcataaatctatattttaatactgagtaaatgtcctcatttacccccaccaattttgtaaagcagatattaaccaaacttcaatagttataagacaaaaatttaatgaaaattggacagtatgtataatccagggctaaatagttacattggactggagtagaaatttaaaatacaatagatgctggagtaaatgttacatattatcatcatctgattcatcttcttccttcagagattcctgttaagagaaaacaggtgtttaaattgatttttaaaattgttatatcccacacctgtggggcaagttaagctacaacaacctgaattaagtggttaaattc

SEQ ID NO: 180460 - DNA, 1091 bp, Homo Sapiens
  misc_feature (207)..(222): n is a, c, g, or t
ttgggtaacatttagggattgacatgttttacatccttaactatcttgctatttgtaatttacaatttttattcatgtaacttaagtatttttccattcactaaatgggacaggaagttttaactcttgcattcaacacgttaatgcaatagccctgcagctcgcatttgtaaatcatgttcccaaaaggataaaaatgcatatacnnnnnnnnnnnnnnnnttaacataaataaaaaagaccccccagttattttaaaaatacacattattccctcatctttcccttcttaagctgcctcagatctagatcccacaccagttgctcctacatctggtaaaactaaggtgtcttgtaaaaataagagatctaagacagacagaccttcgctgtcaagacaaaatatcaagatgcaaatgcctggctgaaatggattaaataatccattagcacttcaaataaaagcgattattacacttgtacgcacagtaggccagaatcccagattatcccctttccactcagataaggactgtatggtggctctttttcaaaatcccattgcttgggataatccaacatactgagctctctctgctatttcctgaaatttaacaccctgcaggtcagccccctatggcaatccggcttccacctctgaatgctgaatgctgaatgcacaaagtttactttgtgcgtctcaggtcaggaggaaaatttagtgttccttggaagcattaaacgatgatggaaagagctcaagcctttccaagactttgcccatcagtccatgcttagccatccccaaacaaatgtatagtggtaagtggaagacctttactggacactctgccaaataattggagcagtacttgtgctgtaatccaattgggtatccccttcatcctggcatttcatcaatctacaaaggtaaaaacaaaacaccacaggccaagaaaaacgtatgagtcctttaatcctcacgtttacataaatgctattaagtcctgtgagaagtgcccgataagtttaaagcacaaaatcaaatagctgcagaatttaaatccacatcattctggtaactataaaaa

SEQ ID NO: 180461 - DNA, 966 bp, Homo Sapiens
ttggcttacccctaacccaagtccgtgggagcccggggcacaggcggtcccggcagtcagccttcgattcccgccccatccccatccccctttgttggcggtggatgcggcgtccgttctcaacccgcagggcctggggccgggcctcggcctcttttccccgtggcagccgcaggccctgtgtggcagggatggggccccgcgatctcccaggcaggtccgagagggatgtgtagattcattctcctgtggagaacaggtggccccgagatcaggcccttttttgctctttgtattttattttgaaactgtatttaatgcttttatatgaaagggggaggggcggggacagagctgacccagtcacccttatgtgcaaatgtcttatttattatgcgtgtatcagagataagctgtgaggtggtggagggaggacctgaaggaaggaggagcgagggcagaggcggggacgggaggaccccaactagctgtgctgatgttaatcccgctgggagactccgggccctactgtctgctcttcacaaagccaggctgctgcaggaacagttcccgcggtcctaaagccggggcggggaggctagtgggtggaacttgagggttgggtctggaggaagagatgcctgggcagcgtggtccagcccctgcctcggggtggaaaggcagagagcaaagaggaggcccctcttattccggacccccaggccagagcccaggagtgggaaagcagagggcaaagaggaggcccctcctctcatccctgacccccaggccagagcctaaggttcaagtgcctcaagcccagtccccttgacgcttcctgtttgggagttggattttataccacggattttatagcatttttatataattgaggattgtcagaattggaaagggccctggagatcactagtactaccctcctcaccttcacagataggtaaattg

SEQ ID NO: 180462 - DNA, 1620 bp, Homo Sapiens
ttgggacaaagcttggtattgtcaagaattcttacaaattactggtgggagtataggcatttgcacaagtaatttgtaagaattcttgacaaagcttggtattgtcagcgtttttaattttagccattctattgggtatattttgatatctcgtggttttgatttgcatttttctgattaaagatgttgaacttcttttcatgtgcttattggccattcacatatttcgtgaactatctgtacaaatatttttgtttattaaaaaattagattgttttgttttattattgaatagtaagaattgtttatatattctggatacactctttttcagatatgtgtgttgtgactattcttagtctttagcttgccttttcattttcttaattatgtctttcaaagaacaagtttttcattttgacgaagcctagtttatcaattttttttatggttggtgctttttgtgtgttccaagaaatctttgcctactcatttaattacctgtgtgcccttgtcaaaatcatttaattttgactactcacttaattaccttgcctactcatttaattacctgtgtgcccttgtcaaaatttactgtttatctgtgaatctggatgatctatttatgtcatttatctatgtgtctcttcttatgccagtaccccactgtcttgattattgtggctttatggtgtcttgaaattaagtattgttaagctttgcaatcttttccaagattgttttggctataggtcctttctttataaagtttatattaagcttctccatttttctttaagaaaaaatctgctggaatggcactgaatttttaggtcgatttgggaagaattgacaatattgaacctttcaatcgatggacatggtatgtttctgcatttatttgggccttttaaaatttatctcagcaatattttgtagttttagtgaagaagtcttgtatatatcttttgttaaatgtattcctaaatattttgtggaaatgttactgtaaatagtactttaatttcatttttaagtttattgctggtatacagaaatatgttttatttttgtatattgactttatattctgtaatcttattaaattcacttagttcagtagtagttcttatttttattttattgcaagtgccttagggataccttgtgtacacaatcatgtcatatatgaataacaacagtttaccttttgtttcttcttgctttgtcgtaatggctaggaccttcaacctaatgttgaatagaagcggtgtgtgagttgttactcttgtcttattctcaacagcagaggatagcgtctagtttttcactattaaaatatgttagctataggttttttccgtttcatgtttttatcagattgaagatcccttttattcctattttgccaagagtgtcatgaatgcatgttgaatttcaccaagtactttttcctgcatctgttgagagaatcttgacttttctcttttattttgttaatgtagattctttaatgttaaactgatcttgcattcctgatataaaccatacttagtcatgatatgttatcccctttatataatgctggattcggtttgcaatattttgtttgatttttgc

SEQ ID NO: 180463 - DNA, 986 bp, Homo Sapiens
actttgtacaaaaaagttggcacccgactccccactctgcagcttcccagaggccttcccagcaaaggcagcccaccttgctaatggagttgtagtaggggtgcttctcgtccatcgggggcggcgggatgtcgaaggagcgcctccagatcttcacctgctcctccccgtgcttggcggccgtttctgccttgttgaggcctgtgaggcccccgtaatgccgctcattgaggcgccaagtgcgcaccacaggcagccacatctggtccgtgccgtccaggatggcccagagggtgcggatggcccgcttcagcactgacgtgtagcagatgtcaaactccatcttggcatccttgatggccttggctccccgcttggcctcctcggtccccttttcactcagctctgcatcgaaccagccacagaaacggttctcctggttccatgtgctctcgccgtgccggaccatcacgaggcgccaggctaggaggcggccctcagcaggcagaggaggagagccagaggagctggtgcagaccacagctttgtggagaggagtctggccttgtggaaggttatccaaaataacccagtgtaggaaaaccaggaaaatcttaacatgggagaaaagaagatgatcaatacatgcccatcctgagatgattcaactattggaatgatcagatacagacttcaaagcagctatttataaccagccttcagaaagtattggtgaatattcttaaacagaatggaaatgacaaagcatggagtccataaattagatgatagtttggaaaaagatataaacttacaaaccaagaagctcagtgaaccacacaactggataaattaacaacaaaagtccaagcttagacacatcataaagaaacttctgaaaactaaagaccaagaaaaataagatcagccagagaaaaacgatacatttcattcaggtgaacaattctttgaaagactggatccaa

SEQ ID NO: 180464 - DNA, 1601 bp, Homo Sapiens
  misc_feature (88)..(115): n is a, c, g, or t
  misc_feature (618)..(646): n is a, c, g, or t
  misc_feature (984)..(1031): n is a, c, g, or t
ttgggtttcgtgttataacttttcctctttttttaagaaaaatgaaaaaagtaattcttttgtctgaaggggaaaggcattctttcannnnnnnnnnnnnnnnnnnnnnnnnnnnatgacttgcaggcacaatatctagtactgcaactgccaaaacttggtattgtagctgctgcccgctgactagcagctggactgattttgaataaaaatgaaagcattaaagggtttccctacaaaacatttttctttaaaatacttttgaaatggctataagcagttgactttcacccttggagagcatcacactgtgtgaggttcagtgattgttgaccctccccagcccctcctgcttctttaagttatctgtgtgcgtgcgcttcctctcaatcttctttgcacgctcatttctttttctctgacccatgagaaaggaaaacttactgatgataatttttaaatagtgtaatttattcatttatagcatgtcaggataaattaaaagaacatttgtctggaaatgctgccgggagcctattgtgtaaatgtaggtattttgtaaaataaccttgaaattgtaaattgacacgtgtttggtcagattgtgtcaagtttaannnnnnnnnnnnnnnnnnnnnnnnnnnnnatttgaaaactactttagcaataattaattccatgattatcacattctgccattaagggatattagtaccgtaatactgaagaaattttattagtctgaacttctggggtaggcagcttctttgtttcttttctatccacccttgtcggttgaggtatttgtttcttgactaataaaccctttgatacttttagccagaaatcagtctcataaagctatttttgagtatagtttgtgtaaaataaaaatgtttagctttggtaataacttccaagctgaactccctctagcaagatatttttcagtgcttttatttactatgcacttagactatgcannnnnnnnnnnnnnnnnnnnnnnnnnnnnnnnnnnnnnnnnnnnnnnnaaaaggttgtggtgtagttggtctgtaattaagttgcagatttaaaactgctgttagctttgtaaatcaaaatataggtgttttttgtcctggtatatcgtcattccatctgcagctggagctggaatcccattgatcttctagctaccattcattttcttcactgttcacaaaagaagagtgtgaaattcagtgaatgctgttactaatcctgttacgagatgaatctcatttcaccaaaattaaattatgtttttccgctaaaatgatgatacaagttgaagacacatcactctgaaattggaagacctcaccacttaaggctccacagtggcttactcagctgaactctaggttactactctttactttgttcacccattggggggtgcagtttttttaaaatgttgggagatggccattctaactactgttgaatgtctctgttttgggaaggtataacaagaaataaaaaagatatatatgaagggagagactggttatctcctcccatatggtgtgcttatcctcttatggcttacaatgaatatttggagtttgctttcacaa

SEQ ID NO: 180465 - DNA, 1015 bp, Homo Sapiens
  misc_feature (127)..(155): n is a, c, g, or t
  misc_feature (495)..(540): n is a, c, g, or t
tggaaattaaaagaacctttagtctggaaatgctgccgggagcctattgtgtaaatgtaggtattttgtaaaataaccttgaaattgtaaattgacacgtgtttggtcagattgtgtcaagtttaannnnnnnnnnnnnnnnnnnnnnnnnnnnnatttgaaaactactttagcaataattaattccatgattatcacattctgccattaagggatattagtaccgtaatactgaagaaattttattaagtctgaacttctggggtaggcagcttctttgtttcttttctatccacccttgtcggttgaggtatttgtttcttgactaataaaccctttgatacttttagccagaaatcagtctcataaagctatttttgagtatagtttgtgtaaaataaaaatgtttagctttggtaataacttccaagctgaactccctctagcaagatatttttcagtgcttttatttactatgcacttagactatgcacnnnnnnnnnnnnnnnnnnnnnnnnnnnnnnnnnnnnnnnnnnnnnngaaaaggttgtggtgtagttggtctgtaattaagttgcagatttaaaactgctgttagctttgtaaatcaaaatataggtgttttttgtcctggtatatcgtcattccatctgcagctggagctggaatcccattgatcttctagctaccattcattttcttcactgttcacaaaagaagagtgtgaaattcagtgaatgctgttactaatcctgttacgagatgaatctcatttcaccaaaattaaattatgtttttccgctaaaatgatgatacaagttgaagacacatcactctgaaattgggaagacctcaccacttaaggctccacagtggcttactcagctgaactctaggttactactctttactttgttcacccattggggggtgcagtttttttaaatgttgggagatggccattctaactactgttgaatgtctctgttttggaaggtataacaagaaataaaaa

SEQ ID NO: 180466 - DNA, 1506 bp, Homo Sapiens
  misc_feature (484)..(531): n is a, c, g, or t
  misc_feature (871)..(899): n is a, c, g, or t
  misc_feature (1402)..(1428): n is a, c, g, or t
ttggattcttttttatttcttgttataccttcccaaaacagagacattcaacagtagttagaatggccatctcccaacattttaaaaaaactgcaccccccaatgggtgaacaaagtaaagagtagtaacctagagttcagctgagtaagccactgtggagccttaagtggtgaggtcttccaatttcagagtgatgtgtcttcaacttgtatcatcattttagcggaaaaacataatttaattttggtgaaatgagattcatctcgtaacaggattagtaacagcattcactgaatttcacactcttcttttgtgaacagtgaagaaaatgaatggtagctagaagatcaatgggattccagctccagctgcagatggaatgacgatataccaggacaaaaaacacctatattttgatttacaaagctaacagcagttttaaatctgcaacttaattacagaccaactacaccacaacctttnnnnnnnnnnnnnnnnnnnnnnnnnnnnnnnnnnnnnnnnnnnnnnnngtgcatagtctaagtgcatagtaaataaaagcactgaaaaatatcttgctagagggagttcagcttggaagttattaccaaagctaaacatttttattttacacaaactatactcaaaaatagctttatgagactgatttctggctaaaagtatcaaagggtttattagtcaagaaacaaatacctcaaccgacaagggtggatagaaaagaaacaaagaagctgcctaccccagaagttcagacttaataaaatttcttcagtattacggtactaatatcccttaatggcagaatgtgataatcatggaattaattattgctaaagtagttttcaaatnnnnnnnnnnnnnnnnnnnnnnnnnnnnnttaaacttgacacaatctgaccaaacacgtgtcaatttacaatttcaaggttattttacaaaatacctacatttacacaataggctcccggcagcatttccagacaaatgttcttttaatttatcctgacatgctataaatgaataaattacactatttaaaaattatcatcagtaagttttcctttctcatgggtcagagaaaaagaaatgagcgtgcaaagaagattgagaggaagcgcacgcacacagataacttaaagaagcaggaggggctggggagggtcaacaatcactgaacctcacacagtgtgatgctctccaagggtgaaagtcaactgcttatagccatttcaaaagtattttaaagaaaaatgttttgtagggaaaccctttaatgctttcatttttattcaaaatcagtccagctgctagtcagcgggcagcagctacaataccaagttctggcagttgcagtactagatattgtgcctgcaagtcatnnnnnnnnnnnnnnnnnnnnnnnnnnntgaaagaatgcctttccccttcagacaaaagaattacttttttcatttttcttaaaaaaagaggaaaagttataccaa

SEQ ID NO: 180467 - DNA, 1473 bp, Homo Sapiens
  misc_feature (66)..(91): n is a, c, g, or t
  misc_feature (591)..(619): n is a, c, g, or t
  misc_feature (958)..(1005): n is a, c, g, or t
ttggctttttttaacaaaaatgaaaaaagtaattcttttgtctgaaggggaaaggcattctttcannnnnnnnnnnnnnnnnnnnnnnnnnatgacttgcaggcacaatatctagtactgcaactgccaaaacttggtattgtagctgctgcccgctgactagcagctggactgattttgaataaaaatgaagcattaaagggtttccctacaaaacatttttctttaaaatacttttgaaatggctataagcagttgactttcacccttggagagcatcacactgtgtgaggttcagtgattgttgaccctccccagcccctcctgcttctttaagttatctgtgtgcgtgcgcttcctctcaatcttctttgcacgctcatttctttttctctgacccatgaaaaaggaaaacttactgatgataatttttaaatagtgtaatttattcatttatagcatgtcaggataaattaaaagaacatttgtctggaaatgctgccgggagcctattgtgtaaatgtaggtattttgtaaaataaccttgaaattgtaaattgacacgtgtttggtcagattgtgtcaagttannnnnnnnnnnnnnnnnnnnnnnnnnnnnatttgaaaactactttagcaataattaattccatgattatcacattctgccattaagggatattagtaccgtaatactgaagaaattttattaagtctgaacttctggggtaggcagcttctttgtttcttttctatccacccttgtcggttgaggtatttgtttcttgactaataaaccctttgatacttttagccagaaatcagtctcataaagctatttttgagtatagtttgtgtaaaataaaaatgtttagctttggtaataacttccaagctgaactccctctagcaagatatttttcagtgcttttatttactatgcacttagactatgcannnnnnnnnnnnnnnnnnnnnnnnnnnnnnnnnnnnnnnnnnnnnnnnaaaaggttgtggtgtagttggtctgtaattaagttgcagatttaaaactgctgttagctttgtaaatcaaaatataggtgttttttgtcctggtatatcgtcattccatctgcagctggagctggaatcccattgatcttctagctaccattcattttcttcactgttcacaaaagaagagtgtgaaattcagtgaatgctgttactaatcctgttacgagatgaatctcatttcaccaaaattaaattatgtttttccgctaaaatgatgatacaagttgaagacacatcactctgaaattggaagacctcaccacttaaggctccacagtggcttactcagctgaactctaggttactactctttactttgttcacccattggggggtgcagtttttttaaaatgttgggagatggccattctaactactgttgaatgtctctgttttgggaaggtataacaagaa

SEQ ID NO: 180468 - DNA, 1548 bp, Homo Sapiens
  misc_feature (1316)..(1330): n is a, c, g, or t
ttggatcttgtttgggaacttggttttcacagcaggaactgattacttagcaagtgccctaattgaagaaaacacattgctcccaatctccattggcttttgtgaaaaatctggtcctgagcagttagacatcctcctttccaagctttttatagaacacagattaatctttaagctctgcttctgatgttgcccttctttactgaaaacaattctgaatcattagtgtaattaagaaaataccgtctgaggccatttttattttgtatttgcatatgacaccaaagctgcaaaacaggaactaagcatggtaataatgctggtccaaaggtggccaggtatgaacacttccttctaggcctgctgccaggaggagagctggcttattgatgggagcattgtatgctgctgaaacctccttacttgggggttctccccagagacagagaagaaaacctaaggcaggcattagtcttggaaaccagtaccagctagtatctcatgccaatgaaaagcatccaggacaagcatgtttgcaaaaaacaagcatgtcctgtctctttcacatctctggcacatccatgatcaccctgagtcagacccaaataaggggcagcagagacagccagatgaagcagcaatttgagggtagtaactggtgatgacaaagcccttctcaattttactttattaacttagccaaggcttagttcctgttttgcagcctgatggaaatttaatagatcatttgaagtatgtaatcacctgacatgctaagtgtctgtgtgtgccggagacacagaatggcaacctgaccccaccctgtccttgtctaggaaacacgctggagaagaaaggtggcaaggagtttgtggaagctgtcctggaactccggaaaaagaacgggcccttggaagtagctggagctgctgtcagcgcaggccatggcctgcctgccaagtttgtgatccactgtaatagtccagtttggggtgcagacaagtgtgaagaacttctggaaaagacagtgaaaaactgcttggccctggctgatgataagaagctgaaatccattgcatttccatccatcggcagcggcaggaacggttttccaaagcagacagcagctcagctgattctgaaggccatctccagttacttcgtgtctacaatgtcctcttccatcaaaacggtgtacttcgtgctttttgacagcgagagtataggcatctatgtgcaggaaatggccaagctggacgccaactaggctgagcaatgacagaaccagctgcaccatgtaccccaccttcagtttnnnnnnnnnnnnnnntccccttcactcctactgggaggtgggacccctttcattttcagttttgctcatctagggaaaataaggctttggtttccagtttaattgtttttgaccttctaaaatgtttttatgttagcactgatagttgggcattactgttgttaaccactggtgttccagaccgtgtctgacttattgtaacctaaggaagattttatagtttttattttaat

SEQ ID NO: 180469 - DNA, 1693 bp, Homo Sapiens
  misc_feature (64)..(76): n is a, c, g, or t
  misc_feature (1273)..(1282): n is a, c, g, or t
ttggcaaagtgctgggattacaggcatgagccagtgcacccagcattggtcatttattttaacnnnnnnnnnnnnngacctcaaaccatcaattttattgaattgtagattattaatagtcatatgtcacatatcactgaagaggtataaatagtagttataaacaaacctcttactccaccccttttaatgacttaaaaattatttatatttctcttattttggcctgatatgttcttccacaaaactaataaataggttttggagaatgtgcacaaaagatccttttgagaagaaagtgtctttggaagaggtgttcactttaatgtctgtgttcctcaggttatcggcattggagcaggacagcagtctcgtatacactgcactcgccttgcaggagataaggcaaactattggtggcttagacaccatccacaagtgctttcgatgaagtttaaaacaggagtgaagagagcagaaatctccaatgccatcgatcaatatgtgactggaaccattggcgaggtgaaagacttggcattgggttctcggctgtgttaatattcagttcatccctttatgtgtaacagattttaacttcatcaccacacagagaaaaagatactttcattgaaattctatgttgtctaaaattgatcattgaaacttcttacacatttctcatgttcttctgtctcatgtaactttcttcattgtttttgacccctttctgaaaccacagtcctctgtctttttaaattgcagccttggtgtagtttgtatatttgtacttcccctgttgattataagcttttgatgacaaggactgcttttcacctacgtcgaggtgcctgccaccacgtcatgcatggtgcttgctgtccgatgggtctgtattcaacattaaatacaaattgcctgacggcaggtaaccctggggtcttctcccaccacattttctacatgtgccattaataacttgatacattttgttacatttcatgttcttctgtttgaagaaggtatgtgggaacattacaatcgcaaacgttaggtaggtagcccgccagaagaaaagatctagcccagtttctggacatattgcgtgcctaacaaaatgctggatggaaaacagaagcctgctaatcaaatactagatggtcttctgaagagccaattgactaccctcagttttttattcaggagcaggaatcaacataagtgtcattgaagagtgaggctgcagaatgtaactgaagtccttaagatatcnnnnnnnnnncaactttgatacttggatttttctgtttgatattaccagtcaacccctgctactagtcctgaaagagtcctggaagtgaacaagaataaaagtatgtcaaagctaaaacatgacccaagatagaagcaccttgtaaaatatgattaactgtctgtgccactatgacacaatactgcaggctgggtaacttataaaccatagacatttatttttcatagttctggaggctgtgaagtcccagatcaaggtactggtgggctgagagtctggggaggcctaccctctgcttcccagatggcacagccctctctggaaaggacaaaactgtgtgtcctatacttcacagaaggggcatacttcccctgaagcccttttataagtctgtaatccattcatgagggccccaccctc

SEQ ID NO: 180470 - DNA, 1926 bp, Homo Sapiens
  misc_feature (932)..(962): n is a, c, g, or t
  misc_feature (1343)..(1359): n is a, c, g, or t
tgtacaaagaagaggactgtgtgcaagtggggtgaaaaaaaaggatacgcgaatgtgcatatgactgaatagggaggaaggtcagggctagaaaggaggctacataaaaaggggcaatggagagtgcacaggaaagacacaggggaaggtcaagtcgagcaaggtagaaacaggagtagctagagccattgggaatccattttgaaacaagaaggagttttgaaagggaataggaaagtaagtgtcttgaagtaaaagataaatatggatggagaaagaagaaattctggatgatagagatgataaaaatatttattaagaaatgaagtcaggttcagtgtatgaaatggaaaggaatttttcagaattttaagaaaggggaagttcctcttggaaaagatatagcaaccattggggaatgaccttttcatttcagaagtggatgaggaaggtggtgtgagcatcaggtatattctggaccatttcaagtgctggtgagaagaaaggaactctttgcctgaactgggcttggttttccaagtgctgctttggaaatgaagacccagagatgcagagcttatggtagttcataaatcttcatgttctattatctttcatctgccaataaagttcattttcaataatgtccaccattgctgtgcccagaataaccacaggcaaacatcaaaacaatacgcataagttagacaagattaaatcttgtctgatatctgcacaaacagatatgcaccatgttggaaacatgtgttttcctagtcccatccaggcttcccacaagaaagccatgatgtgggtctaaaccatatgttttgagtaaaggagaatagaagaaggggagtgtccgcaaaatggaaagagatgaagatgttccaaggaaatatgctgaaacagaacagtgaatgttttgcccnnnnnnnnnnnnnnnnnnnnnnnnnnnnnnnttgcaatacatggctactaagtctttgatcataagtcgaatttatagacctggaatttgccatcctagtctttcctttttagtaagacttctgtcctctggcagtgcatatggtaggtctctaatgtttctgcatctccaggaagatgcagatccttatttttgctgggaaatccttctaaatagaaatgtaacatttttataaaaacagattaatgtgtttttcacttagtaaatgttttcaagagctgaattgagaaggaaagagactggagtggttaatggtgatttgatttctggcattctgagttttctgctacaattagctgcattacttggtgccaaagagcagtggggaattgttgagttgctgtatcctttnnnnnnnnnnnnnnnnncttgttattttgaaagaacttaaggctcacaagatgttacaaaaatagtagagtggccttaccctagatccagttttccccatttataacatttcacttagtccattttcggaaccagaaaattaacattggcataatgctattaactaaactacagaccttttttcaatttcgccagtttttccacacatattcatttagttgctggatacttttaattcttgctgatttgtaaactggccttgcttggatacaacaggaaagatactatctggataaagttctacagttttagagagactattaacacattaatgtgttcctttgtcatgagcaataccctgcctacactgcttctaaattttctgatttgtttggctgtttggcatctgaaacaatccaagacaaacttagaaagattaggcaacacaaaacacagtaagacctgttcatagcttgttgcctagaaaaccaggtagcaggatattctagatgcttcctgctgcttctacgtgagtaggattagcactggggacaaataaggagtttagagtaaccagtatttca

SEQ ID NO: 180471 - DNA, 1977 bp, Homo Sapiens
  misc_feature (513)..(543): n is a, c, g, or t
  misc_feature (922)..(937): n is a, c, g, or t
  misc_feature (1815)..(1858): n is a, c, g, or t
ttggcttttcatttcagaagtggatgaggaaggtggtgtgagcatcaggtatattctggaccatttcaagtgctggtgagaagaaaggaactctttgcctgaactgggcttggttttccaagtgctgctttggaaatgaagacccagagatgcagagcttatggtagttcataaatcttcatgttctattatctttcatctgccaataaagttcattttcaataatgtccaccattgctgtgcccagaataaccacaggcaaacaccaaaacaatacgcataagttagacaagattaaatcttgtctgatatctgcacaaacagatatgcaccatgttggaaacatgtgttttcctagtcccatccaggcttcccacaagaaagccatgatgtgggtctaaaccatatgttttgagtaaaggagaatagaagaaggggagtgtccgcaaaatggaaagagatgaagatgttccaaggaagtatgctgaaacagaacagtgaatgttttgcccnnnnnnnnnnnnnnnnnnnnnnnnnnnnnnnttgcaatacatggctactaagtctttgatcataagtcgaatttatagacctggaatttgccatcctagtctttcctttttagtaagacttctgtcctctggcagtgcatatggggtctctaatgtttctgcatctccaggaagatgcagatccttatttttgctgggaaatccttctaaatagaaatgtaacatttttataaaaacagattaatgtgtttttcacttagtaaatgttttcaagagctgaattgagaaggaaagagactggagtggttaatggtgatttgatttctggcattctgagttttctgctacaattagctgcattacttggtgccaaagagcagtggggaattgttgagttgctgtatcctttnnnnnnnnnnnnnnnncttgttattttgaaagaacttaaggctcacaagatgttacaaaaatagtagagtggccttaccctagatccagttttccccatttataacatttcacttagtccattttcggaaccagaaaattaacattggcataatgctattaactaaactacagaccttttttcaatttcgccagtttttccacacatattcatttagttgctggatacttttaattcttgctgatttgtaaactggccttgcttggatacaacaggaaagatactatctggataaagttctacagttttagagagactattaacacattaatgtgttcctttgtcatgagcaataccctgcctacactgcttctaaattttctgatttgtttggctgtttggcatctgaaacaatccaagacaaacttagaaagattaggcaacacaaaacacagtaagacctgttcatagcttgttgcctagaaaaccaggtagcaggatattctagatgcttcctgctgcttctacgtgagtaggattagcactggggacaaaataaggagtttagagtaaaccagtatttcagtcaagagttagttggcacttagttaatggcactggaaatagcttgtggagagaatagaatacaatggtatagactcctaatgtttgataaaatactattttcagagtggtagagaggttttatttgcctaaatagccgttattaaatggaataacaaccacattagaccaaattaattgcaaacacagcggcaacctggggagaagttgaaactccagttttgtggattacagttttgagttttatgattgacatttttaagtcccctatttaaggggtcaagattataacaatgtgtgtcttactannnnnnnnnnnnnnnnnnnnnnnnnnnnnnnnnnnnnnnnnnnnttgttttttttgaatgaacataagatagaaacaaaaacttctcatccagttaactagagtgaatgtacggagaattgttttgcttgtaacatggagagtttatttcaagtgaggaaaga

SEQ ID NO: 180472 - DNA, 1603 bp, Homo Sapiens
ttggcaggacaagactgcccccaggctgcagaaatacctggtgctcaagtcatggtgggcaagtaactatgtgagtgactggtgggaagagtacatctaccttcgaggcaggagccctctcatggtgaacagcaactattatgtcatggaccttgtgctcatcaagaatacagacgtgcaggcagcccgcctgggaaacatcatccacgccatgatcatgtatcgccgtaaactggaccgtgaagaaatcaagcctgtgatggcactgggcatagtgcctatgtgctcctaccagatggagaggatgttcaacaccactcggatcccgggcaaggacacaggtaactgagccccctcgctgctacctgtgggccatctggctggctcgctgccctcctgcctgctcatcaccaagcgtccccagtgtctcagggtcctgaaactgtgaacagtagtcaattgtgacagatactagacatccattgtttacaggcatgatgctggcgcagggaccccacagggcccagagcagagcccctcccctccggggctcactgcgcatggtgaagggagtcctgctgcagcccaaagcttaggacagacccggcgctgccatggagccggcagaggaggggaggggcgcacccaggggtctggcagaggcagcagccttctctgcttctgacactgtatccttaggcggtttgcacaaccctctagtgcgtcgtttcctcttctgtgaaatactttataggattgttggtgttgcgtgagagagagtggaagcacccagcacagggcctggtttaggacacacggatcccatccagggggcaggaaggcccaggcagaggccgagcaaaacagggtctgcaggggtcacctagtgcatgggaggtgggcccttcccaggatgtagctgggggccccgcctcagcttgcccgtggcctgtatcacagatgtgctacagcacctctcagacagccggcacgtggctgtctaccacaagggacgcttcttcaagctgtggctctatgagggcgcccgtctgctcaagcctcaggatctggagatgcagttccagaggatcctggacgacccctccccacctcagcctggggaggagaagctggcagccctcactgcaggaggaaggtattggcctctaggaagggactgtccccaccctgagttcagggctccgtgaggagaggagcgtggccctgcctgccaccctggaactggaggctggaggcacaactaggggaggggcattggtggtcatggcagcaggacagccagcataacctacctctgacgggtggcagccaggtgaagtgtgcagagggtggggacaccctccaaaatagcttggcaccccccacctccaggcccagcctggcacacacacccccacctccaggcgcagcctggcacgcaccccaacacctccaggcccagcctggcacccccacatctccaggtccagcgtggtaccccccatctccaggtccagcctggcaacccacccccatctcccaggtccagccagggccctcagaggcaccctcatcccaagtccacgtgcccactgcttacccc

SEQ ID NO: 180473 - DNA, 1702 bp, Homo Sapiens
gataactaacttcagcagatctgaaaaagctgaatcaaagctggcagcagagaaactcagaatgaagtttaagacttggaattacaaatatcttacacgctttatgcaactgaaactctattagctgaaatacaaagtaaatttttttctaagagtgaactgctgcagtttatgattataaaaaatattaagtacaaaaacattaaggactttcaagtcaaagaggaaaactgatagttaatatacacttttaagagtacattaggtagatcattttagaaagtttataaacattttgaggcaaaagatggttattaacacattaagttacaatatgaaactgcggttcaaccactgttgacctacaaagggacaattaatttaatatcattccacttaacatagaataacagattataccataattctaatatagctggtatagtagcaatcataacattaaataaagaagcttttaatatctgtatttagttatccaattccattaagaccagcaattgttctggagaaagttctatttgagaattctccacatcttagagaatacaaagcacactgtcaacttgctacctaaaagttcacgtggaaaaaaaacctctaaaatcatacacaaacactcatgataaaaatcatttctaatctacatatacattataatatcttattaaataaaatttcagatttattcttacaccctagaagttcattccagaatggtgatattttgctttggcctagccttcaatcatatgctgatttcaacacatgatcaaaatttagtatgtactgcagcactcctaatcccccacacactttttatcaggaagctacttcagaaggcactccaccaaaacatgagaaaaaaattaaggacagagaacagagccaccagggagaaccaatacaacagaaaaaaagcagagaacagctatgtgtcttgccaggtctaccaaagatagtcatccaaacatgaacagatgagaaggctgttttttgaagaaggtgaaagtgacagaatattcaatgaatctgaacacatgaagatactgagacaccagtagttcagcaataagtggagagaaaactaagcaaatgagaaacttaggaacaattatgcagcaaagaacaactggataagctgaaaagtgtttaaagatgctgccgtaaacactaagtatcacaatcaaattctgatttgtaaaaatagaggtatgggaagggtacaagtatgttgtgggcaaaatggtgaggagagctaaaccctcttcttccttaatgagaaataaataatccaattaagtaaaaaagtatgcatgttttatttacactgagtcaacaaccattcaaaaatagctgccttgggttcaaactacaataaaccttaaaaaactagtcttgtataaatgtatatataaatctgccataatgaaacaagaataactctagtcatacatacaacagacaaaaccccatgaaaaatgcagagtacagtgttaaaacagcaggcaagaaactacaatgagaacttttacggggagttcttgggtggaagaaaaaccatttttttctggaaataccaccctttgaattgcttacctttgactgttagattgaaacaacccagtctatcaccagataatgagtctgcaccacactgtaatccaacttttttgtacaaagt

SEQ ID NO: 180474 - DNA, 1088 bp, Homo Sapiens
  misc_feature (143)..(155): n is a, c, g, or t
  misc_feature (897)..(907): n is a, c, g, or t
ttggagaattcataaccttaattggctttaacagcttttctttccctgaaaacagatgcatatgtacacatgcacacagattgcttacaatatcagcacgtaaaaggcctttgcacattgaagtcggcactgctttggtgccnnnnnnnnnnnnnggctcggtgttttgactgcaagtctttttggatagaattttatagttagaaagtagctaacacttgggttttataggcacaaaaaacaagtcttatactagctgtactttattttttgagttcttattaatgaggaacatccacttttgcattgacagtgatttcaagattgctttatcagcctttaaaggattcttgactagtcgtgcacatcagaactgccaggtccccagtggttctgaagcagtaagctttgggtgggctctggcatcagcactttcactaagcttcacagataattctgatgcatactccaggcctgaaccactgatcaatttgaaacatgcataacaaagcaaaaaaagttttgtttcaccttttgaaatacagttaactcttttaccatgccagagatcattcagagagacaggtcgttgctccggagtgatacagatctggcagtacccagcccttgtgtgtgtgcgttagctcagcacctgcccacactgcgagcccccgtaggatgtgccttgtccttccctgtttcagcacttaacacactacctggtacagagtatgtagtgggcatctgttgaatgaatgcttttcccagtagcagtgtattcatacaatattaatataattgtcccctggcttacagataaaaatgaaagcatcaagtgcccagtgagtgagacccaggtgttcttcctccacccctagtggtcccctgggcaggtcnnnnnnnnnnngtaacactcaccagtctgttctgtagtcaatcattgattgacttgtctgtgaacttgcagggaactgtttcatagtttcattagcacagagtaaacatgtttgccatgcaaggttattttgcatctgcatttaagtgataatgttgaatcaatgaaaagtgttgataaagcagtagttgta

SEQ ID NO: 180475 - DNA, 914 bp, Homo Sapiens
  misc_feature (106)..(115): n is a, c, g, or t
  misc_feature (153)..(165): n is a, c, g, or t
  misc_feature (169)..(260): n is a, c, g, or t
  misc_feature (811)..(823): n is a, c, g, or t
ttgggtccttagagtcatgttaatagttttaggtcatattcctgtgattttattgtaagctagctcaaatctttttttggaaataggataaaaatcaatctgtacnnnnnnnnnngacttgctccagcctgggcgatgagcgaaactgtctcnnnnnnnnnnnnngttnnnnnnnnnnnnnnnnnnnnnnnnnnnnnnnnnnnnnnnnnnnnnnnnnnnnnnnnnnnnnnnnnnnnnnnnnnnnnnnnnnnnnnnnnnnntgagccaccacaccctgcctggttgtgtactcttttaaatactaagtttttaatgttaaatgctgcttttagatacactgtaaaaatacacctatcaatgagtttttttattaaaaacattgcaattgtactagactttaaatactaagcaataattcaggcttcaatgttggtttatagttttctcatttctttcatttaatacctctgtaaaatgaagcagttacttccattttcctgaggtgagataagtgccctgcacaatgttataggcccagtaagtgagactggagctctgatctaatccctttgacattaaagtttgtgcagtaaaccagctatgtcagtttgccacatttgtaatagtgttcaataaattttcacttaaaggtttaatattaaagtagtagcaagaattcataaccttaattggctttaacagcttttctttccctgaaaacagatgcatatgtacacatgcacacagattgcttacaatatcagcacgtaaaaggcctttgcacattgaagtcggcactgctttggtgccnnnnnnnnnnnnnggctcggtgttttgactgcaagtctttttggatagaattttatagttagaaagtagctaacacttgggttttatacgcacaaaaaacaagt

SEQ ID NO: 180476 - DNA, 1545 bp, Homo Sapiens
  misc_feature (551)..(563): n is a, c, g, or t
  misc_feature (1305)..(1316): n is a, c, g, or t
tgagccaccacaccctgcctggttgtgtactcttttaaatactaagtttttaatgttaaatgctgcttttagatacactgtaaaaatacacctatcaatgagtttttttattaaaaacattgcaattgtactagactttaaatactaagcaataattcaggcttcaatgttggtttatagttttctcatttctttcatttaatacctctgtaaaatgaagcagttacttccattttcctgaggtgagataagtgccctgcacaatgttataggcccagtaagtgagactggagctctgatctaatccctttgacattaaagtttgtgcagtaaaccagctatgtcagtttgccacatttgtaatagtgttcaataaattttcacttaaaggtttaatattaaagtagtagcaagaattcataaccttaattggctttaacagcttttctttccctgaaaacagatgcatatgtacacatgcacacagattgcttacaatatcagcacgtaaaaggcctttgcacattgaagtcggcactgctttggtgccnnnnnnnnnnnnnggctcggtgttttgactgcaagtctttttggatagaattttatagttagaaagtagctaacacttgggttttataggcacaaaaaacaagtcttatactagctgtactttattttttgagttcttattaatgaggaacatccacttttgcattgacagtgatttcaagattgctttatcagcctttaaaggattcttgactagtcgtgcacatcagaactgccaggtccccagtggttctgaagcagtaagctttgggtgggctctggcatcagcactttcactaagcttcacagataattctgatgcatactccaggcctgaaccactgatcaatttgaaacatgcataacaaagcaaaaaaagttttgtttcaccttttgaaatacagttaactcttttaccatgccagagatcattcagagagacaggtcgttgctccggagtgatacagatctggcagtacccagcccttgtgtgtgtgcgttagctcagcacctgcccacactgcgagcccccgtaggatgtgccttgtccttccctgtttcagcacttaacacactacctggtacagagtatgtagtgggcatctgttgaatgaatgcttttcccagtagcagtgtattcatacaatattaatataattgtcccctggcttacagataaaaatgaaagcatcaagtgcccagtgagtgagacccaggtgttcttcctccacccctagtggtcccctgggcaggtcnnnnnnnnnnnngtaacactcaccagtctgttctgtagtcaatcattgattgacttgtctgtgaacttgcacgaactgtttcataatttcattagcacagagtaaacatgtttgccatgcaaggttattatgcatctgcatttaagtgataatgttgaaatcaatgaaaagtgttgattaagcaatagtttgtagatatgcctagtatttcaaattactaatatcagttggagattgtttt

SEQ ID NO: 180477 - DNA, 909 bp, Homo Sapiens
ttggggccaaacagaggcccaatctcaagggaccttctagtaaactacaagcccctgggcattgagccctgaggcctcatggtgaatcacatactagctacttgcctcagtgataggaaaacctgagaggaagccccctggctggtgtggggaggggaggtggagttgttcccctggggaggggctgctgccagcctgcatgctcctccagcaccaggtagggctgttctatccccagactactcactgctgctcaccttcatctacaacgggcgcgtggtgggcgaggcccaggtgcaaagcctggattgccgccttgtggctgagccctcaggctctgagagcagcatggagcaggtgctgttccccaagcctggcccactggagcccacgcagcgcctgctgagccagcttgagaggggcatcctagtggccagcaacccccgaggcctcttcgtgcagcgcctttgccccatccccatctcctggaatgcaccccaggctccacctgggccaggcccgcatctgctgcccagcaacgagtgcgtggagctcttcagaaccgcctacttctgcagaggtgaggctgttctctctgggcacatgagcttccaccccctacctcttagtaccccctgggcccaacttgttgggtcctgctacctccctatctgccagcagatcctccatgtagcctatgcatggcactcctgcgcttgtgtgttgcatatcctgtgtggccatatgcccagcctggcagctacctggcagctctcctccagccaagacaatggaaaaagtggttcaggtagagcccagcacaagagtgtcatatcttggagaacaccatcacactgaagcatgcagtcactatgtgaaagtgcacagaagaattggcacagagatttt

SEQ ID NO: 180478 - DNA, 1324 bp, Homo Sapiens
actttgtacaaaaaagttggctgagacatcttgcctacttttctttattagctttctcctcatccatttcttttatacctttcctttttggggagttgttatgccatgatttttggtatttatgtaaaaggattattactaattctatttctctatgtttattctagttaaggaaatgttgagggcaagccaccaaattacctaggctgaggttagagagattggccagcaaaaactgtgggaagatgaactttgtcattatgatttcattatcacatgattatagaaggctgtcttagtgcaaaaaacatacttacatttcagacatatccttagggaatactcacattttgttaagaagttgaactatgactggagtaaaccatgtattcccttatcttttactttttttctgtgacatttatgtctcatgtaatttgcattactctggtggattgttctagtactgtattgggcttcttcgttaatagattatttcatatactataattgtaaatattttgatacaaatgtttataactctagggatataaaaacagattctgattcccttcattgtgtgaatgtttttttctaaaaaaaaggtggagaaatatggataattatgacatttatccctcattaagctgcctatcagtttgatttggacaacttgacatttatttgagacattaagctactttctggtaatatattaggcatttctgcaatagctctttcaggtaactgaatattattaagcatagttttatcttgctttgattaaacctcttaggcaaaaaatggaacttcataagctaatacattagaaaggggttatgattataaatcagaaatgcttgtgacattaagaaatgaggcacttgtgaaatttctttgaaatagccagctcctctaatgtgtcttcaaaatataaagtgattcacaaaggcatgcatcacacctatttgtagcagcccattcattacataaaccagggcatacctgtgtgggctctgtgagtgaagggaggcttcactactttctgtgagcagtaaggactggtatctttctgtgagcaataaggactggataaagactgcctatccttgtgtcgtgtcagcaccaatacaataaggagggttttaatgtgaagcaggcaatcttccagccccttctggtcttggatgaaatagttgcacagagtattgcaccaaaatacacaatggaggctgaaaagttcacatattttaagtcaattaatcaaattgcattgattcttgatgctttcttagaggcctacatgatttcttagattgctctg

SEQ ID NO: 180479 - DNA, 457 bp, Homo Sapiens
actttgtacaaaacactgtgctaggcagtgtgtgggtgacataccgttctaggcagtatgtaagaaacagttgtcttgcagtgagattgaaacagattaatcagaattgttaaaccgagggaaaaagatataaagcatgccttaaacatcttattttaacataaaacacacaaaagaggctagctaatctttagatgaagagctaagactttttaaaatatgggtccattgactggaatttatttaacaaatgtttacatggtgcttactgtgtacatataacacaatgtgctaatttctttacaaattttcacttaattctcataccagcccaagaggtgtgaaggttcatgtaatattagtactgattttcctcagatgtttgatagaatttgccagagaagccacctgggcctggattttctttgggaatggttcttaattttagatttaattg

SEQ ID NO: 180480 - DNA, 1200 bp, Homo Sapiens
ttggcttttatgaaatattttgtatcatttaaatagtccagtgtagtttgttttcattgctcttcatgatgtgaactgtgtatgcagtcacacttttcatttagtggaaaattcagttttcaaatttggcagaaagtggtataggtgggattatattttatttgaggtttccgttttccaggggaaaagagtttgcaatcagcagatcccagcctggtataagaatttttgaaatgttttacaggtgatgatgaacagtctacacagatggctgcaagttgggaagatgataaagttacagaagcatcttcaaacagttttgttgctattaaaatcgataccaaaagtgaagcctgcctacagttttcacaaatctgtatcctttcagtaaagaatggcttatatatatacatttatttaccttccttttggttaatttatgaaatttagaaattattcatttttatttaggaaatcatacattcttttttatggaaactttattactaagtgtcctcatttaaaaaaaatgttattataggaaatttcaaacatatataaaagtaactcaatggtgtagtgcaccccatacattgagataatatattgcagctaaagataggatagggagtttttaaaatgtgaatatctgaaaaacaatatagatcagttgggttggaatgttacaagtagcttgcaagaggcagctggcagcaagatggatagaaaaggaagttatgatagaggagaatgtagtagattcttcactagaatatacctcataaattaacatgtcacatgtattaatactacgggtataatgatgcagtacttgaaattatttaataaatgttagattatattgtgaaaatcacaaagatcatttgttttcctttgttaccaatagtgtttcgtaaaactatcctttcgtttcacatgaattgttagacttcattaaactgtacagatcctgtagtgtgtgttccatccagtttctttattggagacagtggaattcccttggaagtaatagcaggaagtgtttctgcagatgaacttgttacaagaattcacaacgtccgacagatgcatttgctaaaaagtgaaacatcagtagcaaatggcagtcagtcagaaagttcagtgtctactccatctgcgtcatttgaacctaacaacacttgtgaaaactctcagtcc

SEQ ID NO: 180481 - DNA, 1913 bp, Homo Sapiens
  misc_feature (183)..(197): n is a, c, g, or t
  misc_feature (320)..(384): n is a, c, g, or t
ttggcatgtatgcacagaaacttcagttctatttctatagacacaggaacctagtgactattgaacgtaattgtaataaaatgctgctcattgagccaaagagaagaaatgatttattaacatggggacaccaagaaaaacaaagtatgcttttattccctttgtcaagctcagttttagggnnnnnnnnnnnnnnnatagtgacaatccatagatatagacattcctaaaagaaaaataaataattcagtagatatatgtcactgttacctgaatatggaatgaatttgatgttttttattttgttgagacagggtctnnnnnnnnnnnnnnnnnnnnnnnnnnnnnnnnnnnnnnnnnnnnnnnnnnnnnnnnnnnnnnnnngctcgtgatcctcctgcctcaacctcgcaagtagcttgggactacaggcgtgtgccaccagtcctggctaattttttgtagatataaggtctcatgatattgcccaggctgaatttgatgttatttcaagttgattttcatgtgtttgggagcttgtcttgttctcaactactacgcaggtagacagtcttcccccagagactcattagattgcaatatagaggcactttctcatttccctattgttcctaatacagaattgtagagctggagagtaccttcagttttctaaatctattctcaaacaggatatcactaacctctttagaatcattcctcagtatacatcaatttattgagaactgcctaatactcaagaaattaaatcctgagttcagtaggctgtgttccaagcaggaattattttcacttaccaaaatatctcctattacctcaaggtatccttgttgaggaatgctgaaaactaaattttaagtatcaagtctagaccatagagtgctttggtgggagtattttgattacctcctacccatcagaagcaggcagctaatattgtgaactgagtatttttgtcaaaagtcacagggaagagactacagaagaatgagaagggtcaaaaggacctagtgtggcttactacatggatcttgtctcttggaggtctgtcgtagaagaagaaacaaatagaggtgatgaagacacagaacaggctcagtcagcatcctcacccagagatggcaacatctattaagaccaatgcaataccttttcatcttcagcaaatgttgtttcatctgtttttgatccttggcattgtcaaaaacttaactgcaggtccagtgtatatttttccttatttttcccttttagctatctgctaaagtgagtaaatgccacaactgtacttttccaaagaaaaagaactattgacaacttatagcctgtcatgcaggtcatgtttcaaatccaggctgaaattttcaacagctgtgggaaaaactaaaacacagaaatactgtacagtattagtgtttttttaaagaaattgttagtgcattattgagtatactaaatatctgtgattaaataaattagttctaacttttgattttgggagcccaaaataaagggagtgttgttttcatggttatgccttgtttgtggagtcaagtgttgatatacttgaggcatgttatgtgtcttctaattaatatttttatcaccttgaatttgtgtctcttccaagcattaaagatactatggatcttaaattccttattaaaaaaatgcaagtgtgaatactttgtttagcttacattttaatttattgtggttgaccacattttatggctcctgagtgccttcacccagctacactttaccttgtatctataaaagtgtaatttagagtaaatacattggctgtaaagtcgagatcaggtgctctccaccaaaagcaaaacaaaactgctgaaatgtggcaaggtttctcagccaacttttttgta

SEQ ID NO: 180482 - DNA, 910 bp, Homo Sapiens
ttggcttttcttcaataccaaatacttccaactaaagaatgttactgagcacttgaagctttcctttgcccatgtgatgagacggaccaggactctgaagtacagtaccaagatgacatatctgaggttcttcccacctttacagaagcaggagtcagaaccagataaactgactgttggcaagaggaaacgaaatgaagatgatgaggttccagtgggggtggagatggcagagaatactgacaatccactaagatgcccagtccgactttatgagttttacctgtcaaaatggtaatctttctctgaactgaatgtagtgcactcagaaggcagttaacatattttggatttcagatgcttgaacatcagaaaagtagcttgcccgtggctttagacaaggatttaccatgaattttttccccattgtcatatctatgtggattttgaaccacaaaacaaattaccttgtcttcataattattttatgaaaatgtcttcaaaagcaagaatcactgctattgtttgatctttacaactgttgtacaacctttatgtgatacctaatctgtagttattttgttatttgtatagaaaagaaattttgttttgctaaagctataatagaaaaacaatttttaaggaattgaaattttctaagtagtccttctcttagaggaactttatgattttagagttgtaacacttttttttctgaaagaaatgtaatagcttcatttgccctttgataatgtgtattgagtgcccttggagttcattccaggatattgggcacttccaatatgtggtgcttggccatagtgtcacatgtgagttgacttttttgttgctcttaataatgtttgaagtactaaagtttatgatttacactttgtcttatattaacttt

SEQ ID NO: 180483 - DNA, 738 bp, Homo Sapiens
tgagccactgcgcctagcgtactttagtgatttcttaggacgacggagggaactagctagcaaggcaggcttggaatgtgttttgggatcaaatgccggtttctgtctggcactggcgttctctgtggggccgtgatggacacactgctgaggtcaagcgtgattcgtctcacgctgtgcctggcagtctcgttggaaagttctgtagacaccgtgtggacagggctcttcccagccaagccctggaggacttccaggactgtgatctccccaccgtggctgattaagcagggacccttcgtggagtctatggtcccctctaagtcatagctagacagggactcaggcaccatcagccctggctgttattcactgtggatgaggagacaggcccagagaggggcaggaacctgcccgaggtcaccaagcacgggcaggccccagagctttcggtctcagattctccctgctcatccctggatgtagcgctgctgtggacgtggggctgtgctaggggctgtggagagcagagggcttctgccaggaccccagtgagccagtatgggtggtgccttggccatggggcagactgggggtacgggacagccatccaccggggtgtggggaggaacagcttccctgcgaggcggtgccgtgtgacctgcgccttgaagacaatccaatgtcaacagaacattttgggagtggagcctagagggagaaaacttgttgaaattc

SEQ ID NO: 180484 - DNA, 790 bp, Homo Sapiens
  misc_feature (84)..(126): n is a, c, g, or t
ggagggacaagaggcaccagaagctcctgtccaggtctgggcctccctcgggtcactcagttctcccccattcattcattcatnnnnnnnnnnnnnnnnnnnnnnnnnnnnnnnnnnnnnnnnnnnttcccacactctgcagccactgacttcagctagccatgctggatgctaaaacataaagtcccggccatcaaggccagtccatctcagtggcatctagacatgcacagagatgaccagggagcccctaagggacagagaggcacaccctgcctcctgatcccatctgggggctgcatgaaggaggggcacaggtgtggccttgaaggctgggtaaggggctgggagggctttaggggcattccagggggcaggcacagaactggaggctctgccgggcacacccacaggagagcaatggctggagggtgacatggactgcagggtgtggccgcggcagcccagctcttaaggggacagcctgggaaaacagacttaaggacaatgatcttgagccatgaaatgatgtccaatgccccttgtgccacctgacatcagcctgattaatgaacaaacagaagaggaagcaggggacctgtgtgtccctctctctgcttttctgtctttctctgtgccccctctcttatgtctctcacgctgtctcttgtccttgtttttaactctgacacgccgtgggaacttggctcacttcctagggggaagctgtctggactggcccagagatgggcaccaccatttcccaataaacacaagataaaatcagaaa

SEQ ID NO: 180485 - DNA, 1496 bp, Homo Sapiens
  misc_feature (329)..(354): n is a, c, g, or t
  misc_feature (905)..(929): n is a, c, g, or t
ttggcttttaaaatacttataaatgacactggtaaaggtacatatatcaagagtaggcattaattttcaagggctaaaatgtcattaacttcggtataaaccaaactgtactagagaggaagactgtgtccctgaatgatggcagtttaagtctgagttttactgtgagttaaaaccctctgaatttccagatgataattccatttttaatccatttggaatgctgaaagctacaaaaatgtatttcctgtcagtaaacatttgttgttttatttttgtgtttaattaaaagtttatttttcccctttaaatctttgaaggaaagaagnnnnnnnnnnnnnnnnnnnnnnnnnngtcagaatagttcatggtaaactttgcaattacagatgatagtgaaaaaaaaccccagcgacgcaatcgtagccgcaggcgtcgcttcaggggtcaggcagaagatagacagccaggtaacttgagtggacctgtggacaccatcaggtcacaagcatgaaaaaaatgtctatgtctgctttctaaatatattatacttacatgtacacatgtgtgcatatacattcaaaatttgcattgcataaattgtttattcaactaataagactactactattaagaaaatgcattcttccttcacagtgtgttagtaacttgtctaattgaactaatgttgtgtcctaattgtttacatggaaatactgttgagaagaccattttgttcacttggcagtttcttcacacttgagatggggcctgccatccgagggactgtgttgtagattgtgatcaaggttgattggcaaaactgggcagcttttgcatggtgcctgcttactatatctgaattcagcacctcatttttgtgggagttgtaatacccacaattnnnnnnnnnnnnnnnnnnnnnnnnntatttgaaggtgtctttaacctaatgcgaggaatgcatgttgtttttgtttgtttattgtagtgtgatgccttttcccttacacctactaactattcaaattaataatacttacttagttttagaatgtttattttatgtagtcattaatttttagtaacttcaaagaaacttgtttgctgtgtctattattttgaacataattccatttcctgtgtacagagaatcacatgtatattcacaatgaagcaattgtgtgcaccagaaataaacccctttcaaactaatcaatttttgcattctttccaaaaccagttctttcatgtgttttccccaaataaagaatgtaaattctggcatctttactattttaaatttagtggttgtagagacatttgggaaaactggttaagagaattagttcccatccctaaaagttcatgttttaaagatagttggaaatttttagagcaattaaatattgtcaaaaaatagaaagtgtccagaaaatatttgttttccttccccttctttcctcccctcctttaatgttggaaatatattttag

SEQ ID NO: 180486 - DNA, 1662 bp, Homo Sapiens
  misc_feature (139)..(153): n is a, c, g, or t
  misc_feature (311)..(325): n is a, c, g, or t
ttggatgaaacacaaagctacttttagattttttaagacttactgatattcctgggccctaagagcttgtctatggtcctatctttgcaaactagtatttacacaaaatgagccacctggtttttttaaagtcagtatnnnnnnnnnnnnnnnaaatatgacatggagaaagcttctgttacctagtaagatagtaaagtatgtaagacatggcccttcccccagtctacattgaggtatagtgtattaaaggatctcaggagacttgcagcaaattactactgcttctgtgcttaaattcagaagtctgnnnnnnnnnnnnnnngacttctagtaaagagttccattttgctgtttaaccctttgtgtcctaagtttaatcaaacacagaaggatatttttttgcatcattccatctaatggaatgcagaaactgctctagagcagtataaccagtgcttcctgattgccagcagattgccctggacaccccagaataaacagcatcttcaaaatccccctttctcataccttcttattaatggttgaattagtatgtctctgtcatctgagagtcttgcatcttgaccattacctttattttctgtcaagggaatccctagaagatgtatggggagacataggaaaggaatggaagaaagttaattcaccccaaattggataaattccatgacatttagcaatatacttctgtatccctagaattgtatcataactttagttcaaggacattgcatctcaggtgggttaaggaggttgggaaggggagaaaagggatgaggagatattttcttgagatttatctccttgagataatgcttgagaagtcatccagccatggacttcttggagtaatacttacaaagaattggatgcattttgcatccttaggcaaaaaccccagtgctgttacaactgaaaatcattagccttgttctctgatagatacttacaagcccaactgcaggcaatcaaaatttatagcagatgagttctaactccatcaacctgtaatgtggtccatcttagggaaagaataggaaaacaccttggtttaccacaggctttgcttacagtttctgctttctgtgacctattttttgtatttcagcattttgtgaccgacttattcttagatcattggttttccaaaggctttgtggccatgaagccctttgagtgaaaactgtgcagaagcccagagtaaaagtgaagctgctctggatgaagtagtgaagcaagagtaggggcctgaatcctgctacaactatcttcctttaccaccgtggtgacacctaaggggacttccttacaacaccttgaactcttccgaacacagtttgaaaaccactgccccagacagcaatatgtttgacctgaatggcattccaatcttttctgtacctccactcagcacagttcatgttcagtagatgctgaacattcttagaaatactgtgtgtgaacttagaaaagtgcaagaagacaggcatgtctttgaccccaggaatgatcatttgctgaagatggtgtcaagtgaacctagattaacagccctccactccagatggatatccagtgattcctagaatgggatatagccagagaacaattctatgcaccctacactgacagactccc

SEQ ID NO: 180487 - DNA, 1276 bp, Homo Sapiens
caaacggcacagatagattacagacgaatgattgataaagacagatatatagatgatagataaaaatggactgatagattatttaacaatagatagataagatgaatttagatgaaagcagaattggggaagtttgagaactaccaataacatcagacattaggatacgaatcaaggtatttctcagaacagaacacttactgtaccacataagcttatttatcttatatgtacattggtatgctgtttctgaatttttcttaagaccacagaaagacagtaactatgttttagtgatggtatgcactacaagaagtgcaatcatgctgctttcctgcatgatcatcatgggagttgacgtggaaattatgagaaatgtgaaaaaacataccatttgaatcaaatagataaaattggaagattcacatcatcttcctcgaattctgaagttgtaaggtgcctatatcccatttatactcaatcaaaaatggtatttcaagagctagatcaattctatgttaggactcatcaaatgtctacaacacagcacaattcacaaaacataacataagcctatgttttgaccctaatattttcaattaattaaataaaatctttttaccctgctttttctcatgaacagtcatccattcactttctaatttactctttcactgtaaataccatgaaagcaaatttagtcatttaaaatggaataataattttctgtttcactttccaggatgtgatattatcaaaactgtgaaagagatacaaacagcaacacataaaactggtaatagttctactctttgttaaagtatctaccacatcctgatttgccaatcaaaacttctgtttcaactatttgctatatcaactactcaaagaagaaagtggttacattttatttgtagcctttagacaaaagccacatgcatcgactcatttcagatggccagaatgtccaccgtggggtagctcacttattctctcttctggcaagatcagagctcgctacacccctttgcttatgaactatggactgaagacttaaactgtgggaaagaacacttaggcaagttagctacagataccaaggggaaagaatttcttcgttttattcatttttttctagatttttctctggcatgaaaaaatgcattgtggagaatgcttccaccccttggaagtggtaaaagcgggtgataatgctgggaatgagggtagagaagaatacttagctcaaattaatcaccaggtatttctaatccaa

SEQ ID NO: 180488 - DNA, 1388 bp, Homo Sapiens
  misc_feature (350)..(412): n is a, c, g, or t
  misc_feature (430)..(482): n is a, c, g, or t
  misc_feature (1320)..(1345): n is a, c, g, or t
gcatttgggtggcaaacttgattctttctaaaattcccatattttccttaataagcagtaattataattacaacgggaaataatttctttaagtacccagtgcagtgtcactgtcaaataaacatcagtggctttggccccaattcttaaggtggcaaacgccgctgccccactccccacccatccccaatagggcttgagcacctgtagccctgctgagcacgtctgtgcagccccagccctcagcatcttttccactcgcttccagctatatcttttccctttccttcttaattcaggaggcagctttgcaaccacagggcccaacgatagagactgtgaggtggcannnnnnnnnnnnnnnnnnnnnnnnnnnnnnnnnnnnnnnnnnnnnnnnnnnnnnnnnnnnnnngagcgaaattctgtctcnnnnnnnnnnnnnnnnnnnnnnnnnnnnnnnnnnnnnnnnnnnnnnnnnnnnnctgtgcttccctcgagtttcccatttcaggttattgtttactcatcctcttctagtcatttccctttgcctcagaatcgtttacagaaaagacagtctaagttttaaagttcagctatggtaagagccttggtttattaaaaaattatcattttcccatgggtgaaaagaaaaatagagtgaaaatcaaaaggagatattcaagtcacctcagtaagtctaatactttgttatgctgtaagttttaactttttaatccacttgggaagtatatctaccaatacatcatttaagatcaaggcaacaactcattctatgtaacagaaccattactttccattggctctacccttgtttttaggagaagatgtacagaagttacactttctagtctaagacaaagacaaatttcccagtagagcatacacagacgctcaacttctgtcaaggaacactggcaaaccaacttcacttatttgcctaaaaatgtgagtgagagctgtgaatgtaatttcagcccgaaacttcccagaggggagaagaaaccggattaaagtcttacctgtggtgtgcccatttcgcttttgtggtgaagcttctgccgttgagcctccaggtactcctgaaatggcttctgcagagatggacctatgccggggacagcactggaagcagggtacagtagcccaaagaaaaagacacatttgggaagaaaagcaggaaaaacgttaaagaaaatgtacttaccacctggactcaaaaggcagggattggataggaagaggaataaaatataaaaatcagagaactgctgaaattctgtgacccctttttagttnnnnnnnnnnnnnnnnnnnnnnnnnntttactccatctaacaaccccttaaaaaccaaaatctctccaa

SEQ ID NO: 180489 - DNA, 887 bp, Homo Sapiens
ttggcacacttttctccatggtaacctcagcctcttctggtagaaacttatttgctcagactgagagcaaaacaattgctttgtttctgttttctttcttattatgcctaggcacactgtctggactaggcctctcccagtctctcagaatgagaggtctctgtggctgcttaatctaaccttttgctagtgagggataatgacttgggaacagagagaaggtctatgagagactgtagcagggcttcacatgttttggaagacattcattcaacatgtgtaatgaccaattccaggtcaggccttattgcaaggactagaaatatagccgttcctatgttcatagggtttacagtataagggaagaaatcgatacaaaagaagcaaatagacaaatagtataaagtacgaggatggaaacaataggtggagacaaacagagaatggggcggggagaagagtaaagaatcggcctctctgaggagagctggtctagttgaaggaactgaaaggaagagggagaatgcaagcggtgaagctggagagaagctagggcccaggcagaaagctgcatccagagttcaggttttttagcttgagggaaatgcggagctccgaagggttctaagcaggggatcctgaactgctcgagagggggatgtcggcgtcgcaggaggtctctgtcctcaggggagccactggttgtgtccaccggagatctgcagctcctgtacttctatgctgggcaatgccagagctactactcagccctgcaggcagctcgtggcagctctgatgtccagtactcaggctaatcagccctcgcgccttttcgtgctcacagcaagagggtggtggtggctgctcatcgcctggtgtttgttggg

SEQ ID NO: 180490 - DNA, 901 bp, Homo Sapiens
ttgggtcgtctcctgccgaggagcccaaggggtcccgggatccgccgcacaggctggcactgcttgaagaggaggctactcggagactgcgccgcgcgggtagatccgaaacggggctggggcggagtgggaaaaggccgggtatgccttgcatgatcgcggggagctccttcctgtttttatcccacctagagaagccgggaagtaggggtttaggtccaatttgttggagtacttaaggactcgtttgcactttcttttgggggatgacagtggattcattgccctcggaggttaaaccagttatgagtgagggattggccagaagatcggggcgcaggcaagcaggagtgctctattaggataagcaagtttgacaggaagaagctactcttctccgaattacacagaggtgatgtgttcgtattgcacgtagacgtgtgtataacaggacctccttccccgcgccccgccaccccgacacacacaggagctgcctaaagtatccttgccttgcagattggaggctccccaaatattttgcgatctgaggatccagctcaagtgaggtgccataggacgtgttcctgagtttgcattgcacggagaccttcctggaatttttcatttgcaagtcggcttaaccaattttgcattgagtcctaggctgcttgcactctgaatttgggctattcaggtagtgtgctcaaagttgaaaccgcatacagcacaactcaagtttgcatcagactgggaagcgaacttaagccagcggtgcgtggcccaggagtgggaaaggaaatggatgcctgaagtggaagaggtggtgcagagggggcaccgcccatgctgccctgcttccactgctgcgcataggggcggcaggggcggtgatctctac

SEQ ID NO: 180491 - DNA, 1705 bp, Homo Sapiens
  misc_feature (1459)..(1500): n is a, c, g, or t
ttggattactttggccagtggaaagtctcttggagagactttgaggtttgtgatgacaaatcatgctatcgttaaagttaaatacatatatatacacacctagaatataagcagaatggaaaagttggcagggatgaattcaagaacattagagtgaatttttttcattacagaattgttagttcctttaggaacttagtctcgtagatgtatatatttaattagcataacttggacagcacaagattaatgctttaacttgtttgcaggagtttaaaaagctggtttctgttgccaatagttggttggaagggaaaatggagatgccacaaataaaattttttggatgtgcaaaacagttttgattttatttcttacaaactataggactccaagccccctgatccttgatcagaactacattaacaccaaaaatcaagttatcaaagcagagaggagggtgctaaaggagttgggattttgtgttcatgtcaagcatcctcataaggtgagttgtagagtacagaaattgggttcgtaagtattaggacttttctaaaaattttattttatatgaatttatgtttctatctgagtgttaaccttggttttaaaaagcattcttttaaaggttcaggcttcatcgaaaaacattcttttggatgttgagatttatcagtaaaatgacagtcaaaaatgtaggttcaaatcttaaatcttaattgtgtgctcatagagaagttatttttgtttctgtggttaaagtcccagtttttccacctagaaaacagagatgtaaagttcctcattccaaggaataaatgtgtagctacaaaagtatctggcacacttatcatcatagtagaatgttctaagtgtgttggctgctcactgttaccattattggaaatttgtttctcccaacatctcttagctttcattatcaatataagccatagagtgagttacccgggtcaggactacctgggttagaaatgtaccttgggaaattaggtgaaataatctagcacggtgcccatcacatagtaaagtgccaatgaaaaatattcttttaattgccttttttcctgtacaattttgaaatatgcttctaaacataatttatataaaatctagtcatgtagcagttcacattagaatcttatgtacatttaaattggtctgtattatcgatgcacaattagaacttgagtctaacattttcaattacttttttcattgaactctactccgaaagaactaccagtatactgaattgagtttttttcccttgtccttcagatcattgttatgtatttacaagtcttagaatgtgaacgtaatcaaaccctggttcaaactgcctggtaagtcacttttttagatttctttcctagccaggaaaacagaagcagaaataaagtaagtttcgttttccctttccaaataatgagataannnnnnnnnnnnnnnnnnnnnnnnnnnnnnnnnnnnnnnnnnaaccaaaaggtaaataatgcttatttctgcttcctgttttcttggcttgactaattacttttaatggagaactcaatttaactttgttcttttttctactctttaattaaagggtagtccatgatggtaagtcatagaactctgccctctgcacttcagcccatgacctcaggatgggcctgattggctaccctgctctccagcc

SEQ ID NO: 180492 - DNA, 3246 bp, Homo Sapiens
  misc_feature (123)..(150): n is a, c, g, or t
  misc_feature (806)..(847): n is a, c, g, or t
  misc_feature (2705)..(2756): n is a, c, g, or t
ttggggctgcgttgggcttgcgtgcggctcgctaagactatggcgtccgggcctcattcgacagctactgctgccgcagccgcctcatcggccgccccaagcgcgggcggctccagctccggnnnnnnnnnnnnnnnnnnnnnnnnnnnnggagggatcctgatcggcgatcgcctgtactcggaagtttcacttaccatcgaccactctctgattccggaggagaggctctcgcccaccccatccatgcaggatgggctcgacctgcccagtgagacggacttacgcatcctgggctgcgagctcatccaggccgccggcattctcctccggctgccgcaggtggcgatggcaacggggcaggtgttgtttcatcgttttttctactccaaatctttcgtcaaacacagtttcgagattgttgctatggcttgtattaatcttgcatcaaaaatcgaagaagcacctagaagaataagagatgtgattaatgtattccaccacctccgccagttaagaggaaaaaggactccaagctccctgatccttgatcagaactacattaacactaaaaatcaagttatcaaagcagagaggagggtgctaaaggagttgggattttgtgttcatgtcaagcatcctcataagatcattgttatgtatttacaagtcttagaatgtgaacgtaatcaaaccctggttcaaactgcctggtaagtcacttttttagatttctttcctagccaggaaaacagaagcagaaataaagtaagtttcgttttccctttccaaaataatgagataannnnnnnnnnnnnnnnnnnnnnnnnnnnnnnnnnnnnnnnnnaaccaaaaggtaaataatgcttatttctgcttcctgttttcttggcttgactaattacttttaatggagaactcaatttaactttgttcttttttctactctttaattaaagggtagtccatgatggtaagtcatagaactctgccctctgcacttcagcccatgacctcaggatggcctgattggctaccctgctctccagccaatccagtgcaagctctcatccgagattcactgaagtggtccatatccatctggcagcatcttctagttctgtcggggtgtcaaaaggatttgtatatttgcttctagaagtaactatttgacatgcctatgtatttaatgtatacttgtaactatcaaaatgaatagttcatttttgatagatttgttgtgcagccattatgaattaaatggtttattaggagtttgactaaatttttatttttagtgtgtatagcatgaatactaccaaaggagacgacaaacttgcagcttaaaatgggcaccagttcccacactggcttaatttatataactgcttggctgtattgcgggtaataatattagaagcaagaagcacttcatttttaaaagagatgttactataatattgcttaaatgctttagcacttggacttcttgagatgcagatgtgtgatttggagtgctggcttatttaaaggtcaagccaaggagtttgtggttcagccacaactactgtttcctaagactattgatgtgaaggacttagtgaagtaatttttatattctgggcttcccagcaagatgtcctttttatgactgccatgcttcttttggactcagtaaatatttgtaatgttagaaaagtctcattatttttataaaatgcatgacattttaagtatgtgttgcataaaatggattatagcagttctcatggtttaggatttttaagaaatagtccatttaatttcagcttaaccttttaaatgatctgtaaaatttctttgatagtttaggaatgttgtggggagggttcattaataaaagttcagcaattttttaactgaaatagtttatctcttttacctagtcacaaaaaaggtatgtaaacaaggccattatatgtgtttattgctctttatttccctatctagattttctaagtatcttagctttcttaatataagtttaacttggtacttactgaaaatgcctttttacccctgttaacggtattttgagcttttgaaaagaacttggttgacactgcttttattgtggataaaggagagatggtcagtaattaatggcttgaagtattattggagtggtttatcatttctgaaactaatcgtgtcagaattgactttgaaaagcattgctttttacagaagtatattaactttttaggagtaatttctagtttggattgtaatatgaaataatttaaaagggcttcgctcatatataggaaaatcgcatatggtcctagtattaaattcttattgcttactgatttttttgagttaagagttgttatatgctagaatatgaggatgtgaatataaataagagaagaaaaaagaataaagtagattgagtctccaattttatgtaagcttcagaagaactggtttgtttacatgcaagcttatagttgaaatatttttcaggaattacatgaatgacagtcttcgaaccaatgtgtttgttcgatttcaaccagagactatagcatgtgcttgcatctaccttgcagctagagcacttcagattccgttgccaactcgtccccattggtttcttctttttggtactacagaagaggaaatccaggaaatctgcatagaaacacttaggctttataccnnnnnnnnnnnnnnnnnnnnnnnnnnnnnnnnnnnnnnnnnnnnnnnnnnnntagccttacaagaagccaaattaaaagcaaagggattgaatccggatggaactccagccctttcaaccctgggtggattttctccagcctccaagccatcatcaccaagagaagtaaaagctgaagagaaatcaccaatctccattaatgtgaagacagtcaaaaaagaacctgaggatagacaacaggcttccaaaagcccttacaatggtgtaagaaaagacagcaagagaagtagaaatagcagaagtgcaagtcgatcgaggtcaagaacacgatcacgttctagatcacatactcccaagaagacactataattaataggcggagtcgatctggaacatacagctcgagatcaaagaagcaaggtcccgcagtcccagtggaaagcctcgaagacatcataatcatggtttctctcacctaaagccaagcataacagagatgaatttaaaaagtcacaacagaacatggtcataaaagggaaaaa

SEQ ID NO: 180493 - DNA, 961 bp, Homo Sapiens
ttaggtttccatagtgctctgttataaaatatttaaaacacagatttacaataaaatcattatattattattagcaaagtgggaacaaataatgtgtagaaaatttgtgaggaacaaacataaaatttgattcatatggcctgtttgcaaaagtaggcttatttcagggggagtatgaaaataagcaaggcagactattatgagaaatagcctctaatgaagatctccatctctttagaataaccttgaaaagtaacaagaggaagtcatgaaatgccgcattatacagtagcaaaatctattttttaatacaaaggagaagaggaaaaaaaagaacacctctagtcccagtgatgaccactgatgactgtaagtcctagacacagagaccctaataatactactgcgattctgaaaagcattcctgacttgtttaacagtttggaaaagtgtccgaagtttaagtactaacgcactatgaaatggagatacacaggaaagactgaaaagtagaactatcacaatataaggaaattaaagatcacaagtagctactttcaagcaagtggtactttgagagtctatgagaaaaataaaatttaatatcacattattcaaaggcagtctgattaaaatcctgagagtccctgcctgaatcctctgctgggatgtaaagtcttctaaagcaggcctgcacagggctttacttctcagttctatggggacacaggataggttgccagagtgagtgagaagaggatgtaaaagacaatttaacctttcctccccagactcctaatatacaattcatattctagtgtagcaatatgattaagagctctgaataaagaatgaagactaaaggaaaccaagaaagaagaattcaacattaatattcaaagctatttttaattagagtttgatcacccattcagctctataaacctgaacattgtgccaa

SEQ ID NO: 180494 - DNA, 1945 bp, Homo Sapiens
  misc_feature (350)..(364): n is a, c, g, or t
  misc_feature (372)..(624): n is a, c, g, or t
ttggcaattattttgtgtaattctctaaacagtttatgccaaggagtatcagtgtactccatactattagaagtagagttctttgcattttggggtctaatcatattaagcagccaactccagaaaccccaaaacttacaaaagaactccatccttaatattctgttcctctagaagcacccctggtaccaaaatctgtattagtcagggttctctagagggacaaaactaatggaatatataatatagtctagcagtaactagcataaaaattaagtattaactcacacaatcacaagttcccacaataggccatctgctgaggagcaaggagagccagtccgagttgnnnnnnnnnnnnnnnagatggannnnnnnnnnnnnnnnnnnnnnnnnnnnnnnnnnnnnnnnnnnnnnnnnnnnnnnnnnnnnnnnnnnnnnnnnnnnnnnnnnnnnnnnnnnnnnnnnnnnnnnnnnnnnnnnnnnnnnnnnnnnnnnnnnnnnnnnnnnnnnnnnnnnnnnnnnnnnnnnnnnnnnnnnnnnnnnnnnnnnnnnnnnnnnnnnnnnnnnnnnnnnnnnnnnnnnnnnnnnnnnnnnnnnnnnnnnnnnnnnnnnnnnnnnnnnatgagccactatgccccgcctgtcggagttctaaaactgaagaacttggagtccagtgtttgagggcaggaagcatccagcacaggagaaagatgtaggctgggaggctaggccagtctctctttttatattttttctgcctgcttatgttctagccatgctagcagctgattagattgtgcccacccagattaagggtgggtctgcctttcccagcccactgactcatatgttaatctcctctggaaacaccctcacagacacacccatgaacaatactttgtatccttcaatccaatcaagttgacactcagtattaaccatcacacttgccatgaggtgtccttatatattttaaatatttgataatgaccaaggaaagaagagttaagaatgattcattttatcaccatttttactggaatagctatattctcctggtgccagactctgttttaatgatttgaaatacaaatacacttttcaaagcgatattcatttttctcccatgcatctataagcctctttaaaaagggtgaatgctattaggtgaagttgataatagcaaaaatgagtggtggaaatttaaccctatattttaaatgtaaatcttaattgggttccagctgacactgagccatgtctacctacttctccttttatattatcatttcatttctattgggtcctttggccatgtctttaaaaagtactccactcactctcttttcccttcacagtaagcaaagaagtaaatcctccaatcaaataaacaacagacaaacgtgggtacatttttcagctgtatttctactctaataatcaagctataactctctcttcaattagtaccaaaactctgatgctgtagcttatataaggagcttccatcttcttgcctgccatctgcctagccttctacagcctgatttcctttgctattattttgctgctgtcctagatggccactcattgaagtctagaagtttgttttaggcatcttcctttttgcctgctctacagcactgaacactaaaattgtctaattagttaaatgtaatttagatgatctttgttaaccttatcaatgtcattatcacttaactacatacttgcttgcttcttgaacatatataataattgatatataaagagattatatgtttattaatctctttattaatggtattaatcaattatatatgttctgtttattagtaggtcaccatatacattcttcaaatttatccttgttattcattttctgagtttaatttaaaagtgaattatgacatactcatctattaagtattttctgaca

SEQ ID NO: 180495 - DNA, 875 bp, Homo Sapiens
ttggcaagagtccaaaagctgaagaacttggagtctgatgttcaagggcaggaagtatccagcatgggagaaagatgaaggccagaagactcagcaagtctgctcttccatcttctcctgcctgctttattctagctgtgctggcagctgattagatgtgcccactcagattgagggtgggtccacctctccctctccactgactcaaatgttaatctcctttgacaacaccctcacagacacacccaggaacaatactttacatccttcaatcaaatcgagttggcactcaatattaatcatcacagagttatatgctaaaatgataaaactataaagggatacaagagaatggttacctttaaggtcaagttactgattgcctctgtatggaaggaagaaggctaggcatggaagacacaagagcttctcagggaatagtttgtgtgttaagtttttaagttagatgagggtacactggtatttattatattattcttcaaactttatagcagttttatttctcatattttgtgtgcataatacattcagtttggaatctgaaacttttttacctgagttttggttttggatataatggaataagcacaattcaccctatgtctcctactgaatttgagctatgagagctggacagaattcagagtcactatgtgagaattttgaaaggcaaagagtaggagatcagaactggaaatacccctaagcttgtagtgagtttatcattgttccccttctggtagcttctaacttgatctcatagttgaaacccagaagtggacagggagaggtccaggagaagacctctggtttggcttaaggagtggtagaggcagagagtggccttcctacct

SEQ ID NO: 180496 - DNA, 1891 bp, Homo Sapiens
  misc_feature (190)..(204): n is a, c, g, or t
  misc_feature (1634)..(1667): n is a, c, g, or t
ttgggactattaaatctctctgacagtttcttttttaggtgatttccttcctgccaggctccgttgtaggggttacagaacagtcgttcccgcctcacaacctggtaaggatccatctcttcccgtaacgctcatgctctgctgctttgtctactttaatgggcaacatctcagtttgtgtgtgtgtgannnnnnnnnnnnnnnctgttttggaaggtgggagggaaatctaatttgggccctgtccaccctggaaacagacttgtgctggtcaagaatgtatttaagatgcctcttctggttgaaatagctattaatgtgtccccttattcagacttgcgtgtacctagctcttctgtccccagtgtggacatggccttggatgacatcggttccaactgtacactgaaacctgcttatagagagacagtttggagacagtgaaacaggtgaagttgaatggaagttccgagttgtacaaggtgcaaattggaattccgattttagggcaacttttcagaggttgacagttaagtatttggggcatgcacaaatgtgatagttattttgctggaggtgacaggtatctcttaaatatcaacaatgccttttagttttcagtatgagatatagaaacagtctataatggagtaacattttaatgtctcaccattagagaagttggaaattaacatacatatgagactcctgcgttttagttaattggagaataagaatggctaatgtttctttgaggaccagcagtgattaccctatcactgagattgaataaattgttgaacatctttatttttgttgtattaaaattttaggttaaatttatatatgtatgattagatattgaaggttgtgaaatgtgaatgaaaacgtgtaaagtgaggcttcacaaagaatcttattctctgtgtttcaaaagtatttgtcctattttaaaataattttttaaattgagtggttctggccacttaaatgacacgattggtactattttcctaaggtgggatttattcccttgaatctattaaccagttgtataaattgaattatggtgtccttcagtgtaagaggcattaagaaattctttgtgaaacatcactgcttgataaagtatatacgtatttagcatccttgtttttctttgtgctaaagtggatacagctgttggggcagaagagacgggaccagctgctggccacatttcctgctttattttaaaaggtagtataagaaatgaggaaaaagaggtaatatcagggcttctgctgttttttatttttaacatgttcataattaaaaagtattttccagcagtccaaagatgtaagttatcttacacataaaatgttttattttgttatttggttatgaaaatggaatccttgttcttgcacaactgtaaatgttttgttgctagataatacgatttgagacctgaattggtctttggtttccagtgcatcacagcatattttgtaaaatcatctactactgcacttgagcatgaatgggtagtagccaaactcacaaattggagtgatgaacctgcttatacctaagggcaggagcaagcccctcacaatgcagctgcatgggtttttagtgcctactgaatnnnnnnnnnnnnnnnnnnnnnnnnnnnnnnnnnnaaccaaaagtagttggaaagattatttgaaatgactaatttgtgctatctttatgaaatatgttaaatgtagcttttttgaaacagaagccttgaaatgaaatttaactaatacttgaacattttgtatatatttctttgtatataattttgtgcagtaccaatgacaaaaatatggtgtcataataaaaccaggtttgttgatcttttagttatgggctcaaa

SEQ ID NO: 180497 - DNA, 942 bp, Homo Sapiens
aaatacatagaaaatgaaacatgtcatatatagaagggattcatagcttgactattcttaataaaatacacaccagttcccaactagataaaatatccacctattagtaaatttaatctgctcaaagatgattttcctttgaataaacatctgatatctgacattctgatactttaagtataaacacatacatgtacaatattaagactttatgtgaaatttatgatagtattagcatctttttctctttataaaaattctatacaccatgtagcaataaagaagagtatttgtttttaagcccctggatcttcaatgattaatttgggaacatttttcagccctgacatccagataaataataatatatcaagcaacataaatatctaggtagatacaacctcgatcggaaatgctcaaaaataaagaccatctaaactaactaatagaccagcttaacattctccttgaacactatgcttctttatccattttaacaattacagagatcaccaccaccctaaaggaaaaggtgaaaatattattcaaacacatatgaagaggccctagcctcatccatagaagttcaccagcaatcttgattcattactacatgtcagaagcagaggaagaagcttaaagtgaagcccttttgacctactttgaaaataacttacaagaaagtagtacacagcctaattactcagtataaagacctaaaactcccttaaagtggttgtctttagaaactatatagaagaaaggagacaactttgtatagacaataaggaatatgagtattgtagacttgttctttatacccaagtataggagatcctagaaaatctaagcttcacctaattgctgtccctttaatcatagccaaataatccccactgtaccttatatactctactcccttagatcttttctatgccccaa

SEQ ID NO: 180498 - DNA, 1282 bp, Homo Sapiens
ttggcgaaaaaagagcatggaattattttatattgttataaaaatcccagatgcaaatttttttaatgccaattattagagcttctggggaaaaagtatagttcacggaaataaaactatgttctttcagggttgggtggataggtggctgctagggtgtctggctcctggcggctttgccatccatgaggcaagggctgggaacacagtgtctttgcctatggtagatccatgtgaatgtcaggaagccagctcttcagtcttggagatgatttctgctacaattctgtagaaagattaaggatggcagagtaaaaggttaccaagaatgccaggatgtttttcttgggcgtaggaggtccagattactttcctttttgatgaaagagtttggaagactgtcccatctctctggcttgagaaatctctgccattttaaacatcactgtgaaatagcaattattatcatctgtatttagttttaacattacccacaacatagaaataataggtaaaaatcgtcttgcctactcattccaaagatgatcaagtcattaatctagcaaagtattcatgtatcagattttgtatattttgaatcaaagctaactaggaatgttagatataagaatgtaatgatattcatgcactgaattctaagccaatatgaacaaaaatgctgcatgaatggcacatataggtcaccaaagttcattcacaggtagaaaaaacttgtgctttcttttccatctaaaaacaaaaggagactttctttatctcatttaaagaacagctctttgaaattgaaattgaccctttttgcttgaccttaaggagattagcttccagtagatgagtttgcaaaatacttttcctgttcttttgttttgctggtattgaaaacatcccactaaatcagatgaagaggcatgggaggaaaaatatccaaattaattactaaaatcgagaagagaaggcaaactcttgaaaagtaaaaaggtgtttgtgaccttcagtatttattgaacagaggaaataactgacaagggcaatacaattcaatgttcatgtagtaacatttcatgtcacttgttgaatttggttctcatatgtatattgcatacacataaattcaaactataagtcgtcatttttgagccatcatcttacattcatgtaatgaaattatggaaagagagtaaaaactagctcttaacttagtgaatataatatgggtattttaaaatcaggtcactacagtaaaggttctaagtattgccaa

SEQ ID NO: 180499 - DNA, 914 bp, Homo Sapiens
tgtacaaaaaagttggctggatttgtttctattgattgtttcttctccttgttatgggtcatatttccttcattcttttgcatgcctttataattttttattggatgctggtcattataaattttacatggttgggtgctgaattttgttgtattaactttaaatatatttggcattgttctcctaggatgcagttaagttccttggaaagtaaaccttttgaggctctgttaggaggtccagaacagcttttagcttaggggctcatttggccctaagggtactgctgagacagtacccttcagcatactactcagtgcatgtcttacgaggtctttctactccagcttgtgtgaatgcaaactattcccagtcctgtgtgaactctgaggattgttctgcctgcttctctattgtggttctttctccagccttggtcacctccttaacatgcatgtattaatcagaatgtagctacagactctaggggaatcctgtgcatacaccagagtgctcacttttggtggatagttctcttctttctgatattctgccctgcaaattctagctaccttggcttccctgacctctgaattcttgtctgctcaactcaaggagaccgcaagtgactgtatgggttcttatccctacacgccggcctggaaaccctctgtagctggggcaaatatagacttcactttctttgtatcctttatctcaggaatccctgtcctgtgctgtttgctgtccagtgtccaagaactgttgtttcatatattttgtctggttttatttaaggaaggaggataaatgtggcctctgtaattccctgtgacctgaagcagctgataagtcccatattttataacaaaagactgacttcttagatgtcctttctcatataatttatactc

SEQ ID NO: 180500 - DNA, 1295 bp, Homo Sapiens
  misc_feature (654)..(662): n is a, c, g, or t
  misc_feature (671)..(760): n is a, c, g, or t
  misc_feature (908)..(943): n is a, c, g, or t
ttggctttaaattattagtctatcctcaaataatataccattttatgtatccttgtatctccttttccctacctttgtgccattgttgccgtaacttttagttctacatgttataaactccataatacattattatttttgcactaaaaattatattatcttttaaagggattttaaaaatagaagtccttttatgttcaccaatgtatttgccatttctactcttcttcatctcttcatgtaaatctaaatttccacctaatatcatttgactaagggacttctttttaacatttcttattgtctgttggtcatcttttgtgtctgaaaaaaacctttgtctttatttttgaaagttatttttgctgggtgtaagattctaggttttgggttttttttcttgctttcagtattttaaagatgtcattccattgtcctctgacttatgtagtttctgacaagaagtctgccatctttcttatatttattcctctgtatatgtttcctccacacatacagagctacttttaccattttttctttatcactggtttgcagtaatttgattaaaatattccttggtgtggttccctccccctccacttttcttctgtttcttggatctgacaatgtaaagttttcctcaaatttggnnnnnnnnnttgtttaannnnnnnnnnnnnnnnnnnnnnnnnnnnnnnnnnnnnnnnnnnnnnnnnnnnnnnnnnnnnnnnnnnnnnnnnnnnnnnnnnnnnnnnnnacacaccactgtgcacagctcaaatctgggaaatttttggccattatttcttcaaacatttatctgtctccccttctttctcctttgcttgagactccagttacatctgtgtgagacttctagatgttgtcccctaattcactgttcnnnnnnnnnnnnnnnnnnnnnnnnnnnnnnnnnnnnctctctgcgattcattttggttagtttctattgctgttttcaaatttagtaatcttcttcagtgtctaatctgctattaattccaatcagaatatttgtgtttcatatattgtatttttaatcaattaaagttcagttcaatttgtgtcttttgaaaaaaaatagtatcttccatttctctcctcctcatgatcattctttcctcgatcttgaactagggagtatatttttaatgtcattgtctatgcattctatcattgtgtcatttctggatttgtttctattgattgttttcttctccttgttatgggtcatatttccttcattcttttgcatgcctttatatttttta

SEQ ID NO: 180501 - DNA, 1007 bp, Homo Sapiens
  misc_feature (47)..(66): n is a, c, g, or t
  misc_feature (878)..(891): n is a, c, g, or t
ttggctctttcatggtaaaacccttttcattaaacacaaagaaagcnnnnnnnnnnnnnnnnnnnnaatgtgcagaggattgacctgtgcatgcttttgatctctcattcaaaggatcaatattaaataaaattgtcatgagctgtgttgaagacagggtgctttcaaatagaggtaatttgctcttgtgttgtaagaggaacatgtcaacaaagatagggaatgagggtgatcgtgcagatggcttgtatcttatatatgcaaaggagccaatctcagaagcacaaagaaaaaagtgtgcataccttattttgtacagataaagatgatgtctttttgttattgtctgtctgttttgtatgtgtctgagataagggatagagaggaaacatccgtcaggctaatttaactacattttattttaaaaatagagaaacataacctctagatgggacagcagaggacagttagtagaggccacaaactgttatgggctgctgtgttttgttctaaaatcaatatggttggagcatgtatatcttaggtgatcatttcacatcttaggaatgcctactcattttattttattctagtgatgctcaattcactatttaatttattatattttctcttctgtggcacttatacaaaatatctcttcacctacttagttctacagggttttaactttggagcaacatgaataaaatcatcgagaaggccaatattgtttagcaacatgaatacaatacagtttaaagttgtacacatcctgctcaactttattcatgtacatttcctttctgtggttttcttttgcttcttagaaattctgttagtggttagtaaagaatttgaaagtactttctccttgctgnnnnnnnnnnnnnnaagacattcctcccagaatactccagggggcagtgttttataacacattttccccactgggtgattgaaggatggaggatttttgaaaatttgacagctacatgaaacatgagaaa

SEQ ID NO: 180502 - DNA, 1718 bp, Homo Sapiens
  misc_feature (249)..(266): n is a, c, g, or t
  misc_feature (1059)..(1072): n is a, c, g, or t
ttgggaaatggtggaagtcctgcaaaatgcaataaactgaagtaatgtagcttctattaatacaaagtaaataactcagatttactggattttaaaccttattccttgggtaaacaatctgactgacttcacaccaaatatttgttggcggaggatttggactttagggataaaagtggatacattttttattttacaaactctgtatttgaacttaattattggctcttcaattttacgttaccagcnnnnnnnnnnnnnnnnnnaatgaatttgatttacatcatggtcaaacaaaaattgttgagcagggaaaataaactactttctggattccttcttgaattttctcatgtgccctaaagaaaatgtgttccacattaaggtgttactttttccaggggtgtgttcatttaaaaagaatgaagccaggcaatgtttatttttcttttacctataaataaatgaatggattaatcattgtatacttgactcccatgttggtagggattttagataggaggctatttcttgtctgtgcttctcaataccccataagcagttgcttcatggatgtatatactaatagcagtgaaagaaagtgcatgttcaaagaatacaacaaggagtctggatattttgcaatcatctttatatattacggtgctctgaattaaaagctaaaagttactgggtatgtctgacaccttagtgctttatctttgttctactaattttctgtgccccaatcccacttaaccctagcctcattccttatctgtaagataggggataataccactgtaaggttattattaagattgaataccataaaatttataatgggttttagcaaatggcagaaaatattttctgaagaaaaccaagtgctattaaaaaaacatcacaagccttgggcttactttgggattttaaaaaccaagagaaaatggatggctgaactttcaaacatttggtaaatattatagtattgtagttcagagctctggattctttgcattttgcctgctgggtgagaaggaataaaagtttgtgccnnnnnnnnnnnnnnaatcactttaatttcaaaacaatgtgtttaaccatttgtgggagtaattttcattttgtgagcctgaagcattttgattcagtgggaatttctggtgatttatatctggaatagaagtgagcttaagtttagctattctaacgttgaaaaaggaagcaatgtttctattggattctaaagtatattttcaaaaatattctgaagtatttgtatatcttaaacttggagttaagacagcttagctttgaagataagagaaactagatgtgtgcattttctatccagatgtgtttgttgctggaactaaatgaaacagtacatggtaacccttgaaaggttttaaacttgtttctgtaactgctaatctacatactctcaagtcactaaccttcctctttgatctctttgtaggctgaccaactgactgaagagcagattgcagaattcaaagaagctttttcactatttgacaaaagatggtgatggaactataaacaacaaaggaattgggaaactgtaatgagatctcttgggcagaatcccacagaagcagagtttacagggacatgattaatgaagtagatgctgatgggtaatgggcaccatttgacttccctgaatttctgaccattgatgggcaagaaaa

SEQ ID NO: 180503 - DNA, 1539 bp, Homo Sapiens
  misc_feature (338)..(347): n is a, c, g, or t
  misc_feature (550)..(559): n is a, c, g, or t
  misc_feature (676)..(817): n is a, c, g, or t
  misc_feature (830)..(844): n is a, c, g, or t
aactttgtacaaaaaagttggctaatgagggcggtgatctgtgatacttactttgtggttcctcctgccaagtggttacagcgatgggtgtgtccaggaggcaaggtgacatcttaaacaggagttagggatccttgccaactgaaacctccagcctgtatgggtgtggggagaggatttcaccttaaataaaactagcgttcattgacgtttgatggatttgcttcatcttgatgcttcaaatgttattctgaatttgaatgtgctggttacatttgctttcttaaagatgtagttacaggcatatgtaataaacattacaagttgtggagtaagcnnnnnnnnnnaaataaacgaagggtaaagttttctttaatcagttttgataattgaatcagtaattcgaatagattttttcttggtagagttggtatctacgcatttgtggtcccttgcccagtgttaagcttttgtagttactgtttgcatcactggtgctttgggggttttctgttaaattgacagctcttactataagagacaaagtcgnnnnnnnnnntcttaataaaaattgacagatatcattatttgtgacagatacagtaaatttgaaaattgccttcacataactttataattagaggactgagattttacattaggaatccaattaaannnnnnnnnnnnnnnnnnnnnnnnnnnnnnnnnnnnnnnnnnnnnnnnnnnnnnnnnnnnnnnnnnnnnnnnnnnnnnnnnnnnnnnnnnnnnnnnnnnnnnnnnnnnnnnnnnnnnnnnnnnnnnnnnnnnnnnnnnnnnnaccctgtctctcnnnnnnnnnnnnnnnttaggaccccaagttaaagtataaaaaattttatacggaagtaaagtaagattgctcatgtaactcttgagtttacatgtaatcaacatatgctcattgaaaacgggattgcttcaagaggactttgagtccagggtgattaggtaagtaaaagatgtaaaaaggtagaaaatttttgtcacttgagtctaaataattgttcttataagtgccaacgcctgtttctgttaggctcagaagatcaaaggatttggctcttttaaaatatagaaagctctagcttcagctagaatttaggcctttagtaatagccctaatttttatgaagccattttgttccagtgatcttttggtgagagatgctatgtaagtactattcttcagaattaggtgtctttttaccctaatgaaataatttagattgcttttgatacaggtaaaacaaatatcctggcttccataattgtagaaaaaacttcatataggaatccttgttgtatcaaagtagcacctgatgggaatgaacagacaggaatggatgaaggatagcagtttgcgttccatttcaagcctatgggctcacacatttattcagataagaacaccacctttcactagataaactccaacagtattcatgcatacttttgaatggcatgtcggaaatgtttgataggtacataatgtattcactt

SEQ ID NO: 180504 - DNA, 1725 bp, Homo Sapiens
ttggcaacatggcgccgtccacgccgctcttgacagtccgaggatcagaaggactgtacatggtgaatggaccaccacattttacagaaagcacagtgtttccaagggaatctgggaagaattgcaaagtctgtatctttagtaaggatgggaccttgtttgcctggggcaatggagaaaaagtaaatattatcagtgtcactaacaagggactactgcactccttcgacctcctgaaggcagtttgccttgaattctcacccaaaaatactgtcctggcaacgtggcagccttacactacttctaaagatggcacagctgggatacccaacctacaactttatgatgtgaaaactgggacatgtttgaaatctttcatccagaaaaaaatgcaaaattggtgtccatcctggtcagaagatgaaactctttgtgcccgcaatgttaacaatgaagttcacttctttgaaaacaacaattttagtatggaaagatttatgacataattttattacttactgtaatcgtatacagtttccattaacttttatgacatcatagggttttcctaaatactgttaatctattaatcaataattactcttacatacatttgcataattctttataagtctgaattcagtgaaaatctgtaacacaaaggttttcttttacaataactttttattatctggtaattgctattaagacatttgaatatcttttcctgaatttaattgctattgaaattctgtgacacaaattttttagatattttatcgtgtagaattttaaacttcagacacctagttctagtaaccatcagcttgtggccaatcttatctcatccatacatctctccagctaccatctcttactaagtgaaagcaaatcccagatatggttatacttttatatacttgttaaatatgtaattgtaaatatttcagagtagatttctgaagattggggcctttcattttttaaacttagccacaaaaccattatcacaaattattaaatatgtgttcaaatttctactaattgcaaatgttacaattttttttaaaactcgggatccaaataaggtactgcacattgtggttgattgatatatcttttatgtttcttttggtcctataagttcccactctatctgttattttattcttcataatttattgtttaagaaacaaggttatttgtctttcacgttttcccatagtttgaattttgcttttgtatcccatggtataatttaacatgttcatctgtcccctataaattgcaagttggctctagagtttcagcttcaggttcttttttaggtgagtaagggtaagactacattataaggtgatgttcacttcttttatcaagaagcacataatgtctggttgtctttaattttgtaggcttagctgacattaatgtttcatgcctggatgcattatttcatcagtggttgcaaattgttgatactctggttttttctccctcacttatttttcagctgtactgcttctataaagaaaaatttccccttctactatttggttacctagtgctgcatttatatagaaaaggcgggataaatattcctgctcttatcagttttaatataatgtattccacctctagcaaccttcattgtaaccaattagctttttccccattcttgtttttcgagaggtgggcctcccaacttttttgtacaaagttggc

SEQ ID NO: 180505 - DNA, 1665 bp, Homo Sapiens
  misc_feature (96)..(130): n is a, c, g, or t
  misc_feature (242)..(252): n is a, c, g, or t
ttgggctgatcatgttgccataatgtgtatggaaagtgtaacacattcttactggttaaagacgactaccaggtatctaacttgtttaacattgannnnnnnnnnnnnnnnnnnnnnnnnnnnnnnnnnnatattgtttacattttgagaggtagcattctgtttcaaatgctttttgtttttctgacagtattgttgactgggtcataacattttgagctgtggtttggtggattttcaannnnnnnnnnnaaaggtcattcgctgtgctatcttcaaaaccttgagtttggcccccaatttttggcattcaaatgtttaaaagctatttatcttggtttatacaagtttcctttctcttctttttgtcatggtattctatttggtctgcagtttgaatgtagagaaagtggactgatcccccaagcgttgtctgcccccactctttcctccttgggtcccgccattcttttactgggcagtcgagggcattggaggggaagtgactgccctcagcctcactccctggggccatgaagaaaagctaaacagtctcatggcatctcagaataatgttgggtctcccaagaagaaaggtgtaagaataacgacatggctgattaggcgaggccaggatagggctaaggccaggattcctggctggcatccagtcaccccttctcccatccttccccctcttcttccacaagtccgcagccgagacactgtagtctcccagccacagtgatgagtgccctggagactccactgacctctagatgaaggcccctggccctggttcctgttaattaacctctgggtctttgagtcccccagcacaaacttctttcctgtaccctgcggcttggggtcacagggcatgccgggaagccacagctgaggggcgcagactgaagcagtgctccacctctccttctttagctcaggggttgctggtctgtggcaggcgccacgagtggcccctgtggctgttctcagtggcagtctcttaagttcccaccacaggcagctctttatcccctctccctacttgactctttctcttgcctgtgcttttggcctcaaacaggcctgctggtagcgctcagggcgtgaggctacactcctgccctgcctttcctgtcttcatggtctgccagggcataccttggggaggtggaccaaagacccaggactttttgcagtagccagtcctaccccccagttgtctttttaccaattcagggtgggagagaaaactgcagcaccccagcatgtgagttactcaggtgttgggggctagaagggacagtgcgtttaaacaacactcagagctctggccttaaacctgtggccccccaagtctaggagcctcatctcttcctggcagtcatgcgggctggaggtcctgaaagggaaaacccattcagacgactgttccccaatctaccagccatctgcagggtcagtgaccgtggccctctccctcctctaaaatgtgccacttatgaagagtgccccatggggaaaaggagactcagctgtcccttggcagcttgtgccaatatcccagggcagaagtttccacaggagcctcttgcccttgcgcatagccactgtgaaaggcggtgggagccaacacccttgggggagggggcagtactg

SEQ ID NO: 180506 - DNA, 1553 bp, Homo Sapiens
ttggagaataatgaagataataatgatgattattataataatgatgatgattccaaggaaaaaacctacagcgaatgttccatttctaccccgcacgcagacactctccctaacactgataacctgagcccccagcactggacggaagaatgctggcgtctccgtgtgtactggttcagggttctggccccagccttgtcaggaccccctggtgtccagagcccccacccctcccgcaacaagcagctgatgccccagtgattctctatacatttttcacctcggccaatatgtccaggaaaactgcttacttctcttttcttgcctggagccttcattgttcacccttacgttgcaatataggaattaatgctacaaaataaaagtaaagcttacctgaaaagtgcatagtttggggcaatggtatctacatctcccactgtgggaaaaccagcaaagcatcaaaactctcaattctcctgttaccgaatgcagatctgaattataagatgtttatgtttgaccattgtttcaacaatgggattttgttacgaattatccctttaactgaaaccctcagttttactgtttacattattaggaaaacagggatatcttttgaatctaaaaatttgatgtacagcatgtgatttttgaagtttacatgtaaagtcacagtataggtgaaataacgtttgtcatattttgagacgtatcctgcagccatgtttttacgtgagtgttttagtcaaagtacatggtagacagtctttcacaataaaaggaaaaggattttttttcctccaaatgtacatttatcaacctaatgattgatttttttaaaaagagatttcgccccagtctggtttatgaaagttcattgccctaaactgtgctgattgtttttaatcaagttataaatttccaacctagatcatgtatctaccaactctcctgcattttccaaaaggcattgagcttaaatattagtcttgcttagagtaggttatccacttacatgctgcgctaaagccatgcctttgaaactccttgtttaaaacatgatatgatttttgtgggcagtttcagaaaagaaaacaaacaaacaaaaatcgaccctttaattattacttgcaactcaacagatctccctgccgtactgccttttccaggaactttacttcagggctgtccagattgcagttgtgccccgtgtatgtggatctagttcacagagtctttggaagccagcagtcgtgccctccgtatactgtccactcattttatgtagatttggtatcctcagcagccagtgttaacaccactgtcacgtagtgtacagattcatcttttatgtatttaaagtaatccatactatgatttggtttttccctgcaccattaattctggcatcagatcagtttttgtgttgtgaagttctactgtggttgacccaaaccaccaccatgagacccctgaagtaaaaataaggacacatacattatttgagtaactgtttccttgggggccaatctgtgtatgctttaaaagtt

SEQ ID NO: 180507 - DNA, 695 bp, Homo Sapiens
ttgggctggagcggcggggcgggggcggagtccggcggccgggagagcgagtgagcgagcggaggagcagcgacacgggagtctagggagcgagaaggagaaggaggggagcgctcgggcgcgagcgagagaaaccgcgagcgccgagcttggactcgagccccggaacggctgaggagcccgcccgctcctctcccctcctcctcctaagattgtttgtgctatgtatttaactattttgggtagctctatttgttttcttcttattttttagggttactggtatatgcttttagaagaattgtgtcaatactaccgaacttttgttcccataccagtttggtttcgctaccttataagctatggggagtttggtaacgtaactagatggagtcttgggatactgctggctttactctacctcatattaaaagtaggtaacattacaaatcttgtcactgcatgattcacattaatgattactgatacatactactgttttcctcttttatagttttatagtttatcttcatatcactagtttgaagtaataacaggttctatatttgtttagatatggagaaactgaaatagactatcttaatcgagcggtcctcaggtttcactggagggaagggggagtcgaccttcacatagcgtggattatcttactagggaaaaatagtggaataaaa

SEQ ID NO: 180508 - DNA, 1989 bp, Homo Sapiens
tttaaacacagggtggtttcatttaatcttttggtgaatggatcataagtcctacattctaaaccatctggaaacattttctggtagcctgaaaatccattctgatgcttatcagtagtcattatgaccaaatgacattagtattttgtgccttgatagtttatacaacttatatatttgaaggtgtgatgaagtggctccatccttccatttgtttatatggtctgaaatcacagttctgcagagtggacatgttttctctctgttaaaccataaggtcatgcactcttcacaaaatatatgctgacaaatgagaagaattggcttctgaaattcagcttgacatattgaacaaatatcatccacatctgaacactgtctcttgctggcagccactccataacttggttgtgtaaaaaatattcgtaaaacctgtctgaaagttctcagatgcccaaaaaattccaaaagttttaatatgaggtagagtaaagccagcagtatcccaagactccatctagttacgttaccaaactccccatagcttataaggtagcgaaaccaaactggtatgggaacaaaagttcggtagtattgacacaattcttctaaaagcatataccagtaacccttagatttaaaaggcatgatgaaagaaggcaccaataaaataaggcattttaagcccatgaaaaagaatttcagaatgaagtctgtaattccaacaatccaaaatacttcccagaagctcaaatggtccaaagtaggatttaaaaaaattaagctaccaaaagaaaaacatcaaaatttatcagagcaacatacaaagataaagtattaataaagggttttaatttgctacaaatattttattttgatatgtaaaaaatatgagtttggcaggatgtcagagttcacaataatggaatggaggatcattttgcttaaagagactttttaaacctgtttggattttagatcttcccttcatagaataaggaaaaagtcttcacggtttgtcatagttgacacctttctagcctgtaaatgaaaaaaactcatcaataccagacatctgctgtgtttttcttaaccaattccaatcaggattccatctcttcctttcaatgaattgcttgtcaagatcatcaactccctctgtatggctaaatttcaaggtcactctctttttccatcttccctccctgaataattttctttctagacttttaacacaacacttttctatttctcatatttcactgctggtttcttcttagtctcctttgctgtttctcttctaattgtggtcatgtccagtactgggctctctatctacactctctttcctgggttagttttgtccagtcctgtggtttttaaatatcaaccatatgctcctgataccaaaatttattgccttaacctctaccctgagttcatgacatatatttggaaccactttcttatcaattctacttagcctctcaaacttaacatgttcaaaacaaaattattgatttttctcctcaaaatcagttccttcctcaacccaatgaaatgacaccccatccagccagctgcttagactaaaaacccagaggtcattcttgcttctctccacccacctatccaatccagtccatctgagggatactggctccacctccaaactatatcccagatttgcccatctctccaactccagtgaaaccaggtcttctaatattctaataaaagctgaaaattcagaatactcccatttgacatggagacttatcagctactgtcatttagtaagtgttcttactttcagaaacaaagaccaataataacaacctaatggtactttaaaaatacgaaatatgtaaacaaaaactcaggtatcaaaaattaaatatttattgagcatctgttatgtgccaaggcactggggattacaggtgtgagccaccatgcccagccactaaaagtttttcatgatgatgg

SEQ ID NO: 180509 - DNA, 1199 bp, Homo Sapiens
ttgggaaacaatagttataacctaatttctttggtgccaatatcagcagaagaagagccaagagaccattatgaaaactctagtaagttctcttggtgattatataatgctgtattcattgatcatatttctgtatttaaataagtacattttttaaaacatcataaagtggatcagtaatgctgtaatatcacatttcatgtattatacaacatttttgaaatggagtactccaaagtaatttgcttcttatggttaccaaagtttaaagaataccctaacatgcactccaagattttaagaggaaaggctttgtgtttttcattactgtattttgaaatctgagagtgcaaaactagttttcttaggtaaaccccgtaatcagtttccacatttacctgtaaaagtcagtggagggcatacatctggaagtagtagtggcggtacacaatgtgtgttaatatgatttccaaggggtatctagagtaaactttcttaatcacagatctgatctgagcatgccactcctttcttaaaatcttttgttgattttccatttccctaaaaggaaggcccactggagcatgggccttgcaaagtcctctttctggcttctgcctgcctgccttttcagcttcatctctgccatcttccctgaatgaacttttgtcagtggcctcgctctttctacctatgagatgttgtttctgcatgttcttgcatggaattctcttcctcccaaccctgtttcattcctttaatctgtacaactctttcttatcctgaagtctttatgttaaggttgccttttcaggaagacttttaattgtattagctaattaattaattaatagtctgaggtatttggagctgagattctatggggattagttgctggagggtagtttagagccagattgtgaaggactttctaaactgtgctttcaaggttttgaacaggaaaatgatgtagactttctgttttttgtaagtttggaggatggcttgtgtcttaaaagaatatgtaacataaccatctaatttgtgagtagtggactaaggaaacaccactctaacctttttctctctgcgataatcccatcttcagcctctcaagcactgtgaaaaatcactttctcttgttgtattcttggagcccctgctaattcattattgaaaaatacctgctgcctgcattt

SEQ ID NO: 180510 - DNA, 924 bp, Homo Sapiens
  misc_feature (125)..(163): n is a, c, g, or t
ttcacagaggagaaaactgaggctggagcaaaaggagcttatggaaggtctcacagtcaaaagcagcaggtcccaatttgagcccaggtctgtcggtggccaaacccacagctgcatcacggcannnnnnnnnnnnnnnnnnnnnnnnnnnnnnnnnnnnnnnttcccggcctggctcccctgctggaccaaaacttgggtaggccaggggccttttatattcctacctcggccgaagaggcgaaatgtgtttactgatgggaaagaaatgcctccttaacacacaggtgatggaggggctcacttaggatgaaatgaggagccccacgacccagtggagagcgcaccagctgagggcgacgggattcccatccttttaagagcacttttcagccacttcagggcgcagagcagtggacgggaaatcaggaggtgcgcatccctaaatggggcaatgaccccttcacgccctacaaggctgtgacaaggagagaatgaaagactaggggtcttcacaacctgcaaaacttccgccaggccgaggactgtaaaacaagggaagccagcaagtcagagggtcaagggagtcggccccgcgttgggacccgttcccctacttcaaccaggccggagcgggggccttcccgcctggcctggggagaagggctctccagaggccactacagaccccagggactgctcgtgcacgggcgcggccgcgacacccggccccaaacacccgtggccccagccaggctgggcctcaccgtgtcgccgctgaaacgcacagatacccgcgcgggaagcgaccagccgagcagccgccgtgttgccagcatcgcggcgggccagatgggtcacctcacgctgtcaccttcatagcactgaggctgaggaactggcgcgatagagacgctaggccaa

SEQ ID NO: 180511 - DNA, 908 bp, Homo Sapiens
ttggggtaatttggattatattcctgtgtgggaggtgacatccctccccctgcgagattgcattcctgttgcctacatgaccgccattgtcggggacagaaattgtccccttctgagcgagagtgttgctcagaaacggatgaacgatgtgttggaattggccttcaccatcctgtatgaccctgatgagaccttagggccatcgtgtctaatttatatgagtactgcatctggaatgacggcctctgtgccattctggggaaggacatgtccagtgagctgaccaggactgacctggactccctgctgaacatggagatgaacctgctgctcctggacctgcaaaacgtcccaactccctaagccccttcccccatcaccccggatccccctttgtatgactttgtctatcactatggctgaccctggatccttaatttaccgtccccaccataatggatttagggccctgtaaaaacacttacattctggtgccttgtcttttgcttgtacacaatctgtggtgattttggtggccggtagatgccagccatttctcaaaccgccctcggaccacccatagtatcctcttggtccctgtcgactaagagtcatgaaagcagggtgctctgcccactccatcaccatgaagcctggggattgggccacgaggaacaaacagcagatgcccttgccttccagtccaaggaactgcttcttgaaatggatttaacaacagccactcaccttttcctcctgagcctgctctctgatcagctggatccccacgtgaaccaacagctggcccagtaaaggctgccttgcagaggacaggtgtgttgggcgtgttgagagccttgtactgactacctgtatcttaaatcttgagtacaagcctgaggcttttg

SEQ ID NO: 180512 - DNA, 593 bp, Homo Sapiens
ttggaaaggccgcgtctttctttttggtttcctcggctcccggcgtggggagtgcgcgggggcgcaggccccgcttcacctgagccggcccagcgtgcgcgccaggggcgggggttttctcgcttcacaccggtacggaggaggaaacttgtgggggcggcgacccccggcctgggtcctgagtcaggcagcgaggccgtcgggaagtgactactcactctcggggttttccttaatcccgctccccccgtttgtcgtgggcgcgtgttcgctccgaggaggcggccgcgtgcggacagccatgcattaggcagggcttccctatgcgcccggagagcgcggaccgctgcctcgggccgccgccgcctgccgccgctcgcggagcccgagccccagcccgagccgccgcctgccccaggccggggcgtcgagcagccggcggcctggccatgtggggctagccctcgccgcgcctggcctgcagcaggaccagcaacatggaggctgccgtcggcgtccccgacggcggggaccagggcggcgcggggccccgcgaggacgcgacgcccatggacgcctatctgcggaaactg

SEQ ID NO: 180513 - DNA, 1352 bp, Homo Sapiens
ttggctaaataaaggatttcctaattcagtgtgatccttaacagcaaccatgaggattactgagtgcctttctggggccttttgaatgctgtttggtacagcaccagagtccctactagatctagagttggctgctatagttttttgtggcgattttttgccatggagtcatttgaacctcatacacaatcctaacatgccatcccctttctgtcatagcaggtacactaaaatttctttgtagctcaattttatataatcaagatcacataaataaggcttccatgttagaatcgttgcagtttttagtgtattcctttttggaggctaaagttgtaccttataaactgtttctgcgtctggcatttagcaagacaagttatttgggttttctttccctcctcttgagctctcagccttctgactacaaggtttggcttaagccttataatctaaaaaatatcagccaggctattctatcttctaagacctggctgaatcatgaaccagttctaaatctaaagagagtgagagagggaagaaatctggcacaaacttacagtctctttaattacatgtaaaatgcatgtgactgtattacctattggcttagccccatggagggtttagaaaaatgtgtagtctttgtggaagctatccaattatccttctcccaaaaagatgttttaaatgtggaatagtattacattcccctgcccctttatgagtccttcataacttactaaagctgaccaattgttatttatgtaacctggctcattcattgtcaactaagaacctaattatatgcaatttattgtaaaaaaagctataaaaatatattttgctagtattttagaggaaaaatgatattgggcacagtctataaatggggagaaaagttaagtagtatctagattccaaggatactatatttattatacagatatgtgtgcctgtgcttccatcaaaccctttttcaggtatctccttttaattcataaggaggaaagagtagggcatttataaagctaagctaaaaatgatgctaagcataacgtagatgagacgccaggctgaaccaggggaaggctggcattgttagtgtccccaactagcagtccacctttatctgtggcagctataaatgtacaggacccatcagagtcctaagaaaatgagagtaattatctctggcatcatccacatttccgactctttccaatctcttttccctttttctgtaatgtacccagcatccccctattgtattttggttgcccaagattcttgattctttgagtgtgtagtagcatttcttaaaatgagatcatcagaccaacccttgattc

SEQ ID NO: 180514 - DNA, 871 bp, Homo Sapiens
ttggcactgagcagctgtgaaaaaaatgaggaagtaattcctgtgctgatatgggaagacttccaagacatgttgttaagtacagaatggtgtatacagtatgctatatagtgtggtaaaaggtttagggataagcatttatatttataactgtttatatttacataaagtaattctgaaaggatacaaaaaagctaacaaaagagattacctgtggtagtgtggggcttggggattggatgggtgagaaacagtagtggaaatgagatattgtacagtttaaggcattatacacctataaaaacatgggaatgtattacctactcaaaaagtgaaattaagagagatacaagaaactgtttggatgttccttcccgtttcaatgtatctatattttttcagccctcaaagttattataaatgtcattataataacttcataaagcttcccctataatgagaatcttaccattctcctaactccaatagcactgtaatccacctctgttaggacacatcactcttcatcatgtgtgattattatttgcagatatcatcttcaaggctcttctctatttaccacctgccattcttgttctcacctctacatgaccttcacattttatttctctcggttttttggacaagctacattcccttccacagagaaggcttccctgacccctttcacttggttggattaccttgctattcttttctatctttgtacattccttttcaaaatacttatctcccttgttgttacctataatgtctgtcttctttactcaagagtctagacaaaaagctccacgccagccctcggctgtgtttgtattgtttacgtctgtgttcctagtgcttaataaaa

SEQ ID NO: 180515 - DNA, 557 bp, Homo Sapiens
tttgtacaaaaaagttggtaaagaaatacctaaaattattttggtggttctgtttgacttctcatcactttttggcaactcttaatttttttagggcagccaggggaatgtcctttcacctgtttgacctgctttaggctgaggaaaatgatggtgagggcaggggtttcttactgtacaatgtctgcaggtagagtcagaattctcatcaggctgtgatgctcagttgtgtgtagattgaaagccctaattttacacacaactgaggatcatagcctgatggttcctttttgttttactcttaagtccaaaataccagtcagagatttttaagtgcttctgcaaaaactgttattttattgacaaaaaatatttgtacaaaataggtttactttattaaatatttagtgctttactactatgtataaagtacttgtggaagaattcatatgtttttacagatggagaaacttgatgtggtttaataacatttcctgtgtttgctctttacatggggttggcgggggcgaggagtaggaggaaggggaagtgctttt

SEQ ID NO: 180516 - DNA, 1312 bp, Homo Sapiens
  misc_feature (160)..(177): n is a, c, g, or t
ttggatttctctgggaatacactgaaaattaaatatgtagactaaaaactacactgtatcttaagtcaacttctgttcattttaacagacatttagatgaattttggactctttcatttttaaaagattacagttataatgaacaataattaggaaagcnnnnnnnnnnnnnnnnnngcaaaatggaaggaatttcaaaattcatagtaatggtgaaaagcaaagaaaaagaaataaccctaaacacaagacaaaacaagaaacatgagagaggaccaaccatcagttagccatgatctgactcagtctgcaagacagggaataacttccaaatggttctttgttgctacacatttactgggtggcttaaaaaaatactcatagagcaagagaaattatgtattaggataatgtcctagtaaaatattacttttgttttgtctttatatcacaaaatatttaaagtttagtacatattaggggctagagattgcagacacaacatgatgttctgtcttaaaagctgtattcatgttttctaatattcttagactgtatccttctcaaagcaagaaatgtgttttattcgtttttgtatcgccactgtagcaacgtggaatgaacatgagattaaagaaagccatccttcatgtagtcatttttgtcaacactgagaaaatactgattgagcaggtggtgtaagccaggcacagtgcttagaggtgggggtaccagcttgtgtgataggtgctccctgcccttctggatctcacagcctagcagggaagacagatgtgtacataactaaccccaaatacattcagagtgtctggaaacacacaggagggatggttgggttggagatgatttcacagaataaatcacattcaagtttggctggcctgtgacccataatttataaatcaaaatattggccatctagccaatgtcattatgagccacgcattatgccaagtgctgaagatacagaactggacacaacatactccctgaactcaagagcccattgatttgtagaagacatatacagatgtttaggaatccaacaagtagaaactgtgaatgggatgctgtggaaggaggagaaagactgaagaggagagcctcagtagggccggagaagagaggcccagcaaaaactatacgggaagcgacccttgagtttaggaagggggactaggaatttagtaggtcattagagggggattaaggtctggtttcaggcagtgaaacccctcatctatgaaaatttggagcatgataagtgatggggttccggacatgctactcc

SEQ ID NO: 180517 - DNA, 1923 bp, Homo Sapiens
ttggcaaactatacctaaaaaatatttctgcacttcccagagacctggacttcaaactttcccagtggagcctgattatagaacttgagggtcctatctcaggatgaaggggagaggccctggcttcacgggaaggtattccagcattgttctgcttcacccttgactgcgttgtctggcagtttctgtgtgctgccaggatattatatggaactggagaagttggagtcaggtctctgaagctagagtttcactaattagatgcctctgtacatgagaactattactgtctgcaggtccatatagctaagctgccaggaaaaacacattatcttccaaaactttcagagcatgtgcagaaccctttcttagcgttttcttctcagcattttctctgcctcccagaggctggcagccagtgacactgcagagttcagcatgttctaaccatgcacgcagggcaggggctgccttggccctcctcaggctttcgttgggagagcaggcagtggtggagcccttctgggtgcagtcctctggggttgctctttggaactcatgtatgagtttgactccacaaggcttggcatggataccaaaacagttgcaacaaattagttctgaacctggaacagagaattcagtgcttctgttactcaggaaggaggtgttcagaatgccccgtgcagagcagccagtcattactcttgtttgttctcacctgggtgcgcaccctcatgatgcagtggctgtagcaccttcatgccaggtgctgagagaatgggaaattcttcctccccattgacctgagtcccagagacttagggacacagacttcaggtgaggctgcggacctcagaagcagtggataatagattggggcattaaaagcttttgaggcagggggctcatgttttgactgcagggagttatgctgagcaaagagatgtgtttttcaaaaccagggttcaaaaccagtgtccacgctggagtaagtggagcatgcttctctgtgttctctgaatgatcttgcactcctcttaagcaaaggagtaccatgaccatagtcagtgggatcccacaaatgttcttaaatgggtaaggctttaagtagccagagagtatccagcctaccattggcttctccacatcctaaaacctgagacagccttggtatatgctttataaatgtttcttttcttgttgtttaagtaattaaagtgtttaaaatgtcttcattagatgtgacgattgtttaatgagtttgcctctgacgtgtggctccatgggagataggcaaagtaattaagaagttaccagaaattggtcggctggggaaatgcaaaagttagcatttcagtagtgaatttctcctggaacaaatgagcaatttttcctctttctcttaagtagtatacccttttctcacttagtaatttaatggtatataaagacatgtgtataagtgagtgcatacatatgaggtatgactatagggttgtttgtgggaatttcttttcctaacatacagaagatcaaagtgttcatctcaccccgccctccttaaaaggtgtcttttgggagactatgtgctcattgactatagtgctgccaagtaaaaatatcttgggaactcttctactagaatggccttcagggcttggcatgttcctttggtttacccttagagatgagaaatcctcctcctttgaggatggatttaagttctggaaataatctcaagtgcttgatagcacagttggatgaaaaaagatggcaattaaggtaagttacaccatttttgtttctaaaaaaatccctaagaaatttcttggaatgagtctttggcctcagagcctctcaaagtgtccacttcaagggggatcatcctcattagcacacagatttttaaaatcaatctct

SEQ ID NO: 180518 - DNA, 2620 bp, Homo Sapiens
  misc_feature (119)..(128): n is a, c, g, or t
  misc_feature (340)..(348): n is a, c, g, or t
ttggcaggactgataaatagaagatcaagagtagatccgactttagaagcctactttgtgaccaaggagctcaatttttgttttgaagctttactaatctaccagagcattgtagatannnnnnnnnnacatctattgtttaaaatagatgattataacggggcagagaactttcttttctctgcaagaatgttacatattgtatagataaatgagtgacatttcataccatgtatatatagagatgttctataagtgtgagaaagtatatgctttaatagatactgtaattataagatatttttaattaaatatttttttgtaaatattatgtgtgtgnnnnnnnnnaatctatgggaatatttcttttggaaaatcatttttcagctcaattacagagctcttgatatcttgaatgtcttttctgtttggcctggctcttaatttgcttttgttttgcccagtatagactcggaagtaacagttatagctagtggtcttgcatgattgcatgagatgtttaatcacaaattaaacttgttctgagtccattcaaatgtgtttttttaaatgtagattgaaatctttgtatttgaagcatacatgttgaaaatacaccttatcagtttttaagtacagggttttatagtgtaatatatacagagtaagtgtttgtttttgtttttcaactgaggtcaaaatggattctgaatgattttgcatatgggatgaggaaatgcttggatccttaaggagtttacgaaatctgctgttttatcaaagtgaaaaaaaattgcttattactcttcattttacactaaagcttaatgtcactaagtttcatgtctgtacagattatttaaatcatggaaatgaaaaaaatgttctctgcttgctaccaaaggacaaactcttggaaatgaacactttctgctttccttcctccaaagaattaataggcaacagtgggagaaaaaaaaggcataatggcaaatccttcaagcagggataaaagtcgatcttcaaacattaacttaagcagaccaaaaattctgatgaccgcatctagattatttttttataaaaatgattttcactatagctatgttacgctaagctactgtccaatctcttgtgatgtgtaacttttacatgtgaatattaaagtagatttctctgtcttgtactgtgatttctggtctcatttctttaaaaccttactctatttttcttttaaggctcttttttctccttaaggaaggtaatattttctaggttagataggactatcagggtttgtgaacattatgcatttaatgttatgggtactttacacacaagttagatggaatttttagagtgaaagaattaagtaggatttaattgggtgctttgtaaatagtcaactgtgtgtataacgtggtctgtttgatttttaaaaggaaaggatttgtttcagattatacaagaataaaagtattatagacccaagggacttcttatgaggtcaaattcagatatttatatgaatatgaaataccatggtccctagtagtcagttgaagtggcaatgtctaaacagaaatgaacaaaactaatgctagcaggttaaaatcaatcaaaatgtttaaaaattgattctgtcctcagcatgttatttcctcagctctgataatttactggtcttgagtattttgagaatttgatgttgaacgttataaagtcaaagaactgcttgtttagatgaggtttatttttatttctgatattattcattcttgtcacacatcaagaagaaaacactagagtgctgctggaattccaaatctgaagaattctaacgactgcattctttgttattaaaaagggcacaatccttcctttttatttggcagtttaatttcagtaggaagcatgtcacatgtgcactgttggttagaattatgcatctgtcatgcctgactgctgaaccctacctaagccttttggcgcagtttaaaacttatactggtggactgtgaacctcaaaacaaatgggtatttttgggttttgaggatagatgttactccttaaagtttgtatttggggcatgaaaaactactgaaagaagaaaagtgctacagatactacatttcaaagagttggcattttccctttggccactcaagcagcatttgatgtatctaaagaaacaaagtcattgtttattttttaaaaaattatatgcagttgtacaagatactacattccattgaaatgttggctatgtcctaaccaggcaaccagataacaaaaacattttgagtcttttatctaggtagttctaattattcagctacttagtttaacaaaggaaaatatcctgacttctctcatttcatttgtagacttttcattgtataggcacaaccaaagagtcagactggtttgaaactccagaaggaaaaaaagtatcccacacagtggatgttgtttctaagaatgctacaaaaatcctgacatctcacacatctcaatgttaaaggaagaaaaaaaatacctttttcatttcaaagaactaatatactttgatattgtgtaagacccttactcaagtttattgtcaagctcttaactgcc

SEQ ID NO: 180519 - DNA, 1245 bp, Homo Sapiens
  misc_feature (275)..(294): n is a, c, g, or t
actttgtacaaaaaagttggctaaatcctggtagataactcctgtatgctttatccaaaggacacccacagttttccagcatagatataaccaaggatgaattgattccttcaaagaactgggaggcacggatattgcattttttgtttacatccagtagccaagacgcctcagtgagccagtcttgggcagaggctgtcacatttaggcagattggaagttggtatgttctaattctcactctggactacagtgaggctgaatttatcatgtcnnnnnnnnnnnnnnnnnnnngacctttccaagtgctttctattgctcagaattgaaagaatgttttcatttcaagtttacaagaggcatggatggagttgtgacgttcttgacaagctgggctaacctttcccgaacttgtttcccggaggcaaggtgctcggtgacccagcgcatcttaaccttgggtctcctaggctcgaggctagggcattacgtttcgtggaaccaaagcagccaattgcatagcaagtattttcctgcattccaattatgcttaagaaaaagcagcatcctataaaattgtgatcataacatccatttccctcagcttttgtgagtgccttgacttacagccaacatcactgtttaactcagtctgtttaaaaacaaacttttctggtggttgataacagagagttgctccctgagccatcagggtcctgggagctggaagtgaaagggttattaacattctacctttatgcagctgttggctgaccagaataaactccctgctgagttcaagctttgaatggaatggatgcaaatgatgttgtttccattagagcaggtgctcacagcattctgattggcctgagcagaccgaggctatggctgttgggacaagcttagcatcctggacatcttgtcaaagaacctcactcacccctctggcctctacagccctcagaggagagaaaaccaattctccaacaaacaggtctctccaacatggtggtgctggcaggcttaggtttataaaatcctgactgttaaaggcgtttgaatacatcacattcctatgcaaatgtttttaatctccagtttaatgtagtttatttttcctatatgtaaagtatttttatacggcttgtatcatgatagtttagcaataaaacagttggaagcctcagaaaagtaacatgaataaagaaaacaattcccccaccttttcttgtacaaatttgg

SEQ ID NO: 180520 - DNA, 2064 bp, Homo Sapiens
  misc_feature (1367)..(1395): n is a, c, g, or t
ctttgtacaaaaaagttgggtttaggacttggctatatatgtttctttggtggagaaatatctatgtgatagagatttctttgggaaagatgacactcacaaaaaaagccagaaatttctgttttatagattttgataaaatgtatgaaataattttcacagccaaaggaaagtatagcacagtatattatggagagatgttacagctcaggaaaattaatacatgtcagctgtttaataaattatgcatttaattattgccagtacagtcacaatacatgctaatctatgagaatatatttattgcaatagaatataaacccaaatggatgctaaatctatgtcttatctttcattaagcatggcactaaagagggcataaggcacctgcaatgtactagataaatatgtataaatattagattttccatagactggaggataagtttttgtggtgcacatggaaagagtacagaaaaagaactcaggtggtaggtggtggtgtaacaaagtaggaaaacgatgtaataattaataatactttaaattttctttttataggatttttgtttaatgtgtacctttttatttatttctgcttttcctcccgaggcacatcttcacaatgaaatcttcacaagctcagaaccatcaacttgctacactgtgttcctccagtgcccagttcacaggaagcactcaagagtaggatcaattgttatcaacctctagcagattattgaatagacggtcgttacatgaaactgacactcagttcttcatggtccacgatagttcctatatccagaaaacgtacttacgttatcaactctgactccataagacaactttgcaaagtcttggctcataactatgtaagcaatgagataacttagttttcatttctcacttgttacttacaagtaaacagccctgtagctcagctgagctacagattaactacaggtaatcacttcagcgattctgctttacccatgcccaagattttaaaaaagaacctgacagatcattaaattttgagatttgctttttaaaatgcaggttccataaagttacgctgttttgcttatatatacagcaacaaatgccttcttagatatttactttaaaattctagtttccttaccatgtattagccagataatctgtcattttttaaattctgaaattgtacatatataaattaatgtacatctctatgcctgaaaggtacatttggaattacaacgtgtgtcaaggtagagcaaaatcccccagtccactccttccaaccccctagaaatttactctgtttggtttcctcttgattgtctttaattaacaataagtatgtcacataggtatcnnnnnnnnnnnnnnnnnnnnnnnnnnnnngagaagtgattcaaaattcaagtgtttaaacactttatgaatcttcccgttgttcttgacacatttttaaaatttcattttaattcagatcattagggatgaaattctcctgaattgtagcattttatttcctttgggaagaaggggctgaatttggcataattatacttgactatactgtaaaagaaaccagatctaatataaggacatcaatacttagttattaattcatttgcttatatttatatgtcatttgaaaatgtgtattaacatacacaattaaagggatataaaaatgaacatgccctctccatttctttaaaagaaatcaaggctgaatcaaacaggactactgttctgaaagaatactcagactatgaggtaccttattttccttcttttacacctgtctttcagttggcttcaaaaaatcatggcttttactgtgtttcttttttcctttatgtcttccttttgagggaaatgaaaaattgagaaaggaaattattattttataagtgggtgggtttgaatacatctttcacagtcaaatatttttctatgccttatgagcttaaaaaataaatttagaaagtttgataaacacagaaattttttattttatgttattttatgagatgagggcttgccatgttatccaggctgtcc

SEQ ID NO: 180521 - DNA, 2337 bp, Homo Sapiens
  misc_feature (187)..(219): n is a, c, g, or t
  misc_feature (835)..(844): n is a, c, g, or t
  misc_feature (1927)..(1939): n is a, c, g, or t
ttggggaataaatcagagatttaatttttaaaacaagcctttcaggacatgttacatattcagcccagtttcatatgctttctgaatctataatggaggtcagtgaacttttttaatgtaaagggccagtttgtaaataattttggcttttcaggccacatatgatgtctatgagacattcttcttnnnnnnnnnnnnnnnnnnnnnnnnnnnnnnnnntttacagccctttaaaatgataaaaaccattgttaactcacaggcctcataaaacataggctgttggctattattctccaacccttgatctagagaattttaaacattagaattttgttttacatttgttaagctttacgtcatcttcaaatgacaccaaaactcagaattatgatctgcatttaagccaattttaaaataaaataagcagtcaatgctgcctcatttattgaaattcagtagattttagtttatttcttagtagtcagagaattgatttatagctattcaccaaacattcttactaacgtttccttatatctaaatcagattgattctatattttgctttgtttgtaatcaatagccaatgaagaataaggagtattggaagaagcagtgagtcagctttaggtgacctggttcttgtctcaactttgtgatttggggagatacagtttactttccctgagccttaattcttgtgtaactgaagtctaacttaacttcttaatgtccttccagaactaaaattttattgttcattctaatcgttggactactcttgtgaagtttatattttgagttaatacagtttccaaattaacatacatttnnnnnnnnnngggtagtatttttccatttctctgtgtgcacttaggataaacagtgaagtatagcttataaaacaattagtttgagggctgagagtgtaagaggaactataccaaaagtcaggaaacctgagctcttaccctaactctgttaccaactttgctgtgtgaccttaatcaaaacacataacctggaccccatgctcctcaccagtaaatcaagggcctgaattttatggcttagtattcccttccaagctccgaagttgcgtgattctgtgaaaggcagtgattgattcctttgtactcatcttccttttgacctgtttcctcatgatatattggggaacaaatactaaaaaatgttttatactagctttcttgattgacatttccctataatactgatgaatttgggtgatggaaagtaatggaaattgttaaaagttctgctctcaaatctgagtctccttgccctgtgtgccaatgtttaaccatatttgctaatctaagccatattgcgaggatctcaaggatgatacttgtcaagagtttggggccttgagagcacagttttcaaaataatacttagtattttctgactatagagtacatttgtcttgtaaagtatattttaaaatacagagaagtgtgaagtacaaatatctcagtgctactatttaaaaaaacacaattagtatataaatccttccccatttttttgacagtataattttagtatgttaaacttggttacttctttctctcttcctccatcattttccctgcttcctttttcttttgtcatattcttaaaacaattttgcaaccacaggtacccacattgctggcactaccagccttgggctactaccgaggataatggagccagggccttgtagaagcacagaggaagtctagaactgagggggcctatgatacaggaagttcaggaggcagagtctcaaaggaacacctgcctttaataatgtttacagaagtggagaaaggactaaaggacttaaagacatgcaggtgtcttcatcctgattctgtctttgttattgcacaatgactataaaataatgacctaannnnnnnnnnnnnctggcttggctaatggaaatcgacactagcgcttccccaatattagacttaatctaattccaaagtaacattcaagaaaagaaaaaccagtggaacaggatcagtaagctcagactctccatctccattattttagccttgaccattcttctctaatccttttaaattatcttcagtttccagttcaagttacattgcttcagttacagtttgtttgaccctgtattcagagctgcattatgattcttgtgggccctagatagttttgccatcttagaccccttcttccatacaaaattaaaagtgatattttacaattgtatctgtatgaaatgaatgtattaatattttagattaaaacattttgtttagaagttcagtttttttcttatgaggct

SEQ ID NO: 180522 - DNA, 985 bp, Homo Sapiens
  misc_feature (768)..(792): n is a, c, g, or t
ttggtgaagatttaatgagatcatgcagagaaagtacgtagcacttactagcacattgattggcacctgagaaggccctcattgattgttagctacagttctcatcttttgtaaattgtctttcagatactttgcccagttttctatggtgtttatctttttcttattgcgttattagagctatttatttattatagaattaaatgaggattataccatttgtctttcatttgttgcaaatatttttcccaatttggtgtttgtttttcagtttacttacagtggttttgccttatggtttctgcctgtgatagcatgcataggaaagccttgttattcctagaattaagggaaaaggttcttatattcctctcatattttctataatttagtatcaaaaactgtatattccttctagaatttattttcccataaagtataacgtgaagccatagctttggttttaccacatggctgttttcttgtctcattaccatttattgaataatctttttatttctgtgtgatttaaaatgccatattaacgtatgttaaatatatttactcggttgctgtgtcttttccactaatatgtctctattcctactcagtaccataatattttaattactataatgtatacactaagcgttttattcatgcctgaatcatagctttctcaatggaaaaaataaatatatatataccaccttagcttttttttgccaaaatagctatatattcctttctggtttaaaagaaatacannnnnnnnnnnnnnnnnnnnnnnnntttacagccctttaaaatgataaaaaccattgttaactcacaggcctcataaacatagctgttggctattattctcaacccctgatctagagaattttaaacattagaattttgtttacatttgttaagctttacgtcatcttcaaatgacaccaaactcagaattatgatctgcatttaagccaatttaaaa

SEQ ID NO: 180523 - DNA, 1771 bp, Homo Sapiens
  misc_feature (532)..(547): n is a, c, g, or t
  misc_feature (1307)..(1355): n is a, c, g, or t
  misc_feature (1368)..(1381): n is a, c, g, or t
tttgtacaaaaaagttggacttaattgctttcctgcctccttgaaagaaagaaagaaagaagactgtgtttttgccactgatttagccatgtgaaactcatctcatcacccttttctgggtttgaagctgctgtctctaaaagtgccatctcaattgtgctttgtatcagtcagtgctggagaaatcttgaatagcttatgtacaaaactttttaaattttatattattttgaaactttgctttgggtttgtggcaccctggccaccccatctggctgtgacagcctctgcagtccgtgggctggcagtttgttgattttttaaagtttctttccctacccagtccccattttctggtaaggtttctaggaggtctgttaggtgtacatcctgcagcttattggcttaaaatgtactctcctttgatgtggtctctttgggtccaattgggagaaagagaaatcaatagtgcaactgttttgatactgaatattgacaaatgtctttttgaaataaagaaccagtccctccnnnnnnnnnnnnnnnntagtgggagagaagagacaaatctcccatgcagaagaattcaaaataattgatatagaacactacctttgaggtgggtgaaagagtgaatatacaaacaggtaatgaccagaccatatataaaaatagaactctgactcacaacctacaacaatcagtccagaaagccaaaccacaatgctatggactgaatatttgtgtcactccaaaattcatacattgaagcctaatccccactgtgatggtacctggagctggggcttttgggaggtaattaggtcatgacgatggagtgctctgtaaatgagattagttcccttataagaagagacacgagaaagcttgcttcctctctctgctctcttccatgtgaggacacaaggagaaggccatctgcaaaccaggaagcaagccctccagacacaggatcttccagccccttaatcttgcacttcccagcctccagaactgtacgtaataaatgtttgttgttgaagccactgagccctatggtatatttgttagagtagcctaaactgactaagcacaaaacttatgtaacaattagcccaacagtcaggacttgaccagtaactaacagcttccctaatttctgtacccacttttaaattaagacttgctggagaaagcaaaatatgtaccactaatcaataacacaggatgttccaccctctccacgtcagcagcctccaaacagggcctacctggagctttccctttctctataacatagctttccnnnnnnnnnnnnnnnnnnnnnnnnnnnnnnnnnnnnnnnnnnnnnnnnnagacaaagtttcnnnnnnnnnnnnnntatatatacatgtaaaagtgcatagatctatatatgaatatatacatatattcccttactctcccctgagaggactgggaacagcaactcctcaatggcaacaagtataccttgtgcccagatcttggcttctaaatatttttctccactaaaatgaaaaagggatcctcagagaaactgctgattccaagaatggaacaggaaaagtgcaagatgagactgggacatcttagaaagtaatcaagtcctccaagaataatagggacatgtcaaaaggatagagaagttagcttgaaggggctcccatgggccaaatctaggacaatttgagtattaaaataatgttagtaaaaataggctatatcccactgaatacaacagaaaagccaa

SEQ ID NO: 180524 - DNA, 1486 bp, Homo Sapiens
  misc_feature (1116)..(1124): n is a, c, g, or t
  misc_feature (1138)..(1192): n is a, c, g, or t
  misc_feature (1329)..(1340): n is a, c, g, or t
ttgggaattaggcatgctcattctagattctttgtcttttatgaaaccacatctagagtgtatttaccaacatccctgtgataatgagtttgcaaatcatcatgtatatgatacatgatatatattgtgtaaatatacgtgtgaatacataaataggtaaagaaacccttttagccttgtttaatacagtctctccttaaatccattatgctggaaatacttgtttggggcacagctagcagcacagtacatcagccacagcaccaagcaactttcatttattgtgttgtctagtgcacaccacagccctacaaggtagatattattgcccatctctcctttatagataagaaggataaattaacttagtatgccagcatttgaacccagttaatttttaagttaagctagataggtccacagtcctgtttttcacaatttcagaatggaaaaaactctgaaaactgcaaaacctaacatgaactaagttttaatcctacatattgtgaatatttatatattttactgaaacaaataaaaagtaatgtgtttgattatacttgttgccccagatagcccaggaggtattttataaatatagtgtatactcctttctaagcggtgttgtcgttttaataactgaaaaatgttgaacttcaaaaggcatctgaccccatgggtttcttaagagtgagattgtgacctgtacctttatctacatgcagttaacacaaaagataattacttatatgtaacaagttaaagaatgatgaacactgtaaacctactacctggcttaaaaaaatagaatgttatcaactcatttgaagatgctgtgtgcctgtcccctattgtatccctctctctcattcccagaggtaactactattccgaattgtgtatatgtgactcttttcatttaaaaaaaataactagagacattttcttatgttcctactttctgacatttcttagtaacttgtttgctgtcatcaggaagatatcacctcagatttgattcatgtttgcttaagtgtgtcttaggtgattttgttttgtaggaattgcatgaaataattgaaataggaataaatctgaagtcacttcgggcttgcnnnnnnnnnttgtatgcaaaatnnnnnnnnnnnnnnnnnnnnnnnnnnnnnnnnnnnnnnnnnnnnnnnnnnnnnnntaacattatgttaatgttaactcaccagtgtagtaaaatctgtaacagaacataattcctggataactgaaggttttgaatagtccttgggtatttggcatagaaggatttaatctgatttttaaaatttgttgacnnnnnnnnnnnncagaaatggattgacttgcacctaaatgaaattacttatctaatgatctcttggacttaaagcactttgtttctgcagttacttcgcatgagtgtttactgcctctcagtcagcattctttacagtattaatacacagagaaggaa

SEQ ID NO: 180525 - DNA, 2050 bp, Homo Sapiens
  misc_feature (458)..(764): n is a, c, g, or t
ttggattttctttttagagttaggtgtagtgcttaagggttaatttattttcatgttatgccagtaatatagtgttgtatgcctattgagtgattgtggcaagaaaagctacagcttctttgcgtttaactttttcaaaccacagaccagaactggttgcatgttactttaggagttgtgggttggtaagctcccaggtacttcccgaggctatggtgtgagagcccccgtcctgccctctggggctccacaggcccctggcaaggccgatggctcaggatgatggggcacagcccgcctttgaacaatcatgcttcagaaatctgcctgaccctagctgctgctgctgctcactttattcttgtatggctttggtaggcatacttggagaacatatcccacattaggaattgatttaagcctgagagtttgagggctttaatcctttaaaacttggnnnnnnnnnnnnnnnnnnnnnnnnnnnnnnnnnnnnnnnnnnnnnnnnnnnnnnnnnnnnnnnnnnnnnnnnnnnnnnnnnnnnnnnnnnnnnnnnnnnnnnnnnnnnnnnnnnnnnnnnnnnnnnnnnnnnnnnnnnnnnnnnnnnnnnnnnnnnnnnnnnnnnnnnnnnnnnnnnnnnnnnnnnnnnnnnnnnnnnnnnnnnnnnnnnnnnnnnnnnnnnnnnnnnnnnnnnnnnnnnnnnnnnnnnnnnnnnnnnnnnnnnnnnnnnnnnnnnnnnnnnnnnnnnnnnnnnnnnnnnnnnnnnntcctgggagaagccagaacaatatacaaacaagtatgtggaggcagatttgctttattccaagaggctgtttgagtgtgtgtctgcctaagcctccttatagcctatttttctacttgctgagagagtaatattaaaggaacagtgagggagtggaaggagagccttagttagagcgttcccatttctggcctttgggggtttgcactgtgcgggagatgctctctcatcactctgaaggcccatcctgtgcagaagtgggactctgtggctgttcactgagcaccagggcagactgtagctgagcagacttgggttatggatgggatatggggcccagggaccctcaggacacagggaccggctcaaggtaccactcagcctggccaggacccccagctttgcttttgttcttgatctctttgtgatagagaagcttagaacattgaatttggaaccccaaaatgtgtgagtctttggaaaacccattccagcctttcttcaaatgctcttattttcagtatatgaagtgtgtatttgaaatattcatatttctgttatttcttgttttcaagctctgaattattgcagttttctgtcctgcatgctttcaacagtgtgcttttacagtggcagtttagcacagcgaatgtccctgccccacactccatatggtcctgttttcctgaaaatacactccaggtagcacagacttgttattttgcctggctggttacacacatgctgtcttgctttgctgctcagccacctccctctgaggccaacttaggccaacctacataggactccatctttagcgagacaccagagacacctagtgatgaccacgggtctgcttttctctctgatcctaggggacttgttgacatgggagtgtctgtttccacatggaaggatgtctgtttatctctcatctctgaatagatgtatgacaactctagtgtccatggtttaaaatgttgctttgaggattttccatcctgtataagaagaatggctttcttcagattataatcgttattaaagctgtatgtacactttacttaaaaactattaacagtttttcatgttgcactggtggtaattttgaacttggaattactgggtgggaattccaggaaccacagagtattgatttttgctgccaaatgctcttgaagcagatgtccctgtgctcccctggctgcttctggctgaaggggggaggtgtagactgaagcttgggcactcatgtgtgtcccctccccagtccccatcctagtgggg

SEQ ID NO: 180526 - DNA, 1497 bp, Homo Sapiens
ctttgtacaaaaaagttggagaacattgaatttggaaccccaaaatgtgtgagtctttggaaaacccattccagcctttcttcaaatgctcttattttcagtatatgaagtgtgtatttgaaatattcatatttctgttatttcttgttttcaagctctgaattattgcagttttctgtcctgcatgctttcaacagtgtgcttttacagtggcagtttagcacagcgaatgtccctgccccacactccatatggtcctgttttcctgaaaatacactccaggtagcacagacttgttattttgcctggctggttacacacatgctgtcttgctttgctgctcagccacctccctctgaggccaacttaggccaacctacataggactccatctttagcgagacaccagagacacctagtgatgaccacgggtctgcttttctctctgatcctaggggacttgttgacatgggagtgtctgtttccacatggaaggatgtctgtttatctctcatctctgaatagatgtatgacaactctagtgtccatggtttaaaatgttgctttgaggattttccatcctgtataagaagaatggctttcttcagattataatcgttattaaagctgtatgtacactttacttaaaaactattaacagtttttcatgttgcactggtggtaattttgaacttggaattactgggtgggaattccaggaaccacagagtattgatttttgctgccaaaatgctcttgaagcagatgtccctgtgctcccctggctgcttctggctgaaggggggaggtgtagactgaagcttgggcactcatgtgtgtcccctccccagtccccatcctagtggggccagtctcattaggcagccatagataagcctggaacttggctgtcattagtgacttgatcctggtatgaaatgcatactgggtataaggttgctcaggtattttatttccttggccacaactcccatagatgccaatgttttgatagcctcagtttctcaacgatgtcttttgtttacagtgctacacttagtgtgagtcaagaagtgcttgagttacaagaaacttcttattcaggtttgagtaagcattttacttccatgtgtacttttaaataatccataccttgaagaagttggccaatgatattatatacatgctgatctgattgttcttttcattccttgagtcaacttcagggtcttggatactaaagagaaggagaactgtggttaatgttttggatcatcatttgtgaacaaggccagactttgcccattttaggctatccaggacttaaggtagccatctggatcataagaaggtcctgcagttgagacaaaatgacccaagtgtattttccacaagttttgatcctgtgtaatatttctttttccttccctagtgtatgtaaatacaaaggatggaatgcaattccactttctcccaaagttgatcttttgtgattgc

SEQ ID NO: 180527 - DNA, 2925 bp, Homo Sapiens
  misc_feature (2068)..(2117): n is a, c, g, or t
  misc_feature (2428)..(2441): n is a, c, g, or t
tggcgcaactttgtacaaaaaagttggctaaaggatatgtagcccatctcttgagctgttaaactgttttgactactttaaatcgtgcagctgtgagcatctctgtaaatttagtgtacacatgtatcccctggagtggcattgcctcggcagtgagcacttatggttttataactctcttcacagactcaaatgactccagaaagctacacttcctgttgtgagtatatgatatccatttccctacatagccactaacatcaggtttttacaattttatttatttcttgctactttaagaaatttttgtggtgaaatacatataatagaagttgactatctgaatcatttttaagtatacattcagtagtgttaagtatgtcgccattgttgtacaaccaatctccagaactttttcatcttgcaaaacaaactctgtacccattaaataacattaaacattccattccctccagcctcagcaaccccattctactttctgtttctgtgagtttgactattccaagcacttcatatcagttaaatcatgaagtatttgtctgtctgtgactggcttatttctctgagcacagtgtcctcgagatgcgtctatgttgtagcatatgtcagaatttccttcctttttaaaagatccaaataatattcttattttatatcttttttttatccattcatccattagtggacacttgggttgcttttggctattgtaaataatggtgctatgtacaaatatctatattattgtatttacaagtataatgctgtaatgtacacacatctttttgagatcctaccttcagttcttttgagtatatagccagaagtggtattactaaatcttacgatatttctatttttaatttattgaggaaccactgtagtttttcatagcaactgcaccattttacgttctcaccaagagtgcacaagggttccgaggttcccacatcctccccaacacttgttattttctgctttttttagattgcagccatcatagtgggtgtgaggtgacatttcattgtggttttgatttgcatttccctaatgaggagtgatgctgagcatcttttcatatgcttactggtcatttgtatgttgtctttggaaaaatgtctattcaagtcctttgactattttaaaaattgggttattagagttatcgttgttgttgacttgtaggagtttctttctatattctggatattaatcccctatcagatatatgatttgcaaatatcttctcttattccataaggttactttttcactttgttgattgtgttctttgatgtatagaagtttttagttttgaaatagtctaatttatctgtttttacttttgtggtctgtgcttttggtgtcatatccaagaaatccttgccaaatccaacgttataaggtacttttaaggtattttagttgtcttagtctatatttctgtactcacctttctttatccactcatcagttgatgggcatgtaggttggttccatatctttgcaattctgaattgtgctgtgatcaggtgtctttttagtataatgatttactctcctttgggtagatacccagtagtgggattgctggatcgaatggtttttataattttctattttaccacagtttctctctgcatttttcctctttgaccactaaccatgtgaaattctcatattgacctttataatgatcatgaactcttagtatcattgggaaggccacatttgccacttatgattgtaaaccttatcctccatttttcctgttattgttggtgcaaaaagcacctattataccaggactttaaaaatcagtctgataagtctttgataagtctaataataataactgataagtccattgaatttgcttctgattactttttctttagtagctaaacatgtatgtactcctatgattacaatgaacactcctctccatttaaattaattatttacattgatgaaatagcaaaatgttaatgactaaatactgtcttggttttttcgttccaggtcagtcaatattaacttcttatannnnnnnnnnnnnnnnnnnnnnnnnnnnnnnnnnnnnnnnnnnnnnnnnnaatttcaatggcttttggggtacaaatggcttttggtcatatagatgaattctacagtagtgaagtctgagattttactgcaccggtcacctgagtagtgtacattgtacccaatatgtggttttttataccttgcccccctcttaccctccccactttgagtctctagtgtccattatgtcactctgtatacctttttgtacccataagttagctctcacttataagtgagaacacacagtatttggttttccattcctgagttgcttcacttaaaataatatcctccagctccatccaaaattgctgcnnnnnnnnnnnnnnccacaaacattattttgttcttttttattgctaagtcatattccatggtgtaaagataccacattttatttatccactcactggttgatgggttggttccacatctttgcaattgtgacttgtactgccatcaagtgtctttctggtataatgacttcttttcctttgggtagatacccaggagtgggattgctagatcaaatggttcttaacattttctctctggatctatttctggaaattttaggctccagtttttgttgttgttgttaataaaatgcaatggaatgtaatgatcatcacttttcattatgctttaaaatctggtaaatggaggctagaacactcctgtaaggcaagaatattctctctgttggaactcaaatacacagaactgggtaaatctcaatcttaatctttgattcaaggacacaacatggctctcttttacttgctttctttaattgttttttaataattgtgg

SEQ ID NO: 180528 - DNA, 1911 bp, Homo Sapiens
  misc_feature (173)..(183): n is a, c, g, or t
ttgggtaaaatatgatttgggggcagcagctttctaaataccaactctgtttgacaaatgttttgaaaattaaaatttcaagtgagcaacaccctgttaagagttttcactatagttgaggcagctactttatgaataagaccactttgggttatttaagcagaagcgtttcnnnnnnnnnnnggaatggggtgggatgaggagtgagttgccagacctttgattagtttgctggtttagaaacagccagtggctgaattagtgagtaaatgaatgaaagtataaaggacttgttttttatgatagattttctgtaagaatcttaaatgttccttttcaaattagatgtgttgatgcacacatgactattctgtttttctcactgactatataacattaaaaaggggttaaagaaaacaaaactctgccttttgtgctatgaaatatttttagtccagaggttttaagctgtgtgtccattcctactctgaaaatgcatagctttgttctggatgtcatctcttgaaagtagaaaactcctatgtgtttatcacattgcagggctttcttatgtatttctggcagacttgcccaaatctttagatgggctgggttatacagcatgccctcccccaaataagggatctgaaataaatactacactattgatagtggagatatattaatttttaaaactgtaaagtaaatgtggtctctaggtttgtggtgtgtacctttgtgttaatgtgtagggaagagacagtgacttgatggttatggggagtgtatcttgatgtgtgtataggggtaagtattgctaaattatttacagcttttattcagggtgagtcatgtgatgaatggcctaatcagaaaagtgaaggagcgaagatgcaagcttgccaaatgatgaaatgaacaagattttgtatctattttttatcaggtgttgtaaaatttgtgcatggctttttgttgttgttgcttagtaactggtagaggagaaaagatgaggaaagaaactcagctttcctcacagtcttttcaaaggtacacagttggggagtaaaatctgactggcctaatcgatggaaaagaccctgtccttttcaccccatcctgcaatcctccgtgcagaggaactacactgttgtattctagtaattcactgtgatttataacaaaccggtgatgtcattctattgtgcacttttgtcaaaccatttatgtgactttaataaacatagtaaacttgctgactgcaccagaggtccattagtgatttatatattgcatgacattttctatttgagtttgacatgtagagtcatttttagtttcatggcaattgacagtcctaataactcagctaatttgaaactaacaatcttgctgtgtaaaaggaaaaaatggtgtttgtgttcagtaaatgtttgaaaaaaactactttgaggtttgtgtctttattaattattcagtgtgccttagttgcgatgttcttttgttgagtgccttaaagttgtcaaagttatatatgtgcatgggaaaaaattcacgtagtaaagaaaaattcaaatatatattttaaaagttcccttttcatctctccccgcctcctatttggactctgcagagacaatcactattaatagttttttgagtagcttcccagaatgtttctgtgcacatatgtattatttctccttttcagtttttaaaatgcaaatgaacttctacctttgcaacgctattctgtatcttatctttttcatgtaatatatcttaggcattttccatttctatatgtataggtttttaaaacaacttcatagcaattaattctgttgatggattgaaaatgtatttaactagattttattgatggacttttagattttcagtttttgccaa

SEQ ID NO: 180529 - DNA, 2432 bp, Homo Sapiens
  misc_feature (109)..(126): n is a, c, g, or t
  misc_feature (339)..(349): n is a, c, g, or t
  misc_feature (398)..(406): n is a, c, g, or t
  misc_feature (1504)..(1512): n is a, c, g, or t
  misc_feature (2291)..(2303): n is a, c, g, or t
ttggaaataattctcaatgccacttgaaaggtaattgtgtctgagagctgcaaatttttcaaccacaaaatgtcacttattcctacaggctatacagaggtctttatgnnnnnnnnnnnnnnnnnnaatggcaacattgtaactgtcaaactaaaagggtattctgtgattatcttttaagcattacagaaattcaagtgaaagttatatgcttatttctattgatgttaaaaatgataatgaaagcaaaattagctgtatctgtaattttctctctagtgccaaatgaatgccttagctactcatagtgcatggtactgtaagtgaagacctgtagcnnnnnnnnnnnctttaatgaaaagcattataatgatgtagcagcatcagatataaacttnnnnnnnnnggtttcaattaacattttatatatggataatgctttgtaaagtgtaagagaaaggttgcagttggatcagtataaaacaatgaccaagccaaaatcagcaccctagggccttaaataaaatagagataccccacaaaatgaaatattttgaaggatgggaggggacagaaggggggactatcccccaaggatgcaagatactttttacagttgctatcattatactttgtcttcttgcttcagttaggaaggttttgatggtaaattctgtcatggtaatagatacctattttcctaacctgagattttacaaggaaggtttttaggttggcttaaatggaggtatttatttgagtgagccctaatttgaaaattaccagacttgatcctcctggtatgaatcaaggaaatactgtaccttgctcttagcaactctcagtggcctgaaagagaaaatgcacttcttcaaggtgagtgaatcatgctttttccacagttcagatcagaccctttatttttcaaactacaaggcctgcttattggacagtctaaggaatagctttgatacttggtattcagttggttccattattaatgtatattatttttatttaaacatcaaaacttaaaatatcagataatgttgcatgttttaaaaacacatttcatccctttggctacccaggaccagcactatttaagacactgcttatttataaaatgagaataatgattatatgtacatattcagacatcaaaatttaatgacattctattttgagaagggaagacaatgctgaagaaagtaaaactgttgattgaaatgctgacagggtggagaacgaatttgaagacagtggaataaactatgaactatgctaatggtaattagattttttgtttgtttagtatagtggtaaattgtgtagtatcttgctgagaatctaattctatcttgtaaaatcaatccaaatgtgtattgtgaaacacctgtataaaatcatttttgaaataagtgatctacatgcctgtttttttaaaatgtttttggtagaattgtttgaaaatatgtttagccagacccttccccaacttaannnnnnnnnaaaaaaggaaaataggtaagaaaatgatagttctatatctcagccctctgtgaactctaggctgtctccattttgcagccactttggtcatttgatgtttactattggtatacttatgctttgaattgtaaatcttcattgatggtattacagattcaaccaaaacttctctgtcctgttcagtaattgttatataaatctggatgagctagggaggcccaggtggatgttttcattcgcaaatcatgagaaacttaagtgggttttatgcacttgatagagttggcaaaattgaactatgaagttaactatttaactcaaggaatgggcggcaaacccatcccctcgtttgataaagaaggggaacatttttacattagaactgacactgaaaacatagctttttcagtccaccctggttgctctagtagcccacagcccaatcacgttaaggttctttgctgtgggaattttaaataaaccaaaccccaaagcagaccatctgtaagctttggtctgcttgtttctgagaagggttttatttcattatactaatagtggactaataattggtaattgtgagaacttaggtatgataacattgtttgaagtaaaatatgatttgggggcagcagctttctaaataccaactctgtttgacaaatgttttgaaaattaaaatttcaagtgagcaacaccctgttaagagttttcactatagttgaggcagctactttatgaataagaccactttgggttatttaagcagaagcgtttcnnnnnnnnnnnnnggaatggggtgggatgagggagtgagttgccagacctttgattagtttgctggtttagaaacagccagtggctgaattagtgagtaaatgaatgaaagtataaaggacttgttttttatgatagatttt

SEQ ID NO: 180530 - DNA, 1236 bp, Homo Sapiens
ttgggtttcattaagtgactggatatgtaaagtcgtttaatgtggtgctaaaaagtaaaggacttttaatcacagacagtagaattatgtgttcataaattctgcttttctttccactacccttcctcccatcccatccttccttagttctgtatttgtttttcttgcctcatggtaattgatttcagacagactttaacaaaaccacattgttttggtgtaactataaggtatttgcatattggttacctatttgtctttcttttttttaaaggaacagatataaaatgttttgtttatgtaacaagggacatttataatttcaagttgataatgttttaaacagctgcttacaaaagtatttctgttaagcctatgtcagcatgttatccatgcagcagttttgaggattttatgaagaaaaagagctaaaaaggaacattaagaggaatgggatatccaggtgttctgcacatgccaaactgctgtagatagtttacactcttccattatttatacggagtgatgcagcacattttagcattcaggaggattttttaaaaaatagctgcagattaatctggaaaatgtgctaatttaataatagttacaaatttataaatttaaatccatttgaaattgttgcattatgctgggtagtatatacaaaatggttatcatcttaaaccaacttttcagagaatcttgatggactctgcctttaggcttgaattcttcaaagtctattttaatgaaatttatctaaattgcagcagtctatttgattcagctcatagacatgtaaaaattatgaatgctgttttcttatgaaacaaattgtcacagtgtagttatacattctatttttgtccccttttccctttttctcctgtatcttttaaaatttggaaactacttttccagaaggcattatttatgcctccctaataaggtattttacttatgacagatgaaaaggaaccaggatatgtttgaattttttcactttcttagtctgtgacaagaagtagaaatatcactagtgtggtataggaacttacatgttttttatgatgaaaataattctcaatgccacttgaaaggtaattgtgtctgagagctgcaaatttttcaaccacaaaatgtcacttattcctacaggctatacagaggtctttatggttttttgttttgttttatggcaacattgtaactgtcaaactaaaaggtattctg

SEQ ID NO: 180531 - DNA, 1171 bp, Homo Sapiens
atgagccactgcacccggccttacctttcatttctttagtaatttagttttaaagtagttctaatccaaataaaatactttcatatcttatttaaaaatcttttcaatataagaaaattctcttaggaaaaattgtacattgtaattatgtttggttgcatggctgtcttatttccctttgatagatttagagacctcccaaagatttcttgattagtgataaacttagttatccactaatggaagggaacagtgatgcatgtagattatagaaaatcaaacactgaatattctgattctcaattaatgttattttcaaatgattttgattatattagtattaatttgtattattcaatttttttccccagtatgagaataatgttatcactattgatctggttcaaaattcttctcaaaaaactcagaatgatgtggacatagctgatgtggcttattattttgaaaaagatgtgagtatcatcttctttattcctgtgttcaggaatgtagtctatcatgcctcaatgaattaaatatatttcatcacctttttatccacttacagatcaaccaaatggttcgctgctgccgttaattttgtcctccctgtcactcacatgcatcttgcttgtttgtatatttatgcctcttatcaaattgttctgcctaaaatatctcccctctttcttataattcttatttattatctacttggtggttacttagtttgtgcatatatgctcccctatgatatttataatttacacaaataaaagtctgttaaaaaagactgtaactgatatgattaaaatattttgttgaaactttaatatattatagtgaggtattttctgctgaaatatgaggtttgcttcaaaataatctgggcgggggtgaaaggatgaaaggaagaaaagatgaagtaagagaggctatgtgttgttggccttgcatctgggtgataggtacatgggcatcattgcactactctttctactttcgtgtatgttgaaagttcctgtaataaacagttttttaaagttccaatagattagattgttatcactaaaaccataaagattcttggcagcggttcttttggcatacaatttgtatgtaattatatgtggccatggttggtttccttaaatatttttaattccttttc

SEQ ID NO: 180532 - DNA, 407 bp, Homo Sapiens
gggaaagtaaatctttggaggggctgggaggtggggtatctgcagacctgtctgctgacacacgtactgggtgaaaaagtacatggcgggggggaccacctccccagccttctgtagggctgcctggctcttgtcgctgggccccagcagctcctggtggtacaccaggtagacggcgcccccagccacacttcccttgatgaggaaccttctagaagccttccagccctggagaaaccaagtgtccctgggcgcctcctgcccgctgtcactcgcagctccgagcacgcattcacttctcatccacgccagcggcaggattcaccggcattcccacctcacagagaagacaactgaggctcggaggcgttttttttgagcaccgcgaacccaacttttttgtacaa

SEQ ID NO: 180533 - DNA, 1303 bp, Homo Sapiens
ttggcttagtgtttctgatccactaaagactacttctctgttttctagtgctactaaaaagttttccttatttttgtctttcttcagtcaattattaaatctgtaatctttacattgtttttattatatagatcttcacttccataattctaaactataatatcttaattctatttttttctagttttcttccacctattactgcccttacaccctacagtcttatttccttgtgctcattataactaagcataatttacaattctctaactgggaaaaaacctggatactttaagtaatacaagcaatgtataccatggaagacaatgtacaattataaacaaatgaatagtgatattgccaagtgataaaatttaatatgaaaagtacaatgaagtagtagtcaaacttaagcgatataacattagaatacttatttatgccttggaattctactgcaacacacagatgagcagcttatctctccatgtattcacctatttaatggtccacccgagtaatttattaaataaagccaaaataaattaacagagtaagataagatgacgtggtagtgacaatcaatgattcaaaaattcattaaggcctactcaaaaaaactctgcaggcatgcaggtctcccaaattttattgatagaaaggaactaaaataaggtgccatttggagcatcggaatgatgtaggtgtttagccagttcaaacaggctaacagaacaagtttgaaagtgtaagagacttagaaaattcattgtggaagtaaaaaacagaacattcttacagtgtacatgagaagggattaagatagtaaccagttgacaaatacatatttctttctcatatttctctgtcaaacaatgtgtggtacagcactgtaatttttatttttatgcttttatttattaacaaggagatgaaaaagtaagctatttaaagtggagatgttctaagtatctttttttaaaataaattttcaatgggaataggactagtttctgcaaaatttatcctgaaattgatatggaaaaaataggcataaaaatgtctggtaaatataatattggaaaaaggcatttagcataataagcagggaaaataattagttaaaataaatgaacgttcaatgagaaatatatttccttaaaagtactggaagcaaagtagtggaaacactgtgtattagccagagcactaagaaaacatttgatacgaaacaatacctcaagaataaatgtgatgggacagcaagccccatactggtctaatgtctataattccatctaaa

SEQ ID NO: 180534 - DNA, 1353 bp, Homo Sapiens
tttgtacaaaaaagttggcttatttatcccttggaattctactgcaacacacagatgagcagcttatctctccatgtattcacctatttaaaggtccacccgagtaatttattaaataaagccaaaataaattaacagagtaagataagatgacgtggtagtgacaatcaatgattcaaaaattcattaaggcctactcaaaaaaactctgcaggcatgcaggtctcccaaattttattgatagaaaggaactaaaataaggtgccatttggagcatcggaatgatgtaggtgtttagccagttcaaacaggctaacagaacaagtttgaaagtgtaagagacttagaaaattcattgtggagtaaaaaacagaacattcttacagtgtacatgagaagggattaagatagtaaccagttgacaaatacatatttctttctcatatttctctgtcaaacaatgtgtggtacagcactgtaatttttatttttatgcttttatttattaacaaggagatgaaaaagtaagctatttaaagtggagatgttctaagtatctttttttaaaataaattttcaatgggaataggactagtttctgcaaaatttatcctgaaattgatatggaaaaaataggcataaaaatgtctggtaaatataatattggaaaaaggcatttagcataataagcagggaaaataattagttaaaataaatgaacgttcaatgagaaatatatttccttaaaagtactggaagcaaagtagtggaaacactgtgtattagccagagcactaagaaaacatttgatacgaaacaatacctcagggaataaatgtgatgggacagcaggccccatactggtctaatgtctataattccatctaaatgtcagtaatggaaaaaatgagaagaaggaagaagattacaaacaacacatgtgtccgtctgtctttctgcatgtaactctatagggattctctattagaattacataatagtggaatctggtctatgacatgtaagacaaattatccacaaccatgacattttccatgctacaactgtaggtacataagtatagtccagaaatcaaattcttagttttgtcacccttgtaaagcagcaggaacactggaaattttcccccttatatttgggatctacttgagaacctcccttcaccccacacaaaacccgactaaagaaatcatttcttttcctttctttttatttacaaagaatttttctctccaaaatctacatttgcctacttttggctctgtcatcaagtagggtgatacaaaatgtatgccaagaaaagtctgattgttttctattttaatttttttc

SEQ ID NO: 180535 - DNA, 1667 bp, Homo Sapiens
  misc_feature (617)..(668): n is a, c, g, or t
  misc_feature (840)..(850): n is a, c, g, or t
ttggggattaaaaaacttgctacactgctacaaaaagcttttattctaacacatataacacattctagtgttaatagtattatatttatgtagtatggttttatattagtctgaaaatttctacaagtgacaggtttgtacttgtaggtttggtgaatttttatgtttatttttttaaaatatgacgatacaagttaattcccggtcttaaaaaaatttgagggttagttttaaacttttgcattgcccctaacaaatcttgtgctggaactcaaatgatattttgattaagtgattgaatactgtgatacaaacactaagttaatatgttttacatcaagaacagtcaacatagagttactggaaattctaaaaagttacattcaattcgttttaaaatttttgtcctgtctgagccacaaaacatttgtgttaggcgagagtttgttgcttcctgttggcatattggcaggctaacagtgccaagcttaaaagaatagatatctttttcttttgatttagatagccactaccacaagatctgtgtatttgtttgaagttttgttaatagcaaatctaaaaatcttgtttggatttgggatgagaaatgtcagtgnnnnnnnnnnnnnnnnnnnnnnnnnnnnnnnnnnnnnnnnnnnnnnnnnnnnctaaatacttttctggtggttgattattcttttaaatctgtggttagggaaacataagctatgaaagagctattgtaactatgatctgagattagaatttgactctccaaatgacctattgtaggtcagtgttgtataaattaaagctgtgtgaccctagaatctgcccttnnnnnnnnnnngaaaagactcgtggattttagaatacattgagaattgttcaggtacactctgtttggtgtgaaacttctttgatttatactccaagaaatgtgttaattgaaataaaatgacgaagctggtttggtgggaatttttgaacacttttgctttaacagttattagcactattgattattttgttaaaattttccctcattgtggcctttgatctggctccataatataccccattcccttattcagcagctctttgaaataaaagtgattttagttcctaggactatttgttatacttttggagctgtctctttccctccctcaggatgtaaaatgtatttcctgtttgtatataccacttcatttaaaaatatttttccttgaggctcaagacagtatgagtaatgataatttttagaggcattaggatcttgattgaaattctggctctgttgtatcctgttgtgatgtcactgtaagaattgtgcatttaatattgatcttcaagcatagttttgcatattttaacatctgaaatcagaaagtgtctttactgggtttttggttttagaaacataaaataataatgtatgttaaaattgatggcatttttgactcgatgatatatttttatattcagatatcctttataagaattaaacattttatcctttgtaattagaacaattattttatggattttgataaaccagtttttaaattttcaatgaattttgaaacatttgtgtacttgtgtggctacattaagtcaagataaagaacatttctgtcacctcagaagaccctttttgttctttt

SEQ ID NO: 180536 - DNA, 1784 bp, Homo Sapiens
  misc_feature (1443)..(1457): n is a, c, g, or t
tttgtacaaaaaagttggctcagaggacttgtagactgacttccctggatttgatgagcgggctgatgcagaaactcttcggaaggctatgaaaggcttgggcacagatgaggagagcatcctgactctgttgacatcccgaagtaatgctcagcgccaggaaatctctgcagcttttaagactctgtttggcagggatcttctggatgacctgaaatcagaactaactggaaaatttgaaaaattaattgtggctctgatgaaaccctctcggctttatgatgcttatgaactgaaacatgccttgaagggagctggaacaaatgaaatagtactgacagaaattattgcttcaaggacacctgaagaactgagagccatcaaacaagtttatgaagaagaatatggctcaagcctggaagatgacgtggtgggggacacttcagggtactaccagcggatgttggtggttctccttcaggctaacagagaccctgatgctggaattgatgaagctcaagttgaacaagatgctcaggctttatttcaggctggagaacttaaatgggggacagatgaagagaagtttatcaccatctttggaacacgaagtgtgtctcatttgataaaggtgtttgacaagtacatgactatatcaggatatcaaattgaggaaaccattgaccgcgagacttctggcaatatagagcaactactccttgctgttgtgaaatctattcgaagtatacctgcctaccttgcacagaccctctattatgctatgtagagagctgggacagatgatcataccctcatcagagtcatggtttccaggagtgagattgatctgtttaacatcaggaaggagtttaggaagaattttgccacctctctttattccatgattaaggtagtagaacctttctttaaattacgtttgggaatccaaagcagactggtatgttgcatgaaagacaaggataagagaacctgattcttgtgttaagtttaaaattttagtgacacgattagagcaatgagttaaaaagcttagcataatgtttcctgaagtagagatgatggctcccaagtgaaagcatgggtattgatgtggctgaggctcttggtgaactcagaagcattatttagtagtggtaacagatgactcaacaaaccaaaccccttgcctatgataataatgtgttctttctgtcttttatcaattccagctgtctttgttagtccttcttttatttcatatcagcttttcctttctttatcgtctgttatcaccttatctctgatgctggtttctaattcaggaaagagccaaccaggtcatattgggagtaaagagcccctaggtattagtatcatttttgttctttttaaaacaaggtgctctgtggcctataattacatttagcttaaagtcttttgacnnnnnnnnnnnnnnnccagtaaaggttaatgtggaccatgtgcaaagcaagatttcaattgagcagaagcttttagtttagcatgtttgtggtttggctggcccaaaggacactagagagtttacccatgcacttttagcttgaaacattaatttatcatgcatgtctgcatgtgagacaagcagatgcaaagcatgttctgcccttctgtctcggagggagagccatgacagccctgcagccccagcactgcccgtgttagctgatatataccaagtgatagaaactattctgtctagaacgcttgatttgactatagttgttaaagttgcctggttcttt

SEQ ID NO: 180537 - DNA, 684 bp, Homo Sapiens
ttgggataatctttccggtcccattggaggcccatgctctctctccttctttaagtctttgctttatacccttgtttcttttcttctctcctctttagcgactccttcccactggtgtttgaacaagattaaacttgtataagaaaccagtttagaaagatttcctggacttcacgttcctgtccagctccactctattgtctattcatctatttggataaactccttgaatggattgtctacagttgatatttgcattcttttttctcatccaattctcaattcacttattttccttcagcctccatgccactgaacctgctcttgtccaagtcctaatgaccaacagacactgcagtttttatcttacttgaccttttgacaatgtatctgtcaattgttgaccactctttccttcttgatagagtctcttcctttggcttccatgattccacacattgatagtacttctaccatcttttgtctactttcgtgacttaaactgccatctgtgatacatgaggacttacctaaaatgtctgagaactgacttacgcttgattaccaatgttttggagtttataaagctcaattctaacagaacatgatgatgtataaaaataatcttaaaaaataaaatatgatggtatagtaataaagtaaaaataaatatggtacgataag

SEQ ID NO: 180538 - DNA, 1074 bp, Homo Sapiens
ttggccatactcccacctacagtttttccctgttaacatcttgcgtttgttacaattgatgaaccaacactggtttcactctgcagaaattcccttttaaaaacatcctgtgtattagtttcctgggctaacagagtactacgacctgtgtgggtaaaacaaccgaaatataatctcccagttctggaggccagaacgtccaaggggaaggcgtcggcagagctatgctctctgaaggccccaggggagagcctcttcctgccttctgcgtggcttcgggtactgccatagcccttggccctcccgggctcggagaccgtcgctgcactgtctgccactgtcttcccgtggcgtgtgtctgtgtgtcctcttcccttgttataaggatgctggtcattggatttagggctcaccctaattcgttgtgacttcagtgtaattcgattatctctgcaacccaccccatttccaaacaaggccacagtcgcaggtacggagccagggcttcagcatgtcttctcttctcggggacacagtgcagccaggacgcccgtcttgctctggtcattttggaatttatcctagggcatgggtctcctccctgtgccacagggcacctgggctccctcctgcaccctccgctctgcccacctggccaccacccacttggcatccctctccccaggctccagcagctcctgcggtctcccattctgcaggtgcggccgggaacttcctgtgccccgctggcgccttgtccttcaacgccttcaagaccgtgatggacatcgataccagcggcaccttcaatgtgtctcgtgtgctctatgagaagttcttccgggaccacggaggggtgatcgtgaacatcactgccaccctggggaaccgggggcaggcgctccaggtgcatgcaggctccgccaaggccgctgtggacgctatgacgcggcacttggctgtggagtggggtccccaaaacatccgcgtcaacagcctcgcccctggccccatcagtggcacagaggggctccggcgactgggtggccctcaggccagcctgaacaccaaggt

SEQ ID NO: 180539 - DNA, 1308 bp, Homo Sapiens
  misc_feature (204)..(218): n is a, c, g, or t
ttggttaaaatttgtcacataccactttacctttacttttatgtatcattcccccgacttccttactgcaggtgtgggcaagaaaacttttcctttaacacttttcaacagcgggcataaaattctgcagctgaggtcttgaagaatgcagatgggtacagtatgtgttggagctcacagtgtgtattgactaacctagttccnnnnnnnnnnnnnnnggtattgtcttgttaaaagtgactcccaggtagcaactctcttttttaagggtgggaacgaaagggacgtaggaagaatagatctagattatttaacagtcttcgatagagtttgaaagctttcttcttcattcaattttgggcaaaatactgcctctgcatttgttcataacaaaaagattagattaataagtagcttttgttggtggaaattaccagctctataagtcacccttggtggttcatggacctctgattagcttgggttttgcagtctcattgccacatgtatatgtggagccaatggccttttggtgctcagctgtttacgtctgactccttgacttctttggtacagtgatggagtcagatctcattaagtgtgattctccatgatataactagcctcaaaaaaatgtgtattccactccagttgtaaatatctttagatcagcttttcattgtatttgatggggagaacacagaaatgatagtctgcaaatcatccaggtgaattgttatactagttattttttggtggttaatgtgataatattgtcttatttaaaaccacaaatgaatttcaggagacgaaaccagacagagggtcaagtttacagatgaccgtgtctgcaagagtcaccttctggactgctgcccccatgacatcctggctgggacgcgcatggatttaggagaatgtaccaaaatccacgacttggccctccgagcagattatgagattgcaagtaaagaaagagacctgttttttgaattagatgtgaaaggggggaccctaccctcagaacatgagggaataatatttacgtggctcacaaagaccagcaatggatcacttggagtcctttattgctgaatgtgatcggagaactgagctcgccaagaagcggctggcagaaacacaggaggaaatcagtgcgggaagtttctgcaaaggcagaaaaagtacatgagttaaatgaagaaataggaaaactccttgctaaagccgaacagctaggggctgaaggtaatgtggatgaatcccaaagattcttatggagtggaaaaagtccgtgcgaagaaaaaa

SEQ ID NO: 180540 - DNA, 1422 bp, Homo Sapiens
  misc_feature (191)..(205): n is a, c, g, or t
ttggcataccactttacctttacttttatgtatcattcccccgacttccttactgcaggtgtgggcaagaaaacttttcctttaacacttttcaacagcgggcataaaattctgcagctgaggtcttgaagaatgcagatgggtacagtatgtgttggagctcacagtgtgtattgactaacctagttccnnnnnnnnnnnnnnnggtattgtcttgttaaaagtgactcccaggtagcaactctcttttttaagggtgggaacgaaagggacgtaggaagaatagatctagattatttaacagtcttcgatagagtttgaaagctttcttcttcattcaattttgggcaaaatactgcctctgcatttgttcataacaaaaagattagattaataagtagcttttgttggtggaaattaccagctctataagtcacccttggtggttcatggacctctgattagcttgggttttgcagtctcattgccacatgtatatgtggagccaatggccttttggtgctcagctgtttacgtctgactccttgacttctttggtacagtgatggagtcagatctcattaagtgtgattctccatgatataactagcctcaaaaaaatgtgtattccactccagttgtaaatatctttagatcagcttttcattgtatttgatggggagaacacagaaatgatagtctgcaaatcatccaggtgaattgttatactagttattttttggtggttaatgtgataatattgtcttatttaaaaccacaaatgaatttcaggagacgaaaccagacagagggtcaagtttacagatgaccgtgtctgcaagagtcaccttctggactgctgcccccatgacatcctggctgggacgcgcatggatttaggagaatgtaccaaaatccacgacttggccctccgagcagattatgagattgcaagtaaagaaagagacctgttttttgaattagatgcaatggatcacttggagtcctttattgctgaatgtgatcggagaactgagctcgccaagaagcggctggcagaaacacaggaggaaatcagtgcggaagtttctgcaaaggcagaaaaagtacatgagttaaatgaagaaataggaaaactccttgctaaagccgaacagctaggggctgaaggtaatgtggatgaatcccagaagattcttatggaagtggaaaaagttcgtgcgaagaaaaaagaagctgaggaagaatacagaaattccatgcctgcatccagttttcagcagcaaaagctgcgtgtctgcgaggtctgttcagcctaccttggtctccatgacaatgaccgtcgcctggcagaccacttcgtggcaagttacacttggggttcattcagatccgagagaagcttgatcagtttgaggaaaa

SEQ ID NO: 180541 - DNA, 1081 bp, Homo Sapiens
  misc_feature (99)..(151): n is a, c, g, or t
  misc_feature (816)..(824): n is a, c, g, or t
ttgggtgaagggtgtgtgttgtgtgcaaaacttaaggtattggttgagagttaaatacattatttttataatatgttgggtatagtctagttactaatnnnnnnnnnnnnnnnnnnnnnnnnnnnnnnnnnnnnnnnnnnnnnnnnnnnnnaaaagccaatatacgttgcagaattaggaacagtatttatatttatttacacaagacattgtgccatagcatcctagtaaaacaccttcatgaatgagtaatgttatctcccagaattacattaaaattatttctaaaaagtagcaaagtcattaccttttgcttttaatgacccacacctcaccagctcctggtcttttcttcactgttgcccttattttgaggcaatttttcttaaaatatgacttttatgcaccacatttagtagaggcagtgacatcagtgatctcagtacccatcagctgtccccctcctctgcccttcttcatctcttctaccttgtgaccatttcccttaccggttcatgttctcctttatctctgcttttctttcttagccaggatacttccctcacaactctcactcccaaattcttttagatatacatttttctggatattggctgctgaaatctgaagctctggtaaagttcctagtatcagagatcaatcctggaggaggcctagttcactattagattacaaagactcctcacaaagtaaaggaaaatcaccttcaaaccacaaccctttatgttgtcaagtctaatatgagtgtttttacgaagtatttctttctacccattgttcaagaatgtaaatgtnnnnnnnnntacaagagagttgggtagatatgcatgcttgaggaaacttgcttttactgttttcctacttgtatccccagttcagttgaatttacaaggacctacaagatggtcatgtttgtcttggtatgtgctaccccaattttagtgtttctttctttattttaaatcagtaattattcagttgattgtttatactatataatgaagtaacaaaaacattttggtttgtatgttttaagtaacagttgtgcaaattcctcttg

SEQ ID NO: 180542 - DNA, 2665 bp, Homo Sapiens
  misc_feature (251)..(259): n is a, c, g, or t
ttggctcactcccaaattcttttagatatacatttttctggatattggctgctgaaatctgaagctctggtaaagttcctagtatcagagatcaatcctggaggaggcctagttcactattagattacaaagactcctcacaaagtaaaggaaaatcaccttcaaaaccacaaccctttatgttgtcaagtctaatatgagtgtttttacgaagtatttctttctacccattgttcaagaatgtaaatgtnnnnnnnnntacaagagagttgggtagatatgcatgcttgaggaaacttgcttttactgttttcctacttgtatccccagttcagttgaatttacaaggacctacaagatggtcatgtttgtcttggtatgtgctaccccaattttagtgtttctttctttattttaaatcagtaattattcagttgattgtttatactatataatgaagtaacaaaaacattttggtttgtatgttttaagtaacagttgtgcaaattcctcttgtttgttaggtgctccctttgaatattttgtgaactgtgtcagagggagaggggtggtggctaggaagagggtcagaaagaagctagagggaggtcaggagaagggtaacagggaggatgcaaagcagacatctaccctggtcaccccaggatcaggatatctgtccttgtttcatgttgaattcaaaaattggatctcacttaggctttgaaggtgacagccatctctgatagctgagcataagtaaagaaaggtggagtgccgatgcagaaaggaaaatattcagctttcctctcttagatcgcactttgaagatggccttttggagacaatctgacaggttaaaacaggaactgttggaattattctagctgtaactacctattggctatgtgttgattgatcctagaaagaaaaaataatttttcattttagatcttgattgaatttaagatgtatttatatgcctacaaaaggtctgtcttgtaactgttgtataaaataaacctaatctatggtttcatttttaatctaaaaaaagttgtgccttaacaatagggcattgtatgttaataagggaaaacaacctttttagtagatgggggaaaataggaactttttgccattaaaacttaagttcttttgatgtttttaatattatagttgggggagattcattaaaattaaattgaaataaaattatttttgcataacctagcatttacaactaaagtatgttttttataagaactggcatcttgatgtatataggtctgaaataatatttcatcttttgatttttaattttaataatattagaccaggatagatcacagttttacaaatcttagttttaaataaattatttcagtgtgctgttagtcctctacagtcattttggtttaaaaagtgactatttatttatggtagcatatcaataatttattaatgttaaaaaatactgtgtatgacattacaaaccagaacagttcctgggggagaggattctaattgattggcagttctgagagggcaagaagaatggaactttatacttcaaaaggaggttttggttttaccaggtactgcttatgtaaatcgtttatttttatttcatcaaagcctggcaagtatatgcattccaatttaccattggcaaagctttatttatttttaaggttggatgttgaattaattttgtgggaaaatgagatttgtaagtagttttctttctagataagataacataaaccaaactttcagaagttaaggatgatgaataatattgaaatgacttgttatatattgtaagggttcccttaagtatcataattaacaatttgtggaaattgaaaaagcataaactgtgttatttgattagtaatatgttcccttaaaattcattttgaggtgtatgttatacacacagtaaatttttgttcaggaatgacttgctcattctgtgtttttaaaaataggaaataaggcatagtgagtcatcattacatcaattaaccaaaaaatatttcatcccctccgtcactgaaattatctacttcagccacctttcttattctcgtgttaggagggcacgtttatggactttttaatttccatgtgccatattgtccactaccggcagtagccaaagctagctgtttcagtcccacagaagagacagtgctctgccatgatgacagggcactgctagggctggtttttcttgtttttcccttttggcagtgtggacttcaggaactagatgtatatgcacaagggattgagtttacactaaaactaggaaatggagttttcaatctatgttcttgcctcttcatacttttatttattttttgtcatcctgccttatactgggctaacaatgagataaaataaaaatacctttgaatactcttttccctttcatgcatttaaagccatggaggaactagaccattagctgttgccgtcacatgcttagacaccagtttacttagcgtgttatgaccttcctcaccccatactaccaaatttaaatgggtcccgacttcaccctctggaaggaagtaaactcttctctccccatggttttcagagcagtttttacctgcaagcaccatctctgtatgtgctcttactaaattataca

SEQ ID NO: 180543 - DNA, 1556 bp, Homo Sapiens
  misc_feature (422)..(682): n is a, c, g, or t
tatagtggtcttggagaattcagtgacaggccaaaccattaagtctgtcatcacaacagtccttagggaactgcaatattataagtatagtaatgacgcagtagagaaccataatgatggcctccccggcaaagaagaaccaacccgtttacgcctgaggttgcaattttttgaatttttgcagtcagaccctggcgatgaccttgagcagtaggagataaattccacatgcttagcgttccagtaatggaacactaggcataaatgggttattaaagtatccagaattaacatgcttagctgtgacattggaaaggcaatgtgtttgctgtggcacacatactagtaaataatgactggtccgaatttggttttcgtttgtctattaaagtcaatttactaaggcagggagggcccagagnnnnnnnnnnnnnnnnnnnnnnnnnnnnnnnnnnnnnnnnnnnnnnnnnnnnnnnnnnnnnnnnnnnnnnnnnnnnnnnnnnnnnnnnnnnnnnnnnnnnnnnnnnnnnnnnnnnnnnnnnnnnnnnnnnnnnnnnnnnnnnnnnnnnnnnnnnnnnnnnnnnnnnnnnnnnnnnnnnnnnnnnnnnnnnnnnnnnnnnnnnnnnnnnnnnnnnnnnnnnnnnnnnnnnnnnnnnnnnnnnnnnnnnnnnnnnnnnnnnnnagactagaataataggttttataaagatgtctattgttatactaaaagtgtgacgtaaactttagttatttaggagactcttagtggaatacatgattttcttgacagtgaggggtagatgaggcatcacatacttgaacagttagaaccactatctttttaaaggttctgtgccagagctacagctttaaaatggagggatcaggaaagcatgcgtttgtctccagtctttcccattggccctacatcaaaatgaggacatagttactaagtactttgtgtgctactgctctatttcttgttttggaggggatcaaaaatataagacagggataaaggaaggttttttttacagtgagaccagttgaacatttgaaattattttaaaagaataatttatttcccaggttggtggctcattactatatttttttaattgttcattttctgaataggcttctggaatttaatttctgtacttaattatatttatctttgacatgatctttataccttggtttgcaggaaagcagatggtggagctgaatatgccacttaccagactaaatcaaccactccagcagagcagagaggctgaatagattccacaacctggtttgccagttcatcttttgactctattaaaatcttcaatagttgttattctgtagtttcactctcatgagtgcaactgtggcttagctaatattgcaatgtggcttgaatgtatgtagcatcctttgatgcttctttgaaacttgtatgaatttgggtatgaacagattgcctgcttttccttaaataacacttagatttattggaccagtcagcacagcatgcctggttgtattaaagcacgatatgctgtatttta

SEQ ID NO: 180544 - DNA, 1652 bp, Homo Sapiens
  misc_feature (146)..(191): n is a, c, g, or t
  misc_feature (200)..(226): n is a, c, g, or t
gagcaatgctttccttttaatggccaactttgtacaaaaaagttggctcctcaaggtgggaggggggattgagagtgctctaaggagacttttcctccaggtgggaagagataaaaagacattaattagttgtttatcaagtgacnnnnnnnnnnnnnnnnnnnnnnnnnnnnnnnnnnnnnnnnnnnnnncctctgatnnnnnnnnnnnnnnnnnnnnnnnnnnnggttaactataaggagatggcctttcctccttttttttcttaaggtgctgttttgggggaaaaaaatgtaatgaaatgaccaaaagaattacacagcattaattaaaaatggaagttttccacttccttgataatttggctatctgaataaatttgtgaatttgctaggttaagacctagttcgtggtggcatttcaacaaaacagcttgagtataaagaaaataataaaaggctgttcttatttattttcctttggtggcttttggtttgctctttttgcataggtcatgactttgttctcctgggtccagatttataaaagcagaaaattactaattaagtcaaaataagtgtctttggtgtttatgcatttgcaatttcagtaattaaatggtacatgtgttgctgtcttgtctaaaacttttaaaggcagaattatgctgttgggatattagtatgcgtataacttgatttcaaagtataaatctggaaaagtctagaatcttttctgtgaatgctatctcagtactactttaagtcaagtgtgatgctaatgatatcttaaaatttccaacaccttttgtgcagtgatcacaaagtctccacttaatttgagactgttactcagaacacgccttgcgtcacgggggctaatctaagtgtcctagtctatatgactacattacatcatgatgtattgattgcctctggcctaggaatctgcagcttaagccagtgacacaatattttgcatttttaaatggtgattctcaccaaataatgcctccccacaaaagaggaaacctaataatgccccaaatcctctttttactccatcttaatgacataaaaattaagtgaattagagaactacaatgatcttaaaataatttttcagccacatttcataaatgtggaaactgaggcacggatctgtttttgcctatgaaagataggtcctgtaactgttacacagtttaacacttctgaaattagaatattagagatcctgctaaatattacgtattgtttccttggcctctcttaatagtgccatttatatttttaatttaccagagttaggctcattaagatagtgtttgctttgaaatcaatgtttctgtggaaactaattttaacttttacagatattgattacgggcttgtgaaaaggcaagtaaaggaggaatgctgtgctatctgggcattaaaacaaaacaatacaattaaaagttaaaaagaaagaaaaaggtaataacagatttgtgtggaaggagggcaaaaaaacttcacacgtggattatctgttggagaatgtgcattgcaaaaaagatgcaaaatagcaatcctccctctagcttgatggaaatgtgtttttccatgaaacatatatgtatttttacaaatgaaagatgatttaaaatg

SEQ ID NO: 180545 - DNA, 906 bp, Homo Sapiens
  misc_feature (267)..(580): n is a, c, g, or t
ttgggcctcacagcactgagggacagaatccagaattcagtaggcttctttggaaataatgtggaatacatagaaatgcataggcaaacatgtcattgtgggttcatagtaccaaccaaactttcttcctcagatggcctgtgcccactttgaggataatcataaagtagccagttgactggaccacatttaatcagagtaaagtttaattcacttgtcctgagataataacttatcaagagattctgagaaaaaaagagacacaannnnnnnnnnnnnnnnnnnnnnnnnnnnnnnnnnnnnnnnnnnnnnnnnnnnnnnnnnnnnnnnnnnnnnnnnnnnnnnnnnnnnnnnnnnnnnnnnnnnnnnnnnnnnnnnnnnnnnnnnnnnnnnnnnnnnnnnnnnnnnnnnnnnnnnnnnnnnnnnnnnnnnnnnnnnnnnnnnnnnnnnnnnnnnnnnnnnnnnnnnnnnnnnnnnnnnnnnnnnnnnnnnnnnnnnnnnnnnnnnnnnnnnnnnnnnnnnnnnnnnnnnnnnnnnnnnnnnnnnnnnnnnnnnnnnnnnnnnnnnnnnnnnnnnnnnngacacaaatatctttttttccatagatttgaaatgctacataacaaattttgtattcctgtatgtacgggtctatttttggagtgtctcttctgttttattggtctgtttggctatttatgctctagaaccatgacatttagaaaattaagacctgataatatgttacaatagctcctattataacatgatttctttacctacttaggccgtatacatttcataggattctctttttctttccttctagttctttttatttctacctgcagattctgcccaatgaactgtatttaaaattgtttttcacttttaatatactttttt

SEQ ID NO: 180546 - DNA, 503 bp, Homo Sapiens
actttgtacaaaaaagttgggatagtcctctaagagtgacctaagcataagtgaaagacacctcccctcacccttctagccccctacaaggtgccaggttggggtaaagagttggagatgatggccaggagtggcctccaacacgctggtgagaggcctgattaggttttggggaagatctgagagctctggcctcttcgtgagtggaacataaagccgcctcttgttgggagatcctaccccagtgacagaggaatcccccaaactaggctgtgccctggctccgtggcggctccagacccgggtagtgcctttgtcccctgaatactcactcccccggtccagagggccttcccactgcccagcctggagaaggcctcccctgacctgctctctcagtatcctggagagctggccagaggccatcacaggcatcatcctcagagctcctcagacctgggactttgtttttgctggttcagtgcattttgtgtatttaagag

SEQ ID NO: 180547 - DNA, 1209 bp, Homo Sapiens
atgcatgtgcaagaggaaaacttgataaactcaagtttatcaagaaattgttgatttcttgttccactgttgatttgaaccaggcttctggttcaaagggccaggccatagctacagctgctctggtgggccaaaccaaaagcatcactgagtttgggcacttgaagtttcagacagctgggagtctccatagaaccggaagggaaaacacttccaaggatatgagcatgtcttgtccctgcctttgggccacccatgcacaccagctccacagcagctgaagcagagcatatccagaggaggctgtcggagggaccactgtccatcctgctgaattcatactgaccctctggattctccagattttctccaaagttcttccattctagcctggccaaacatttgggctcagcaaactgagacaagctccccacccatggcgacacttcctatgtccatagtgtgaatgtagtaatgggatatatgtcttggaacccccaagcatatgtcacgtgcaaaacaccgtgggaagcagtgggggtgtggtaaagagatgggctggaaaggctctttgtcctcaataagctggccatctgatggggagatagaggagtgaagcgagtccgaactaataggcatgtgtatttggaggcaacaaggaagagagaaccattctgactgggagctccctggaggaggtagcggacatttgactggggtttggcatattcaaaaaatgtggatgagcaaagaggacagagcagcagatattccaagcgagaaaacataacgagcatagcatcctcccatgtcctaccatttataagagaatgttaatgtgagaactgctcagtctcctgacagacccgggggctgcaggcacattttccctaggggtaggtctgttagcttttcaagatcatgaagtatttttaggtccaagttgtcaccagcattcaaagccaccgtgcatcctccagctgttcccagcgcataccgggctcttgcttgtcatagcttggatgtcccctggatcatcagatacagactgactcctgcacttgttttcccccgtaagcagatcacgtgtcagtgtgtaaaatgtatatcacgctggtcttcatgtaagtgttgcaagtttcgttcattttatacacatccattagcaccacacatgaatgccatcctcttcaagaagtaagcagatag

SEQ ID NO: 180548 - DNA, 709 bp, Homo Sapiens
ctttgtacaaaaaagttggtaagcagataaattctaaatcagtgttgagtggtgacaagtgcttgttcttttgctgtttgaatggataacactatcaaagctagacaggagtcagaatgtgtaccctgtattgtggtgactgggggaaggacagagacttaattcctaatttcaaaaaatttcagtgcagcaaaagcagtaacccccagttggtcctacctgaggggaaagcctgccctgtgaacggagaggaaaggggttctggaagaagtgggcagcactgggcaggttgatgtttcacttaagttcaacactgagccctaccaaggggtggatgtcacgctgggctcgcctccagccaggcctgcattccctaatctattgccgaaaccatgtatggctcacctcacaaagtggtttattgaggtataaaaggaacattcactcttcttcctcctcttatcctgttgctcctcctcccctcctttcctcacccagagagaaattctgacacatcctaactctaccaagctttttatggtctacccttcctggatacaggacaggtgactatggggtaagagtaaactgctcgcccagtgaccgattgctgtcctgcttgatgtctctttgtgttcgctattaactgcctctcaccaagtctgctaacctgtcttccttctgcctcttttctgctaacctgcttgct

SEQ ID NO: 180549 - DNA, 852 bp, Homo Sapiens
ttggggggacagaggtgctgcagagggggccttgggggcagcggtgctgggaacggggtcgcgggggcaggaggggactaagtgcccggggtgggtagggtgtgggtggactcaggggagttgtgggcggggggcactcggaggcagggagcttgggggactgggctttgtgagtctgcacggggtgcattggagtccatgcagttcctccaggagcatggggtgcagacagggaatgggggcgcggcagggcccccagccactggcatagcctccctgaccctctcctggctgtccccagccccgcagcgcctccaccccagagacccggaccaagttcacacaggacaatctgtgccacgcccagcgcgagcgcctggactcggccaacctgtgggtgcttgtggactgcatccttcgcgacacctccgaggacctgggactccagtgtgacgccgtgaacctggccttcgggcgccgctgtgaggaactggaggacgcgcggcacaagctgcagcaccacctgcacaaggtggggcaccctgaaccccgaagacggctccggcgcctgcccaccactctgccccctctcatcacctggcctgggccctcaacacctttctcctctgtcccacttatcccgagggaccccagaagcaagtgtcacctctccgtaaacctatgtaaaaccaggtgacactgggtatgatcgcagtgtgttgcaacccccatgactgagaagaggagctgtggggaggatggaggcaggagctggtctggggagcattgactgcctgggaggttcccaggagtcctggcctggcaggcagggctctgactctaagggcctca

SEQ ID NO: 180550 - DNA, 1343 bp, Homo Sapiens
  misc_feature (268)..(276): n is a, c, g, or t
  misc_feature (1220)..(1229): n is a, c, g, or t
ttgggtcatggggttagcactgatatttctttgtacttgggcatatgttaaatactctggggagttcagagaaattggaacagtgattgatcagattgctgaaacactatgggaacaggtattgaagcccctgggtgataatttgatggaggaaaacataaggcagtctgtaacaaactctatcaaagcaggcctgactgaccaggtgtctcatcatgccagattaaagacagactgacagttcatctcctcacggactccactctcnnnnnnnnncatgcttgctgtacaatgagaactcaaataaaaataaaccaaagtttacaatcaactgtagaagtagtttagtgtaactggcttcacagatggctgccacagagtgtgaagattgtttgttagttttaagcattcttttaatggctcctaagacatgcagatggactgaggagcattggttaatcatgcacctttgtgccatgtttaactcttttatttctttttacttaatctaatgttagtgaatttgtcttatgtaaaaggatatttcagggaaatattttcagaaatctatttagagtctctttaacacagtgtcccattgaaattttaatttttagagaatttatgaatcactgtttcaagaaccagattggaaagacaatgaagcctttattgagccactacattaaaagtatatattgctttactgccttcaataccagtattacataaatgcatgtatcagaaacttcacagaaattacatggcaactcttgtagctaagaaagtaattctgaggtgtacatttgtcttgcctttttaaatttataaacttgccctaaaaggagatgcatatctgggaaactgaactgtctttttgcagtttagccttcatgtatataaaatatgccattaattttattggggaagaaattccatccaaaaatgttgcctacagctatgagttaagagtgtctgtacagtgtgtagcttttattttctaaaatcacagatagggcatgtatatgacttataaatatataaatacgattttgtattaaaagttttgtagtttatggcaaaatctggtcctgtggtaggctaaataagtactgtccctgtgaaaggaatgtttgtggctcatgtcagtgtgtgaatgcatagacaatttgaagtttttgatatatttgtgatatttatcttgagcactgcaatctcannnnnnnnnngcccaccaagggaattcaatgggaatgtttattgtgactttgtcctctgttgcattttaaagttatttcctgtaatttattttcagtacataattaaaaatttgttgtatatat

SEQ ID NO: 180551 - DNA, 1237 bp, Homo Sapiens
ttgggcaaaaatatcttctatgctgctcgtaccccagccacactgtttgcggtcatgtttgctatgtatataatctcaggactgactggcttcattggcctaaactctatagctgtcttgtgtaaccttgtcatggggttagcactgatatttctttgtacttgggcatatgttaaatactctggggagttcagagaaattggaacagtgattgatcagattgctgaaacactatgggaacaggttggtatctatcttttggttttttagtgactaatcttattttcctgtgactttccatcctttgcagtatttgtactccgactttgccttcatgtgaggaatgtcaaaaggatgtcttctgttttgttcagatgtagaatctttatgaattgaagattttttctttaaagttataattttaatgtactttggttagcctaaatctgtactatcctctggatagattcttagttgtaggcctgattgtatcagacggtgggcagggtcagagtctgtaatgatttttttctttgaggaaagaaaatataaacaatgaatgattttcaaggtaaggaaaagaagtttggaagtggtgctttcggaaagcaaaagaagtttcttcctaatattggcaagcagcaatgcaggagaaatgctggatggtagacaggtcttcattgccttccatgaagatggtagtgatttcctgatgtactatgaggaacaatcccgtagggatttcttaccaaggaaactttgacctttgtgttttggaaatattaattagtaaagcaaagcgccatgaacagagaaccatgctccgtcgtaatcttttacctcgaaccagaattcaaagccccaggctgtgaactcttgcctgcaagtatctgctaaggaaagccattttgtgtatctgcctccggtgtgctggaattacctgtggaccgcttatggatgtcattaagatgatcttcgtgaaatacttgaacatcatgtcaaggaccagaatgaaagctacggttattaatgacgaacgctataataggcatttgagatgccatttttgggctcatgaaatattgagcttattttgaagatctaggatatgcaggtccatgtttgttttggctataaacttgaagaccgaagaagcagaccattttttttgaagaaagttgattggatattgactttttcttgtaatgatgttattttataaagtgacccactatat

SEQ ID NO: 180552 - DNA, 381 bp, Homo Sapiens
agatgaccatactccccaaactgatctacaggttaaatgtaattcccattaattccagctggtttctttgctgattctaaaattcatatggaaatttcaggaacacagaatattaggaagaatcttgaaagagtttgaatgacccacccttcctgattttaagtatacagaactacagtaatgaatgtgttgtactggtataaaggtagacatataggtcaatatagatcaatggcatagaattgagaattcagaaaaaaagccttcacgtttatggtcagttgattttaaaccagagtgccaagacaattcaatgggaaaaggaaacagtctttgaaccaactgtcttctggatctattggatatctatgtaaaaaagag

SEQ ID NO: 180553 - DNA, 1877 bp, Homo Sapiens
  misc_feature (364)..(382): n is a, c, g, or t
ttggcacagtatataatgcctccttaaggcatgatggagtcaccgtggtccatttgggtgacaaccagtgacttgggaagcacatagatacatcttacaagttgaatagagttgataactattttcagttttgagaataccagttcaggtgcagctcttaaacacattgccttatgactattagaatatgcctctcttttcataaataaaaatacatggtctatatccattttcttttatttctctctcttaagcttaaaaaggcaatgagagaggttaggagtgggttcatacacggagaatgagaaaacatgcattaaccaatattcagattttgatcaggggaaattctacacttgttgcnnnnnnnnnnnnnnnnnnngcaaagggcctctaaagaatcagcctctttggtccctttgtgctgtcacctttttgccatgtttaacagcatcttggttggcactctagtcttaatcttgctccttaactttgaatatgcagtctaaaatgtcagtagtcaacatgtaattttcctttgaaattctgaatattccagtgctggaacttatccaaaaagaagacctcagaaacttagattggtagatctctagtgcatattatcatgtgggcaccttctcttagggtggaatgaggcagtctggatgcagcatagttaaaaggagctgtttaatattctctgtagtctggcctcttaactagaaagtaaagctaaatcagaagcctgtatttaaccatgtgaacagggagggatttagtgttctgatggctgattaatagaacagctagatacttagagcatgacgtgggatgggatgagtttacagctgctgccttttcatggtgagcttagcagttttctcattagatgtgtttttttgggttggggaatagcaatttattttattgattttagactttatcaagctaattagctcccctttagataagtacatgttggcacatgtgcacctacttgtaatctcagatatttatgcacacaagtgtgaaggtttttcagggagcagagcatctgggacaggctgattctgagctaaacagggctcctttaaggcaatatgaactgttgccttctataaattgcacattgaggaactctaatagacaaagattaggtgtcaggcagaaaacactcattgtaaatatactattagttgataaacataggactttcttattccccagtttttctttatcatataatttaaatatttattcattttgtatttaaagactacctacacatagatatatgattccaaagtcatactttctccatccccacattagccaagtgaatacagggccaaatgggttcttggaatgataataacaaagcattacaaagtgggtccccttggttccagccttgtccagagtttttggttatatatttctatttattacaatttaccttttaaattgtaaaataaacctttgtgtggacagagccaatgtttcaatcttgaatgagtaaagaaaatactttggaactgatcctcattttgaaattggttctaaattattatccatttccaatgtctgaaattctcttacttcctgctaaaactctctttctgccaaagttgtttcgtaatctgtctcaatgactataatgtaaaattaaagaagtaaccatgcttctcaagggggaattaaaagtgtttattgaattttactcacgctaattgtttggtcagaaattcctaagccacagctttggggggttcgtgtagatgtacatggtgggtgggttataaatattgggacttaaagcagcttgttctatgtatttatctttgctcttgggtgacttagggaatgattttatttga

SEQ ID NO: 180554 - DNA, 1327 bp, Homo Sapiens
  misc_feature (107)..(121): n is a, c, g, or t
  misc_feature (978)..(987): n is a, c, g, or t
  misc_feature (1134)..(1143): n is a, c, g, or t
aagatgtatccactaacactcacgaaagtaattaaaagccactttaaccgtgctagtcaaatagctattttatcaaagatgtgtgcatacagatgtatatatatatnnnnnnnnnnnnnnngtactgtacagaaacaaacatatgcatactactatgaacggccaaggcaagggggatgatggcaacttgactagattctgagaactgctatttgtccacagatagcatgtcaatgttgggatgggttggggagtgagcgtaggctaagaaaaaaagagatgaagtgactatgtgcttttctttaaacttagtagttacagacatagtacaggactctactaataattagtagagatcatgaaagtctgattgatattgaccatgagaccaacagagtgacaactattacttaatgcaacattttggaaagtcaacaactgatggaaacaaactcctcacagggtagaacgaactaaaattaagacaactgaatggttagtttctcctgtggacacatgaccaaaaccactgaaaccaccgtatgtttatttctccctattacctgttcttctcttaggttggtataatgtgggacactgagggaaattaaccttttctacaactgaagaaagtagagggatacgttttcaactggatcaaacggtttgtaattcagcatcatacacaaagttactgatcagaattctgagaccactaacaatgacacataaaaaaacaggaagaaaactattcattttacctaagacagctgaattagtaaaaatgtttcctaaagcaatgtaaaaatcagaaaaaactccccacaattttagtaatttctaccccaacagaaatttagacacaaattatggtagtattagaaattagcctaaattaatacgacatttgctcactataatgccagattcattaaaaaacattaactgtttcctggttaactgacaatctgttttggnnnnnnnnnnattgcaaattgttttatgactataactcagccatttgtgtgtggaatacacatgcgtaggggaagactatgaaactcacttgttactcaaacacacttgtttataaatacatatatacacacacacatatacatatcaacaccaacnnnnnnnnnncccaaaattcaagtcaacaatttagtggcagagagatgctataaaaacattatttttagatgccacacaagtcatgagaaccattaattttatcatacaactgaagtacagccatcttgaattctacctggattaaagttgatcattttgttaccaatgcaaggtttaaaactacaagtgccaa

SEQ ID NO: 180555 - DNA, 882 bp, Homo Sapiens
  misc_feature (660)..(695): n is a, c, g, or t
gagagggagaacattctaaacaactgatggaggttcttgtggccaggcaagtttcagtagagctgaggtagatggagttgcttgggaataaggaccatagagactaaaagaaaggtctaaggagcatattttgcagaggcccaagtccataataaactggaataacccttctttgccccaggttatttccatttccagatccggcactctagatactccttttattttctgggcctctaggatttatctcctgctttctttttcaatgctgtcacctattatttctgactaaggtttttctctttataaatccactctgagatggaattcttttttccctaaatcccttttgaaatatttctaacagatgacactaaatatgggaaagcatattgggaccaaaaatataccattctttgttcttctttcttcctttaaaaagttagttgccatgtttaaaaagaaaagtggacatgtgctcttctcctttctggtcctatcccttcctccccatcatatcctactgtagactggctctggggcagataaaaatcaaggaaagcaaggggaagtgaatttttgtagtattgggtgggctttcaagtataagggccttatatatgaaagttaagttagggtctactatgtatatgtgttcannnnnnnnnnnnnnnnnnnnnnnnnnnnnnnnnnnnggtttatgtctgggaaagaaataaagaagacgaagcatttgtttgggttgcgaattcgtgttcctcctgtgccaccaaatgtggctttcaaagcagagaaagaacctgaaggaacatctcatgaatttaaaattaaaggcagaaaggcatccaaacctatatctgattcaagggaagtaagcaatgg

SEQ ID NO: 180556 - DNA, 1305 bp, Homo Sapiens
catttgggtcagccacagtatttctagagacgtgtctgctgcagggccctcgcaaggctctttcctccttctgtggagatgccgttggacgcaagactcagggtggtcaagctggggtggttccgcagagcctctgcgaaggcttttgctccttcatccccaacttgattgccccacatcgtgagggaggagacaagatagtgaatgttagctccccaagaaacagccatgctcacccctccttttttgccaatggccacagctcagttcctactcaacaggcagatgtttgtgcccagtccctggatctgtggcctggacactaattcctcacactggtctctgagtgggctgctctggatttcaaattcaaggggtgatgcaagatcgaagagcaggggaagccttgtgaacagaggccatcggcaagtggcacagttagagaccgagcctcaccacgagcttcggagagctgtcagcccaggagcctgagctcatgagagaaagcacctgcatgtctcctgtggagcacagaggtgcgcagagtcctggagggaaggccgtgtgcaggtgctgggttcccagcatccgttcaactctgggcagggtcagagacattcctgaagacacagtcttccaggagacaaagagcaggaagtaccttcagaaaccccatcagcaacgttcctgtcacataaagaggacgttacccaaccaagctctgtggctacggccatcttggtggacaggtgcggcgataaagctgtattctgtcccctacagcagatccggagagtctctggctaaaacagtctgcgtggtaagatggtggactcctgacccggctctgccatctgctacctgtgtgaacttcgggaaattatgtagtctcttggacctcagttgccccatctataaaatggggataattagagcattccgtcatggagttgtgaggattcactgagttaacagaagcaaagcacttagaaccgtgtgtggctcacacaaagcgttggctgttcctaataggatcagcacacactgtctacacacaacagaacaagttcgtgtggcccactcacaacacaatggcagctgcctcaacaacacgttcacaccaagcaaactacctgcttacaccattccaggtatggcttgctggaacccagaataagagttttcagtgttttgcttacatatatgtatttactatacaattgaatggcatcacatttttaataaagtggaaagctactcaaggcatgagattaagtgaaaaaggaaggatacatatagtcccaa

SEQ ID NO: 180557 - DNA, 1302 bp, Homo Sapiens
  misc_feature (50)..(58): n is a, c, g, or t
ttggctgaatttttcccagctcaattaccaccacaaaacaaccaatatgnnnnnnnnnctttaccttgattaaatttattccctcagcagcctgatccttggccccttgagccgactggccatctggatggagcacgtgatacagctggaccaagttggttgcatcatcgattctgagaatgaaagggtttaatgttatctaggggttttcttcatttgattcacagtcctataaaagtgtgtgccaacttcaaactaaattacatttcagactttcctcaggctggagggattggggaaggaccttcagttttacagtttcaaaagcattttcaggaaaattgactaatttaggcctcacaccaactccgtgaggcagctagggcaggagtcactgcaggaagtgtccaatttatgaaagtgaatatattccaaatgtggctatattctttttggaaaaagagcaccatttctcacagaaacagcattcctaatggtagacaatttccaggccagcttacttcaccagcatgtaatagtctaatccaactcagaggacagaaacacagcttcatcccacataagcaggagggtggtggtcacagggatctcaaagtcacttgcctctaagtgacatttgctaacagacaaatgcctctacaagaggccccctaagattccaaggaaaggattcacaggaacgcattagtaaaatagcatcctagtgaagcaaatttgaaattatacacacacatcagacaaaaaggaaaatcgggttctacatcagcaatctgtcttaacttcagcatcacacaactacctatgaagaagacagaacaagaattcagttcttctggtctgtacttctcagaaatgtataaacaatttttatcaacattaaaactgtcctagcaaaaccaaacaatcactatcttttcacacagctgacactttcccaccatttgccatctcatcgctggagggcacagaaaaacgacactcaaaatgcttgtgcttttgaggctctgctatatacactaagtgaactactggcttccagttgggaatggagggctgaggacaccctaattcagtgcttccgcagctagcactcttcagccttccctgcgttccccttacctgagctgggggatgaagagcagggtgacagtgggagtaagtacagaattcctcaagccttggtagccttagagaaatgctctgggcttatactgaggctcatctaccctaaaggcatctctcagaaaacagagctgttgtatcataaagcttttcaggggg

SEQ ID NO: 180558 - DNA, 608 bp, Homo Sapiens
tgagccactgtgcctgccctaagcctgtgtgttttattcttctgacttgcaggctaaagcggcagctcttccatatctcattgctatctcctagggcttccgctaggagactgatctggggctagaggcctccctctgtgcacacgagaatgctggaaatgtcacctctcagggctctgcctgcctctcagccctgaaagccatggtggaaaggggtggcgctgacatagacatctgaggaaagaagtgagggagggtaaagggtggtgcagtaagaggaggggtggggagggcttttggaggcgctgcccctcctggcctcctgtacaatgagagtgcactggactctccattctctggcacccacacactgcgggggccaatgacctgggtctcactcctgaatcaagtgggagatagggttagcaggaataacttcttgggcttccctgcctcagagctccaggcccggattcgaactttacaatcagcattacaacaacctgctacggggtgcagtgagccagcgggctgtatattctcctcccatgggactgtggggtgcctgataacctgagtatggctgaccccaacttccgcttcctgga

SEQ ID NO: 180559 - DNA, 870 bp, Homo Sapiens
gaagtctatgccaatccccctgtgctgtaatcggaaaagatgaagtgtgtaattcagttaattggagactaaacttacaagatgcaactgtgtgtcatgctcatggtagtagtgataatagcagtcactgttactgactccatgctgtgaaccagctcattcggtggtgggaagacacatctcagttgtagggcaagagtgtagaaagtggtcttgttttctttttaggaacaagaagttagaagaaagaatttttggtgggttggggtggtatatctaaaatataaacacactcatctgcaatctaacttgctgtgtgcagtcataatgaaaactcttgttgagatttctggattttgagctttttcatgcaatatgtagagcaaaagatattcatatgttgttcagccaggcacagtcagcccctttatgatgggactggtgttcaaatcatctggacaaaacagttcatactaatgaaaggggaatgtcagtttctcaatattattacttcaaatttttcatttttttaattgaatcttaagtgaggaaaggggagttttactgctgccgctgtgactggtgaaactcataaaggttaagtgagttatcttgcatcaacagtgggtggctaaagcagagacaaaagactcctacaatgatttactgtcttgagaaattcttttctttcatttccaaaccaaaatacaagattttaagtatgttttgttgtgttttttttgggtgcatttcagccacttctgactacgccagctttggttttcattagtgacaggtttgttttgggcagaacggaattgagaatcattaaggacaggaaattatcgtttacccataagtgccccagct

SEQ ID NO: 180560 - DNA, 1643 bp, Homo Sapiens
ttggggttttcctgattttctaatttttatttttgaattcacatgtgtaatttcacatcaataacttgtgtttctgaaatatcctaactaacttgttaataaggaaagaaaccagatttgcttaaatctgttcaaggctgacattctgaaattctaaactggaaataacttcccagagtatttggaaaggttctaagtacaaggatcaggcctaaaatagctccttgggaaagaaatttcctttttgatgagaaaacttaaaatattgtttttggtaatgtaagcagttaaaaacatgactttagaaagacagcttaatgcgtattcaagcaaacctttgttttgttgcttttgcttttgtttgtagaagagagaggaagttattataccaaaaagtaatagtatatgtaactttgagtgaggctacttatatcttagaatgggtatccttgaactatatctaccccaccatggcttaaaaaaatcagtggtatatattgagaatgtcagtcatgagcttagtgtttaagtaacacatcccacttacagttgtttgcatgattagtcttgtgtatcatgatgttcaactttgcttttgctgtgccagttcaaaaatatcttttttgctaaaaactcttaaaattcatgacataagttttgttttgatcacccggttttatatagtatttctgggaccaaaaaatttaaatatacctttttaatataaaacagaagtttgaagctggaaagatagtgtttatggaagatttgtgtgcttttgtgttttttaaacccgtcaggctgctggtaaggcagtttctagggctcacttttcctccttacctcttgactagtgtagcatgtggtatgtttaaaatatttcattttctgcttcgtaattctaaggtcaacactatactgtatgtagacaggagagctgatttgtatattttagttatttggtctaatcaagcataactaaagggacttcttttttgatacttttctcaaattaagtttaaatatagtatacgggccacatttcatgtctttgaaagtgttgtacattactgtaaaccaagtactctgtctacaccagagggtgctttaactgcaaaatatttgagaaacaattcagtctctcaaacattttggcacagttcatcactccagtttgttactttcttgagaatagtccattttttgtttttgttattataccgtatgttctggtcattggaaacagaacagctcatagttgggtgatgtaatataataacagtaatataacctagtagtcattttgcttcaagtaatttaattagatagcaaaatcactgcggtttgtttattacacttgtagggctttttgtcttactcagtgaccatcactacgaatgtcttacattgaagcacagactgcagagcacttgttaacttaatcctcctgcataatgcactcgtgaaaagtagtgcttgctaggtgtttgaagattttatgatccgtgtgcttgggctcgttgagttatttgtaaaataaacatttagtttgagttgatgcagtaagttttttggactagtagtatccaggtccctactctactgaaaatataatctacactatctccccttaagtcagagga

SEQ ID NO: 180561 - DNA, 908 bp, Homo Sapiens
  misc_feature (385)..(555): n is a, c, g, or t
tcagctaatgtatttttcttataaaaaatgtgtgcatattctaggaaactgataagtattaaaatcgtttttaattatcttagtcaaccattataaacagtttagtgtgtattgtcccaaatgggaaatcagcttttttccatgtatcatgacttgtttttccaggcagtaaatagaattctatgttatcatttgcaacagtgtggagtatcctattatatagaaatgtgtactttatgttggatatttaggttgttttaaaatttttaatattctatactatgataaatctaaatcttaatgcatgttcttaattacttccttaaattcctaaaagtagaattgctttgccaataagtatatccaccagaaaattgtgtgcctnnnnnnnnnnnnnnnnnnnnnnnnnnnnnnnnnnnnnnnnnnnnnnnnnnnnnnnnnnnnnnnnnnnnnnnnnnnnnnnnnnnnnnnnnnnnnnnnnnnnnnnnnnnnnnnnnnnnnnnnnnnnnnnnnnnnnnnnnnnnnnnnnnnnnnnnnnnnnnnnnnnnnnnnnnnttgtgtgcctaagagcttgaacgagagtgtcacaattgtttgcttttttatgatgtgctacagaactttggaactgataattacctttagagatatttttattctaattcctggttttacaaaataagttgtaaaaggcagggcaaactacttaatgccattttaggatcctttaactcttctacttcataactttctctttctatacataatatagaaacgttaaagatgcttttaccagcatcactaaaactttaatgacatgtttgtattttatgttacgacaccagcagtgaaaacactgtggttcctccagaaacatatgtgaaagtggcagccacctgagatctttt

SEQ ID NO: 180562 - DNA, 904 bp, Homo Sapiens
aaataaacgttagctgggtgtgatggtgcacacttgtgctcccagcctcccgagtggctgggactacaggtgtgcaccaccaggcctggctagtcttttgtatttttggccaggttcgtctcaaactcctgacctcaaagtgctgggatgacaagtgtgagccgccacacccagcagttgggttgttttttattagagttttttctgtttttctgcagatacattggctagaaatgactgaattggaagaattctctgtattctctggttgctagaaccttatcaattaaaatttgcagaaaatttctccaattctatggactgtctcttaaattttcttggtgtctttggaagcacaaagtatttattttggtaatatctggtttactttgtttccttcgccaaatccaggttcatgaagatttgcccgttttcttctaaaagttctatagttttagctctgaagtttcgctctttgatccactttgaggtaaattttggcacatggtatgaggcaggagttgcgtttcattctcctgcctggggcggtgcctgcaccgtgttgaaaaaggttgtccgttcccactgaacggtcacagctcccttgtctaagatcaacgacccctgaacatgagggttccaactggactcttagttctactccactggcctgtgtctgcccaccattactaccgctgtgccatactgaggtcaggctggggcttttctgggctgctgggtgagctggagaatgcggttgtgtgacccgcacgaagggcagagctgagcgtatgacctgtgtcgttctcctccagaaatacccgcagcccaaagggcagaagagaagaagatcgtcaagtacggcatgggtggcctcatcatcctcttcctcatcgccatcatc

SEQ ID NO: 180563 - DNA, 922 bp, Homo Sapiens
gtgagactctctctaaacgttagctgggtgtgcaccaccaggcctggctagtcttttgcatttttggccaggttcgtctcaaactcctgacctcaaagtgctgggatgacaagtgtgagccgccacacccagcagttgggttgttttttattagagttttttctgtttttctgcagatacattggctagaaatgactgaattggaagaattctctgtattctctggttgctagaaccttatcaattaaaatttgcagaaaatttctccaattctatggactgtctcttaaattttcttggtgtctttggaagcacaaagtatttattttggtaatatctggtttactttgtttccttcgccaaatccaggttcatgaagatttgcccgttttcttctaaaagttctatagttttagctctgaagtttcgctctttgatccactttgaggtaaattttggcacatggtatgaggcaggagttgcgtttcactctcctgcctggggcggtgcctgcaccgtgttgaaaaaggttgtccgttcccactgaacggtcacagctcccttgtctaagatcaacgacccctgaacatgagggttccaactggactcttagttctactccactggcctgtgtctgcccaccattactaccgccgtgccatactgaggtcaggctggggcttttctgggctgctgggtgagctggagaatgcggttgtgtgacccgcaggaagggcagagctgagcgtatgacctgtgtcgttcccctccagaaatacccgcagcccaaagggcagaagaagaagaagatcgtcaagtacggcatgggtggcctcatcatcctcttcctcatcgccatcatctggttcccgctgctcttcatgtcgctggtgcgctccgtggttggggttgtcaaccagcc

SEQ ID NO: 180564 - DNA, 952 bp, Homo Sapiens
ttgggttcctccaaaatctactttggcttcagctccgggtcctgtaccagatggaaaatgtttttggtgatctggctgctgcttaaagccagttttccctaagaactccaaaggctaaagtctactaggggcagagtgtgaggatagatttctaatcagagaaaagtggcctccaggagctttcatttatgtcttctccagaccaggttttcctgttatcttcctttaatcccctttcaaccaacaggtgaagttcttccagcccacagaggtagtaatatcatcttttctatctcctcctctcctttggccatgtaatgaagcaaaatattatttatttagcccaggcttgagagccactgtttgtggacagtcttcatctagattccataccctggcctaggcgaggtaaggctctctggttattgccaggatggagcccctctaccccagtctgctgtagggaataccctaattagttgaggcatgcttttggaatcctggcatgttggcatatggctggtctatcctttttaagatctctggttgggggtatctggatatggattaggagggacaaggagcctttttcttggctaatgttttccaatacttttttgaatggtgccagcccctccaggcatcccacccccaaatcatcatctttagtactaacagggtgtctggtcttagaagcctcccttcagatcccagctgaccctggtgactgcctggccttgatgttggctgcagccttctgatagaaccacatggattccacccacagctggccaggcttgttacatgggtcagggaatacaaatgggccccccccagggagcagtgttggcctcagttttcagggacccttggtgttgctccttacctagagcccattaatctaccccatcactctctgccatgaagccatcttccaggagccctgtttttt

SEQ ID NO: 180565 - DNA, 1742 bp, Homo Sapiens
actttgtacaaaaaagttgggtgtatttcagtaaaactttatttacaaagacaggcggtaggccagatttggcttgcatgctgtagagctgtggtctaaattttattcatagactttctttgcaaatacagtgtgagtattgttccatttacagtattattattttttagatacctggtttttagattcttgcctggtaactttttactgaaaatacaagaatttcgtactgcatttgcatctccgagattagggagcacctgtcaggatatgttgttctatcagggttacttctgttgactacctcttagattttgatacagttatattgttgagtttcattttcatatattcttgtagtgtctgcttgcctgtgacttctggtaaaataaaataagcctttgaaaatattttagcatggtatttaacattttctaaatattatggcattttgacatattttagtcagcgaagacatctgcccctttggtgtttctacttgcttatgattgagattttacaagcccttcaaactccgttttaaaggaatttattgtaaaacattaactttaataaattagtgttttcacagatcagatcattatacttggaacttctaaatcatgcaatttctgaataaggacataaggctagattcatttttcttaatagagaaaaaggaaatttctgatttatcacttttctagttgataagtaggattcaaaacgtttgatatgtaagtatttatataagactaatgtaatttaaagttctgtattattgtgattaatcatacagaaattcaggaactgatcagaagtgagattcttttccacatctggttaatgtagtgagttgacaccctgtgggtggtaaagcattataaacatttcatcttgaaccatgatttatacacatctgtgttataagggaggcttgagtacatataccaatgaagagatattcagcatttgtctatttgataaggaattaaatgtcctagtgattataaagtaaaaccacagaccaatttgcaaatgatcttcaatgttaagcacttgctctaagattaaaattccttttctttttaaggttaagggtgtgtacgtatggcagtgatgtctatgttgagattaacttatgtattgaggaaaatttgaagtttattttttcgatgaataaggctgtcaaatgatttagtatagattaatgacatcttttttagaaatattaaagtgagtattcctcattatgtcatcatttctgataattagagtgctaatttgaatgttagataatgtttccacatctatacctatttctttctagggcacttctgaccctggggcttggggatggcctttaggccacagtagtgtctgtgttaagttcactaaatgtgtatttaatgagaaacattcctatgtaaaaatgtgtgtatgtgaacgtatgcatacatttttattgtgcacctgtacattgtgaagaagtagtttggaaatttgtaaagcacaaaccataaaagagtgtggagttattaaatgatgtagcacaaatgtaatgtttagcttataaaaggtcctttctattttctatggcaaagactttgacacttgaaaaataaaaccaatatttgatttatttttgtaagtatttaggatattattttaaataaatgattgtccattatcaatataatagttgtgaaatgatttaagtaaataaactttatgcttctgtg

SEQ ID NO: 180566 - DNA, 1582 bp, Homo Sapiens
  misc_feature (619)..(911): n is a, c, g, or t
  misc_feature (1217)..(1257): n is a, c, g, or t
  misc_feature (1390)..(1433): n is a, c, g, or t
ttggctctgtcttttaaagcaacaaacccttaatgattattcgtcacttggatgactgcccactcagtccagctttaaacaaggtgtttgctgaaaataaagaaatcctcaaattggcagaccaatttgtcctcctcaatctggtttatgaaagaagtgacaaacacctttctcctgatggccagtatgtccccaggattatgtttgttggtaagcggaagtgacagtgagataactcggaaacacatactagtgctgccatcctccttctctcctccccactgtcccttgccacgttgccatggccaatgtcatcactaagctctagcaaggagcatgacattcctttaagttccgcaacatattttctttagaaaatgtgagcttttacctatttccacacaacactttcttttctcacatgctaattgtaacttttcatcttctgctataatacttctgagaacaaagcaccctattcactatttaaacatattgataaatttcctgaatacgagaggcctgcaaatatttattttttaatccagcaaactttcactttgtgtgttagatttttctgacattttttatcattatttttaagaaagttaggaataannnnnnnnnnnnnnnnnnnnnnnnnnnnnnnnnnnnnnnnnnnnnnnnnnnnnnnnnnnnnnnnnnnnnnnnnnnnnnnnnnnnnnnnnnnnnnnnnnnnnnnnnnnnnnnnnnnnnnnnnnnnnnnnnnnnnnnnnnnnnnnnnnnnnnnnnnnnnnnnnnnnnnnnnnnnnnnnnnnnnnnnnnnnnnnnnnnnnnnnnnnnnnnnnnnnnnnnnnnnnnnnnnnnnnnnnnnnnnnnnnnnnnnnnnnnnnnnnnnnnnnnnnnnnnnnnnnnnnnnnnnnnnnnnnnnnggaatatgaggtgggaaaaagaaatgaaaggagccacatgctccttcctgccactggtacttttcatatgctttccccacttccttctctgtcccccaatttcacatcattaactccccaatcatcattattcattgaccgagtcaaatccctactatgtgctcttgtagtcatactttcctcaggtataattttgcagtttgggggtggttatgtaataaatatttcccacattggactataagcccctatggcagggactgtacctatttctgctcaccatgatattcccaacgtgaccctgcnnnnnnnnnnnnnnnnnnnnnnnnnnnnnnnnnnnnnnnnngtactgagtttggctttgttcaaagtcatactgatttaaggacaatccataatgaaatccatcacttacaacaattcatgctaatcatatgattcacctgtgtaattcattaaaagtttacactgaatgtacnnnnnnnnnnnnnnnnnnnnnnnnnnnnnnnnnnnnnnnnnnnngctgaactaaagcactaattttataggtttagttttgtcagaatttaggacatttggaatcctaacattaaaagggaatttatagatgtctgttcataccttgtacaggaattctttgtacagcatccctgtggaaagacattttaacc

SEQ ID NO: 180567 - DNA, 1010 bp, Homo Sapiens
  misc_feature (819)..(855): n is a, c, g, or t
gaagcccccatggccattctctccctggacatatttgtgcgtcgggggcttggcactgtgtgagatggcgatccctgatgacaagtatcggtccctgcgccgctcaatgcgccggacattcacgaagtccctgggggagaccacgccgcccgcagcccctgcagacacgtcataggagatgagggtgttgtcttccactcgctgcaggatctggcaggcagtcactgtcttgttccacagcaccatcctctcgggctgcaggatcacctcctggtacacgagctccgcaggacagggcaggaaggtcttcaggataaacgtcttgccgtgaaagggaacttcaatggtgtacacggtgtccccatattcctatggcagggacagaaggtggcagggaggagagtggaggcagggggtgggctggtggcacagaaatgggtgacaggcagggcaggtttttaacagctcagggtggaaaactccaggagtttggggacacctgagcagctgttacaaaacagtagctctaacaaacctatggcactggcaggagagaggcttttgatgtcgagttaaaagacggggggacagctgcagctgcaaccacaaaaaaccatgtctccaggccaatggggctgccacaagaactggccagagagagggactggggcatgttgctctctgttttccaagctctctacgatctttgtagataatgttgttttgatcatgaaacgaaacaacggatgcagagcagaagcctggcttccccttcaaagcctggagccaagggggcagaacagcagggaagtaaacatnnnnnnnnnnnnnnnnnnnnnnnnnnnnnnnnnnnnnaaacgtccaatccagcccagcctcctgccgacccgagggcccagctccctctcttggggcaggaatatggctccaacctatgtaatctttgggtttcttcctcaggcctcagaaaagagaacagaaactcctaacacgcatgggaaggtcaccaa

SEQ ID NO: 180568 - DNA, 1262 bp, Homo Sapiens
ttggatcttaatcctgttttaatttgtattctcaaggtggggagaagaattttcattgtccaagcaccctcaggtatgttttaaaatccagccattaagaacatgaaaaatttccttaccataaagttcatatatgtgacaatcaacttcagttagttctaactggtgtaaagtgataagtttttctcaagcttctctgacctgtctggatatattttgttaaaatactgtgattatacacacctgatttagtggatgaggcgtcagcattgggttctagggtcaagtttgttcagattattgtggaatttgaaattctctttgcctttttgacctttatttcttctcctataataaagatgttggactagatgttctctattgtgccttctactttctgtgtgtctctagattctgtatttgccgacctgtatggcctcactctatggtaggaaaatctattggaacaggagttggcagtttttttctgtaaaatggacagataataaatgttttaagatttgtgggcccagaatgacagaagagcagctactcagtgcttctgttgtagcaccaaagtagccatagataatacttaaatgaatgagttcacttgtattctagtaaaacttatttatgcccattgaaatttgaatttcttatcattttcaaatgtaacaaaatgtcattgttttgatttttttccccaaagtgctgagattacaggcatgagccactgggcccagccaatcaacttttcaaagcaaaaaggaatgttttacaaatagcttattaaaacatctggttcctggaatatttcttggtttaaaaataccttcctggttttaatactgtctttaccttctctccatgaatccatatgccatccatccatgaatttatgcatgcattcagcaaatacttatcaagtgcctccagtgtttcagacttttttttatgcactcgaggtagaaatgtaataggataagcgaagtctctgctcttactgagtttaaaatgtagtgggagaagtgagccagacaaacatgtaaacacataatataatttcagatagtgaacagtgccatcaggataaggtaagagtggttggaggaggggagggggtagtcagaaaatatatgtttattaacccattctcacgctgctgataaagacataccccgagactgggtaatttataaaggaaaggggcttaattgattcatagttcagcatggctggggagacctcaggaaacttac

SEQ ID NO: 180569 - DNA, 1362 bp, Homo Sapiens
  misc_feature (449)..(469): n is a, c, g, or t
tttagtgaattcaggcatgcgggatccatagtctcatcttgtagtaaaactcaagacaaaataaattagtgttggacagagttctacattgtacaatgttgaacaaaagaccacagggggaccttttgttcaaagtagcaccaatccacacgtgattgtgtttccaacattaaccttcctgttgactctatcattggcactttgaatggaacttcttctgctttagtgaggattcctacgctgactaagcacactgtgttgctaaactctctacaaagtgtggcagcatcaacccgggaaatggcacatttgaaccaggatcgccctgacatgggcttgcctttttgtatgtgttttccccaccccctgacctagctggtatcttgtggatgtttctgtgacagtggtaaaagtaaataaattgcatttaaggggtaagcaggtgtttnnnnnnnnnnnnnnnnnnnnngaaagaatgtggtcgcagctaaggaggttttcacatgttgtttaactccagtaaagtctgatccagcatctgatgcatactaaggttttcttctttggcatgagccactttctctgtggtgagattagaaaattaagtcatgaatagctgtgctttggacacaatggtggtttgtacatttaggcaggcaaacatcaatcacaaacacaggatgagatgattagaactaggcatgcttgtaagacattactcatttctagacaagaacctaagacggaggggagggcatctttgacccaaaggagccatggcacggattctcacagagcagtcaggtgcacctccaccaacaattcactgaggataaaatgcacgtggggtttggtgaaggttcactgacggtgtgccgtgggaacagggagaggtaaaaaccaaatacagctgcagcactgttatacaaactgaagaagttacgaacagcagacatttccaaggtacaggcagttaaaagtatgggagttgtgcggtaacacaaactcacaaaagcaaagatgacataaataggttttctgagaacttttaaaatgatttatttctgttgttcataaaaaattgtcaacatgtttcatgcacacttcattaggacattctcttaatatttttatagtgttctatttattagcatgacattctccccagactccaacagcaccattagactgagtaaagcatacctttcagacaaccaggggcttttggcatgagttcctgttttcaaaagctattttgcccaagcataggtacatttaatcatatttcaaacactataccagatatttagaagttaggaatatgagtatctgataggaatatatatacacacacacacccaa

SEQ ID NO: 180570 - DNA, 2376 bp, Homo Sapiens
  misc_feature (867)..(899): n is a, c, g, or t
  misc_feature (1090)..(1119): n is a, c, g, or t
  misc_feature (1602)..(1628): n is a, c, g, or t
  misc_feature (1649)..(1769): n is a, c, g, or t
actttgtacaaaaaagttggctcttatgaaggtgaaacctaaacatttgtcttgcattggagtctgttcttttttgctggctgctagaatagttgaagaagactgcaatattccatccactcatgatgtgatccggattagtcagtgtaaatgtactgcttctgacataaaacggatggaaaaaataatttcagaaaaattgcactatgaattggaagctactactgccttaaactttttgcacttataccatactattatactttgtcatacttcagaaaggaaagaaatactgagccttgataaactagaagctcagctgaaagcttgcaactgccgactcatcttttcaaaagcaaaaccatctgtattagccttgtgccttctcaatttggaagtggaaactttgaaatctgttgaattactggaaattctcttgctagttaaaaaacattccaagattaatgacactgagttcttctactggagagagttggtttctaaatgcctagccgagtattcttctcctgaatgttgcaaaccagatcttaagaagttggtttggatcgtttcaaggcgcacagcccagaacctccacaacagctactatagtgttcctgagctgccaacgatacctgaggggggttgttttgatgaaagtgaaaggtaggcaggttccttgactaattaaacttccctagactaaatattactgagtttattatactcagaactggaatagtgtaagacatcagagaaagcaagcacctacactaagagctaagaattaaagcccccactcttcaggtaagcaattaaccagaagtagtattttaatatgtaatgatttataaggtcctctccaannnnnnnnnnnnnnnnnnnnnnnnnnnnnnnnngagtagagatagggtctcgcgatgttgcccagggctggtcttacatactcccaggctcaagtgatcctcctgcctcagcctccgaagtgctgagattacaggtgtgagccactgcactcggcctcttttccctttttaaagtggttgttttccatctttctcctatttcccttgctcttgaaatacagctnnnnnnnnnnnnnnnnnnnnnnnnnnnnnngaattctgggctttgtaatgttagtatgaattcctaatattgtgctgtggtgaagagattgaggggtaggtgcctggaaaataaagggaatcaccaccactgatggggaagacttctatatatgttctcagaggtttgtcaattggtgttgtcttattcagaatttgattactttgtttgtaaagtgaataactttgctaaatttgtttgttttatgccgtagagataaagggccagaagtttcattttcatagcttgttagtttactttgatatttgacagtgtaagtggtataataaatcactgatgcaagaaatacatctaaatagaccatatgctaggaggtatgttgtttttagtcttcattactggatttaaaatacttagaattctacaattctaatacttgctgatagttattaattggtacaagaataatagtttggcaaatagtaacttgtttaaacttaagaaaacctatannnnnnnnnnnnnnnnnnnnnnnnnnngcatgtgccaccatgcccagnnnnnnnnnnnnnnnnnnnnnnnnnnnnnnnnnnnnnnnnnnnnnnnnnnnnnnnnnnnnnnnnnnnnnnnnnnnnnnnnnnnnnnnnnnnnnnnnnnnnnnnnnnnnnnnnnnnnnnnnnggatgagccactgcacccagtccaaaaaatctatattttccaatgagattactatagacttcatttaggaagtccttataaattttgtctctgtaaagcataaattttgaatataaaaatcctcactagagatatagcagctttattttggctataaaacatttaagtgtgttttaagtaatggtatcctctttttttgtctctttttctctttagtgaggactcttgtgaagatatgagttgtggagaggagagtctcagcagctctcctcccagtgatcaagagtgcaccttctttttcaacttcaaagtggcacaaacactgtgctttccatcttagaaatctgattgttctgtcagaatttatatttacaggtttcaaagcaataaatgggggaataggtagtttcctggtttagcccccatctagtcaggaaataatatactggaatacctaccttctatttgttattcagatcagatctgggcctattttcatatttatcctaagccatcaaatggggtagtgcctctttaaccaataaacagtactttagaaatttggcactttaatttttctcgtagatcttttagctactttggggga

SEQ ID NO: 180571 - DNA, 1476 bp, Homo Sapiens
  misc_feature (437)..(446): n is a, c, g, or t
  misc_feature (699)..(707): n is a, c, g, or t
  misc_feature (1151)..(1165): n is a, c, g, or t
ttggcacctgtgatgggaaagggcgaacgaggattaggggatggggaggaagagagagactgtggagctctggggggcaacctggaggtctgaaaagaggagccagagaaggtggtacccaggcttcctggtcagaaccggcctggagctccttcccttccccctggcctgagaggttgcttttaagtcttccaccccttgttccatctgcctgccaacccatcggaaaggaatccacatcatattggagatgaccccatcaaccccagggctccagcactaccaagttggaattccacgcccgggagtggggtagaggaagacgagacaggacgaggcagaaaagcacattttaaaaaccagacaagatggctaggccatcaccaaccaacggacttaccttacatctttgtaggtaattccccccaaatcttgannnnnnnnnncctcaattatcctttaaaaaataagaaaacacatttcaaacccaaaaggcacaaaacacgttcccttccaactttcccaaaacctcaaatttgttcccatttgaggtttattgaggtacacttctagcccccggtttttctgctctagaacattcatatctatacatcccacccccatcaattacagtttttagagggctcagggatggtgagagatcctgaaagagctgcctatattataaattatatacannnnnnnnnaaggaaaagtgtggaggctagggcagcagttgttaggactgaagtttgcccattctgctgcctccatctcagctccagctccatccccctctccacagaaagcagttggtgacacgaggttctatacttttcttctgttgctctcttgacttaacgtgaaaacagggtatatttgaacaaactgtctgtcccaggcaggggctgggcagggcctgtgtgccttgctcagcctcctgacaggacacttttgttgcacttagaatttacattttaatggatgtaaaaacaactgtgagagatgtctgggcctgcagaagtccagcattgctcaaaaaagcgtgtgttctagtgaacattttcatatatatttattggttatagcctgttaaaatattttcttttttgtattatttatccccctacattatgtatttatatgagggnnnnnnnnnnnnnnnttgtacttttttagtatttacctgttacaaaggacattgtgtttcctgtcatgtaaaaccagctattttagttactattgtactctagaaaagagctgtagatttatgttaaactcgtacttacgaacaattgtaattagttctaaaaggcatgaactcagctcctaatcgtcactgtatagtcctgaatttgtagaactagagttaattccctcttggaactttctttgttcttcagtagttacttttttccttacctaaaagggttgtctgtcaaacaattcttgaataaactttctgttatcaatttt

SEQ ID NO: 180572 - DNA, 1390 bp, Homo Sapiens
  misc_feature (77)..(91): n is a, c, g, or t
  misc_feature (957)..(1001): n is a, c, g, or t
  misc_feature (1098)..(1110): n is a, c, g, or t
ttggctgggacattttgctaaacatagaagatttcagttccagatttttcaggtgggtgggggaactattttagtcnnnnnnnnnnnnnnntgggaaattttcaatttataaagatggacaatttttgtgttgtatttgaagcttttgaaagaattttgtaatattttccaagtttggatttatgtgcattgttaacaagaactgaaattctaacttttttggtaacattaaagtttaggtagcaggattgaaggaaatgatttaagaaggatatagctgttaaatgcaaatgaactgtcattacaaatgaacctttttggtacctgttgggagattttgggatttttagaagttaggccagtcacatctccagcttcttttgctgcagaaatatgcaactgaactcctcatggaggggtcatcaccacaaaggtcatggaagggtcattatttctcttgttggcattttattgcagcccattttaaatgtttgtacagaaatatttttcattctgtgaaaatttatttggagttctgtatgaaactggaagaactctggatacttttatatgttctcttttaattaaaaaaatgattagaattatcctaacactaaagtgttaaactggaatggttgacaagatattcaggatctcagtctacacattgaggggttggggaaaatgtaatgttgtccttagtttattttcctttctaaaaaaaataccccacgaaagggattctgatcagttctctgccatttccctctatctgtgaaataacagcttcgtataaccacaaccaaaaacagatgttctgtattaggagaatcgaattgaaagttattcaaagccaaaataagtttagatttcaaaatcattccagctctgcttttatctatcctggatttggtagaaaactaatttgaaagagaatttaattttcttaaaattccnnnnnnnnnnnnnnnnnnnnnnnnnnnnnnnnnnnnnnnnnnnnnaaattgtctttaattgtattcaggatttattttaataataaccgatttggaccattttgaacattccctgttttaaaattcatatgacttccttttnnnnnnnnnnnnnggatacaagggtaaactggtgaaaggtttgctctctgcattttctaactttctactgagttgtgactgaatgagagcgctctagcgtttaccagtgaggttcataaactaaactctcaggaattaattgcatctgttctagaagtgcttctgggtcttagcctggcctcttcagagtggtaatattgaccatctcctctggaatataggtaggggctaattagaaattaatcaaaagattaatctctacagtctttcagcctatggaatgctttaaaaaa

SEQ ID NO: 180573 - DNA, 1984 bp, Homo Sapiens
  misc_feature (126)..(136): n is a, c, g, or t
  misc_feature (159)..(393): n is a, c, g, or t
  misc_feature (627)..(719): n is a, c, g, or t
atgagccaccccgcccagctgagtcatgccttattttcgtagtataccaagaaatgttctatggaagtttacgttttaacacctcttttatacttggtaaaattgcctgtgtttcgctttattccnnnnnnnnnnngagacggactcttgtactgtcannnnnnnnnnnnnnnnnnnnnnnnnnnnnnnnnnnnnnnnnnnnnnnnnnnnnnnnnnnnnnnnnnnnnnnnnnnnnnnnnnnnnnnnnnnnnnnnnnnnnnnnnnnnnnnnnnnnnnnnnnnnnnnnnnnnnnnnnnnnnnnnnnnnnnnnnnnnnnnnnnnnnnnnnnnnnnnnnnnnnnnnnnnnnnnnnnnnnnnnnnnnnnnnnnnnnnnnnnnnnnnnnnnnnnnnnnntgagccactggaacctggccttgttttgctttattttttctcttacatgaagtaaagcgctttggtcaaacacacaaaaatactgccttgtactggtggttggtttcattagtggatcacacacagtgttctacttggcttgtaaaatggtgccttggatagggtgagtttggataagtatgtatgtatgtatgagttatagcaaaattaagtagattgaatcaagtccatgcnnnnnnnnnnnnnnnnnnnnnnnnnnnnnnnnnnnnnnnnnnnnnnnnnnnnnnnnnnnnnnnnnnnnnnnnnnnnnnnnnnnnnnnnnnnnntgatgtaacttacatggaagtcttcacaggacttttttctttcctggaactattgaaatgtaatttaggatgatttgatcttccatctcaagttgtcaacatggctgtgtcattctggcttacatatgttttatttaacaaaattctagtcaagggataagggcataatgaagacaagcttcagttatgaaagtacaaactatttgtgtgattaatttttaaaaatgacattaagaagcccattgtaaaataatatttgcagtcaaatggtttttcttgctgtaagtcctgttgtagctatgtttagggtagtggttctcatctaccttggagtgcataagacttacctagcaggcttgtttaaaaagttcagattcctagctttgtacccagggattgcctcaggtggtatgggctgtggtcctggagtcatcacttttataaatagtggttcagagaccacagagagagactgcttcatcgaatgggaagtaccaaggagaaagtacaattcagtattgtctggaggcaagtggacactttgtacctgaggtttagaataggtggtctcttgccagtacaatccccaggcgttttctgtgttcagaagtagtaagaatgcctttaattcagaggattatctaagctctttaaagctgtttttctccattgtcatagtgccttctctgaaaaatgaatgtacaggtatcctattttctaatgtaattaggattttttaaaagcaatttttgatagtttttcttttaaaaagtaaaattcagcactgtgacttgaacccccaaatctttcacatacaggtgaaacattaagccacaaataaaaataatgaacaagaaagaagacaagatcctaattcctgtcattagtgacctaagtaccccatatcagaaactttgcaaaacagatctagggacagaagggctttgaaagacatttttctttggggcaaatttcgtgtgccagaactacagtttaaatgtttttatgagcaagggaaggtagcattgattcccatagctttctaattagatacatgctgtcatggatgtaagccttaaaggagttaatactaatcttgtacatacacaaattttcctcaggtttttttattttaaaaaatgatttgttaaaagtactgtctgctagacccttgcctttgagtggctttgaaacttaataatattttaaaaagtgcaatgggatgaaaattatgctattagtatattaaaagcatgtttctgttt

SEQ ID NO: 180574 - DNA, 654 bp, Homo Sapiens
cctaagtgtttgttaattaagagatttcaccctagtttttactgtgtctcattccagaaggaagagctaatgtggagaagcaggccttaaagaagacaacatttggctgaacaaaggaaaccatttcccccatttagaactatttgaaaatggaatgagctgcctgtcccaggaggtccctcaaccaaagatgacttcttagtaggtagagactttgtagagcagattaaagaattgcctttgcaggggaggggaaaaactgggtaaaataagctctacagattcaatgtattatcctggagatgactgctggcttgaagagctaccttttggccaggcatttttataggaatgtagctttagttacattatattcagacatttaccttgactaaaaagcatgaaaatatgaaatacaggttgttaaaaatgggtgtgtgattatgacagagatgttacgaattcattgattttaggatatctcacagtaaaatggcccagtgaagtgactgtaacaatttaattgaataagtgactaagaataacttaatgtttgcaatgagaaagaaaatacttcctgaatttctaagtatactctatattttctatgcaaaataagtaatcagaggtattcccaacttttttgtacaaagt

SEQ ID NO: 180575 - DNA, 867 bp, Homo Sapiens
ttggcaacaacccccagtgctgggattacagatgtgagtcaccgcacccggcctgctgtggtaatttttaagaaagcttttaacatttccttttcctccttcgtattgttgcttacaaacataagacaataactgctgaggagaagcaaactcaaggctgggcattcctgcaggaaaatggccaaggtgtactttcgtggaataaaaatgaatcagagaatttgctaatttttttctcttaagaaattagaataaaaaacaacagtgcttatactgatttttctttaagaaatcgaatacctctgattacttattttgcatagaaaatatagagtatacttagaaattcaggaagtattttctttctcattgcaaacattaagttattcttagtcacttattcaattaaattgttacaatcacttcactgggccattttactgtgagatatcctaaaatcaatgaattcgtaacatctctgtcataatcacacacccatttttaacaacctgtatttcatattttcatgctttttagtcaaggtaaatgtctgaatataatgtaactaaagctacattcctataaaaatgcctggccaaaaggtagctcttcaagccagcagtcatctccaggataatacattgaatctgtagagcttattttacccagtttttcccctcccctgcaaaggcaattctttaatctgctctacaaagtctctacctactaagaagtcatctttggttgagggacctcctgggacaggcagctcattccattttcaaatagttctaaatgggggaaatggtttcctttgttcagccaaatgttgtcttctttaagcctgcttctccacattagctcttc

SEQ ID NO: 180576 - DNA, 2190 bp, Homo Sapiens
  misc_feature (604)..(664): n is a, c, g, or t
  misc_feature (908)..(963): n is a, c, g, or t
ttggcataaatgtgggattaattagatgtttttgttagtgatatttgattctactagttaagaggcaaatgtggtttgatttttaacaaatttatgctcagattttactgttgttacttggtaaaaaatatattggaaaactaaaaatggttatgaattgtagaaaatgtttatcataatttatctttctgattaaaatcagtttattttgtatatttcctgtagatttaaattaaacatcttagtactactttacaggaaagtgtttcaactaagaacaacaatattttctctatacaatttgttgttctatagatttaatttctttaaaagatgtaattcttaactttctgttttgatatttgctttgctttttaatctaaatgtggtaagtagtactattttaaaaatcaatataaaaataatacaggttgctgtttttcaatctttatttatacctgagacctgcagtttttcttaagtccaagtcacaattaaaagtaatagcattctggttattttgcagaattgctcataagaatggacaggatcttgaaggctaactgcaaggaactgtgcacactggaactcagttgtagatttnnnnnnnnnnnnnnnnnnnnnnnnnnnnnnnnnnnnnnnnnnnnnnnnnnnnnnnnnnnnncattttaacattctatattcagtggagttctatatttccaatcatttaacttactcactaaaatttctgtgtaaatttgttgttttcgtactggtgtgcttagcattgttgttagttttttattctcctttcttaaatttctgaaaatgtcaatttttcaaaatttacagctgcccaaactccaaaatgatggtagagaattgaccaagaaaaataaagaaatctgttaacaggccatgtatgnnnnnnnnnnnnnnnnnnnnnnnnnnnnnnnnnnnnnnnnnnnnnnnnnnnnnnnngtatcactaggcagaagacatttaactatttagagattgcatggtaaagtagttagtattgttacagtaatttatagaatcagtaaaccttagaggacactagtaaatagaatattagaaagggaaactgttgttcctattaatcttcaaatttgagcatttagtttagaaagcacaggctatttgattaggttgcatgtttattacatgtttttgtcctactgcttttttctaacaggtaaagaagcattagggagagttcaggaatggttgtagttaattagggctaactggaattttattttaaaaatgctcacaatacagtgtgtgtggttccttttagtttttattttgagggtggctcttacttccctcatttagctgtgcttcttttcacagggatgcccgggtagttaaagacatggcaactggaaaatccaaaggctatggttttgtatctttttataacaaactggatgcagaaaatgcgattgtgcatatgggcggtcagtggttgggtggtcgtcaaatccgaaccaattgggccactcgtaaaccacctgcacctaaaagtacacaagaaaacaacactaagcagttgagatttgaagatgtagtaaaccagtcaagtccaaaaaattgtactgtgtactgtggaggaattgcgtctgggttaacaggttttgttttatagatcagcttatgagacagacattctcaccatttggacaaattatggaaataagagttttcccagaaaagggctattcatttgtcagattttcaacccatgaaagtgcagcccatgccattgtttcggtgaacggtactacgattgaaggacatgtggttaaatgctattggggtaaagaatctcctgatatgactaaaaacttccaacaggtaattcgatttttcatagcattctttaaggtttccatcttacatgtcacataaaagctttggaaactctgtaaaatgaacaataaaataaagcatatagctactttcagttgattgtatttcaaaattgattatttgcggtattaactgaatcttaatactttcttttcacaggtgtcaccaccccaataaacttagacaatgataaataacagagtcctattcacataagggtgcttacttagtttttctcttccttgtctcccactctttcttcatatacggtgtttcttatgtgttccctaaaacaatactttgcttttt

SEQ ID NO: 180577 - DNA, 1509 bp, Homo Sapiens
  misc_feature (825)..(859): n is a, c, g, or t
  misc_feature (949)..(1012): n is a, c, g, or t
ctttgtacaaaaaagttgggtcaataaagccaattctgactacaaattttgatataataggaaaaatggctaatacattttgattcttagatactattccatttttatcttgctgttcagtattttaactcactgtgtttttaaaagagcaaaaaagggaggatcgtgaaaacctgggaatcacatataagttcatcctgaatcctgatactcccctccccttccctgaggtggaccacatttgaagtcagcatataaaaagtgtgatattcataagaaatgcgtgattttggagtcgctttggaggaaatattttctttctctatgcctaatgaaactgaagccagactgaagttttgcaccctaaaaaaggaacagcattgtttgagttacttgagcaaatgttggtggtccacgttaagacatatttttaaaacttccaaaagtgtcgattattaaaattgtagtattttacatttcattttggggggaaatccaagtatggtgtttgtattgaagtcagacagtcatacttgtgcttttacatgaagtttaaatgatacatattgtaaatattcaataactacagtgtttaaaaagcatgcttcaacatagaagtagcagcaatgtaattatttgaagtaacacttaacacactccgctgcattgaatgcagtggattgatcagaatgttaagactgacatttccaaggttggctactatgtaaaattaaaattacacaaattgtgcagaaaaagccttaattttaatttcatacaatctttgatgcattagtatgttctaaaatgtcattgggaattagnnnnnnnnnnnnnnnnnnnnnnnnnnnnnnnnnnngctttacattacttggtatgtaaataccttgattaaaaccttgtaaaccaatttcaaggttactataagttgtatagtacaagtgttttnnnnnnnnnnnnnnnnnnnnnnnnnnnnnnnnnnnnnnnnnnnnnnnnnnnnnnnnnnnnnnnnttgctaaaaacatcttatttaaacacttcaatgtaccaatttataattggatattcagtttaaataatacacaaagttgtggcttttattttcaattaatttttttccttgtgggcagtgtgcatggtataataagcctgaacaaaagcttaagttgtatgtgtgcagagtttgtaaaggaatcaattggaagatgcagaaaaccgaggtttgctttcaaggtatttttcaggctgtgtgggtaaaatttgcctcaaatttctatcaaacaggaatgtaaaatagataaaatcctatgtatttgaattgtccgaactagggagtgcaaatgttttggcaatgtattcaaaatgctggcctgggcaccaaagagaaaatagccttttacagttacatagtaaagatgcgattagtacccccaaataactgttttctaacatttgaagttttacgattagctttaaaaaatgattttataaattggtggtccaataatt

SEQ ID NO: 180578 - DNA, 936 bp, Homo Sapiens
ttggcttaactccccagtaagtcaaagaaataatgagcaacacagactcttcctaatctgatcagtgactggcttgggcctttctgaaagtgctcttgtgggcttcccacattgggtccgaagttaggacacagagcacattcctcagagcaaggggccagctgagctcactgagggagtgaagagctctggtggcatcgtagatacctgctcagagtgctggactctacctgggaccccaaaccaccctcccccaccatcagcagcaggtgtcaacccccaggactggagttgtcacatcactgctggtgatatgtgttctttgttctttttctttgtgaaggtcgtgttattttttacatttgatagacactggggtatgcattccttttactgcttatttttactttagtcttaccctagatcatggcattgggtgaagccagctatagacagctggcatttttgtaatagaaataggggtcttgcaagtgagccccggaagggtacctcccagagccagggtaggtgaggaggtgattaagggtcatcacctcatttctctaggctgggagccaacattccattaacatggcttctagggagcttcttatcatgtcatatttgacggcaacttaaacctttttagccatgtgcatttttcagagtctctgtccctgaggtgcttggcacaggggcccaagcaaggtgactgctcaggcaaccccgtggtacaccttagtatgcctggaagctgtcacctccctggctctggctgctgcgccccagtgctcagctgaacttggtttctttgactcctgaagcacagccagccattgaacacagggaagaaaggacgagactaaaggagctgttgctttcagggctgcttcatgaatttcccctaaagagacacaagaagactaaagccccata

SEQ ID NO: 180579 - DNA, 1311 bp, Homo Sapiens
  misc_feature (261)..(371): n is a, c, g, or t
  misc_feature (776)..(806): n is a, c, g, or t
  misc_feature (943)..(962): n is a, c, g, or t
ttggcttttcctccagacccatatcatctcttataaatttttgcccaggtatcaccctctcatcgaggcctaccctgcttaccctatgatattgctcactgctctcttgagcccttcccaacacacacccagaatcctcagtcctccttacactgttttactttttttctttaatcatagctcttatcaccttccagcatacatacaagttgcttaacatgtttattgtttgtctccacaacaccttgcaatatgaactcnnnnnnnnnnnnnnnnnnnnnnnnnnnnnnnnnnnnnnnnnnnnnnnnnnnnnnnnnnnnnnnnnnnnnnnnnnnnnnnnnnnnnnnnnnnnnnnnnnnnnnnnnnnnnnngaacaaatgattttactatatttcttttgagggttgcagcttattaataattttacagaggaaagaaatctgaaggcaaggctttaaccattcctttcttattcgtctgtaggaacttttgatttggtttgcatgacaataaagcacaatctaggaggcatgaaacataaatatcacgtgaggcaatgtgggaagccaaaccctgatcaaacacaataccaggaggagaaaataattattaccattgcagccgaggaaatggaatgggattattctcctagtagaaagtgggagaatgaactccaccacttacgaagagagaagtaccatgatagctccagtctctaaatgggaagggttctaagggttctttctgagtcttcctctctttcctttcagtctctnnnnnnnnnnnnnnnnnnnnnnnnnnnnnnnatttatttgtgtttggtatggtgggtgggtgtggtatatttatttgtgtttgttatggtgtacgtgtgcataatggatatgtggatgtggtatttgtgtgtttaggatattctccattataaatcacttcaaaattnnnnnnnnnnnnnnnnnnnnacatattcaattgcaaagggcttcaaatctttctaaatatctatataacttacttatgggctttatttcttcctgcctgagttttcacttcttgcatccttcctggacatatgttactgtctgatctcaccacaggaatagtgacataacttcagctacattcagtatctacagtcaggtgtttcttttgtcttcattttcttctacctctattcttctgagaacttcaaatttaaagacacctgtttttctctttttgtacaatttgatttctctctctggttttctctcttactgtatatttatttataaaaactaaattttatccctgaaaataagctttgaaatg

SEQ ID NO: 180580 - DNA, 731 bp, Homo Sapiens
ccatttttcttaatagacgagttgtatgaccttaaagtactcagccactttgaggctatttcctcatttacaacagtggccactttgctgttattctgagtcgtgaatgagcatattgggaagaatctggtgagttagttgttctgttctccaaaaacatattccaagtcttcacccaaaacctgtgctctgtgggagaggatggctgatgaggcaggtgacaggcagtgtctgtgcctagggtgggctgatgtccctagcactggagggtcctgcttctcagtttggagtcatagagggatggatggcttccagcctagccctggaccacatggagactgtgcggtccccacgaacaagcggccagggttaggatagggcctgactcagctgtgcttttaacgaccaggtattagcatttccctttgccctgccactttcaccatagggccttcttacctggcagaggagtgccttagataccagaagattggcagggaagaagggcagccacttcctggttaccatggagaagcttgtcatgctccaagcctgtgcttacttgtccagtagcaacaatgggaaactgtattatttggggtaggggtagaaccctgagggcataaagctaagaattccaggctgcatctggcagaatcggtttggccaggggttcagctgctccctgggaggccttggcatagccaggctgctccagcactgtgagctgg

SEQ ID NO: 180581 - DNA, 886 bp, Homo Sapiens
actttgtacaaaaaagttggcttaatagacgagttgtatgaccttaaagtactcagccactttgaggctatttcctcatttacaacagtggccactttgctgttattctgagtcgtgaatgagcatattgggaagaatctggtgagttagttgttctgttctccaaaaacatattccaagtcttcacccaaaacctgtgctctgtgggagaggatggctgatgaggcaggtgacaggcagtgtctgtgcctagggtgggctgatgtccctagcactggagggtcctgcttctcagtttggagtcatagagggatggatggcttccagcctagccctggaccacatggagactgtgcggtccccacgaacaagcggccagggttaggatagggcctgactcagctgtgcttttaacgaccaggtattagcatttccctttgccctgccactttcaccatagggccttcttacctggcagaggagtgccttagataccagaagattggcagggaagaagggcagccacttcctggttaccatggagaagcttgtcatgctccaagcctgtgcttacttgtccagtagcaacaatgggaaactgtattatttggggtaggggtagaaccctgagggcataaagctaagaattccaggctgcatctggcagaatcggtttggcaggggttcagctgctccctgggaggccttggcatagccaggctgctccagcactgtgagctgggagtctcctcttgcagaagatgggtgtgaacctgacacgcagcaacaaaggagacggtgaagcacagcgacgtcctgtttctggctgtgaagccacatatcatccccttcatcctggatgagattggggccgacgtgcaagcca

SEQ ID NO: 180582 - DNA, 896 bp, Homo Sapiens
ttgccctcgcctggcttagacctggcaggcagatgggcacgaagagcgatcagggtggttcacaggcaggtgtatcagggaaaggggctgggcagacagtcagtggctctcacctgtacgccaggcggaggatgaagagctccaggaaggccgactccagcaacaggtcctggtcagccggtgacagctcagcaaagccagggatcttctccgcccacttgcggatgacctccagagaaccggagagcaggtcgtagaactgctgtacatccccagcatcttccttcccaaagtggggcagcaccagctcctggaactaggaagacggtccagtggggtcagcaccccaggcaggctcctacacccactgccacgtatggctgtgtcagacacttggatgccagatcccgggagtgggagtggatctgagatcctgcccaggctctcacttgccaagtctcacatattaacccagggctgcagctgccaaaaggacatatttttctaattggccacctgcctgagggggtgcattttcccatctggtcagccgagagggggatcctctctttgatctgtcgaactggagggagtcgcttttctttctttcttttttaaacctcctttctcattcagtccttccagagggggtagctctcctaacacgcacaaaggcactgcatgtgctcatagacctccccaaggcagacacggggtgggacctcaccttggagtagtccagtttggcagtgctgggccctgagtccaggtgtgcacggaccagggaagtgaggagattggcaggggaggcatctgggggctgcttgggttttgaaggtagccggccccgccgccccttcaggctgtctgttcggacaactgcaaaggaatgccaa

SEQ ID NO: 180583 - DNA, 1254 bp, Homo Sapiens
  misc_feature (819)..(943): n is a, c, g, or t
ttggggaagatgctggggatgtacagcagttctacgacctgctctccggttctctggaggtcatccgcaagtgggcggagaagatccctggctttgctgagctgtcaccggctgaccaggacctgttgctggagtcggccttcctggagctcttcatcctccgcctggcgtacaggtctaagccaggcgagggcaagctcatcttctgctcaggcctggtgctacaccggctgcagtgtgcccgtggcttcggggactggattgacagtatcctggccttctcaaggtccctgcacagcttgcttgtcgatgtccctgccttcgcctgcctctctgcccttgtcctcatcaccggtgagtgaccagcaccacaccaggtccaagggaatgggcgtcagggggttgactggttctcaggagggcactgtcccagggagtttggtgggccgggatctagcactttctgggcccctgcactgccccgggctcatgccagcagtaaagtagggaccataggaattgcagatgggctcagctgcatccagctctaaagcgcaagacagcctttggtcccagactgtcaggatccagactgcaggtgtcatgtatgtggcctagggtattggcttgtttttaaaaccttcctgtcaattatgctgcatatagaaaagtacacaaatggtaaattttcataaaccgcacttacccaaccagcgccttggtcaagaaagagcacataactgccccccagaacccattattgtgcccccttccagtcatttgccctccccaagggtaaccactactttttatttaaannnnnnnnnnnnnnnnnnnnnnnnnnnnnnnnnnnnnnnnnnnnnnnnnnnnnnnnnnnnnnnnnnnnnnnnnnnnnnnnnnnnnnnnnnnnnnnnnnnnnnnnnnnnnnnnnnnnnnnnnnnnnagcccttcactgtgacttctgacagtgcagatcagattggttgtgcctgttttggactttatgtaaatgtagttctgcaggatggaatctggtgttgaatgcagaggttttcagatttctctgttttttaaaggaaagaatccaccctcgttcattttttcacttaaattgcacaggggacccaacgatatagaacacaatcagaggtactctgggctgagggagtgctgagttctgaggctgggtttctcagacagtctagattttaaaacccaatgatctagccagaaaacgtagttaggattttattt

SEQ ID NO: 180584 - DNA, 861 bp, Homo Sapiens
gattgggaatgcggcacagaaagaaaaagaggtggaaagccatttgagaaggcctaataaatatctaattggagctctggaaagaaaaaatgggacaacatttgaagagataatggctaaaaattttccacaactagtgaaagatacacatattgcagtgaatcacaagaaatccacacctagacacatcatactttagagcactaaggtcaaaagatgttaaagcagctggagggagtggaaggattaccagagcaattccagtctgattgacagctaacttctcagcagcaaagatggaaacaaaaatacagtgtaatgttgccattgaggaaaggaaataattaccaaaccataaatgtattctaagcaaaaatatctttcatgaatgaggatgaaacacattttccaacacataacacgcaaaagagtttgtcactagtagacctttgccaaggagtctaaagaatgtatttcagacagaggaaggtattataataccagaagaaaggtctgaaatgcaggaggaattgggggcaacataatgagcaacaaaatgatgataatgttcttgtgaggttaaaaagaaaatgaaaatgtccaaaccatcatatcatgtaactcaaggagagcagatgttcaaaattaaagtcatttaagttcatactgtacagtgaaaaggtaaagttattgatgaattttacctttatatagttaacatatacaattgttaaatgaataaagtatttaaaaaaatagaaaacttccaaagtagcagagagaaagtggaatgagatagagaataaatccacacgaggaaaaggaaacatggaaggaggtagaacaaatagaaagcacagc

SEQ ID NO: 180585 - DNA, 1731 bp, Homo Sapiens
taaacattggacatttttgtgacaagtaaaaagccagaaactggtgaaggctgaggaattctggaaattaaatgaagcaaaaacagattcctaaccatattgagaaagggtatatgcattccctatgaatcttccaggttgttatgggcagcccaaatattacttgtacatgttgtatgcacacgtgaatctatgtggacggatgacaaatattttgggcaaggatcatgcacataaaattagcaaacattcaagaacctcaactttgaggccaagtgcttacaattgtccctagttaaaggggagctgattctaagattcatgatgccactgtcacccagagaaggatcccagaccaggcacacatagctgacagtttttgtttcactcctcttccttgcccattcccagaagtcatgtgcttcccagaaacacacaaagccagactgagtttccattaagagtgggtggagttggtttagagccaggaaaacaaggcaggacagaggcagcagacactcacttggaccaggcaaagagggaagcaaggtggccaggtactcatgcccagttgccatgtggacagcagataagacctctggtagtctcacagatggcaggagagctcaggtcaggaggctgggcactttagagtccactgaatcgagtcagcagcagattatgctgaggctggcgatattatttactggatctgccactgactttctaatggtttttccagaggctgccgtttttgtggtccttcatagcagtctgttacttcatctgtttgccacaaatcaaaccagagaccaaaagacagcagggaccttagaaaatgctcaatagttgggaagctaaggttatgaataaaagctggtaactgtcacaggtggtcttatttctgggtgatcttttcttggggaagtccatggctatagccatcataaaattaggggtgaagggttggatctagaaaggagagggtttgggcttaaaaagaacatatctgatttcagttttatgtcctggagagagactgggtttgaataaatactgatcaaaatgaatccaagaatagatcacacactgttttgttcacacttggaaacacaggcaaacattaaaaataaaagcaaataaacctaccctggtctctttttggggaagtagatttgactgctctcagatgatcagcctggatgttcagaagacaatctgaattcaaaaggacctttcacctggtttaattctctggcaacaattcagttttcaaacccaattcccaaataattgctattttcagcatcatgatgcagatcacaaaaatattccaatttggcctggctctttttatgacgatatcctctcccagtaatttctgtaacctgcaaagtaagtgcctttttccttccacctagggggaaaaaattaatgatccctgttcacacactgactcacgtgggttttcatcatgggttagaaaacaaaatggaattctctgtccataatgtgccatcaggaactgtgaccctgcctgacttcacatgatcctggacttctaatcagctgctggaaatggaagaaatactatgaggttctggaattgcggtccctggaagattacctgggttagttcattttggtcaaaaaataaaatcaaaagtatggttaaagaagtaaacagctgggctgggtgtagtggctcacgtctgggatcctggcacccaa

SEQ ID NO: 180586 - DNA, 1785 bp, Homo Sapiens
  misc_feature (313)..(347): n is a, c, g, or t
  misc_feature (467)..(478): n is a, c, g, or t
ttggctcagaatggagagtctcccccgctccagttattggaatgggagaggaaggaaagaacagcttttttgtcaaggggcagcttcagaccatgctttcctgtttatctatactcagtaatgaggatgagggctaggaaagtcttgttcataaggaagctggagaactcaatgtaaaatcaaacccatctgtaatttcgagtgggtggagctcttgcttttggtacatgccctgaatccctcactccctcaagaatccgaaccacaggacaaaaaccacctactgggctctctcctaccctgccctcctccnnnnnnnnnnnnnnnnnnnnnnnnnnnnnnnnnnngctctttagaacccagtgaaaaataccagggtactggggtgcaactctttcttatgataggtcattagtgctttaagcaaaagatattagcagctttgactgcagcattagcaattaggnnnnnnnnnnnnttaagttccctgcggacatgtaactttgccatcagttttgatgtggaaacactgtgatatataaaatgttgttggacaacagtagttttaagagtaaaatatgaaacgtttaaaaagttccaaaaaaagctagctctgtcctttacttattgagacactttaactttttcctttgtatttccattgtattagataaataaatgtgaatgtaaaattgtataaattactgtacttgaatacttctgtttcccagtgttgcttgctggacattttagtgccttggacttctattgcttctgccattagcatcaacttaccagaccccagatcaataaagggcatgtggaaggaaatcgtaggtccatgtgaccccagcagtccagcagtggttatgccaaagggaaattgaaaaagtatttttttaagtcattcaacaactttgtctagagcaggtgtaagatgagtagggtgggaagttaggttggcatcagtggttaaaaacagaaagttctgtttcgggaatagtgaggagggggtgttgtaacaaaattggacaacttaaaagaatggtgtgtgctgggtgaaagacaaagactaaagaatgaggaaacaaacgtgatgcctggccagtgactgtcatataaacctttcttatttgagctaggcttgaacagacgtgacctagaagaaactgaacataaagagaagggggtggggggctagttttcaagttggggaacctgatagtgaaaagtcacagatggagaaaattgctctcagaaaaactgtttggattgctttcctcttgttgcacatgtaccatgcatttctcagcttggggtactacattttgtggaaagttaatctatctatctttccacatctgaattaatcattctaggaaagaatacttattcctactcatttcctttatgatgtccaaatggttgcaggatcataatctattgtgccacctttatttctagaagtacaactaatatgttcacattttcaaataaataatactccccgtaagtaataactgcaaccaatcagtgttattcagtgctatgcctccttgtaatgggtagttattaattattttcagagctttccggaaatactgtcctaactggctatgtttaggatctttgttatctctgaagacaaaagaaagaagctaggactcttaattttggggtgcttcttgactcttagttgggaaactgaaaatatttccacccttttacccacgtcaatgggcatattctgggaatcacaccaccaccaccactaccacagaaaga

SEQ ID NO: 180587 - DNA, 1554 bp, Homo Sapiens
gatacacacatacccacacacaatatggttgtaaatacatggaatatctctggaatgatacatcagtaactggtaacagttgttactttttgaaaatgggaccagggaactgaggccaggggtgagaaggaggaagagagacttactttttaatagtatacccttttatactgtttgacttttaccataggcatgtgttatttttctaaaaaacaatttatatattaaaactgtaaaaaagaatcaaaatagataccagctttatagctgatagagctggattggagaacatggcttggacctgaggctgaaatgaacttctatcataagtctaacgactttgggattcccccaccccaaggagagatagttgggtctagaaagcagatgtttacccagccatgtagtgaaggactgcagtctttcccacatcttgctgtgtggaacgaactcaagatccaagagtggcctaagctgcctatccattataaccattttctcaatctcatcaagttattcctcctcccaagcataagattgaatgagtgtaagagaagatgggtagaactttcttccaaacatttttgagagatgcaagtcttttccttttcttgagtcaggagcatggagagaggaagaggatagatcccatcatacccttgtacattttcattctcttaagccacaatggttaatgctcaagactctggtcaacaaacagggctgtggctgtccccttccagggagaccaacagtatcttagaaaagttctgctcccatcaatgtaagattggtgagcagttgtttttgcccccaagaggctctgaaataagtcaaaatagaacagtaattaaattaactctaaggctacattacaccctagactgaaaatttgatcacaattgcagccctaatttacaattatgtccagccatatttcctgacatagctgacaacaattatacaatgactcccaaagatagcattaaaatactccaaataatacaatatcaacaacataataaaaatgccttagtttgaactatatgacctcacccccaccccatcaactattaaactccaagggaaaaaggactgcccaaaattaaatttctaattcaaagtccaaaataattaaagtccaaaattctgcctttcccaatttctcgtttttctcatttcagccatatagatctcacaaagatgtctgcccagatatggggttccttcagcagctgcagccttggctgtcttcctcttgactgggtgaagttccttcaggacctcaggagttgaattaatctaaccccacaattgcatgtcatacatattaaagagtccaaagggtcaagaagacataagattatcacaatatcaacctcacatcaaaaaaattagaaagcacactagtccccagccactagaacagtttttttaagcaaatatatgaccccaggacttagaacatagggcaatacagacccacattgctgttgtcagtcaaacatcatattagagacttagtggcatcaaaaagcaaaagttgtcatccaa

SEQ ID NO: 180588 - DNA, 2096 bp, Homo Sapiens
  misc_feature (566)..(611): n is a, c, g, or t
  misc_feature (1819)..(1897): n is a, c, g, or t
ttggctaacttcttctgtgcttctgatttgcccttgcaggtgtttttccaggtctgaccacctggccctgcacatgaagaggcacctctgagggagcagagaggtggatcctgtaggctaaaaggcttccaggctgagagccggccgtggaaggagggatgcgtgttccagccaaagcatgccgttctgcaccctacccagttgcctccagggcctctccttggaaggtcttttgagggctaaaaaggtcctgtaagaagcggcatagcacccgtggtgcatggtatgtgggtgaccctggactcgccactggtacccgcccttccgagcggcgcctaagcctttgccgtgagcatgcacactgagaatgctaatggttgggttgattgtatgttgaggatctattactgaccgtatgatgaggccaacttttttttccttgtggttagcaagactgcaagagatggaaaaaaagtagtttgaatgttttgtgtgtaaggagtataccatgagatgagatgaccaccaatcatttccttggggggagggggtgtctgcaccttagnnnnnnnnnnnnnnnnnnnnnnnnnnnnnnnnnnnnnnnnnnnnnngaaggaaaatcttggagggtgggcgtgggaactcaggaccccagagtggcgagtggtgtggggagggagagcctctctcccccttttctgtgtgagaggaactcttagtgtctggtgcagctattaaatgtgcaatgtgtcaagtagcttgttttacacgctacaacatagctcatttgtaacccattgtataagctgtgtatttacaaatataacacaacaatttaacttttccttagaatacaaaaagtcatgcatggtctggggaactatatgcttttccatttttaagtcaggactgcaatactgattccagttaatgagcagctaagatccaatctgtctaatacagtgaccccctagccatccgggcctggcaatatacaattttttttcccctccaagtttgtaacactccccttccagaaaggcattgtgcaacacaggattatttttaaatgattctgaatttgaattaactttttggagaattctgtgatgcccttagaagaaattggacacgtattgagtgtcacaaagctggggctgggaattgctggtctaatgtttcattagacttaagaacctaaaatttttctcagttgggtggataaaaccactaacgcttagaaactgttttctcatgcagctatgtttctcttatttatgccttgaggactaatttctggttttctagctgttaatgcactgttgaccttcataatggtgccttacgcaagcgatcccttctgtgggggtctcatacaggggtgtgggcgatgcatgctttattaaggctcttgtttcacctggcagtgtactgtatcaacgtataatacagaaaaaaaatctctttaaggtcctccttcacaaagacatagagtgaaactccctttacatgtcagtatttgttcaacactttaggcaacttgactgtcagtgttaaaatggaaaacaggaaaatggaaaaatctgaccaattctgccaccttgagactttcatatagaccttgcacaacaattgtatagatcacacaccggctgtatttaatatgtaacattttcacacatattaaagatacagaagtattaaaaaacccccaatgttaatgtatttgcttaaaaggcacaagtttcacatatctgtctagctatctgttggtaatacagaaagtatactacttttttaaaaaagtgggcagaattcnnnnnnnnnnnnnnnnnnnnnnnnnnnnnnnnnnnnnnnnnnnnnnnnnnnnnnnnnnnnnnnnnnnnnnnnnnnnnnntttttttaaggagaaactagaatgtttagctagaaaattccacagcctgtgaagaaatatttcaaaatggccataaaggaggtaaaaatgaaaaccataacctaacttttatagaggctttatctttaatttaacgatgtgcggaggactttcttgcttgaatctgttccgggctgtctgctctgtccatcaaatgggc

SEQ ID NO: 180589 - DNA, 1405 bp, Homo Sapiens
  misc_feature (421)..(429): n is a, c, g, or t
  misc_feature (540)..(617): n is a, c, g, or t
  misc_feature (1212)..(1221): n is a, c, g, or t
ttggggactaatttctggttttctagctgttaatgcactgttgaccttcataatggtgccttacgcaagcgatcccttctgtgggggtctcatacaggggtgtgggcgatgcatgctttattaaggctcttgtttcacctggcagtgtactgtatcaacgtataatacagaaaaaaaatctctttaaggtcctccttcacaaagacatagagtgaaactccctttacatgtcagtatttgttcaacactttaggcaacttgactgtcagtgttaaaatggaaaacaggaaaatggaaaaatctgaccaattctgccaccttgagactttcatatagaccttgcacaacaattgtatagatcacacaccggctgtatttaatatgtaacattttcacacatattaaagatacagaagtattnnnnnnnnnccccaatgttaatgtatttgcttaaaaggcacaagtttcacatatctgtctagctatctgttggtaatacagaaagtatactacttttttaaaaaagtgggcagaattctnnnnnnnnnnnnnnnnnnnnnnnnnnnnnnnnnnnnnnnnnnnnnnnnnnnnnnnnnnnnnnnnnnnnnnnnnnnnnntttttttaaggagaaactagaatgtttagctagaaaattccacagcctgtgaagaaatatttcaaaatggccataaaggaggtaaaaatgaaaaccataacctaacttttatagaggctttatctttaatttaacgatgtgcggaggactttcttgcttgaatctgttccgggctgtctgctctgtccatcaaatgggcaggtctggaatggggcaccttcggccgttcagaagtggcctgaacagaatgctggaacccaggctggactcggacacactaaggttttgattttgaatttcagccttattagaagatctaacctaagagtaagctaaccacagggattcttttgtagaacactttttatgcagatgaagctattttttccagcaagtagattcttccagtttttccaaggagtaatttccccgaattggcataccacggcgtggacagctgatatttcacccagctgctggcttgtgggtgtggctctttgctttatatatatatacacacatgtgagtctggctgggctggtattttgtttgatcttcctggaaatgagcagtgactaacgctcacataactggnnnnnnnnnnatctgggctgatgaatacatttacctaagaaactcatttcgttttacttaagaggggaagtgcagttttcttttggcagttcagaatccaagcacttgatttgctgggtttggaaaactccttttttggccttctatgtgcttagccataacaattccattaagcaagaaggtaagcaaaagac

SEQ ID NO: 180590 - DNA, 1393 bp, Homo Sapiens
  misc_feature (528)..(605): n is a, c, g, or t
  misc_feature (1200)..(1209): n is a, c, g, or t
ttggctggttttctagctgttaatgcactgttgaccttcataatggtgccttacgcaagcgatcccttctgtgggggtctcatacaggggtgtgggcgatgcatgctttattaaggctcttgtttcacctggcagtgtactgtatcaacgtataatacagaaaaaaaatctctttaaggtcctccttcacaaagacatagagtgaaactccctttacatgtcagtatttgttcaacactttaggcaacttgactgtcagtgttaaaatggaaaacaggaaaatggaaaaatctgaccaattctgccaccttgagactttcatatagaccttgcacaacaattgtatagatcacacaccggctgtatttaatatgtaacattttcacacatattaaagatacagaagtattaaaaaacccccaatgttaatgtatttgcttaaaaggcacaagtttcacatatctgtctagctatctgttggtaatacagaaagtatactacttttttaaaaaagtgggcagaattctnnnnnnnnnnnnnnnnnnnnnnnnnnnnnnnnnnnnnnnnnnnnnnnnnnnnnnnnnnnnnnnnnnnnnnnnnnnnnntttttttaaggagaaactagaatgtttagctagaaaattccacagcctgtgaagaaatatttcaaaatggccataaaggaggtaaaaatgaaaaccataacctaacttttatagaggctttatctttaatttaacgatgtgcggaggactttcttgcttgaatctgttccgggctgtctgctctgtccatcaaatgggcaggtctggaatggggcaccttcggccgttcagaagtggcctgaacagaatgctggaacccaggctggactcggacacactaaggttttgattttgaatttcagccttattagaagatctaacctaagagtaagctaaccacagggattcttttgtagaacactttttatgcagatgaagctattttttccagcaagtagattcttccagtttttccaaggagtaatttccccgaattggcataccacggcgtggacagctgatatttcacccagctgctggcttgtgggtgtggctctttgctttatatatatatacacacatgtgagtctggctgggctggtattttgtttgatcttcctggaaatgagcagtgactaacgctcacataactggnnnnnnnnnnatctgggctgatgaatacatttacctaagaaactcatttcgttttacttaagaggggaagtgcagttttcttttggcagttcagaatccaagcacttgatttgctgggtttggaaaactccttttttggccttctatgtgcttagccataacaattccattaagcaagaaggtaagcaaaagac

SEQ ID NO: 180591 - DNA, 1094 bp, Homo Sapiens
  misc_feature (543)..(668): n is a, c, g, or t
  misc_feature (736)..(770): n is a, c, g, or t
ttggctccgatcttgtcaatgaagaatcgggccaggatcgccgcggagcggacgccgaccctccgacccggctcgcaggctgggagtcccctctgcgaggctggcatggccgcccctaccgggtcccgcgccctctgcggaccctgccccgggttgggcctggcccgcgggcggccccgggaccgggggaccaggagggagagtagacgcgggccgcggacggcgcggactgacagctggcgagagggcgccggggctgggggaaagggagggagggggctcatcggagtaactttccagaaaaacagccaacgtgtggcaggagtgattccaagaggggaaaaaaagttcagctaccacgtcgaacgagaggactcgcaaagtatttttcaaaagggctcggcttttcctgtgcctgtttaaaacattaacatcgtgcagcaaaagaggctgcgtgcgctggtccctccctcccccaccccaggccagagacgtcatgggagggaggtataaaatttcagcagagagaaatagagaaagcannnnnnnnnnnnnnnnnnnnnnnnnnnnnnnnnnnnnnnnnnnnnnnnnnnnnnnnnnnnnnnnnnnnnnnnnnnnnnnnnnnnnnnnnnnnnnnnnnnnnnnnnnnnnnnnnnnnnnnnnnnnnncaggggaagaggcgtgcgagagaaggaataacagctttccggagcaggcgtgccgtgaactggcttcnnnnnnnnnnnnnnnnnnnnnnnnnnnnnnnnnnnaaagagaagcaggggacagaagcaatggccgaggcagaagacaagccgaggtgctggtgaccctgggcgtctgagtggatgattggggctgctgcgctcagaggcctgcctccctgccttccaatgcatataaccccacaccccagccaatgaagacgagaggcagcgtgaacaaagtcatttagaaagcccccgaggaagtgtaaacaaaagagaaagcatgaatggagtgcctgagagacaagtgtgtcctgtactgcccccacctttagctgggccagcaactgcccggccctgcttctccccacctactcactggtgatc

SEQ ID NO: 180592 - DNA, 1738 bp, Homo Sapiens
  misc_feature (1352)..(1365): n is a, c, g, or t
ttggctaggagtctatagtcttgggatcaaatcccttttcttgttcattagggcaactttatgtcttctctgtttacttgagtagggaccacaaagagggaaaaaaggatgtttctgacaccaaatatgagcttatcttatggtcagaatgaaagaggttgcttatcagtgagctgaaaactaaaattatagaatgaagcctggaaaccttcctcaaagtaacttgatggtggccatgcaatgtaatgttcctctttgtctgaaccttcctcttcttgggatgaattggtgaattgctaagggccaatgctggccttggagcttgcaagcaaattaattttccagtttagtctcttaagggttcaataatgctcttggagtgagttgggtatttttaaaggctgaagtttggactaccggaggatagagcaattgaagttcgagcaggatggagaagccactctaagtctcttcatctggacacgaattctctggaggcattagcagcagcacctctgggtcaacacagatttactggattccaaaatctagcaaggatctgagctggttaactcagagggtggagcatgatgctaacaagacggtttatcattttggacccctcacaaacacacttctctttagcagaggtgacattccttaggctaaataattggatccagggacataacagatttgttgagagaaaatgtggcagtgccttcacccgggacagtggtcaggaagccctgagcatccctgatggatttatccatcctcttctgaagtgctctgctctaggctgggtcctgttgccacctgcctgttctctggttggcttttgcaggagggcagcttacgtgtttgtcaaccagttagaaagccagttcctgtgggtcgagtttaggcctttttggccatagttgagaattttgacttgggatactgggttgttggtgacaaataatgtcttccttttcccccttcccgcctggctcggttatgggaatagccgtcagtgcatccatgtctgtgaccaacacccagccagactaatgtacacagcagggagaaataacattcaaatggtggttcacacatctcatctcaagataagattcttagggttcactgctttattcaaaagtgttttcactgtagctccttcatatggaatatcaaaactgaagaaattcacatgtggaaatgcaaatagacattgattaatcaaggtagcatctttatgtaaatatataaataagtttgggcattgaaatgtaaactgtacagctaatagacttttctcctctgcaatgtgggttgctgtcatttcagtaatgtgtatgtttacnnnnnnnnnnnnnntctgtgtttcgaggttgaagcctcaccttttattctcctttacatgcaaccctctcttcttgcctctcaagggttgaggggtcctttctgtcaagtaatggttatttttcgtggtatcctgaggttcagggtgttttaagctgggggtaggtggttagaggcaggagtagaagtgaaaggaaaggtctgattctcctagaggacacaagaagacctcctttttctggaattagggaatctgccggaaggagctgtttgaggcatttctgctctgagccttctatatgcaaacactgcagttttaactgcaagctcagaagtgctggtgtaaacatagcaaggagagaatgaagttcctgttttttcctttgaa

SEQ ID NO: 180593 - DNA, 1341 bp, Homo Sapiens
tttctctaccaggtctttcccactggaatctcacctcggccacgcaagttcatcttctgaaagagaacattactaactcatgtgttttcaacgagttttccaatacacacttgtcacaaactctaggtacatttagaattgcaagaatgtttattaggtcagaggatcaaggttatatttcttccatgctcactgtggtttccaatgcaaattctcaaaagatatactgggtcacacataccaatttcagatgacttcctctgagagagctgttcagcttgggcttgttctaattcatgtctagaattaatcatgcttgtctcagctgacctgcacattctcatggagaaaaaaaatgatttcttacaaatatgaaacccagctaggtgaagtttcatttgtgaatttcaccagaggcatgggcaactttaacctaagtcatgggtaaataaactgaaaaggacaaggtgattacctgaacttgaaagtgcaagttggttacaggaccagaaagtacttgtgaattgcaatctcctactcctctaagccaacccaaaatggagagagaaattaattaaatcatgattttgataattatttaaaactgccatagacagtaaagctttggctacaaacgtttgttaatatatttgatgatgaataactaaactttcaaggttaacagttttctcaaggttcttcaatagctcctccaaactctagcccagaggggagggacggatgtgggaaccaagatgatcagcacaagaaagccagttccccaacacggcccttccactaggatgtgctcgattgtttgtgtctgaagagaggagaggaaccaagcagcattttacttcatttggtgctcattaaacagctggccgagaaaaacagtcacccaccacaggtactaagctacttcaacctataccatgctatgatggccagcctggcaagttctcagtggaacaggggactggttaatagcctgccaccttgtaagtgggtctaactcaatgatggaggtggtctgctggctgatatccaggcactgcagacacagtgagtcaggacagaccaaccaaggggcccatcttagttctgccctgacatcctaaggcagtggtccaagcctccatcacaaagatcatgatgatctctcctttctgtgaatgcctctgatattaaaaatctgcttctctcatcctggcaattcattagatgctgtactacagtgtgacttcaactgtttcatgtctgtgggcctcacgttctggattttccttctttttgtaacttttcttgtcttatgcactgtagtgcaatacatatagccag

SEQ ID NO: 180594 - DNA, 1500 bp, Homo Sapiens
ttggctttcatttctccatacaaacacttccgtgaaactcttttttgttatagtccacaaacaatgataactatctcagacttccaattatgttactttaggaagtctgtgatttgggttggcttgctgttctcaaacagcggttagcttgaccaacttttttatttggtacgatgggctttgggatgtgaacgtgctttctcttgacatacgtttctgttcttgtgcccaccttatttccccctagcgggcagtatgtatgagtgtgggttggtgattttaagttaccatctgtatcacatccctagcgcttcctttccctttgtaagatttcctttgtttttagaatcctctcatattggttattcgacggtctttgtagataattatggagtacctggagcattttggctgaagtggaatgctttacatgtctttatcctttttgaagcttatctgattggttgtacattcccatgcattagaaacagatcatctagtaatatggaacatccagtcagcttatcttgcagagttcaggaagtacatgtatcttccggaagtatcttctggcgttcaagaggaattttctaatggaaaaccaaaatgttgtaattttgagaaatcttttttaaagttaaattgattgaggtatgataatatagtaagagtaaccctttttgctgtataggttctgtgaattttgatgaatttaagtcctatgatgacaatcaagaaaaaataatgtagttttaattttcatttccttgatgactaataataagcatctttcctgtgcttatgtgagtcatctatatatttctttgatgaagtgagttcagattttttgccacaatttctagattgtgttgctttcttattactgagtttctagagttttctgtatattctgagtaatagtttttaattaggtatttgttttgcaactatttttgctgagtctgtgactttccatttcattttcttttgattttgactttccattttcttaatggtgtcttttgaagagcagaaatgtttgatttttatgaaatccagtatatcaatttttctccttaaaggcttatgcttttttagttcttctgtatggagaaagatatggatcgaggttcttaattttgatgaatggatgccccatttttttctgcaccatttgttgaaagactctcttctccattgagttgattggcatatttgtaaaaatcctgattactattaatatatatgtgtgagtttatttctggactgtgttccattgactcttaagtgtctgactttttgccaataccacgctgtcttaaaaattgtaaataggtaaatcatgaaatcaggtagcatcagctcttcaatttggtactttttttccaaaattgttttgacttctaggtgttctctttttccatgtaaattttagagtcagcttgtcagtttctatgaaacttgctggaattttgacagcattgcattgaatgtgtagat

SEQ ID NO: 180595 - DNA, 1143 bp, Homo Sapiens
  misc_feature (943)..(959): n is a, c, g, or t
ttggccatttacatgtaggaaagaaaagttgagcttcaacccaatgtgccactttgatataaaacaagtatgatatatatataaactgaagatataaaacaagtatgatcttgcctttgaaatcataaatgtttggggtacctgttctttgccagttaagatacatatcttattatctttgtttttttcaagtctatgctcctgtttgaagcttttcctgtaatttaggttgtctgtgaaatacctataacatataattcctatagagtatgccacattttttttctaactcatttcaaatgaaattctctcagattctagtttttgagcttgtccactagatctgaaaataaagcatcctttcctgagtccacttgaactaattgtgaatttgttacttaatttactggcatcttgggaaacaagttttgctgtggcaggaaggctgttttgagagtgagcgttgagtctactctggtttgtggatgacattgcattagggttatttcctgtattaccagtgcccccttgtggcaatatactttatgacttggaatgcaaacaccacttttaaaagcctgttttcaagtttttgaaaggcatttgttttctgttgtttgccaataatctgaaagtatcatgtgaaaggaattattttaaaagcattttaaacctttcccaaaggtaaaatgtgctcagattataggcacttgtaattctaaccttgtatccatttgatcaaagaaaatttgtagaacatttttacctctcatgatcacaatcattagtgtctccctttataacgacctatgttttgtttactttgaaacaccaaatttgttgtcttggttttttttacatgacagaactcatgcagtttcttttttagttgaaagttcacatcttgccccttgaatagtttgaacatttctttcttaattcnnnnnnnnnnnnnnnnngcactgtaaaactgatgaaaactttaagccaatcttaatgcactagcctctgtagtgtaaggaagtgtgagaaggagtttcttaatgagtttacacgtttaaatcaagcatattataagttatatgccatgtgttgaagctttttctatttatatatataaagattttagtatttgttttagtg

SEQ ID NO: 180596 - DNA, 1078 bp, Homo Sapiens
  misc_feature (100)..(116): n is a, c, g, or t
ttggggtttttttcctatgaaagaactcatggagtttcttttttagttgaaagttcacatcttgccccttgaatagtttgaacatttctttcttaattcnnnnnnnnnnnnnnnnngcactgtaaaactgatgaaaactttaagccaatcttaatgcactagcctctgtagtgtaaggaagtgtgagaaggagtttcttaatgagtttacacgtttaaatcaagcatattataagttatatgccatgtgttgaaggcttttctatttatatatataaagatttttagtatttgtttttagtgtccttgtgttgcaataatttaactcctttgactcagttgctgaaaatatttcttctattaagaagtgctcttgacttcaacacccaaacactgaaaatcatgtcaatgttacccaaagataagtttttatacagatacacaccttataagttctgatttattttcttactcattatgctgtgttctaaataaatcatgaatgagaagagtgctttattgtgaaattattaaaactgtcctttaaaagaaaaagaggaaacgatgaacaaaaactaatctaattgccaagttagaattcattatttaatttacctcctatgcaatgattaatgctgcaaaatgtatggttatgttaccgtatattcacaaaagaaatattattacaaggtttcagaggtagccaattgcattcttttggaaatttactgtactgtttcaatgtgttaagtgccttgttgtaaagtaaaattttaagtctagattcattattttcctgacatatatttttcattatgatatctactgtatgctattgtgatagttttatgaaatgcttacattttaatcaaatatgtaaatttcagaagctcttttttcctacccaccagtaccttaatcattggtttatcacattggattcaaattcagttccttttttgataaagaggaaatttgttttccatgcttgtgattttgtgtttgtaaacatttcggaaggatttaggagtgtaactatagtttatacttctataatgttgtcttacatttacattttt

SEQ ID NO: 180597 - DNA, 2854 bp, Homo Sapiens
  misc_feature (1828)..(1836): n is a, c, g, or t
  misc_feature (1869)..(1885): n is a, c, g, or t
ttggagaaaacactaacagtgtagtgcccatcatagcaaatgcttcagaaacacctcaataaaagagaaaacttggcttgtgtgatggtgcagtcattttactggaccaacccacccaccttgactataccaaggcatcatctatccacagttctagcctaacttcatgctgatttctctgcctcttgatttttctctgtgtgttccaaataatcttaagctgagttgtggcattttccatgcaacctccttctgccagcagctcacattgcttgaagtcatatgaaccactgaggcacatcatggaattgatgtgagcattaagacgttctcccacacagcccttccctgaggcagcaggagctggtgtgtactggagacactgttgaacttgatcaagacccagaccaccccaggtctccttcgtgggatgtcatgacgtttgacatacctttggaacgagcctcctccttggaagatggaagactgtgttcgtggccgacctggcctctcctggcctgtttcttaagatgcggagtcacatttcaatggtacgaaaagtggcttcgtaaaatagaagagcagtcactgtggaactaccaaatggcgagatgctcggtgcacattggggtgctttgggataaaagatttatgagccaactattctctggcaccagattctaggccagtttgttccactgaagcttttcccacagcagtccacctctgcaggctggcagccgaatggcttgccagtggctctgtggcaagatcacactgagatcgatgggtgagaaggctaggatgcttgtctagtgttcttagctgtcacgttggctccttccagggtggccagacggtgttggccactcccttctaaaacacaggcgccctcctggtgacagtgacctgccgtggtatgccttggcccattccagcagtcccagttatgcatttcaagtttggggtttgttcttttcgttaatgttcctctgtgttgtcagctgtcttcatttcctgggctaagcagcattgggagatgtggaccagagatccactccttaagaaccagtggcgaaagacactttctttcttcactctgaagtagctggtggtacaaatgagaacttcaagagaggatgttatttagactgaacctctgttgccagagatgctgaagatacagaccttggacaggtcagagggtttcatttttggccttcatcttagatgactggttgcgtcatttggagaagtgagtgctccttgatggtggaatgaccgggtggtgggtacagaaccattgtcacagggatcctggcacagagaagagttacgagcagcagggtgcagggcttggaaggaatgtgggcaaggttttgaacttgattgttcttgaagctattagaccacatcgaggctcagcagtcatccgtgggcatttggtttcaacaaagaaacctaacatcctactctggaaactgatctcggagttagggcgaattgttcaagaacacaaactacatcgcactcgtcagttgtcagttctggggcatgactttagcgttttgtttctgcgagaacataacgatcactcatttttatgtcccacgtgtgtgtgtccgcatctttctggtcaacattgttttaactagtcactcattagcgttttcaatagggctcttaagtccagtagattacgggtagtcagttgacgaagatctggtttacaagaactaattaaatgtttcattgcatttttgtaagaacagaataattttataaaatgtttgtagtttataattgccgaaaataatttaaagacacnnnnnnnnnctctgtgtgtgcaaatgtgtgtttgtgatccannnnnnnnnnnnnnnnnaggacacctgtttactagcctagctttacaatatgccaaaaaaggatttctccctgaccccatccgtggttcaccctcttttccccccatgctttttgccctagtttataacaaaggaatgatgatgatttaaaaagtagttctgtatcttcagtatcttggtcttccagaaccctctggttgggaaggggatcattttttactggtcatttccctttggagtgtagctactttaacagatggaaagaacctcattggccatggaaacagccgaggtgttggagcccagcagtgcatggcaccgttcggcatctggcttgattggtctggctgccgtcattgtcagcacagtgccatggacatgggaagacttgactgcacagccaatggttttcatgatgattacagcatacacagtgatcacataaacgatgacagctatggggcacacaggccatttgcttacatgcctcgtatcatgattgattactgctttgttagaacacagaagagaccctattttatttaaggcagaaccccgaagatacgtatttccaatacagaaaagaatttttaataaaaactataacatacacaaaaattggttttaaagttgactccacttcctctaactccagtggattgttggccatgtctccccaactccacaatatctctatcatgggaaacacctggggtttttgcgctacataggagaaagatctggaaactatttgggttttgttttcaacttttcatttggatgtttggcgttgcacacacacatccaccggtggaagagacgcccggtgaaaacacctgtctgctttctaagccagtgaggttgaggtgagaggtttgccagagtttgtctacctctgggtatccctttgtctggaataaaaaatcaaaccagaacgccggatggaatggatgcaccgcaaataatgcttttctgattttcttgtt

SEQ ID NO: 180598 - DNA, 1178 bp, Homo Sapiens
  misc_feature (204)..(220): n is a, c, g, or t
  misc_feature (1067)..(1080): n is a, c, g, or t
agcccaggggtacttcaagcattccttcggatgcttcactccagaaagagggagttgaggcaagtccttcattactaataaaaatcaggtgaggctgacacttctcttgacttaggataatagcgctttgttgtctctcctgccacaggaaggctccatggttgtctactttaagctttcggtgcctttagtgaggggtactgnnnnnnnnnnnnnnnnnggcttagcgcccacctcacccctccacccccacgccaacacagtttgctcacatgccagttactccagcataaagctgaaatctattcaatactattgtcccataactgatctgactttgtatgtaaatacagaaaaagcttgttcacctgttttcctcattttgtccactggtgaattcaactggaagctccttctatagtctgaagaataccatctgaaagaactagtggttcccaatccccacatttaaaatggaatgtttggtttatttaaagtaaataggctattttttcttactgggtctggcttctctggcccttcgcatacgtgtgtctgctgagtgttcctgcatgtaagaattaagaccaagggaggggagagagaaacccacacataaacaatgcactaaagatcactgaactgtttaaacatttccacttgccagtttaatttcttgaagactgttgcttgtttggaatgtttcttgtcactgattttaaggttgcatctggaaaagactaaaggcttcagtcccctcccaccaccagaaatgaacaaaaagcattttacctaaaaatacaccagcaaaatgtactcagcttcaatcacaaatacgactgcttaaaactgcagaaatttcctcaacactcagcctttatcactcagctggattttttccttcaacaatcactactccaagcattggggaacacaacttttaatcatactccagtcgtttcacaatgcattctaatagcagcgggatcagaacagtactgcatttacttgccaacagaacagacagacctgaagtcaagacaactgcattctctgtgaagtctgtnnnnnnnnnnnnnngctacaacaagtaagccccaccccctcctcccatccctccaaattccaggaaaaaaattttgagtatgctgataaactcactgcaaggtctcatccaa

SEQ ID NO: 180599 - DNA, 1903 bp, Homo Sapiens
  misc_feature (115)..(126): n is a, c, g, or t
ttggctgttctagtgagtgtatgagaccttgcagtgagtttatcagcatactcaaaatttttttcctggaatttggagggatgggaggagggggtggggcttacttgttgtagcnnnnnnnnnnnnacagacttcacagagaatgcagttgtcttgacttcaggtctgtctgttctgttggcaagtaaatgcagtactgttctgatcccgctgctattagaatgcattgtgaaacgactggagtatgattaaaagttgtgttccccaatgcttggagtagtgattgttgaaggaaaaaatccagctgagtgataaaggctgagtgttgaggaaatttctgcagttttaagcagtcgtatttgtgattgaagctgagtacattttgctggtgtatttttaggtaaaatgctttttgttcatttctggtggtgggaggggactgaagcctttagtcttttccagatgcaaccttaaaatcagtgacaagaaacattccaaacaagcaacagtcttcaagaaattaaactggcaagtggaaatgtttaaacagttcagtgatctttagtgcattgtttatgtgtgggtttctctctcccctcccttggtcttaattcttacatgcaggaacactcagcagacacacgtatgcgaagggccagagaagccagacccagtaagaaaaaatagcctatttactttaaataaaccaaacattccattttaaatgtggggattgggaaccactagttctttcagatggtattcttcagactatagaaggagcttccagttgaattcaccagtggacaaaatgaggaaaacaggtgaacaagctttttctgtatttacatacaaagtcagatcagttatgggacaatagtattgaatagatttcagctttatgctggagtaactggcatgtgagcaaactgtgttggcgtgggggtggaggggtgaggtgggcgctaagcctttttttaagatttttcaggtacccctcactaaaggcaccgaaggcttaaagtaggacaaccatggagccttcctgtggcaggagagacaacaaagcgctattatcctaaggtcaagagaagtgtcagcctcacctgatttttattagtaatgaggacttgcctcaactccctctttctggagtgaagcatccgaaggaatgcttgaagtacccctgggcttctcttaacatttaagcaagctgtttttatagcagctcttaataataaagcccaaatctcaagcggtgcttgaaggggagggaaagggggaaagcgggcaaccacttttccctagcttttccagaagcctgttaaaagcaaggtctccccacaagcaacttctctgccacatcgccaccccgtgccttttgatctagcacagacccttcacccctcacctcgatgcagccagtagcttggatccttgtgggcatgatccataatcggtttcaaggtaacgatggtgtcgaggtctttggtgggttgaactatgttagaaaaggccattaatttgcctgcaaattgttaacagaagggtattaaaaccacagctaagtagctctattataatacttatccagtgactaaaaccaacttaaaccagtaagtggagaaataacatgttcaagaactgtaatgctgggtgggaacatgtaacttgtagactggagaagataggcatttgagtggctgagagggcttttgggtgggaatgcaaaaattctctgctaagactttttcaggtgaacataacagacttggccaagctagcatcttagcggaagctgatctccaatgctcttcagtaggggtcatgaaggtttttcttttcctgagaaaacaacacgtattgttttctcaggttttgctttttggcctttttctagctt

SEQ ID NO: 180600 - DNA, 1359 bp, Homo Sapiens
ttggctaaatatgaaattctcaatatggtataaacccttatagagctttatagaaaaacctggatttaaaatcttgctttgttacttactgattgtgtaacctcagacaaattacttagtctttctgattgtcaattttcatttataaagtagaatttaagaagaaatctatttcattattgttttgtgaggaaatagtatatataaaggttttagcatagaatatggaacatattaagttcttagtaaagagttgctgtttctgctaacagtataggaaatattgcaggattagttcactaattttatctttgtacatctttagacttcagttttctgttacacagttttataactccagtacttcatgactaagcatttctagattcaagaaaaatttagtataacattattttcatttgtctagagagaaattgtgcacatatctgaaattcaaaacaaaggtggcagttcgtagtttggttatgaattacattagaaaatcaagatgtatataggtacaaagtacgtgagccttataactccccaagtcctaacacttactactgttgcaattttacatttatttatctgttgatttgattaatttatgtttctggattttaatttccatgagggaagggactagttagtttttaccattgtattcctgccacatagcaggtgcttatgatatagtttgctgaaacggatgaatgaatataaattaagaagtatggacatttaagttacacaacaatttattttgactgttaattagaaataaagtgtttttgagctaatatgcctcctctttggttatataacaccttgtgcttttctctctcatgatgattattttgtgttattgttttcttgataatctctcccactggattctttgttttctgaggaaggagaccttgtattttttatttttgtgtttctaatgtctagcacagcattttatacatgataaatagttgataaatctttgtaaaagtaattaaatgaatattgcacaagtaatctctttacaggaaatgctggggctctctaaagtaccacttactcaagcaacacgtggtcctcaggtacagcagccacctccttccaacagattcttacaaccagtacagaaaatagacatgaatctcacagatcttctgggagaactccagcgagacccttggcctgtaccacagggaaagagacctttgcgttcctctggggtggcactttccatagctgtaggactgctggagtgtacttttcccaacactggtgctcgtatcatgatgttcattggtggtcctgctactcaggggcctggaatggtggttggagatgagttgaaga

SEQ ID NO: 180601 - DNA, 1112 bp, Homo Sapiens
ttgggtcattttaagagtatcacttggtacccaggcagaatgtatccttgaggccacctttatgtttaaattatttgcactacttatttttccttttaactctggtcctttcagtctacaacggaacatgattctgtcataataatataactgtaggaactagcaacttctttggcttttagaggctgtactttgcctttatgggaagaatttccatgtcacatgacagagggcatggatatagggagacatgaagaactggggccactgtggtcaaccacggggtttatagctcatatcagtgctcctttttacagattgggtctacaggtaggagaaacagatagtagaagccaaaaccaactttgcagtctttattttcatttcttatcctcttgaagcatgatatgtttacatttcttgtgattcacgcagaattacaaaagtgcatcccttgcttcccctaacatgataaactgcttatggagagtaagtctgcctaagacatgagtaacctggctctgagctcggccagagaaggggaaattagaaattgtcctgggcttttggacatagagaggattcttcttgcgagtggaagatttgacctggagaaggtcaaaaccactgtaacgttagaggcaccagtgccttcaagtgttaagatcagaatccaccaattactgaaactcagctcattttttttctactttatttagaaccttaaaacaggctttaaatgaatcttgatttcacagtgctattttattactatttcattataaataaaacatataggagaattgaactcttaaaaccctaactttgcctgaatgtgtctaggtcagtggctttgtatgactgccgaagtccagatgaaaagccatcgaatgtggcgattcagtgggcagatagagagagtgacttggaatcacttttcaccttgtcatttcttggccagtacagatgacggctttgtatataatttggatgcacgttcagataagccaatttttacacttaatgcacacaatgatgaaatctctggtgagcaagagtaatgctttctttcatttttcttaacttatgatgaagtaaatctgtatttcaaa

SEQ ID NO: 180602 - DNA, 1578 bp, Homo Sapiens
  misc_feature (772)..(1048): n is a, c, g, or t
ttggctgtagctttgtagtaagttttgaaattgggaagtgactttggggagtactgccctcttagcaatattaagtcttccagtgtgtgaacataggatgttttcccatttaatgatgtctcttaacaatttctcttagcaatgttttctagtttcattgtccaagtcgttcaccttttggttaaatttattcctaggtattttattctgttagatgctattgtaaacacaattgtttccttaatttccttttcagattatttgttgctggtgtatagaaacacaactgatttctatgtgttgttgttgtaccctgcaactttgctgaatttgttagctctagcagtttgttgtggattctttggtattttttatatagagagaatcatctgcaaatacagataggtttattcttcttttccaatttggatgccttttctttctcttgactaattgctctgttcagaacttccagtacagtattgagtggcagtgtgaaagtgagcatccttgcctcgttcctgatcttaggggggaagtctttcaccatggagcatgatattagttgtggattttcccataaatgccctttatcatattaaggaaattcccttctatccttaatatgctgattgttttgatcatgaaagagtgagcccattttttctaaagtgaaagtttggctcaaagtaataaagtgctgacctgaaagaacaatgtgcctgtagattgtctttgaagtctctgtgcctccattttttttgagacggannnnnnnnnnnnnnnnnnnnnnnnnnnnnnnnnnnnnnnnnnnnnnnnnnnnnnnnnnnnnnnnnnnnnnnnnnnnnnnnnnnnnnnnnnnnnnnnnnnnnnnnnnnnnnnnnnnnnnnnnnnnnnnnnnnnnnnnnnnnnnnnnnnnnnnnnnnnnnnnnnnnnnnnnnnnnnnnnnnnnnnnnnnnnnnnnnnnnnnnnnnnnnnnnnnnnnnnnnnnnnnnnnnnnnnnnnnnnnnnnnnnnnnnnnnnnnnnnnnnnnnnnnnnnnnnnnnnncctgttcctccattctttgtgcattacttgctgtgatcacactcatctaggtggtggacataatgcgagttaacgtggacaaggttctggaaagagaccagaagctctctgagttagacgaccgtgcagacgcactgcaggcaggcgcttctcaatttgaaacgagcgcagccaagttgaagaggaaatattggtggaagaattgcaaggtaattatcttttaactgacctttacatttaaccccccttctccattctcagagaattaacaggctacagataatggactttcacgactctgggaggtgggtttgacttcctccacatggaaatgtgggtccactgtgaatccgaaacactgactgcataccctttcctagccccacactaggaatcctctatgtgctgtggctgatcttcagaagatgcagtagaacaaggaatatccaaaatcactcacagtcatcagcccctcccaaccctctaccccagcaggccccaaacacataggaaagggctggaattggtca

SEQ ID NO: 180603 - DNA, 342 bp, Homo Sapiens
ttacagtaaggaaaacagaagcccagagagatctgatctggttcccatgtggggtccgaagccactctgcggccattgcctttgtcatcctgcagggtggagacagctttgcctcccttttgcgtttgggatttttcagaataactgtagccagtgcttcctgtttatgagtactgttcatccaaataatccttcgggggtccttctggggggtgtgtgggaggagcaacacaaacacccagcaattggagaaaacagaagaaaagcgataatgtggtctggagactagaggatagctctgcggtcagccctgccctcgggaactgctggggaggtgggatg

SEQ ID NO: 180604 - DNA, 1092 bp, Homo Sapiens
  misc_feature (275)..(531): n is a, c, g, or t
  misc_feature (613)..(789): n is a, c, g, or t
ttgggcatgagccaccgcacccagccagaatattttatttctgttagacacagagcgttcgttgactcgtctgggcgttagtgttaatattctgtacttgaagcaagcccaccaagcggctgaactgggtggataatggaaaatgtcctgtggatttgggagtgagacaaaccggcttgagtctaacctctcagttagtctaaggctccaagcttgaaagggttaaatgaagtactatatttgttttgtttcgttttcgttttgtttgaggcttnnnnnnnnnnnnnnnnnnnnnnnnnnnnnnnnnnnnnnnnnnnnnnnnnnnnnnnnnnnnnnnnnnnnnnnnnnnnnnnnnnnnnnnnnnnnnnnnnnnnnnnnnnnnnnnnnnnnnnnnnnnnnnnnnnnnnnnnnnnnnnnnnnnnnnnnnnnnnnnnnnnnnnnnnnnnnnnnnnnnnnnnnnnnnnnnnnnnnnnnnnnnnnnnnnnnnnnnnnnnnnnnnnnnnnnnnnnnnnnnnnnnnnnnnnnnnnnnntgagccaccacgcctggcctaaatgaagtaccacatgaccgaccgaccgacctggggaacatagcaagaccccatctctacnnnnnnnnnnnnnnnnnnnnnnnnnnnnnnnnnnnnnnnnnnnnnnnnnnnnnnnnnnnnnnnnnnnnnnnnnnnnnnnnnnnnnnnnnnnnnnnnnnnnnnnnnnnnnnnnnnnnnnnnnnnnnnnnnnnnnnnnnnnnnnnnnnnnnnnnnnnnnnnnnnnnnnnnnnnnnnnnntaatccagtcccccccaagaaaggaatgaagtgctataatgagaaaaatcctagtacctaacatatagtagacagtggagagtggttctctttcgtttctcaggggcagacagatggggtgctggagtcctctatcaaagagtcagagctctatcccagatgtgtaatgaacgtggtcacagacatattgtcccattaccatttacttccctataaccactgtgcctcagccttgttgaatagacacataagagcgcccgcatactctaaaaataggagtgagagagggcagggcatgcccgt

SEQ ID NO: 180605 - DNA, 833 bp, Homo Sapiens
tctcttttgctgtatacagatttaaattttcatagagtctaatttatcaaaattttcctgtgacttctgggtttataactcactcttcccataattaaaggttactattaaagtgttctgtatattgtatcctggcatgttaggttttaattgctacatgtagatagttaatctaactgtatttttgtttatgttgtgaagtagaggtttgtctttattttccaaatgtgttctcccaacactacttaataatctacctttctccacagattaaaaatgccatctgtaccataaagttctattttgttccactgatctttctggcccttcttctacctcttctatactacattaattgatcttaggaaatgtacaataatgtacataaccaaccctgcattcatctccctataagtatctcccacgtatcttcacttatatccttttcacaacaaattattagcaattttatatttattcttctagatgcaactcagattcaagattgggaacttctttttcaagtttcctgaatcctactgagactggaataatttgggtggaagatctgacaacttgataatacaatattgacttttttctaatcatttctcaagtttttgctgcatatttgttatatttattcccagatgctctatcacttttctgatgaatttgaatgggatcttttcaactatccttttgattggttattgctagcatgtaggaaacctagggggtttgggtattttgatcttgttttgacctcttggacttcctgaattatcttattgggtctaataactttttgggccaggtgtggtagctaatac

SEQ ID NO: 180606 - DNA, 1309 bp, Homo Sapiens
actttgtacaaaaaagttggcaagaatatccaaattatgtgactaatcagtttagaattggtaaaacaatactgccactgtagtaagaaatacaatggactacgattcaagatacttgagtttcaatctcaactctgcctctactgatgatgtaacctaaaataaattatttcacttctgtgagcctatttccttgtctttagaatacaaagattagagtatatgaattcacaattttgagacaatttcccccacattttagtatctctgaaatcagaatacattagatttgatgaaatacagtataaggtaacctagctctattgctatgccataacacaaaattataaaaattacctagtttttgttttggaattaagcactaagtgatgaagaagggaaaaatgtaactaccatctgccaggcacatagttttatgtagtattcacagtacttctactatcagtatccccagttttcaataatagatgaagaaacagtgagacatgattaacttgccaaaaggtcaagtagccaagctagcatttgaactcccacctgtctaatgccaaagtatgtgctgcataaactatttcaaactgcctctgaataaactgttcaggtaagagtcctccagagaccttttaaagccttagccacaattctgtaagccatgtgaagtaacttacctttagggaagatcttccagttccctttggtctgaaagatgcagatatttaattaaacattatactatgcttctattttttttaacacactggaaataacttttaaaagctgctacatttttattgctgagaaattattgtacttctttttaaatatatgctaaaggggagcgtaaacttaaattctctttaatttgctcaaccagaggatataatttaaagaaattggggtttaccaagattttccatttgtcctccaacagccttggcttgataataagcatacagtatttggacgagtgactaaaggaatggaagttgtacagaggatctccaacgtcaaagtcaatcccaaaacagataagccctatgaggatgtcagcatcataaatattactgtcaagtaaaataagatttgttttaatgtacttgcaaataaaaatacaatattaaacagattattttacattaggaagcttaggacttgctgaatatacagatcatgtttcaaagatacagtatttttgtattttttattaaaggctattttttaaaaattacctttgacttttctcgcaatatttctaatcctgggaggtgataaattgaaatggacccaa

SEQ ID NO: 180607 - DNA, 1372 bp, Homo Sapiens
  misc_feature (915)..(928): n is a, c, g, or t
  misc_feature (1005)..(1058): n is a, c, g, or t
ttggtctttttgcatataactatcttggagtaattaggcatgctcttaactccatttagttgcaaaacacactttattacaattcaaataaacaattggtatttaatttttgaaggcaaaatatttcctacaaaggtataaaatgtctactaacttatttaagctattttatttttcaacgaattttttcctgttgacattgagggatcacattaaaatacattatagctaaatgttctacaatattactgctaaatcaacagaaaaccaattgatcttgaggaaaggttaattaatttgggtgacaggtcttctactttggccagcattggaaggaatttgtattgatctcggcagttttttgcaaagaaacttaagcatgtttgtggaattgagaccaattttttaaaatgccaaaacaagggcttacatttttatcacttcaggacttcttttctgttatggctcgttcaaatctgttagacttctaagaaatataatgtttttatgctttcagtgaaatcaattaggtatctagccttcagaaaatgaaaacagaggttgggagctttactaggatcttgtttgttttaatccctccttccctaataattctcatcagtttatcctgtatgagggggatcacaaagggacaatggaaattaaattttgcctttgatgtaaacactgtattagccatcatgtagaaaatggacggaactgccttctacttccgaacacctgtgagttgtttagtttttgctgaatagaactggtgagcttttcttcttccctatctttggttctgtttttgtcaccttaaaaatgtttcatacctgcccttcctaaatgcaaggtgagagtaacaattgcagctcccctcccctgtcctatgctcactcccaaaacatttgnnnnnnnnnnnnnngtaaaaatgtttgctcggtagcgttggtgggtccgagcgccaccggagctgtacacttgggtcaggaggaaggcttnnnnnnnnnnnnnnnnnnnnnnnnnnnnnnnnnnnnnnnnnnnnnnnnnnnnnnatctcgggcgaaattcctaagaccagcgagcaggagcaccgcggcgggacggtcagcagcccctttccggccctggtcttcgggagctggcgaggtgaagaaatgtggaaacacccagacgaaaaggggatggggtgggggtcgcaggaaggcggcgccctcaacagggtctccgcactccctcggaacacagatgtgttcttcctgacccaggggcgcagcgctccagcccgggcgcccgggtgtttgtgtgtccgggtttccgaggaagggattacgcgcgggagcagcgcggcaacgcgggccgccggggc

SEQ ID NO: 180608 - DNA, 3595 bp, Homo Sapiens
  misc_feature (1775)..(2033): n is a, c, g, or t
  misc_feature (2177)..(2191): n is a, c, g, or t
  misc_feature (2193)..(2458): n is a, c, g, or t
ttgggttttggttgtatcagtccagaatatgtaattttccatttccctgaaaaagacttcagaggaaatttattttccccactatacgctccagaatgtctttcggtgaaatgagagggcttgggctcttctgattctagacgtagctatcagagtttgcttaatgaaatatgggtctactcacaaataaagcaatttaatggtttcgaaagagtaggcaacttgtggtttcattaccatttctgttcatttgagaaaaatcataaaattacagaaaaggaaacattcatttcaaaaataagctttgaatttagatggtaaggcatatatgttttatttcacatgacttcagggtagaagtcaaatgaagaaacatttctatggaaacttaccctttaagaaaccagtatatgcaaagaatgattgataccccctgagggtgtgccatataataggtgactgataacatacaggatttaattcttagaataattaagaacagatatcacccattacattgacctacatttttctaaagtgaacaatagaaacctctctcagaattagtatttgcctattaatgtaatcagtgtagccttctcaacataaaaatgtccttattctagaacatggaagcgtacggcaaatgcaacggttgaaagcactgaaaaatatttgtaaaacatctgtagtgctcacattatgaactttaaatgtaatactttgaaaaccatcttcataatttttttgttctaacagcttcctttttaagaaaacattttaaaacattttaaaatggaacttaatgtgcaaaataagttgtgtaaaataccagtatttgggtggtggaggatattggtatattatattgacctgggttgatgactactggactattttaagatacctacttccaaaacttattttattctagaggaccactaaaaatcagaattacagcaatcattttaatttttctactttccttgttaaggtcttctgcttacccaaagaatagtgtatatcttaacatgacttttaaaggggtatcttgatccccatcacagatttttatctatgaatagaaggattgaaaccctatttgatccctagctctttgctgaaaagtgcataaacaggaatcctgaatttattatatagacctcctcgcattatataatcgaagcaaagggaaaccagcgatggagtagaggtacgtagactaaagagatgcttgcaaatgatggtacctagggatagtcacattttcttgttgccaaactcagacaatataatcacaagtccagagaagagctagttaattttaaattccccgaggtccttttactgagatggaaaagcacaaacagtcaaggaaaaccaaagagggaggggtgagggaaggggaaagtgcataaagcacttaaagattttttaaaagtaggtatgatagataagccacaagaagtttttaagactactaataaccataattctattttaatcagctatttagctggtacctactgctatatcacctagtgtgacatttcggaattaatggaacaatgaaggaagctgtacactggaggttccaggtggtcatggaaggtttccagtttatgcaaacttctgtgaaaatgagctttgttattggtgaagacattggaaattttaccagccaaaacagagtttctctcttattcagggtaagatgtaattgcagtgtgctagcgctggaagggacctgttttatatgttatgtatgttacacnnnnnnnnnnnnnnnnnnnnnnnnnnnnnnnnnnnnnnnnnnnnnnnnnnnnnnnnnnnnnnnnnnnnnnnnnnnnnnnnnnnnnnnnnnnnnnnnnnnnnnnnnnnnnnnnnnnnnnnnnnnnnnnnnnnnnnnnnnnnnnnnnnnnnnnnnnnnnnnnnnnnnnnnnnnnnnnnnnnnnnnnnnnnnnnnnnnnnnnnnnnnnnnnnnnnnnnnnnnnnnnnnnnnnnnnnnnnnnnnnnnnnnnnnnnnnnnnnnnaccaaggaataactaaggtaaaactgagcataagtggcctgtccatattttgttaaatatcagattattgattagtgatcatcaacattttcccgcattcatgcagtgcggcctctgaaaacatggttgaacatcctatggaannnnnnnnnnnnnnngnnnnnnnnnnnnnnnnnnnnnnnnnnnnnnnnnnnnnnnnnnnnnnnnnnnnnnnnnnnnnnnnnnnnnnnnnnnnnnnnnnnnnnnnnnnnnnnnnnnnnnnnnnnnnnnnnnnnnnnnnnnnnnnnnnnnnnnnnnnnnnnnnnnnnnnnnnnnnnnnnnnnnnnnnnnnnnnnnnnnnnnnnnnnnnnnnnnnnnnnnnnnnnnnnnnnnnnnnnnnnnnnnnnnnnnnnnnnnnnnnnnnnnnnnnnnnnnnnnnnnnnnnngtatgagccaccgtgcccagcagaattttttaactatttggttacgactaatttggataatgtagtgcatgcagctttgatttgtgccactaagagtgggcaaactgtcttcctttttgtgaatcagtaaaaattttccctcaacatgtgtttgacagttgtcattcactgctaagttaaggcatttggtaaaccacacagcctctgcatccttcctagcgacagccacaagaaaaggtgggcatgggagggaaaatgctcttgtgaattgaactggaggcaagctccacttttctttagaaaaagatgtagatcaaaataactaatattttcttccttgctcgatttctgtgccttccatggtacatcaaaataataggaccagtaatggccacaatcctgttgactgctgttaccttcgccccaatatttctttaagcatttcttaagcatctagcttgtgttttgttatatttaacagattttcttaaagtattgtatgaattaaaaccagaaataacttcattttcctagaaagggataatttctcccggagaataaatcctgaggatttagttagatgctgtgggtattgtattttaaataatattttaatgggagcagctgattgactttcaaatggattgtttacattaatagtaattctgcagttgttttactattgcatcagtctgccagacaagttccatgtgcatattttaattcagaactaattatacttaaaaatttaaaccctgcatacttccccaaaaatgtttagggcagttaaaaacaactcttttggaagatgactcgcattttaagaaatgagagaacactgtcaaatgatgaatgcatttaaaaaataatttgcaaagtgataaaagcccttagttttaaatcttacaatgacattagctcttacaagaactcagtaagtatttgctgttttttaatgggatagtaataaggttgaggtttttgttaagggacgtttacttatcatcaaactctatacttactactacaaggaaactccaagtacattaaacactatgttttataattctttgccacactgccaataaatttctttttaacaggcattttaagccaacttttttgtacaaagttggc

SEQ ID NO: 180609 - DNA, 1021 bp, Homo Sapiens
ccaactttgtacaaaaaagttggctttaaatgacccttataatgggaatatgcctatcattggaattgaaagcagcatagcttgcttcagtaactccaataatttgggaagcagaaatggaaaaagtaatttgagtcatgtttgcttatgtagtgccgtttaaaattcccctagtaattacctttcatattttattaactaggttaacatcaactgtggttgtaagagtaaatgtttcaccttaagataaacatgggcaatatattaaactctagtctgttttcttgcctgtgaagtgaggctgcacttgattatatttgattctttgttcgtaatacatgggaacgacagctaagtgtggtgaaaaacgcggggatccaaagagctggatttttatctcagatctgccgctaacttttgtatcctataggctacttttatttctatggtctcaatctataacatgaatgggttgggttaaatgactgaagttccttcaagtgctaaaattctttttctacagtcttcattggatttatgtatttcttattcctaatatgtttaactgggatgtctgtcactctagggcggcaagacagacatttaaaagtaacagtcacactgctgaactggcatttctgttaacacaaaagtttagaaaactcacggtaactgttacttgatttaagtgtatataaaattttcagtaaggctgcttttaaaaggaaccactgtccatttaaaggtttcatagttatcttcaatgggttagtattgtttggggcaggacattaaactagaagggattctataggatgaggtgatacctagaaggtaatatattgtaaggcaaaagagattaaaagaaatggggaaaggatagtaaaaggcaagtcagattaaaaggttgaaacatgaagatattctcaattgtatttctgcctatgtttgcttttttggctcaagcatctgttggaagagacaaaatgtgacttggttcataataaagcaagaattattt

SEQ ID NO: 180610 - DNA, 1863 bp, Homo Sapiens
  misc_feature (1346)..(1354): n is a, c, g, or t
ctttgtacaaaaaagttggattaaacactcattgtaatattataattctttgccacactgccaataaattctgttcacattttaaggatgacaagtccactatatgtaacacgtaagaatgctatcctggcagtagacacagggccagaataaactggcaagttttcattccacacaagtgtgggaaaaaaatgactacaacttaaactttatttacttgattgagagcttattgcacatgaaatgttttatgtggttgatcttaacttcgtttacattgacttctatgctcaagattgttcaattgctgctgctgccgttgtgttttctttcaggatcgaggtgggtaccttcatataatatcttctttttaatttcttctctggcaattctttcctggattctttgctttgcataattatacctacaatgaaaccttagaagaaaagaatatgaataaattgttaatataaagtcctacagaaattaatttatgaaatttctctaaatcacacaaaacttaaatacagatgactactaccctgagactgaaaaatatgttctaatttatagtgctatttttgggcagttttggtgtcagaatacctatcaacacattctttttttattaggaaaaaaaggatgtctacataacaatttgtaaagtgataaaatccattagtttttaagtcttctgatagcattggctattataagaaacaagtatttgctctcgtttttaacgggataataatgctatgtctacataaaatgatttctaccaccttaaatagctcactgtagaaattcatgtataaatggaaccatatagtacatacatatcatactcttaggtctggcaaatatttgaggttcatccatattttatattcactcatcagtagttgtaaacacattcttaaagtagcattttcagatatgaataagcagggatgaaataagtattagggtaagggaaatggttgaggctttcctaagtgaagtgtaaaaaccacagctttctttttaatgggatgtctaatatgcatttatctgttcaagcattttaagatttccatgaaaatgtcctgaaaaatcaagattcttcattgagggtgaggatctcccaatgggagactgctctgaaaagagcatgtgctttttgaattagataacctactataatcatggatgttcttgaatacttagcaaacataccagcatcccaaagtcaccaagataaaccctcctactccaacatcacatgatcttctaattctacctgtaaaaataagcataacaattaattagaatataattacgttatatacattactccacctagnnnnnnnnntagttcattatgtagagaaatgctttttttagtacatagagaaataaaaaatacagatactcactagtgaacaaaaaatgtccaaagccagccacaacagatcctaatgaaccatacaatattgaatgccgggcgcagggagtattttcaacatctaaaaatcctaggagcttaagggactagaatgaaaaaaaagaacctagattgagtaagaaagtatttcattttggggtgctttggcaaaaatgacaatacaccatttcttttcttgtagttgagggtttaaactagagtatgtgccacgtgacaacctaaatcagcttgcgttgtctttgtccacctttggtatgcagtctgaatctttaaatccgaaaaccttacaaattggaccggaaaacccttaagcagtagggtaacttggagctgtatcttaatttgctaatcaactgacttggaaataggataattcattttatgagctctttaatgagtttatttgggaatatgcc

SEQ ID NO: 180611 - DNA, 864 bp, Homo Sapiens
tgtacaaatatgatgacctaggtccagtcatcaagtaagtcacttgaaatttttcataagatgacaaagtccataggacagagaccatatttgtctggtctgttgtatcctccttagcccagtgccagacacctggtaggtgggcaagagaaactcaatgaataaataaatgaaggcaagttcagaggctcaactgaaatggaacattttaactagaaagggaaaaatcaaatggtcttattaatttcatcttgacctgcgttgagctaaggtgaaagtgaaaatgaggaagtcgcaagatagaataaaaattgatatagaaaatcaatattgatagaaaaaccatatcagagatttatggtaagctataaagggtggtagagataagcctacttactgatgtatattaagaggaagtcattttgtgtacactaaattggaaacttttttctttatagacacaaggtgtgaacatagaacagttcagagaattgaagaacacagtatcatacagtgggaaaaggaaagggcccgattcgttgtctgatggacctgcttgcaaaaggccagctctgttgcattcccaatttttgacaccacctcaaacaccaacgcccggggagagcatggaagatgttcatctcaatgaacccaaacaggagagcagtgctgatctgcttcagaacattatcaacattaagaatgaatgcagccccgtttccctgaacacagttcaagttagctggctgaccccgtggtggtccctcagagctccccgcagagcagtgtcaggacttccatggagggcaggtcttttctccacctcagaaatgccaaccattccaagtcagggctcccaacaaa

SEQ ID NO: 180612 - DNA, 2745 bp, Homo Sapiens
  misc_feature (2140)..(2153): n is a, c, g, or t
  misc_feature (2171)..(2230): n is a, c, g, or t
  misc_feature (2304)..(2413): n is a, c, g, or t
  misc_feature (2509)..(2521): n is a, c, g, or t
ttggattgaatagtttcatgagtaaactttttagataacaagaacttattctttcaagaacttaaaatgtttttgatggaactcttttcctgggaggaatgagggggattgtggctgtgggtaggtcattacatactttactaatcacaaaataaaatacgtggaatgcagtttagctttttctttgattctgagctgtcattatgaccataatgttatagtagcccctatttatagagctctttgtaatttagaaagaatatttctatagtttgtaaaaagttttcatgtatatcatttaatagttagaagaactttacaagtttcaagtttcaactgagaaaattgatattcagagaggttccaaggaccagaaccatcattaacttgtaaaaggcagagtcctaagcccagtatttgcttctacttcactgtttgtggtgtgcagtcatataactatgctctcagggatcattgagatattaagccatttaactcttcattaaatgttcccagattatctcctttttgctttggtattttgtgtgtgttgggcaggtagaggctcttttccctggcttttattgtcatactgtggtcgtgtgtttccttctagcagctatcagttgtatcccctaccccaatcgcctttcatctaaattgttgcttctaatctgctggaggctgagagatagaaaataaaatttgtcagactgggatgtaaaatgaatcactctgaatgagccgggatcttttctgtgatccatgaagttacgtgtagatgctttattacttggatatcatgacagctgttttgacttgaatggtattaaggatttacttgtgtgtgtatcataaaatgtgggttttctgttcctgttagttgaggctgacttcaagataagtgagatattataatatgccttaattactgtcttatgttaaatgttctcacaaatagcaagagtaaagattaggaaaagaatataggtgttaagtttatggagattttcaacttcagataatttttagtggagatgttttactttcttgaactcaaagattattataagagatctgaaataagtttaaaaggagtttagtatttttaaaagtcacctcaaaatcttgagaaatattgtgtgtatttcttcgtatacttacaagttaataggagtagtgtagatggtataagaaaggaatgaaactcagaaggaaatacaccacattggccataagaaataaacctcacaaattttatttgtttctcttccagatccgacgtatcctgaagggaaagtccattcagcagagagctccaccgtattagctccattagcttggagcctggctagcaacactcactgtcagttaggcagtcctgatgtatctgtacatagaccatttgccttatattggcaaatgtaagttgtttctatgaaacaaacatatttagttcactattatatagtgggttatattaaaagaaaagaagaaaaatatctaatttctcttggcagatttgcatatttcatacccaggtatctgggatctagacatctgaatttgatctcaatggtaacattgccttcaattaacagtagcttttgagtaggaaaggactttgatttgtggcacaaaacattattaatatagctattgacagtttcaaagcaggtaaattgtaaatgtttctttaagaaaaagcatgtgaaaggaaaaaggtaaatacagcattgaggcttcatttggccttagtccctgggagttactggcgttggacaggcttcagtcattggactagatgaaaggtgtccatggttagaatttgatctttgcaaactgtatataattgttatttttgtccttaaaaatattgtacatacttggttgttaacatggtcatatttgaaatgtataagtccataaaatagaaaagaacaagtgaattgttgctatttaaaaaaattttacaattcttactaaggagtttttattgtgtaatcactaagtctttgtagataaagcagatggggagttacggagttgttcctttactggctgaaagatatattcgaattgtaaagatgctttttctcatgcattgaaattatacattatttgtagggaattgcatgcnnnnnnnnnnnnnnctcccgagacagggtctnnnnnnnnnnnnnnnnnnnnnnnnnnnnnnnnnnnnnnnnnnnnnnnnnnnnnnnnnnnngggctcaagtgatcctcctacctgagccttctgagtaactggaactacaggtgtgcactcctcgcctggctaannnnnnnnnnnnnnnnnnnnnnnnnnnnnnnnnnnnnnnnnnnnnnnnnnnnnnnnnnnnnnnnnnnnnnnnnnnnnnnnnnnnnnnnnnnnnnnnnnnnnnnnnnnnnngagtgagccaccatgcccggctggcagttgcatggaagagaacacctctttatggcttaccctctagaatttctaatttatgtgttctgttgaaannnnnnnnnnnnnacctttattgaaacaacaaaaagtcagtattgaaacatatcttcctgttttctgttgtcaaatgatgataatgtgccatgatgttttatatatatcattcagaaaaagttttattttttaataacattctattaacattattttgcttgccgctggcatgcctgagggaatgtatttggctttgattacacactaagtttttgtaataaatttgactcattaaa

SEQ ID NO: 180613 - DNA, 1599 bp, Homo Sapiens
  misc_feature (631)..(693): n is a, c, g, or t
ttggctaatcatcagcattttgagttttttctctgtcgctctgttggtcatcttggcctgtgtgttatggaaaaaaaggattaagcctatcgtatggcccagtctccccgatcataagaagactctggaacatctttgtaagaaaccaagaaaatgattctcttgctgctaccacccaactgcatccgtccatgatctcagaggaaactgtcgctgaccctggacatgggtacgtttgacgagtgagaggaggcatgacccctcccatgtgtatagacactaccccaacctaaattcatccctaaattgtcccaagttctccagcaatagaggctgccacaaacttcagggagaaagagttacaagtacatgcaatgagtgaactgactgtggctacattcttgaagatatacggaagagacgtattattaatgcttgacatatatcatcttgcctttcttggtctagactgacttctaatgactaactcaaagtcaaggcaactgagtaatgtcagctcagcaaagtgcagcaaacccatctcccacaggcctccaaaccctggctgttcacagaaccacaaagggcagatgctgcacagaaaactagagaaggggtcataggttcatgnnnnnnnnnnnnnnnnnnnnnnnnnnnnnnnnnnnnnnnnnnnnnnnnnnnnnnnnnnnnnnnactttatttagggggactaggtgtttctgatattttagttttcttgtttgttttgttttgtgttgtctgtgaatggggttttaactgtggatgaatggaccttatctgttggcttaaaggactggtaaaatcagaccatcttattcttcaggtgaatgttttactttccaaagtgctctcctctgcaccagcagtaataaatacaatgccataatcccttaggtttgcctagtgcttttgcaattttcaaagcacttccataagcattccttccacctccttgataggcatttatggaaagcctgctacatgtcaatcatactgttaggcacaggggacctaaagacacataaaaggatggcattctgcctcataaattgcaaaacctaatgaaagtgactgcttggtaaacaaattattattatattataaaatgctataaaagagccatattgaaagtgccctgttggagacagggcaaatgccacaaaaatgatgtaaatttacatggaggaaaagtagaatctgcctggtttgtaggcagcagaagacatttttcatcagtgggcaggtgttctttaccttttgtagaaatgggagtcaagtctcaaataggaggctctacaaaatctcatgccaggtctctgataccttattcacagaagttctttgaagtatttattgttattttctttgacttatgggaaaactgggacacaggaagacaggtaaattactcaacctcacacgttaagtcagatctgggagctcataattttgtatctctggtataaatagacaatctctcgaagaaatgaagagatgaccatagaaaaacatcgagatatctccagctctaaaatcctttgtttcatgttgtttggcatatgttatctttggaattta

SEQ ID NO: 180614 - DNA, 713 bp, Homo Sapiens
  misc_feature (236)..(257): n is a, c, g, or t
  misc_feature (332)..(340): n is a, c, g, or t
gcgggggagctacacagaagaaagtgcacatgccaagtagctcagtctggtttgggtgtagggagagggtgagagataggagatgatgccacagggagtttggtggggaccagtttgtgaaggggccttgaaagtcaggccaagtaatttgaagtctgccctatggtaaagaagaaacatagaaagttcctaagcaaacttagagttctgtgatattacaagagcatgttctatannnnnnnnnnnnnnnnnnnnnngacattattgccaccattattccccattattcccacttgtagcctgattgtgactagttctcctagtcaaaagannnnnnnnncctccctatctttttctttgctggctttttatgagcaggaaatacttattaattccctgtaataaatataatttttatgcagagttatctttatgcttacaaatgagtaagtgagcttggctctactaccacctttaacctttgattgaatgccttataatttactgagcaaactaattaccatgatgaaagagatgtattttgaaaatattatcccttattcaggaaattgatgacagtgctgaagacttacttggatacctccagcagaggggagcaatgtgagccaatcctaagaacgctgaaactttggaatatgtgttcaagttcattgttcggtcgaggacattattttcacagtgagtacttgtta

SEQ ID NO: 180615 - DNA, 1562 bp, Homo Sapiens
  misc_feature (319)..(370): n is a, c, g, or t
  misc_feature (522)..(535): n is a, c, g, or t
ttggataaaagtaaacacaaacaaaaaattgccacacgttacattcccgcttagtgaaattgaacatctagaaatgtgggatcctttctcaaatgtctggctgactcattctgttattctcaccccctaaaaggatgcagtttatttccaggatcctgatttcctatttctgttgatcttttattaaagctaatatttgtgtgtccttatgttttgagctgcctttaatccttttttggaaagttgtagaatagatactaaaaacaaaaaagtaaaatgggaacataaatttaaccagttcccataaatttaaccagannnnnnnnnnnnnnnnnnnnnnnnnnnnnnnnnnnnnnnnnnnnnnnnnnnngggtcaaagaaacattaatctttgtgatttcagagctgttggggcagaggatgaagaattgttgaagaatagatgcctaagaggtgaggctaggaggagaaatctgtagactttggagcaagtcaactttgacagtagcagggaaatactcnnnnnnnnnnnnnnaaaccttttaattggatccttttgaataaataatactttcacatggtttacattcataatggtacaaaaaggtaaatcagtggaaaggttttccttctatcctgtccctgaacctttcatttctttccctggaggagtcagatccttctaggttcttgagtatccttccagacattttatgcatgtaaaagtatttgtttgttgttaaaggtatttctatgcattaacacttactcgaagctaatcagctaatttagctgagttcgttttatggaagacaaccagcttctatttaattgctggggccaaattttacagtatggaatgtcttactccttgtaatttaacctccagagaaaactcacatgtctatgttaatcttcagcaaacaaaggtttttaaaactatgaatttgtgggagaaataatatgactaggaagcaggagcaggggaaccttatttcttattgcgttagttatgggaatcactgatgggctggaagatcacactgggtcagggttcagtgtttggttcttgtctactgaccttgtgagttctcagagcatcagcaagtgatgtgcacgtgtggtacccctgtctgctcaccatatgcttttgttttaggttctcccatggcgccagccagtgtgggcaattgcagtgtgggcaactgcagcccggaggcagtgtggcccaaaactgaacccctggagatggaagtaccccaggcacctatacagcccttctatagctctccagaactgtggatcagctctctcccaagaaggataactatggcagtggccttcctgaatgctggttgaaaggtggcttgatcttaatggacttgcatgagtcacacgggatgaacaagcagagcagtgaagcaagactctcactgtcatctctaacccttgcagtgactgacctggacatcaagtttccattaccgtgggaaggagtacgggcagaccatgaaccgtgagcaaccctcagggctgccgactcttctatggggactggggtc

SEQ ID NO: 180616 - DNA, 905 bp, Homo Sapiens
tcattccagttgctctcgatgacaccatcggggtccattccctctgggccgccatgttctctgctgacaagaatactgcagtcagacaccccttccaggccacctcaactgcacttaagcgcatagccctttgcaacccgtctcagcacgttagcctcccctgcacaagctaaagcagcagcctcagggcgaatatccacactgtgcgccttccctaaaggttggggcctgcggatgcccggaaaggcagccccccaggcccgagcgcatggcgatcccgtttcaactgcggagcgtctcgcgagagctcggagcgccgaactccgcccccaacaatgcgcaagccgggtgattgacgcgggcggagcggcctggcgagagcgatgccaacggttcaccggcaccggtcctgtcccgtcgcctccgcgccgtggccgagtggagaccgctgcctccaacccttccccaagtaaagcctaggaccctcccccaactcgtgtggatgaccgaaaataaagcttcgggtcctggttacagtgtaccgaactcggactgcgccacggctttttactccatgtttcccgtgctctacactgggaaggaaagcagccgaagtttcgtaatgtcttagggaggaaaaacgccctttagccactgctttcgcaccaccgtcctatctccccacaatccgggccctacccatcatggaagcttctggaagggcacaggagtgctgtaccctaagaaaacgtccattaatttagagtttttgcctccttgccatccactatcatctcccctggcgccctatgaccttcactacagaccgcgaccgccaacagactgcatacctgttataatccgcggagccaccagacatgatccgaaaaaccactcagcgccaa

SEQ ID NO: 180617 - DNA, 2172 bp, Homo Sapiens
ttgggatcatgtctggtggctccgcggattataacagcagagaacatggcggcccagagggaatggaccccgatggtgtcatcgaggtaagaaacggttgtggatcttgaagctttggaaaggtgagtgtgttcatctcatttatgcgtgcattattttttctaacttacagagcaactggaaggagattgttgataactttgatgatatgaatttaaaggagtctctccttcgtggcatctatgcttacggttttgagaagccttccgctattcagcagagagctattattccctgtattaaaggtaaaagaaactggcatttttaggaaattgttctacatagacatgaaccataaaagggaaagtaacctctgggggactagcacctgtttgtattccttaaagtgaaatgatggcaatcatctttcgggactgacctgaaatgaagagaatactcattgctgatcacttgattatttgggtataatgttccaaatggaatacatggtgtgaagtagaagtgacaatttgatgtgggatcggtaaatgtgtatcctacttttttttagggtatgatgtgattgctcaagctcagtcaggtactggcaagacagccacatttgctatttccatcctgcaacagttggagattgagttcaaggagacccaagcactagtattggcccccaccagagaactggctcaacaggtattgatagtgtagttcaaaaaaactgcttgcgtgttgcataggtttcaggtttcacaactgtgaagaatttaaaacttagtataaattggtcctaccagatccctccttttaattgtccatgcatgcagggagtttttgttgaaagttttaaaagaactgggtatgcaggtatggtttgtagggttgtatactaatagattgagaatccgaagcgctctcttggatgtactagatctgtccccattttttaagtttgaatgcagttgtgcaacatgaaaactgcagtgacatgttaccatttgactgtctccgtagttcgtgatgcatctgttgcatgctatgttttcaaagctcactgctatattggctttgaagtaaaccttcctaataaagctgtaggctttattgaggtcaggattatataaggcacaataccctctgggggaaaaaaatcatttgccctagctgtaattacagaacataaatttcactacgtactccctacctacagtgaagaataatgtacgaaacgttattcttgaattgtctagctgatgcgtggagcagcagcatcccaagtttgacaaggcataagaaagacattaagggaattttaccttgcagcagttaggtcgtctgcattttaagcttggaagtagttttgtgctgtgcatgcataaaagctgttggcagaccagattatatttgcctttatgctttaaaaattagtcattgatcctggagttctgcggaataataattaaggcttgggttttagatccaaaaggtaattctggcacttggagactatatgggagccacttgtcatgcctgcattggtggaacaaatgttcgaaatgaaatgcaaaaactgcaggctgaagcaccacatattgttgttggtacacccgggagagtgtttgatatgttaaacagaagatacctttgtaagtattgtctttaagagagtattttttttaaaactgttaacatagttgaaaagtcaaattgtatcactgagtagatctagaaatgacagtatgactttgtttctaacagctccaaaatggatcaaaatgtttgttttggatgaagcagatgaaatgttgagccgtggttttaaggatcaaatctatgagattttccaaaaactaaacacaagtattcaggtaagcattacttcacccccctcttaaaggtagagatggggtttatttaatgcaggtactgttacaatacaactgatgtgttttgctgtcgttccccctgcttaaagcacttgatgcataactctgtctaccttcattccgtagtaagacagagacgcttggcttcagacattttcctttgggtattaatgtgtaagttgtgctacaacataattttctctttttaaggttgtgttgctttctgccacaatgccaactgatgtgttggaagtgaccaaaaaattcatga

SEQ ID NO: 180618 - DNA, 1473 bp, Homo Sapiens
  misc_feature (799)..(1013): n is a, c, g, or t
ttggatagatatttcataaggaattagaacttagttacttaaaaattatattctagaggtttataaagcaaacatttattatattcatttaccttttaaaaaaattttaagcaaagcccatactcctgttttggggatatctgaaagagagagcatttacaactttagaattacagattcatgagggatctgattttattttctttttcaactttaatttttgattcagtgggtacacatacaggttttattacctgagtatattgtgtgatgctgaggtttggtgtacagataaagcgatctgattttatactcttatgcagtggatctaccactactacaatgactgctacagggctgctaatgtttctgaatattgtctaagtacttctagaaataggaaagaagatcacagaatcataaattcttctatcttaaaggagccttcaggataattattattttacaaaaaaatgcagctaggctattgtatacatcaaacaggctgttttttctcatggtgaactgaatctgcttcagtggaactttccccattctgtctgaggtctccctttggacacaatgtagaataaatctattgctctcctgcattcaaatagttgaagacttattttttacctcttcatcttctcttccctaggctgaacgaaacgaaaactctcagttccttaggtttctgtgcattatttctaatttattcttaattcataactctatagacacttacagaacacctactatgtgtgagcctggcatttttaatttaaaaccctttccnnnnnnnnnnnnnnnnnnnnnnnnnnnnnnnnnnnnnnnnnnnnnnnnnnnnnnnnnnnnnnnnnnnnnnnnnnnnnnnnnnnnnnnnnnnnnnnnnnnnnnnnnnnnnnnnnnnnnnnnnnnnnnnnnnnnnnnnnnnnnnnnnnnnnnnnnnnnnnnnnnnnnnnnnnnnnnnnnnnnnnnnnnnnnnnnnnnnnnnnnnnnnnnnnnnnnnnctatctcaaataaatacattaataaatcattttctttgtaatacaaactcaacctaagaactagataaaagaaagccgattttacttttttcctttgtgctcaggtaatagaaaatgaaatttgtatgtatgtttataacatgtacatttatacctgtatatacatattcatatgtatttttaatcatagggaatgaacactagaaagtaaatgaaaaatgagttgaaaaactaagcatttaaaataaatcaattgacttttgatatattaagatattaatttcaaggttaattatagcctcctcttagagatacaactgttcaaagatacatcatcacagctgattgtcaggcctagatgcctgtgaggagagagactcagcttcagtaacctgttgaagccagaacatagaaagtaaatgaaaactcaattgtaaaaacattcattagtttaaactct

SEQ ID NO: 180619 - DNA, 1414 bp, Homo Sapiens
  misc_feature (87)..(137): n is a, c, g, or t
  misc_feature (387)..(425): n is a, c, g, or t
  misc_feature (593)..(628): n is a, c, g, or t
ttggctactattcgccatacgcgctgtatggacagagactagcttcagcctcggcgctgggataccagtaactacagctcttcctcnnnnnnnnnnnnnnnnnnnnnnnnnnnnnnnnnnnnnnnnnnnnnnnnnnngccgtcgccgctgcaacctccactactgcttgaccctgccgggattccccacccagcccttccccaccggactgtgtatttatttactataatgttagcttacaagctgggaatataagtgcattaacggcccacatgagtcaatggtatgcaaaaagtctgtgttctcccaaataataatattaatcccacaaataacgacatgatccccgcccctgttcctttctgttattttttcttagatataagnnnnnnnnnnnnnnnnnnnnnnnnnnnnnnnnnnnnnnngattggtttggtttgagggagagttggggtctttgggttcttctagacgttttgttttcccttcctggggagtttcttgcatgagtcttaacttaaaactacgtttccgccttctctttttccctcttccccctttattccctcttgtttccttccatttgcggttcnnnnnnnnnnnnnnnnnnnnnnnnnnnnnnnnnnnncctttgttgtacaagtaacagagaggaggttttttttgtaactcattttgggggtggagggggccacctgggtggcaggggccctggagctctattgacctggtacactgctccgggactcctcccccgccaccctccgcgcatagggtccttggtctggaccctgccccccaaaagtagggccttgctcctctaccttgctctgagcacggagagccctgaccccaccagtaggctcgcccccagaagggcccaagtggccgtctaccgtcaccttccagactcccgcccctaacacccagtggctacagtgcgcctgtcggggcacctggagcgctcacctggttgaattcaaagtcccagaaggccccgctggcgtgaagccggccccttacattttgcgaagtgcattatagtccttgtttttctctccctcgtgggggcaacgacccctcccctggcagtaggggtggggtaggtgactctcgctagatccctccaaagcagaccggtggcgatgtcagcggatgtcacgagctcgttagctgcgttcggggaaggttggggcgtcagggagctctcggatcacagcagccccccgccctctcctaggcctggcccggcagagcccctcagagtggactccccagcgactggggtcttctcccactcctccctcctttctggtctgatgcggcagcgcgggggctgcggggcctgtttgggacgaacagagctctctcttggtagacttattttgttaataaatggaatacttggccatag

SEQ ID NO: 180620 - DNA, 1514 bp, Homo Sapiens
ttggattattcataaatcctttcagaatatcctcagctccataaggggaagttctggagatggaaaatccaagggaggaagattggggattggaatatccttggctttcctggtatttgctgcaaacttctgccaggttaaagaggctgtagcagtttctgaatgtggcggcaagctccataactctgacttttctacaaaatcagcatctacatccagctccttttctattggaccatttagaagtctgcccttttcagccttgagttgtttattttctttccttaatctttcattctcagccacaaggaattccacatgcctcttcaaatctgcttctctataattgttttatctttcgggcctttgcttctaatacatggctctgctggctcactcttttgctaaagtaaaaatagtagcgtgtctggatccctgtcaaagatcccttgaatctcaggcaggcatttctctgtgaaagggctgtgcttctgagaaagggggctctggctctctgcatcctcagcagagggtttgtgagatgggcagctacatcctatgttctgctgggctttcagtcttttcacgctgggcccttttccacctgtcttggatgaggaggcgctgtttcctattcctttgcaattccagtgaaaaatgagcctgctcagactgtcagcttcacggcttctgaaggatatgccgcagcctttttgtgacaagaaatagcttctttgtagttgctgataaatggtctgttcatctgctctgttgatgagccaggttgagggatccattattttcatagactccggggtaagtggcagccttaggaaggggagcagtggcgcaggggaacatggaggggactgcagggaagcgcgatgcagccgcagggactgtggcccctctctgcgttcaagagccagcagcggggcgcagagggagcaacaacctcaccacttcctcctccagcactgctccacgggcctgccacctgcgctgctgctgctgccacgcacggtgccatgacgtcacacgcgcaagtggcctctgcttattcttaaacgttactcctctggagtaagcaagctcctttgaacatggcaattttaaacttcagacacattttttcttctgtccttcctctataatctctgctaacctctttgagcctttcagctgtttatttctggtggattccttcgcttttccctcctgtgtgagcacttctggaggtagttaaggatttgaagatattttatcatagatttgttggctccttcttttgaggctccctcttttgtgaaactttcccctacaattttcatctcctctggccgccccaaattctgtcacatctcaaatcaataggactgcagggcattgtgcttctgttgtagctgtaccatgttgcaaggactcgggaagttgctgcctgaggggaaaaccatataaactacataaaagctctcacccacttggttcctttcaagagtttcttcagtctctgg

SEQ ID NO: 180621 - DNA, 1495 bp, Homo Sapiens
  misc_feature (264)..(280): n is a, c, g, or t
ttggcttttaatactttaaatgtgttatttgtatggcccttataaaggtgtttgctgtaattctgttaaaagacttcgcctatgccatactggtgtataaaaactgccgcaattggacgccggtgtggtactcatttcagtatacctgaactgtacattttgtgcaatggctttatctaaaagaatgacgcttcgtgaaagcactttgtggccttttttgggggggagggtgagagagtaggagagaataccatgttaagattnnnnnnnnnnnnnnnnncattggtcatgtattaggcagaaacagtgttcataacatttttctgggttttaaatatgttgtttcggatatccttaatataaatgttttaggtattctgtgtaccctgtcgtacccccaacattatagaatattgcagtgtgtcattgcaagctttctctgctgtcaccagtgaaacatagtgccctgttaaattcccccactttaacttccttgtgatcaacagtaactggatgtttttgaggtgctcaattggaataaaaatattccaatctatttggagaccaaaggcaaaatcagttttcttacctttggaattattcgtaccttttatggtaaatttcagctttgacatgtattatgaggaacgtaccaaaaaccggtttgtaacaaatctgtagagaaggtctgaatctatcgtgtttgccttttcaggtgccatttctactgcctaatacagtgccatttgccttgtgaagacccataaacattcattgtgttgaatgtaagatagagactctccctagtcttactgatctcagtaccccacaaatgattaagaatgatatgaaaaccagcagctaaggaacatcttattatttagttgtagcatattcataacaagtgtccttcaaggataaacatatattctctatttgtatttagcaagtaaaacttgtgttgacctttagtgcattatattcagcttttaacagtattatgtatgtactggaaagcaaagaaatcttagagtcttggacattgtttatttgtgcaacaactagaaaggagcaatgaagtttatttcagttgtatttttccctaagcacaatctgcaatagtttatgtatgacagagataattcaaaaaggaaaactatatataaaagttgtatataaagtttgtctctgaaatatttctttgaagtttttaaaaaattgactcatgtttaaaaacaaaaacacatattcagagcattggacttttttaacttgttttcatctgtttatcatgacttttttatttctggtgtagagtccacattatttagtttgttgtacttttaaatttcaaagttcaaatctgaagaattagcgtttgtgatttcgggataccatgcagtggttttaatcccaggaaaaaaactatcaacaaaagttcgtttgattctcattatgtaactttgtagaaccatcctttctagatgggtccacc

SEQ ID NO: 180622 - DNA, 1293 bp, Homo Sapiens
actttgtacaaaaaagttggattgtccatgcctgccttttgttgtttacatgctcttctgcccagactgttagtaatctagggaccccctttggagctgataagtacagttcagccttttctcctcaaatatataatgactttaacattcctaagaatataggtatttctgaatgatttaaatttgaggaattttaatacataaaatacaatgtacaaactttctgcccactcagatctcttctccatcatgtacttagtatttcccattaacctacacactgatttttatgctactccttgtagaaacaaaattctggtttgactcattttttgtgtttataaacttttggaatgtgtaccccgtttatgtgaagaattatgacctatcagtcatagctaaatagtgaacctcaaaagtgttaacttttgactattcatgtgaggtttggatcttgcatttatgtacatggctgtaaattatgtgcatttactctgtatttatgttatctagctgacttttacttgaattgttcaaattttaaaaattaaaatacgctcatgaaaatatggctttttctgtaatatatcaacattttattgagaacataatcacacttttttggattatcctatgtgtggaacaaaaatccattgccattttcaggttaagttttaggctcgcttgattcagtcagcaaaccttatcttgagcactttgtatctgttagatctagtgatgtctgaaggaacccaaaggtcaagtaatccaactccctcatagtgtacaaagaaatcttgcatatcttccacaggtttattgacttttatccaacacttttcatgttttaatttcagcctttgtgaaagttgatattaaaaatacagaggtgagaacttgttagaataaccaaatgaatccacataatgttagatcaaaatacaaatgacaaagataaaatgctatgtagtgcctaccctctttacattttgtctattttatttaagtttttctgtattgtagttaacatcaaacattgtccagtcttgtaggtgaggaaaccaggacgaaatatattttgtatttcaacattgacataaatctgaaattgttggttctactaatagtactctgcactgaaggcactggcaaaataatggttaaaattgagcacaggtgttccaagttgtgtgtgtgtgtttattactgaacattgggagccgtgatagggaagtaatttgtgagttcatgatttcttaagttctagtgtgacatttatacactgataaaact

SEQ ID NO: 180623 - DNA, 944 bp, Homo Sapiens
  misc_feature (611)..(627): n is a, c, g, or t
ttggacttgctttcacattaagaatttgaacttttgagttttttccaggtctatatataatagattacatttattttgtaaagaaaatagtaatttaaagttttgccattttaaggtgacaatatttgggacagtataaatattatagacaagggcccccttgctgtctgctttagcaggtagtgacattaattgacttatagttttgtgtaaatgaacaaactgcttttgacaagaaatttattctgtcctagtttcctgcgtggtaaatcatagaaagattcaagttcatttgggttaaatgtgctaataggatgtagcttttaaattctgctattgagtcagctgtaccttttaatactttaaatgtgttatttgtatggcccttataaaggtgtttgctgtaattctgttaaaagacttcgcctatgccatactggtgtataaaaactgccgcaattggacgccggtgtggtactcatttcagtatacctgaactgtacattttgtgcaatggctttatctaaaagaatgacgcttcgtgaaagcactttgtggccttttttgggggggagggtgagagagtaggagagaataccatgttaagattnnnnnnnnnnnnnnnnncattggtcatgtattaggcagaaacagtgttcataacatttttctgggttttaaaatatgttgtttcggatatccttaatataaaatgttttaggtattctgtgtaccctgtcgtacccccaacatttatagaatattgcagtgtgtcattgcaagctttctctgctgtcaccaattgaaacatagtgccctgttaaattcccccactttaacttccttgtgatcaacagtaactgggatgtttttgagtgctcaaatgggaataaaataattccaatctatttggagaccaaaggcaaatcaggttttctaccttt

SEQ ID NO: 180624 - DNA, 1007 bp, Homo Sapiens
ttggcagcctcccaaagtgttgggattacaggcgtgagccactgcacctggccaggctcatcactttttgcgcctattgcctcgaagccagtctctgatgggacattagggcaggggcccttcagcctagtctgggacatgggccgctcactcagcagtatgacaagcatcacctggagaacgggccagtctcaggaggtcgttcatgccccactggcagtgcactgtgcagccatagtgtaaacaagaggcttaacctgaactggtctgagatcttggggaccccctaccctgtctccagcagcctgtccctttagctgtttgcctactggcaccccatcctgagaaggcatagatacccggcccaccctgccctggaattacaaaagtcttagactgtgcctgagtgcccggcctccttgggagaccctcctaggcagcctaagcaccagacccgggagctgggtgctctggtcctgcctgcctgccgctcactggaccctctccttccaggtacggcttcaggtccagagcgtggagaagcctcagtaccgcgggacgttgcactgcttcaagtccatcatcaagcaagagagcgtgctgggcctgtacaagggcctgggctcgccgctcatggggctcaccttcatcaacgcgctggtgttcggggtgcagggcaacaccctccgggccctgggccacgactcgcccctcaaccagttcctggcaggtgcggcggcgggcgccatccagtgcgtcatctgctgccccatggagctggccaagacgcggctgcagctgcaggacgcgggcccagcgcgcacctacaagggctcgctggactgcctcgcgcagatctacgggcacgagggtctgcgtggcgtcaaccggggcatggtgtccacgttgctgcgtgagactcccagcttcggcgtctacttcctcacctatgacgctctcacgcgggcgctgggctgcgagccgggcgaccgcctgctggtgcccaa

SEQ ID NO: 180625 - DNA, 1196 bp, Homo Sapiens
  misc_feature (779)..(791): n is a, c, g, or t
  misc_feature (841)..(850): n is a, c, g, or t
tgatttgtcagcatctccctcaggattctgctggtctcttgcagagtgaatgagtggcccctgcctctcctatgggtcctttgggatctgagctctgggccacagtctggccgcagccctgaagctcctggcccctctactctcagctcttcgggacagttctctgcctggcacacaaaagaccctcctgacaccagccaacctagacacaccccctccaaagatcccatcggagcccaccatcctgggagcatcacccaaaacccttcctctggcttctcggatttgcatccgaccttcgaatacccctccatcccgcaatttccaaatgagtacagtcaccccaacactgaggtcccttctctgatgggcagcccctccccagaccctcattccccctctccacaatcttcctcttccaagatgtgacctctccctctctgtgttcctttctctccatcagtatctccttgctatggtcatagcgtatttcagccgagccggcttcccctcctggcaataccaacgccttcatttcttcctggctctgtgagtggtttgctgcctcctatccgtcaatatccaatgccctgggacagcgggggaagtgggattccagcctttcatttgttctttcacctatttgtcctctttactctgtgtacaaaaaagagaggattatactatcatagactgttgtttctaaacagaaactcaggctggagggtgggatgcggtttgtaaatctgtaactgcatcagaccaaatctagttcaacnnnnnnnnnnnnngatggagtttcactcttgtcacccaggctggagtgagaagactccgtctnnnnnnnnnngttaaaattagcaccaaacgctttacaagtaaaaaaagtttttagctgcatatgtttaagtaactttttagattataagaaatacgcatgcaaaatggaaaggcacaaagaagagagcaaaaagtgcatgagatctcacatccaaggataaccgctgagaacatggaagtactgactcttcagtctttatactatacacatttaggcctgttttgtttttataaaactgtaatcatataatacagacagttttataatctgctttttaaacacaacaattatataacatttagctgtttcatttgcattcaaattcataagggttccagtaactcatttatcccaa

SEQ ID NO: 180626 - DNA, 864 bp, Homo Sapiens
acaaaaaagttgggtataccttggctcttccaggaatagtagggaaaggcaaagtgctgggattacgggcgtattccactgtgcccagcctgagtttctgtttagaaacaacagtctatgatagtataatcctctcttttttgtacacagagtaaagaggacaaataggtgaaagaataaatgaaaggctggaatcccacttcccccgctgtcccagggcattggatattgacggataggaggcagcaaaccactcacagagccaggaagaaatgaatgcgttggtattgccaggaggggaagccggcccggctgaaatacgctatgaccatagccaggagatactgatggagagaaaggaacacagagagggagaggtcacatcttggaagaggaagattgtggagagggggaatgagggtctggggaggggctgcccatcagagaagggacctcagtgttggggtgactgtactcatttggaaattgcgggatggaggggtattcgaaggtcggatgcaaatctgagaagccagaggaagggttttgggtgatgctcccaggatggtgggctccgatgggatctttggagggggtgtgtctaggtcggctggtgtcaggagggtcttttgtgtgccaggcagagaactgtcccgaagagctgagagtagaggggccaggaacttcagggctgcggccagactgtggcccagagctcagatcccaaaggacccataggagaggcacgggccactcattcactctgcaagagaccagcagaatcctgagggagatgctgacaaatcataaaaagaccaaggaatagccgggagtggcggctcaagccctgtgatcccagtactt

SEQ ID NO: 180627 - DNA, 1540 bp, Homo Sapiens
ttgggttctttgtgtccctacagggcctctcttccatcctcttctcctttcctggtgctcccagcctttcccatggaacagcccacagttgcaggattttctgtctttatgtctgtccccctgatcctgaagcccaaaggtggtaggcgtgaagttacagaagtctgtgtcttcaggtacaatgagtaggtggccaatggccagcttcttagccccgtcctggtgcttccccgacccttctgatccgctcaggcccctgtcctcctcgtacacagctgcagctctccctgccatgtccacgcaaggcacaagggtgtccccagcagaactgcaggcctggatgctggtatccagcacgttcaagccaggtggcctccggcaggctcttgccacaccttcgtttccttatctgtaaaccagggatagtggtctcccggcctccccaggacccagccctccctggtctccccacctccccgtggcccctgttttgaggctgagtccgctgcccctcagtgttagatctcctctgagaggaacctgtggctttgctgcccatccctacttcctgccctcgactgggcagttccttaacagatcagggatcaggaacatgactgcccttgctcatctgctggccctccacatttgcccagtccctgggtctctctgcctccgtttcctccctgtttgatgaggataatcacgaagcacatcacgactgttgggttagatgaagtcatgcaggtaaagctgctgtgcagctgcagacatgtcagcatggctggcagtctctgtgcttggctgagcctgctcagagccacagtgacctcctaggtgtcctcctcccctgctcccatcgtggcatctgggactctgtccccctgccaccctccagggtctcctactgcttctgcctgtttgctctctcctcagtctccctgcagaagagcttccaagtggaggagacacatgactggggtggcaccgtccaagagaggcagtagctgcgagtccagtgggtctcagggcaagccaagtcaaagggctggggcctaagacaacagggataggagtcaatgcacatctgtgagataatggggaagcagcatcaacatgacttggggaccccctgggcccacagctctctgcatggaaagggaggaaggagccaagctggtgagcacccagccagtgttttgtggacatgaacagttctggttctggagagggatcttcgttgagcttgatagagacatgtgctgtcggactgtagatgtcatgagtttctgaggaaaggtcagcatgacaggcaagtgacagacatcagagtcagtaaagatggagcgtggggaggcggggcctgggagcagagaggaggggcctaggaatggagaggtggggccttgagtggaagggtgtggtcttggagtgcagaggcggggcctgggagcagagaggaggggcctcgaaatggagaggtagggcctatgagtgtaaaggtgtggtctttggagtggtagaggcggggccctgcgca

SEQ ID NO: 180628 - DNA, 2381 bp, Homo Sapiens
  misc_feature (479)..(503): n is a, c, g, or t
  misc_feature (510)..(699): n is a, c, g, or t
ttgggtagaatttttttcattcttatattttgccagatctgttatctagctgagttcatttcatctctcccttttttatatcaagtttgaatttgggataatttttctatattaggtacaatttatctaaactgaattgagaaaaaattacagtattattcctcaaaataacatcaatctatttttgtaaacctgttcatactattaaattttgccctaaaagacctcttaataatgattgttgccagtgactgatgattaattttattttacttaaaataagaaaaggagcactttaattacaactgaaaaatcagattgttttgtagtccttccttacactaatttgaactgttaaagattgctgcttttttttgacattgtcaataacgaaacctaattgtaaaacagtcaccatttactaccaataacttttagttaatgttttacaaggaaaaagacacaagaagagtttaaannnnnnnnnnnnnnnnnnnnnnnnngagacannnnnnnnnnnnnnnnnnnnnnnnnnnnnnnnnnnnnnnnnnnnnnnnnnnnnnnnnnnnnnnnnnnnnnnnnnnnnnnnnnnnnnnnnnnnnnnnnnnnnnnnnnnnnnnnnnnnnnnnnnnnnnnnnnnnnnnnnnnnnnnnnnnnnnnnnnnnnnnnnnnnnnnnnnnnnnnnnnnnnnnnnnnnnnggtttaagttaaattttttaaaaaactaaagtgactggcactaagtgaacttgagattatcctcagcttcaagttcctaagataagggctttcttaagctttcaggtgtatgtatcctctagatgtagacaataatgtcccatttctaagtcttttccttttgcttctccttaaattgattgtacttccaaatttgctgttatgtttttttcctaatactgtgatctatctgatctgcagacaagaaccttgtctctgttgaagagcatcaaggggagattatgtacacattgaaactgaagtgtggtgttactgacggaatgtgcagtaactcctcagatatctgttaaggcatttcccagatgtgatgccagccttcttacctgtactgaaagatgcttagcttagaaaaaaacaaaacagatgcaaaatcagataattttattttgtttcatgggttttcttatttactttttaaacaaggaaggaatattagaaaatcacacaaggcctcacatacatgttatttaaagaatgaattgggacggatgtcttagacttcactttcctaggctttttagcaaaacctaaagggtggtatccatattttgcgtgaattatgggtgtaagaccttgcccacttaggttttctatctctgtccttgatcttctttgccaaaatgtgagtatacagaaattttctgtatatttcaacttaagacatttttagcatctgtatagtttgtattcaatttgagaccttttctatgggaagctcagtaatttttattaaaagattgccattgctattcatgtaaaacatggaaaaaaaattgtgtagtgaagccaacagtggacttaggatgggattgaatgttcagtatagtgatctcacttaggagaatttgcaggagaaagtgatagtttattgttttttcctcgcccatattcagttttgttctacttcctccccttccttccagatgataacatcacatctctacagtaagtgcctctgccagcccaacccaggagcgcaagttgtctttgccatctggtctatagtacagtgcgcggcgttaggccacaactcaaaagcattatcttttttagggttagtagaaattgttttatgttgatgggaggtttgtttgattgtcaaaatgtacagccacagccttttaatttgggagcccctgttgtcattcaaatgtgtacctctacagttgtaaaaagtattagattctactatctgtgggttgtgcttgccagacaggtcttaaattgtatattttttggaaaagtttatatactctcttaggaatcattgtgaaaagatcaagaaatcaggatggccatttatttaatatccattcatttcatgttagtgggactattaacttgtcaccaagcaggactctatttcaaacaaaatttaaaactgtttgtggcctatatgtgtttaatcctggttaaagataaagcttcataatgctgtttttattcaacacattaaccagctgtaaaacacagacctttatcaagagtaggcaaagattttcaggattcatatacagatagactataaaagtcatgtaatttgaaaagcagtgtttcattatgaaagagctctcaagttgcttgtaaagctaatctaattaaaaagatgtataatgttgttg

SEQ ID NO: 180629 - DNA, 1099 bp, Homo Sapiens
  misc_feature (454)..(485): n is a, c, g, or t
  misc_feature (487)..(679): n is a, c, g, or t
ttggcctgttagatttgcagccccgtgttggccaggcctgggaattgggtcattcatagttacagctcagattccccgagcacgtttccaccccacgcacacctcagcttcagacactccataaagcttttggagctgaaacattttcttttctttttacttttgtgaattaggtcattttgagtgtgaagtattatgtttttccttttttctccttccccccagaagtcctgtggttgaaaagttacggacatagaatctatatccgtgactatgacattattcaactggaagagtgattttcagggagaaacgacctaaaactctgagaagaagagaattactgacacattaggcttttagctgatccacgtttagggaccaaggtgacgatagacaaaaacccaaccagatgtttaattgtaattggctgtgctgataaacggcttgagannnnnnnnnnnnnnnnnnnnnnnnnnnnnnnntnnnnnnnnnnnnnnnnnnnnnnnnnnnnnnnnnnnnnnnnnnnnnnnnnnnnnnnnnnnnnnnnnnnnnnnnnnnnnnnnnnnnnnnnnnnnnnnnnnnnnnnnnnnnnnnnnnnnnnnnnnnnnnnnnnnnnnnnnnnnnnnnnnnnnnnnnnnnnnnnnnnnnnnnnnnnnnnnnnnnnnnnnnnnnnnnncaaaacaagatgttaatctgtgttaggaaagtcttaaaaggcgccgggaccgttggtaaaactgatggcactcagttgaaagagttagctcttcagtggacgcaagcaaacaggtgactccagcactttgctcccagtcattcccaagttggtctgtcatttcaccccctcctcatcttcctggagcttctgaggcccccccacttcatggttcaacacttgtccaagttgacttctctgcagtctttgcaagctagtccctgtgttgtcctggccactggggagctctgatttgagcatgtcattcagcctcttgactgtggggattgatttcagccctgtgctgcccgtgctgtctggctttccatttaggaaagaagcctaggaaaagctcatgcatttctctttgggcctccacgg

SEQ ID NO: 180630 - DNA, 1311 bp, Homo Sapiens
  misc_feature (234)..(281): n is a, c, g, or t
  misc_feature (292)..(540): n is a, c, g, or t
  misc_feature (1023)..(1093): n is a, c, g, or t
ttggatagtctccagccagttactctcatgatagtactgctataaaactcattcttgtgtggtgttctgtgctatagagtctgtgtattgctgttcatattcggagttctggttttgtttttcccttaaaacctgttaacagttttttttgggggtggggggattcagaactcttgtttcccattccatagcacctgacattatttcaagttttataatatcttaaggtgtatnnnnnnnnnnnnnnnnnnnnnnnnnnnnnnnnnnnnnnnnnnnnnnnnagatggagttnnnnnnnnnnnnnnnnnnnnnnnnnnnnnnnnnnnnnnnnnnnnnnnnnnnnnnnnnnnnnnnnnnnnnnnnnnnnnnnnnnnnnnnnnnnnnnnnnnnnnnnnnnnnnnnnnnnnnnnnnnnnnnnnnnnnnnnnnnnnnnnnnnnnnnnnnnnnnnnnnnnnnnnnnnnnnnnnnnnnnnnnnnnnnnnnnnnnnnnnnnnnnnnnnnnnnnnnnnnnnnnnnnnnnnnnnnnnnnnnnnnnnnnnnatgagccaccatgcctggccttattggcttagtttttaaattatcctccaaaaattttgggcctttttctgtggggaaacaagtgaagctgctcttcagcatagacactacctttatcccatcattttagtaaaaactaggtttgtttcacttctgaggtgtcttattaatgtacttcatctgagaatttgttgatcttaatgttcgagctatataagaactgccattaaaaaaaatgggataatagatgattttatcagtatacctgtggaatatgtacaaactggatctatagatattttgaactggaccaggtgggtattgaagtaacccatcaaaatatgctctgcagtgattccgcttaatgtttaaattcagtaacgtacttgaaaggcaaatttcagtgcttttgttatgttggaggagggcttactgatgcgtgctaagaccgatttctgattgagggatgaaccttgggctcannnnnnnnnnnnnnnnnnnnnnnnnnnnnnnnnnnnnnnnnnnnnnnnnnnnnnnnnnnnnnnnnnnnnnngaatgtatcatgtcttcattaacaacagaaaatccacatggtgtttactaaacttgtttacgacattaaaaatttcctttttatttttagtagcccaggttgagtttttcacaagagatttttttcttagctgaggtatagttgtatagcaagaagaattaagccagatttttgtgtgtggaaagacagttttctatccacgtctttttctgtttgtc

SEQ ID NO: 180631 - DNA, 1038 bp, Homo Sapiens
cttttttataatggccaactttgtacaaaaaagttggctcagggctatgtgagactggcaggagaagataagactttatgcctgagctcagtcgtttatttcctggtgtttgtgcttttgaatgtttatgttcataaagtcaccattttctgtttcctcttcgggaatgtttttactaacatgagtggctattcagagtattgcaatagatgagctgcttttaaatttgctttaagtcaggtgttcaaggttttctttggacagctcccaaggtagaaatggaagactctagacactatatgaagaaaaagatcaggaaagctctcctcttctttggtcttaggggatgttttgtttttagtgtttccatcctggtgaatgtctccatagccttcacttcttatgtttgttatacagagactcatgtttttctagatgcagagtttttatccacaaggaaacagttgttaacaccacacagtaaccactctcaatatttcttgcataagttcatgggatcagagactagagctaagtcaggctgttttgctacatgggattgttttggtcaccaagtgtacaagcagtggtggtctgtggtcgcctgcacataggccaggaggacagtgtgtgtcatgactgaaactctcctttgtctctgtgtgtggcaggtctggcagacccatctgcgttaacacaagcggttgctgcctaccaaggctgtcattttataggcatgcctgaatgtgaggtaaagtaatcagctcatttcttgcaaatcacttcttttctctctcgtgctctgtccctttgtagatttgaataaatgtccctccttcaccattggtgtattggacccactgagtatgctgcttggctttggaattccaattgtagactcttagactcctagagagggaaaccttctgtgtcaacgaggtcatgtgttcaaactgttctcgggattccggggttcagagcacatgctccatatgttcccagggagcagaaaggttaaaggagctgaacagcaaagcc

SEQ ID NO: 180632 - DNA, 1387 bp, Homo Sapiens
  misc_feature (606)..(717): n is a, c, g, or t
gtacaaaaaagttgggtaaaaatgggccatgtgaagaattttcataatgtaatttgtgtctttgtatattttgaactacatatagatttgtggcacttaaattattaatttttgatttcttaagagtgaagtctgtaaatgatttctctctgctgtacttctgtgtttgtatggttggtcattttgaaaactggtgagattgcacagtcccaaacctggatgtcttaaatacaaggaattacaaactgtgatttttgtcttgaagacctggaagaattcattgtgcttcagtatgtatttgtactgcacttgattaattagttaagtattggtctggtgcaattgacattaactgtcatcaactcctctattttgtgctaaataaagtcatttagtcagaatggatcaaatataaacttatactttaaaataaacttagattataaaaacttgttcaataaaaaagacccactgaaaaatcttcaaagtacatgtaacacatagctaatacaggagaccaaaatcaataatacattgtgtggctaaactcatccacctaatgtactgtgaatttgcttcagaaacattcttttagaaagttgtgtnnnnnnnnnnnnnnnnnnnnnnnnnnnnnnnnnnnnnnnnnnnnnnnnnnnnnnnnnnnnnnnnnnnnnnnnnnnnnnnnnnnnnnnnnnnnnnnnnnnnnnnnnnnnnnnntttggccaaggtgctgggattacagggcgtgagccaccgcgcccagctgcttctttcttctctatttacagtctactgtatcgccttttgcccccagtaacatgatccacaatagtagttctcaactgaggtatattagtcaggattctccagaaaaagaaagaaacaacaggtagaactgagagagagaaagagattgattgattataaggaataggttcatgtaattatggaggctgagaagtcccaagatctgcagttgggaggctgagaggctggggagtcagtgatgttccaatctgaatttgaagacctgagaaccaggagagcttatggcataagttccagtccaaaagctggcaggcttgaaactcaagaagagctgatgtttccatttgggtccaaagggaagaaaagaccgataattgcagctcaagcagtcaggccagagaaagtctctttttttattatattctggccttcaactgatggaatgagagccacccacatcagggagggtgatcttctttacgcagtctactgattcagattttgtctccctccagaacaccctcacggacacacccagaataatgtttgactaactattggggcagcccatggcccagtcatttggacacataaaattaaacattacacagggctatcc

SEQ ID NO: 180633 - DNA, 1030 bp, Homo Sapiens
  misc_feature (184)..(207): n is a, c, g, or t
  misc_feature (573)..(593): n is a, c, g, or t
tgagccactgtgccaggttttaaatcatactttaaataaattatactttaaaatgctttacttctcaagattgaagataacccagatcaaacttcaggaaatgggacaatttttataaaatttcatgtgatacaaatttagaggatggattttgttactgctttttctgaaaacaaaaacttcnnnnnnnnnnnnnnnnnnnnnnnnaatgggagattctaaattcagagaacaaaatttttagcatcattataaagttgggtcttttttcctactcttgtttctttttaacgatttgtcaactttaataattatggtaaattacacagagatttctcaagcagaactaatcttaatgacttggcctgaaataaatcatactttgactgttaataatgatacttattttcaacaaattttttcagaatgttcagggtcttgttttttttaaattgtcaccatgctcaagttagattaattctttattgttattcttttcaagatcacattttttgttgtggctgttcacacagatggtacgggacttttttttagcccattataattcatggnnnnnnnnnnnnnnnnnnnnngagcttttatagcagctcatccctaattctacttcatttcctatacctgagttttgccagaagtttttggatgcagttataactagcattctgttttgttttgtttttaaatactaccgaacatttattgagcctttattatatggtgggaacttatttgtctttatttctcaatgtctttatcaccagaacactgaaaaataatcatttgtaaaattcataattttctgcataaactatatttaaatgccatattaaaaaggtgacaaattcaggtaagattatcgagagtaagaattgaataccacttttatcctgatattcctatcttataacctcccatacaacagatgcaaaatatattttatgtatgttttgttttatttatgatatacacaaatctcattttacagattatttgaggtgagactacacac

SEQ ID NO: 180634 - DNA, 1645 bp, Homo Sapiens
  misc_feature (420)..(470): n is a, c, g, or t
  misc_feature (1145)..(1154): n is a, c, g, or t
ttggattagtatcagtcccatcaagccaaacagaatgaagacctttgatagtaatagcaagaggttacaaatagcagggaggaggcgagtagtgaatgtcactgtgattgcaaacccttacctgtattatcacacgtagtcctcacaacaaccttgtgagacaagtgttgtgttcctcattttttcagaggggaacacagacccagagaggttaagaaatttgcccaagataacaagtaaaaggcaaagttggttgcaaaagaggtgtttctgaattcaagggccatactctctctctgacaacatgctctaagtccatagagtaagcactctagtatgaaaaaaagtttcaaggaacgaggccatgaaaatgagactatttgacatctcagatctgtctgggatgttatggaggttttnnnnnnnnnnnnnnnnnnnnnnnnnnnnnnnnnnnnnnnnnnnnnnnnnnncacatgtaacacatttcaagtgtttgaaaataaaaccaaaatctaaactttagtcttcaagcagacattcagtgttactttagaaaactcactgaattaggtggaaatgatggaataatactattcatggccagctattaacacagaagaacatggcagtgtgtgtctggaacggcatgcacaatttgtaaacctttttcaaatatcatttaatcaactcagaataaagtgccctgtagccaacagtgcctctttacttgcttctctgggaaatacatggtacaaattagtagcacaaagtttgggaatatgcaaaataatggataaccatttttcaaaatgtacattctctgaagaggaagcagctggttggacaggatttcttgaagagccaggtgctaagggcatcaggtcgacatccatagtaaccatgtgccataacatctacacatttccacttgttttacagacaaggtaacaggcagaaggaaaatccagagtcttgcagtaagcagatgacaaaacttcaatatgcttgggcaccacttaggtgaccccagggagatttagtgtggccttaggaaagcaaaagagcactttttattggaaatatgagcttgtcactgggaaagatttgtaaaattgatcaagaacttgatttataattatgcctcnnnnnnnnnngttctcatttagtagtggagcaatctagaaaacataccttttttgtttgtttggaagatcctctttccctggctgtattgtagtgtttgctatttgatgtggaaataactaataacttaagattttggaacagaacaccctttagatttccaaaacacaattcttatttcagggaagacagaccaaaaatatctcctgagatcattggtttctttataaattgtggtaccactccatcattgaagagaaaccactaccacaccactagcaccatacagaaccttttctctgtatctttgtacaatactacaaaggggtaccagggaggagagagtggctgaccactttagtgacaaaacagcactccactgctggtgaatcccatctaattatggtccttccacccttttcaaccaccaacaactgttcgtactgttaattcctatcctgaagtttaaccagtggttgtctagtatcttctgtctttagaa

SEQ ID NO: 180635 - DNA, 1554 bp, Homo Sapiens
  misc_feature (226)..(246): n is a, c, g, or t
ttggtattaattacacataatgcttattgattcaatgaggtttctctaaagacttctgcttaataaatatgctgacttcatttaaattagtttagactattgtaggaatggaaggaaatgattatatttactagaattagtgagatcagaaagcatatcagaatgttgatgatatcaaggagacaatctacagagtttttgcctctgtggatggaaataagggtgnnnnnnnnnnnnnnnnnnnnnactttagtttcccataatttttggaaattatgtgtgcatttagttcttttagtaacactgattttaaaattaaatttcaaaagtcaatctctaagagtaatttatttttgttttaccaaccagtgccaaaaaggagaggagggaatccaaaagccaatcttttgaaccaatgtgtaaaagattatgttttttcttaaagttagggaggctcgggccctgacactgccagccccagtgagcatccctggctacctcgggattatgtgcaagctgctttgtcctacatttctttcatctggttcttattgggagtgcttctctctaataaaaattgatttcccacaaaataggcaaagctgaacaaagatgaatgcttttgataagttgggtttcacttcagttgaaacaatgtgatagaatatccaggtgtggcatgatggggcaggaggaggtgcctagagggaaaagttatttttgtttcttagtgttgtgttgtggggatgggacagataagaataagatgtttattgccctaatcatgctaagagactattattcaatatgcttttcccgcttttctaagaggaataaacttagacaaattacattataaacagttcccctactactatctcccactctagataaagccagtgggtggtatgggtccttttattccttatagtattatgccaaagaatcaacttattttcattgaagattataaataaatgaagcttgttatagccataatgatttgagtcagtataccattttacctataaaatgcaaaattcatccttgcaaccccattcaccaggagccttgaagcattttgtttactccaaaggccttgtcaaggaagcataattttttgttttgccttcttatttagtcagtttggtcatatttacttaaaaaaacaaactgaaaatcacactcctttatatgttgatataactgattttatagaatctgtctgttctttgtttaacaggtctctgtaagcaagcttgcaagtgtattttgtgtacattttatctgaggtggaaatgaaaattctaaagagaaaatattttaaaagatattgtatttatgttgcttgtgttgtagaataaagattcaaatgcattaaaaatctggtacatgaaacaattgtgtttactgaataaatatatataaatatcctgtgtttacagaattctgtcaaaagaattaggccccttttcagggcatttcttaagtctaaatgtaaaggcccattttaaatcctgtaacatggagataatcattattgacaatttggta

SEQ ID NO: 180636 - DNA, 1791 bp, Homo Sapiens
  misc_feature (223)..(232): n is a, c, g, or t
  misc_feature (725)..(783): n is a, c, g, or t
ttggacttgttttacagacaaggtaacaggcagaaggaaaatccagagtcttgcagtaagcagatgacaaaacttcaatatgcttgggcaccacttaggtgaccccagggagatttagtgtggccttaggaaagcaaaagagcactttttattggaaatatgagcttgtcactgggaaagatttgtaaaattgatcaagaacttgatttataattatgcctcnnnnnnnnnngttctcatttagtagtggagcaatctagaaaacataccttttttgtttgtttggaagatcctctttccctggctgtattgtagtgtttgctatttgatgtggaaataactaataacttaagattttggaacagaacaccctttagatttccaaaacacaattcttatttcagggaagacagaccaaaaatatctcctgagatcattggtttctttataaattgtggtaccactccatcattgaagagaaaccactaccacaccactagcaccatacagaaccttttctctgtatctttgtacaatactacaaaggggtaccagggaggagagagtggctgaccactttagtgacaaaacagcactccactgctggtgaatcccatctaattatggtccttccacccttttcaaccaccaacaactgttcgtactgttaattcctatcctgaaggtttaaccagtggttgtctagtatcttctgtctttagaannnnnnnnnnnnnnnnnnnnnnnnnnnnnnnnnnnnnnnnnnnnnnnnnnnnnnnnnnnaagacacagattgctgggctcatggtcagagttcccagttaagtaaatcaggaaatttgtatttctaacaagtttataggtgaggccaatactgctgttttgggaactatgctttgagaaccactgccttgaaaaaatttccaacttctacctttaagatcagcctgacttatcaaacgctagagaaaaactgaatctacccttgggcagatgacttgggattggattctatacagcagtcttgctcaatcttcccagtttccagttttattataccaacaattggtttttacaagctagaagacaatgaatgtataagttctatggaacagtgagataaatctaagcttcttgtctttgtatttagaaacattgattctatggatgatcatttgtatcatgttgaccctttgacttgtactgaaggtgattttaaatttaagtatgtagtgtttgaatttcttccatccatgtcgttttaatgagatgtttccatgtcagctcctttacagccttggctcctggcttacagatttttgaatagttgtttgcttgccagttgttttacatctttcattggccaccaaaatattagccatttgagatgagatgagactacttgttgtaccttcatctttcatttaattttctggcgtaaattaacattttaatttcatatatatctgtaaagagtctacccaaaggcttcacggaaatttgcaaaatgaactaattcccttttaagcagcaggtgtgcctgtttttgacttttcagtaaatatgttgtttgtgcacatatctacatggtggagaccatattcattatttcatcttccaaataatgggaaaaatataaaagtgaatcagtgtgctttgggaattcagtgaaatcatgttaactcatatagagggggccttagtttatctcttctttactgaattaattagttttggaaattcttttaccattaaaaaaattaagaccatacagagaatgatttagaaaaa

SEQ ID NO: 180637 - DNA, 987 bp, Homo Sapiens
  misc_feature (456)..(572): n is a, c, g, or t
  misc_feature (575)..(586): n is a, c, g, or t
  misc_feature (642)..(687): n is a, c, g, or t
ctttgtacaaaaagttgggccaccgtgcctggccagaaaatctggattcttattcctagttcttcatttctgtcacatgcacttagttgacattacatctacatatattagctttttcctacatgagccatctatttacttagtaaccagtgttcttaatgaagtatttagtcttgggtttcttgtaaaatttctctgcattccttagacagtgtactatacatgaaatattcttgttgacctagtaatttatattattccatttaattcttaaacctatggcctttttattgagcacactcttaaatcattatttggcttgtaaacattcatctgaattgtggctacaatcctctttaaataatctaggaaaaaagaaagataaagcttacattttcacagttttggctcttaaacacattccacaaatgccattaagaatttattttgttttannnnnnnnnnnnnnnnnnnnnnnnnnnnnnnnnnnnnnnnnnnnnnnnnnnnnnnnnnnnnnnnnnnnnnnnnnnnnnnnnnnnnnnnnnnnnnnnnnnnnnnnnnnnnnnnnnnnnccnnnnnnnnnnnngtttattttgttttagagtcatttaatgtgtttttatgcacaataatagtgggagnnnnnnnnnnnnnnnnnnnnnnnnnnnnnnnnnnnnnnnnnnnnnnctttccatgtgggaaaagttaacattggaactgtttctagtaaaagatttttttcaggctgggattacaggcgtgactcaccatgcccagccacttagttttttcttattcccacctttctatcccataaaacactcttttttatcttccctgaaccatattgatgaaataaatagggctgggggctgggccccgctggtcactcaacagagtatttcccttggccgagatggaatttttctcccaatagatgagctgctgagcatcaacaaggtgacatttttctgctgcccatttgtg

SEQ ID NO: 180638 - DNA, 1272 bp, Homo Sapiens
  misc_feature (1007)..(1038): n is a, c, g, or t
  misc_feature (1101)..(1154): n is a, c, g, or t
ttggcgccgaggagctaccggaacttcaggcatccagaaatagttggctactccgtaccaggacgaaatgggcaaagtcaagacctcgtcaaaggatgtgcaagaacagcccaggctccggaagacagaagtacagagccagatggcagtgaggcagaaggcaaccaggtctattttgctgtctacaccttcaaggcacgaaacccaaatgagctgagcgtgtcagccaatcagaaactcaagatcctcgagtttaaagatgttacaggaaatacagagtggtggttagctgaggttaacgggaagaagggctacgttccctccaattatatccgcaaaaccgagtacacctgagcccacgttgcctgccacccagccttgctgcctttgctttcagtccgccgagggttctggcggcccaccgagagggcgcctgctcctgagacacaggccctgtctgcgttgcttaaccatggcatggtggagcacaccacagatcttgttctcctcgattgggttgtaaaccttgatgctcactagaatctctagaatttgaaatggaccctggggctttgcaaatgacttagtgactatgagaagagagacaagtcttggagctggcttttggaaaggagaaacttgcagtcagaagcccagtgtcctatgtatgcaggaagctgtgctctagcaatagacagtgttggtaatggttgtgctgtacggcgtttggggtggccccatgttccatgctcagctgaccggatgccaactcagatgaaaagaattcatggctctgggcaccccgtgaggcagtgcttgcacatggctgggagtttgtcgggattgaaccaaacctagtgcttcaaagctcctgggacacctccagtgtccagcacacattctcatacatactgcccctaatttctaaagtccctaaagcactacattctgtaaccttgtttcttttactccattcccagattagttatgcaaaattcaactgcgtnnnnnnnnnnnnnnnnnnnnnnnnnnnnnnnntctgttgacccttcatctgaaagattctcttcccttgttaggtacaatcactgcccccccgcnnnnnnnnnnnnnnnnnnnnnnnnnnnnnnnnnnnnnnnnnnnnnnnnnnnnnngggctcacagcacccctcccgcctccctgctgagattacaggtgtaagccaccataccgcaacctcaatgacacctttctgatggtctttacacagtctgtgatgtctggtggccccc

SEQ ID NO: 180639 - DNA, 1224 bp, Homo Sapiens
aaagggcactccatcttgaaaaggaaagaccaagaatgtgctagagtaaagagacagagaccagaccctactctcaagatcaagagactttcagtctcggagacatctgccatttctctcttcttaataaacctcattgcctttaaaaatacatttgctttgggggcccagaatcaagaaaggaaacttacaaagtaaacagaagttactccccacagggaggcagaagcagattaaccccaacagcagacatctgcccggaagagcaaactccacatctggccacgttcccaggggagggtggcaaacagactcaaggagtgaatgtcagtgtcctggccattcctgacttcccgggctgaaagcatcgccttccgccacagttctcaagggtggagaacccttggctctgggttttacctgtctgttcccaaagccagaaaatcacagctaagaaaggaagaattcaaatggccaacctgctgagagcagccaacacccagcttcccgaagctgagctgggagaggtcacctggagaaggaaacaaagccccacactggagctgagaccttattttccccaagcccaggaaggcaacgtgaccgatggcaggagagcccagaaaggtcactgccagaggaacatctccaggttccttcttcaaagttatcatcaagataaagatgcagcctacagagatgacaggaatctactcccacatcaaatcttcaccaagataatgtccagatacacagctctgatgccgatatctagctatacatagccaggtatctaaatataatatctagttacaccagtagccacacaaccccagataaccagtcacaacaccactgagagatgctgataccgaggtaggcagttatctcaacacctagataagaagaaagagcttatggcatccatgtagagatgtctggaagggcagagcaaaacgcaacgtgatgacaatgttaatagattattatctcttattgttcaatacacatcaatcgcctccttttacaaattcctggtaaaccagagaagacagaaaaaccactcttgaggatgaggaagtttctgtctcccattcactggagcccagccatgaagaccaagctcattaagattgaggaggtagaagtggccatggagaggattcctcagctttactttgatttgagaaattcatgttcttcagaaatatatatatatgccaa

SEQ ID NO: 180640 - DNA, 1269 bp, Homo Sapiens
  misc_feature (324)..(336): n is a, c, g, or t
ttggtccattttacctgtcctgaagtgtttcattcactcgaatggagcggaccaccatgatttctcttcatgaattttggtttcccagttgaacaatactgcttgaggcctctaagccaaaaatgtgggcttttagcgatctaggccaccacatctggcaagaagaacaaagctgtcctgacacgctgggtggggatttgtccctgtgtgaccctcttagccccacttccaaccatctggttacccagagagttgactgggcatgaggcaagaggcaagaggctttgccatgaaccagcttaaggaaatagaaactctcattcnnnnnnnnnnnnngtcaggaaaacatgaaaaatcacatcatatgtgaggcaatactctgggatgctaacctagtctttagtgttcctgtttcctttgataatctacttcagtaaatggaaactaaattgctccattaaatttctaaacactacattaagaagataaacagacaaaacaaaaacctctcagtctgcaagggataaatccaaaaccaaacagtgggacacaatgttctccagaaacaattagacttgactttcacaccaaaaaaaatgtaatcatcagtgatgtcttagaattgcagggttttgaatgaaacttaagaatgaaactatggtgctcaaaagcactaactcatggtggttactgttatcccccaaagatcatttcattctggtaacccaatgaggtaggtactatttttctttccatttaataggtgacaaaactgaggcacagtgaggttagtaacataactagcaagtgtgagacaccggaattttaacatggttcatagctaccatgctgttttgcctctcatgatctggaagtgactccagtgctcagtgccaggggaagcccaggctcctatttgagcaggctcccaagacaccaagggtctatcaagttgccaaggaaaaactcattcaggctcaggacatcagtttctaaagtgcattcccataccctaggtatctggaaatccatcataaccttaagtattaatagtatatttatccccatttcacggccacaggaactaaggctgttgaaagttaaacaacttttctgagtttggacacatcatctacatttctcatctaattcccagacactgttctttccctgatgacatatatccaagtttaagcacaaccaagcaagggttgagaaagcttcagacatttacaaagctcccttcatacctagtactgtgcttagacc

SEQ ID NO: 180641 - DNA, 1635 bp, Homo Sapiens
ttggccttctcaattttttttcagcatcagataaactgctgctggcctggagggaaatggagcaggctgtggagctctgtgggcgggtaggagactcattttgggtttcggaacttaccaagggggtgagattttgtgctcccacttttcactttctcatcaaacactgggtcgatctctgtcaaaaatcaggtgttcctcaccatgctttgagcttaactggaccagctgaaaagaggccaagagagtagccagtgaagggagcccctctgtggccagatgcaagagctgcatgaatggacagagatggtccaggtttaaataagaagcaagggttaggttcccttggggaaaagccaagaccatttcctgttaggaagggcattggatggatgatcaacactccctcttgtcgaaggtttttgactaattttgttgggatgctaaatccataggaaataaaaggtctaggcagaaagtctcagggcagcgtaaatcagatgtcaccaaaaaaagttaattatgaaggcaaaggaaatacatgtgacttaatgaacctcacacaaactgaaggttgaagtcaggctccggggctttttcctggacttatcctctgttttcccctgtgtacttgggcaaggatcttcacctgtgtcttagtatcgatttttatgaatcagtactgatggagtatatgtgtgtttaatggtgaatattaaccatagaagggctgagtgctcctccccatcttgggactcataatctgtgaaataaaacagtctgggcctccctgcccgggtagcatcaggatagacagatgaagagaagagaaagtaatgtgtcttgggcatcttctgtatgccaggcaccatgccagaggctttaagtacttcatcttacttgactcctcagatggccctgttagaagcctattttatgcaaaaggaaactgtagctgggggtaagtaacttgccaaggggtcacacagctagaaagcggtggaccctagatgcaggcgcagccattcagaccccacagtccacattcctttgagccagtccattgagggtcctcagggaatgtggcgggtcccctggtctcgctcccccgcagatcttgcatctcagcatgcgcctaccacatcagttgacattagcacagcttttccattaggagaacgaagtgaaactcctggtagaacggatgatggctctgcagaccgacattgtggacttacagaggagccccatgggccggaagcaggggggaacgctggacgacctagaggagcaagcaagggagctgtacaggagactaagggaaaaacctcgagaccagcgaactgagggtgacagtcaggaaatggtacggctgctgcttcaggcaattcagagcttcgagaagaaagtgcgagtgatctatacgcagctcagtaaaactgtggtttgcaagcagaagcgctggactgttgcccaaggtggaagaggtggtgagcttaatgaatgaggatgagaagactgttgtccggctgcagagaagcggcagaagagctctggaatctcctgaagattgcttgtagcaaggtccgtggtcctgtcagtggaagcccggatagcatgaatgcctctcgactt

SEQ ID NO: 180642 - DNA, 1233 bp, Homo Sapiens
ttggtttttcctaggagagggcttgtggcatccagcagattctcctgagggtttgtgacccccccacacccccaaaaagtcaggcacttgttccttgtcacggtcactgtcattgatagcaagaagtatcccggttgttggtaatttagccgtttgcttcctttttctgccccagagggtctgtttcaggggaacagccacacagattttggtaccttcggttattgccctgcctcccagttgtgcgggaagcagttgctccgacactagtggacggagcagaacctgtgccttgtggtctcagcactgggccggactcacctgagagctggtgtggaaaaccagttgcactaggacctctgcagaaggagtggaacttttgcgttgtttttcttaatgcagcgtcatggatccatcttcctgtggagggaactcttctgtgtgtgatatggagggcacgggtctggagccagtctggggagggctgagggagagctgccctgagcttggttctggaggatgaggtggggtgctcctgggcactctgagaacatggctttgcctggtagcaggacagctggaggtccttctttctgccacagtcagctttcgttgaagctgttttgatgatgagctcccagcttcagagtcaggacccaagcggggctccacgaaaggcctgggcgacccagccactgggcctaagcctgacctgctgcacccctgcctccctccacagttgccgaggtactgtctgaatgccgcctgctcgcctacatatcccaggtgcccacgcagatgtccttcctcttccgcctcatcaacatcatccacgtgcagacgctgacccaggtgagaggccccggcagacacacagcagggaaggtcgattggaaaccacttcctttgtcctggtgcccagcaggtttctgtcccccactccagaagtgcgtctctggagacccagctcttctgaggactgtgctcaggaggaatcagtgtcccaatgtacagacagggccctaaggaaggagggctcgcaagtgccctcaggtcacaggctgacttgcatgccagtgctctccccgcctcccccatgtccacgtcccctcacaccttctgccctgctgggctttggaatcggacctgaggctgcccaactccctcactgaataatcatgcagcccttccttctctgagcctcctgcccctcttttctaagtgagggtgatc

SEQ ID NO: 180643 - DNA, 1546 bp, Homo Sapiens
  misc_feature (440)..(503): n is a, c, g, or t
aatcttaaaaatcaggatgcaagaaaccaaatcataacttgtcctaacttgacaaataaatatatttatatgacatcaagctttattttagttcactcctaactaaaaaagaccagctttgccttcaaaaaaggagaaggtaggataaaaacttgtatctaaacagttaactgaaagattgctaagacatgctagttgaccatcagtaagaacattaaacaaaagcattttctactgttcctatatatttcttatgagcaatggtataaggattttgttgaacataaagatagatcagaattacagccaagttcacccaaatcaggtagaaaaacatctaagggaaagcctataagtacctgatactgaaatggtaagtggttggtaagtagtgtcaagcactactctaagcacttcacctgaaaacaccactaggcaannnnnnnnnnnnnnnnnnnnnnnnnnnnnnnnnnnnnnnnnnnnnnnnnnnnnnnnnnnnnnnnggctgcacagttaagaaatggtacaggcaagatttgccacagactatacatggttttctaaaatttctacaacactatttccatttatatacaggagtcaattttaaaatgaaatgtaaatataagccaggtctcttttacttaatatatttaacagatattcttcatacattggtttatattataataattgatcagtaaagaaaattattacactataaaagcaccctgaaatgttaagtcaatatcattgcttaaataatttagaagccaaattaatgctgggtgtgagagttgggaaaattatattaggactaacaaagcagtggtactggaatgccagctatattaatgagttttgtattaattacatattgaatgaaacaaagatacaaaagacaaaatctagattttgattgttttcaaaaccgtctcacacccaaatgcaaagcagttggaaagtacaagctgagggaggactaaaagatgttttctacattcttctaaataatgagccaatatagtttaaactgactgctgaaaataatttcctaaagtctttatatgtatttccttgagtaccttctcacattcagacactcaagttgtcctatatacaatacctaaaaatacagggaggccttgactgcaaaaaaagtcccctcactttcacatagaactagcacccctcgtcttaacctctaagaccacctaaacaaccaaagtactgcttagccacatcccacacaactatgaacagctgtactggtggaataaactgtagtaacaaagctaggaatttctgtaaacagtatgaccaactgccacttttaaataagggattaaatgaatcaaggaaatgggaggctcttccatgttaaaaactcaacacaaactaagacatacttatctgtaatccaaacagcattactgaagcaatggtggaaaggacaatggccgctgctgcagaaaagcctttcatgatgttgtctgtgtacttaaccacaacagaagtgtagagccaacttttttgtacaaagttg

SEQ ID NO: 180644 - DNA, 1812 bp, Homo Sapiens
ttggcgtcagcattttgtctaatcgcggcctgtgacgctcgaagggcggggagcagagggagatacagaaaccgacaggggccaggcacccggtggctccgaagcggggaagtgggacaagatggtttacatctcgaacggacaagtgttggacagccggagtcagtctccatggagattatctttgataacagatttcttctggggaatagctgagtttgtggttttgtttttcaaaactctgcttcagcaagatgtgaaaaaaagaagaagctatggaaactcatctgattccagatatgatgatggaagagggccaccaggaaaccctccccgaagaatgggtagaatcaatcatctgcgtggccctagtccccctccaatggctggtggatgaggaaggtaaatgtctgctctaagaagcagacaaccggacatgcgcattcatagcagaaggaaaccatcaagaagtggaaggctgaccatgatgagcagtagatgaatgtgtatgtctaaacaaggactgctctgtgtcctcacagatgaatgaggtcatgctgggaattccctctgcagggaactggcctgactgacatgcagttccataaatgcagatgtttgtctcattacctttttgtatagtttattaaagtattaatatagttttaataagtaaatatttttaggttgcagaatggactcctcatctttatattcacgaaaaagcaatctgaagaaaacaaataaaagcctgtgtatttagcactgttagtgtcaccttttcaacttctgaaacactgttcattgttaactttttctcatttataaatcactgtatttattttagtagtatgcatagcatatctgtgctcttgaattaatttttatctttaacatatttgtctcatcaatctttaatacactgtgtctaatttgctaccaaatgtaattatcagggtatttataaaaccatagctaacaaaactgagctacaaaatgaaaatttactaaatagtttttaaaatcatgagccaccacgcccagccaaaatatttttttaaagtcattttccttaagctgcttgggctacatgtgaaatacactggacggtcaacattcctgtctcctcccatttgggctgatgcagcagatccagggaatgttacctgtttctgctgctagaagatccaggaaattgggaaggttacctgacgcacacatggatgaaggccatcatctagaaatggggtcaaccacaattgtgttaattccgtagtgtcagggattcttcgggaaggtcaacagtatgaaggattctgacccctgtgcctcccatttatgtgatcaggtgacagttaataaccgtggaggtcacactcagccatccaacagccttacagtgaccctacacaaaagcccccaaattccaaagactttttcttaacctaaaggaagaaattatttgttaattccagtagagcaactgaatatactgggctatttgtacttttttatagagaactttaataataattctttaaaaatgagtttttagaacaaagcaactgacgatttcctaagattccaatgccctggagcttgtaggaggacttagcctgggtcagctggagcacccccgacctgatctcccactgccagattttcccatgctcctagggtatggagtccacgtgggaatgactgcaagttcactggaacttgggccgactgatgctctgcgagtttttaatagacactggggacaactgcttaaggtttagaaacttccaaaccacaggaaagacattttta

SEQ ID NO: 180645 - DNA, 1075 bp, Homo Sapiens
ttggattctttaagaatcttttccagtaaacatttgttactttttcaaagtaattgggagctgttgagtgtggaagcgaaaaccaagttaagaagtcctgttatttgggtgagtccagttcctataaaagttctgttggatgtgtcttaaattgttcggtgcacctcagctctctcccgcagggatccggagaaactgcgccattgttgtcttacagagaaacaaccttctaacactctcttcgccgccatctttttcaagattttaaattgaaaatactttttttgacggctcttgccattatgtctggacgttttaatttcaacaaaacgaaataatagtgttaagttctttgagtcaaacccgatattacagaggtagggattccaggatattagaattttactataacacaaatgaaacacaaagttccttatgcttaacagtgtatcttagaaaaccttgtttgagtgaattagccttgtactctataatgaaacgaggaatcattgagagatacttaggcaacggattttaaatgagtgaataaggaagggaaaaacttcaggaaaatgcagaaaaaagcagcggagattttggaaaaaaaattctaaagcactttctaacgcaaacacattcgattttttatagctaaacaggataacagatcagtctattaagttaaatgatcaatgtctttgcaggtcatggtctacgtgaaacatcaaagaaacctgtaacggaaaacgacttgtttgaaagagccagttctctatccaaatttaccaatcagaatcttgcactgaaaaaataaaccaatcgtgaatctctacggccacttccggaatttagcaaccgatcactaacagggatcgtccacaatccaatcagagtgattctgttcctatatagaggggcaaaccaatcttcctaactcatttactttgcagatgaactatggcgcgtactaagcagacggctcgtaaatccacaggcggtaaagcaccgcgcaaacagctggccactaaggcagctcgcaagagcgctccggccacgggcggcgtgaagaagccaa

SEQ ID NO: 180646 - DNA, 1631 bp, Homo Sapiens
ttggctcaatgtgtcataggtacccttacatattgattcattggacctgactgccatgttccactggacagactcaccagaatttatttgaccaaatcccttccagatggacattgggttgctttagttttgcacgaccacagacagcaccagtcaaggtccttacacacatcaattaactatggagtctcccgccagcttaggtctgcgtgctacaagtggggttgtgggctcacagggcatgcgcatctgacagttgaagagaggacaccaactgccttccaaaagggcagtaagaaagtgtccttcgctagagtgagtggctcactgcagttcaagatggagcagtgggggaagcagctctgtggtggtagtctactgagtgtatccttccagtatggttcccaactaatctccatttgccactgaccaggccacagatggggaagtcacagccgtggaggaggcaccggtaaatgcatgtccccctggattcaggccctgggtacaattttggttttttcctttttgtgtttctgtgtttactcagccttcatttcagaaaatctgccatctgcttctgggattgcttaagccctgtgggtgtcctggtcattggtgtgcccctcactgatcagcccatcacgatgatccctgctttttctgtaataagatcacctttgcgtcaccatccgtgctccacgaatcgccagccgtcgtgtctgtgatcacgctcggtgcagtttgtctctgtgtttaaagagaaagacagacagctgtctgcagccctcctgctgcctctcaaagccgccacttgcacattcagtttctgttcagggggaaagccacccactgctactctctgccacttaaaatgcaccttcttttccaggccacaagcaactaaacctttccagatggagcctcttgggactcatagacattgctgtctctcacttttccactttcccgtgggtgctgctgggaattttacaaacagactcccgagtgattgctaacagttggtcagcatgacctctccagtccctcaggttctaccctgggtctggagccacttagacaaagcccataccacaatgggcagccgcattcccaaatcccggcctcactggcttgtagaattcccagcagctctaacccctgtagcttcaccagctcccgctgttgtctgctttacccagtgaccactgccttctgtttttaggtgaccgaagaggcctatgtcccagtgagtgacatgaacggcctgggatttaagccttttgacctggtcattccgtttgctgtcaggaaaggagaaatcactggagaggtccacatgccttctgggaagacagccacacctgagattgtggacaacaaggacggcacggtcactgttagatatgcccccactgaggtcgggctccatgagatgcacatcaaatacatgggcagccacatccctgagagcccactccagttctacgtgaactaccccaacagtggaaagtgtttctgcatacggtccaggcctcgtgtatggagtggccaacaaaactgccaccttcaccatcgtcacagaggatgcagaaaagttggtctggacttggctattgagggccctcaaa

SEQ ID NO: 180647 - DNA, 1965 bp, Homo Sapiens
ttgggtggggagtgggatccgatcccgtggggctatgtaggggaagttggtggctgcagctgccgtggttttctcctggtgtccagcagaaacggcggcggcgcaaggtgtggctgggccaacccaggatctcccaggaccctccgctctgcgcgacaaggggcccgcgcttgccaaggccgacgggcaggagtgaacgtggcctccgtgggtctgcagccccgataggccaattgtacagaatttaaaccgtctctcagatgtgtacagtagaactcaagaagacagactaccaagggtcatctgaagtcgtgattgggtcactaataacaccaggacaaagttaagggatcactactcaagcataagccccagttttcataagactgctgtgaagatgtttgatataaaggcttgggctgagtatgttgtggaatgggctgcaaaggacccctatggcttccttacaaccgttattttggcccttactccactgttcctagcaagtgctgtactgtcttggaaattggccaagatgattgaggccagggagaaggagcaaaagaagaagcaaaaacgccaagaaaacattgcaaaagctaaacgactaaaaaaggattgaaggactgaacaggctttgcaaccagaggaaaatcatttggaaaattacacagctttggaagaatccactaaagtttcttctttggatttcttgacagtatgatttagtaaatgaaatttgaccaaatggaagaatcatgttagttctgacctcaatactatagtaacttttaggcgtgggtgtagaagtttataggtttctattgacagttattgtaaattagcatttactgtggtacaaattctttataactgacttagtcatttgccgcttagcagtttatatactgaaatgaaaacatcttgtggggaaaagtgactttagattatgaactcaattcaaatgaactctatttaaaatggggtcctattttggacaaaggaaattaagaatgtaaaagtcagaacagtcttgaggtaaaaagtgtgctttggcttaaaagggatacagtatattaattacatcttttattattattgtttatttcttagaatcatttctggctttctcaaaacaaaataatattaatgagtacttctatttgctgcatttttcttattacagcctttgagacagctggtaattataagtcattttccattttttaaaacataattttataaagaattctcttatctcgactatgtagaataccacctactggacagaacaatttttgtactcacaaacactgccattttcttagagatggcttgagaggagtaacactatggtttaaagcttgcagtaaaaatgccaaacactgtagtaccttggaacccagtttattcttgtgctaagcagaactgtaaaatagttaaaatgtcttatcaagtaattcgccgattacaaagacaccatttgttttttatttcattctttgttttaactcatgtggtagtgatatttaatactttctgatcaaacaggttcaaagtaaaacgttaaatttcacatttcttttaaagaactcttaaagtgtaacagttacgccatacttcataagtggtaaagaaaggtataaaatttggaaacattttgttgggcatagtagtgattgggtgaaaaggataaattatatcaaaatgagaatgtgctgtaattggaagtagggagctaaaggatgtttctttcagtttagtagaactggaacgttttactattaaacatggcttttataaatgcatggtccaataattttattcactgttagtatttaattcactgtcagcttattaatgttttctgtacccattaatgaattttaaattacaaaaaattgtctagcagctacagtttaaaaatgaaactagacatcaaaataaatttgattaattttttat

SEQ ID NO: 180648 - DNA, 1688 bp, Homo Sapiens
  misc_feature (578)..(622): n is a, c, g, or t
ttggcaaaagatatagtgggtatcttaactaagatgataacttaaataggtatttttaaaagctacaagtctaatacaacatggaagtaatttgttgtgaggattgtaaggcgctaagtactattaaagattgctgtataaagtttgggtttgtttgaatttttgtctcctatcgaaattctttctctcaacacccttacttctctccatgtacctgcctctcttctccacaaaagatataattttgctttttagtgctatgaggacctcagggaaaggaattctataaatgcagaatattgtttttccctttatttcagatctttcacataatacagaatagcagtgttttaattttaataaccatacttttgggaagtttgctatagaatttaaaagtactattttaatataaggaatgtcaagcttttttagaactaaagttcaaggactgggtttttcgttttgcttttctaaaattaatttttttaagtgtagaaaaattagttttctgctttctgtttagtttatcttctacctcatgccctctgtaatcgccgttatcatctaacacctannnnnnnnnnnnnnnnnnnnnnnnnnnnnnnnnnnnnnnnnnnnnggaggaagtattattttttttacatattatggaatcattaaaatatttgtctgacccaaaacaatttttagatttaaacattaaggaaactaatattattagtatggtttataacttaaatgataaagaaggcctttttcctgttcatttaggtatcttaaggtaagggtaagtatagtaatgataaattaaatatataaggtatttgtacattccttgtcagttgaaaataaggttgttatatatttgcattgaaattaacatatgttgcattcattttatgtactatagtttagaagcatttaatttgagatagatttaatatataattaccctattaaacatacttttcttttgttatatacattctgtaatcttactgataagttggatcattgttgatttttaccttaaccgtcaaattcttacacacgtgtagaagtcagttgtagtaatcaatatgtaatggggaaacagttttaaaatgagtctataaaaaaccgattttgtttctctttagatgtgttctacgcaagagtgtcttgttttgatcaggagaagaaaaaataccattaccatttcttattttaactatattgtgttgttctctcatgtaatgataatgctttttgaaggaggaagaaatgtagaaagacaacccagcagtaggtacaaaaagtttctcagactctgatgcagtctgcttagtactcttcctctgctaaattaactgactaacctgggcctgaggacattattttcctctgagcaaagtcagagagtttacaggatactaatcttacccgtttgtcttgttccaaccagcagagatagctagtctgaattcgctcgcacaatgtgattgtttgcagtaatgggtattcttgctagtaagatacataatcaaaatagttgaagatgtattttgaaatatttgtttttctttcttgttatttacttttaaagaacatcttatatttagtaattcctttttgtttaattcttttcccatctacccctgtgattggtggttttcaaattaaaccatttaaaagctagaatcttc

SEQ ID NO: 180649 - DNA, 1006 bp, Homo Sapiens
gtacaaaaaagttggctcacttgatgtgcctagcactttgaaactaaccttttctttctttgttcatgacagtttaattccaaatatttactattttctcttgtaactgttagaacagttccttttgacattaatttttgcctacatatatatttttaagttgagaccaaatcggtgaagtgttgagcaagtaacatttatgatgtgtgtatattggaacaaatgtaaaagggttacaaagattagaaacagagtcataaaaaatggcttgatttataaaggcattacttttggtgctttatataatggcatatattgaactaaaaatttgtatatacagtatgtcagcatttcttagtaacttctcttgaatccatttttaatatctaatattgtacaggttggggagttacattcttcaggccaatactatccagactatataaatttataaaataaattgaaaaattcattcccctgtattcaagaccaaagcacataaatgctaatgtagggctcagaggggaaatacagttctcctgcatatttgagaaaatgtgaagtcctttcaagaaaatctaataaacataataatcatagcctgctgacactaaggaaaaaggacctcattcactctttcttttatgcagtgatttactggtccctactgatttccaaattggatcacgatagtaaattatccatgctggtacctgtgaaagtaagccctgggatccatatttgttttgtgttctgcttaaatcagcaagaatgataaatttgatggtgtgaaattggaagtatcaagggctttctttggtgattgagggaaataatgtctctacttgtaatttattgtgaccctttttcactgtatatgctttgtatgtctaatatttatttcaatgcaaattcaattgttccttcatctgtattgttatatctaagattttattgatgttaaaatctaattgtggaataaaaatctctctggaatttagcagat

SEQ ID NO: 180650 - DNA, 1734 bp, Homo Sapiens
  misc_feature (60)..(81): n is a, c, g, or t
  misc_feature (1055)..(1085): n is a, c, g, or t
  misc_feature (1341)..(1349): n is a, c, g, or t
ttggcaagattatgcaggtaaaatatagagtgaaactttacctgtgaattgaattataannnnnnnnnnnnnnnnnnnnnnaaggaagaataagttctgtatcaaacaagaatttattagataattttttggtcaataaaatacagtattcatttggattttcatctccagactagtattgttctagtcttggaatctgtattttctaatctgttagaaaatagagattgaaaattgatggaataatgtgaaaaagcaggtaattaattctccttgaacaaagcaaaactgaacagtcatatcacattgctattctccaaagcataatctcaaatggtttcatatcatggttgtgtattacttgcaatgggtgtgttaggatatgacagctttttaaaaaaaatgagctgctggttatacaaagcaaatggcatatgaccaagaagctgtgatatgctagtgtttctttttatcatagtgtattactaggccaaataatgacaccttgaatatttttacatttattgcagaaaccttaaactttggaatttccataaggtttttatgtaatattctatttctagctttttagttttatcttgctgtactgtaagtttgaggatatttttcacctgcactcttaggaataagttcataattctgtttatggggctttcctcccataacactgcatttgtatattttctgtataaaatatgtgttgtgtattaacctttatcccatacagagagtggtacatgaatgactagttttctaagatgtcctttttattgtgaataaaatataaaagttaaaggccctctgctaagtcacataaagtacagcatataagttcatataggtacaaataaatgagtttgcagtgaattgggccttcaaattacctcaagtgacagatagtaagaaaagcttcttgagcaggtggaggtcactgaatcccctactatgcacttatcaagattttacttactttaatttactggaaattgattttttaaaaaatgactacactgtaacaagggaagggatctggnnnnnnnnnnnnnnnnnnnnnnnnnnnnnnnaagtagttcaaattctgaaactgtgatttaaaaattttttacagtcaagcattctgattttgaacataactcccttccctttctgtgtaacaaaggtctctctgttatctcttaaattttgttacatctccctcagcctctttctttgtccgtctcccttctgtcattgtctatggatgtttacctctctgttctcctaaaagtttgaagattaggtcaactcttatttctagttcattggtaatttaatcctaannnnnnnnncgtgatttttgttggttgtataatctgctgacgtatttttatactcaagtgtagttttctattaaaaaagaaaagtggttggattaaaaatagtaagctatgtaaccctcatgttactttcactttcaaatattgggtacctaaaacattacttcagagattatgtaatcctattatagtatgtttgctttcctttattgttggattttacattctgatttggctttcctccaaaaaatgtatatcatgaaagactagacagttatttgcaagtgtttagaaaggtgttaaaaatgtaaagcaaagagtcttaactttctcctaattgggagaaaaatgctttaacattactataataatattccaaggtttggagggggtctcc

SEQ ID NO: 180651 - DNA, 3984 bp, Homo Sapiens
  misc_feature (545)..(553): n is a, c, g, or t
  misc_feature (991)..(1285): n is a, c, g, or t
ttggggcctttcagcatagacataaagagcccacccgttactcagtcatgttgccaagtgcaaactgatttatccccagatgaatccctttactgtagcagatccctaatccctaaatttcagccaatttggtagttaattataggagtttattagctaaatgtatgttctgagtaaaagttttgactctttggggaaaatttattttgctgctagcatacaacatttgctatgtatataaacttaagtcaatgccagaaattttaaaaccagctcaaatttataatctgtaatgatcaaatcaaaacatactgtaaactcagagttggaaacgcctggtaatatggttaagtcatgtttaaatatgaatgcaatttaaatgacattggcaatgcctgagatttctttcattgtgaatgattaaaaggcagtccaatatatgaatggatttcatcttacctttctcccgttaatttactaggtgtaacatcttgagtgtaaagtcattcacaggcagttgggttgtggagctagaaggagcctcnnnnnnnnnctttttggccagactcctacatcatgaacagggtttttgatgaataatatttattattatgtttctaaagtaatacagtgttggagaatgaaacagtttagtcctttcctcttctgatggaaaagaatcatagcgccgttgccatgacaataacaggatgtagaaagacccatgaagaaagaaagaagaaagctatggttccgaaagcaggtaaccacagattttgaaaggaggcagagatggtgattaaactgtagtccttgttttttaaaatgttctttcatgttaggcaccaccacatagttaataactaccaacttctaaagagaagatccccttgatttatttatatcatgaaaatactaaaaatcaattctcaagtctaattaactattacattatcttgctaggtccttttccctaaatttttaattcagnnnnnnnnnnnnnnnnnnnnnnnnnnnnnnnnnnnnnnnnnnnnnnnnnnnnnnnnnnnnnnnnnnnnnnnnnnnnnnnnnnnnnnnnnnnnnnnnnnnnnnnnnnnnnnnnnnnnnnnnnnnnnnnnnnnnnnnnnnnnnnnnnnnnnnnnnnnnnnnnnnnnnnnnnnnnnnnnnnnnnnnnnnnnnnnnnnnnnnnnnnnnnnnnnnnnnnnnnnnnnnnnnnnnnnnnnnnnnnnnnnnnnnnnnnnnnnnnnnnnnnnnnnnnnnnnnnnnnnnnnnnnnnnnnnnnnnnctggggtgagactaccattaaggaaggaaatttcctttaaacagaaaaaaacaaaggtgctcatctatttcttctgaattctctctacatccttgacttaagaggaaaaccagcactcaagaaacagctttaaaagagaacagtccccattctagctaccagtcttgctttcccccatcttggcaagccccagtgaatttgccattgaaagattaccctcccctttgccctcatctgcctgagctagaggccaggctgttgttaatgttttttcagttccaaagcccctgatgggacattcttgtttctgtgctactgctttctctctcttaaattaaggtgcaaggggataaatattactataactgggatgtaaggctcagtcagtgtggctattccctcccttcgggggaaatattccatctgtctgaacggttttaggtgatcatgaggagagcggcttagtcacacagccagccacgctcatcacaaaagatttgttcagactcactgtaaagaatgacaaggcagatagctaatcctttcactgtgcctcaaagcccgccgtgcaagtcaccaaccctaccggtcctctccacgtgcgaggctaatagagtgatcagaaccaggaatgtgagctgggttccaccttaggaggggacaatgaggacagagcaagagggctccatgtttaattactccaggctctgacttctgcccacaattacagagcatgaaagcagaattggcctttagtaagtgaaaaggaagtggctcctgcagcatataattgttataatttcgtatttatggaaagagaaaaggacttcagtccactcatgttgttaagcacttgtccctcactccactggagcccccttcctatgttttgggcacagatggctgggaccgagaggaaagaggaagagcggctgccagagtgtgaatatacccctcagggatatacagcggagtttcatgataaactacccatactttcccaaaaaaggttgaggagcaatacataactttgcagattacaaacccttgttttactttttaaaccttttttccatactctgcttattggaaatcgatggctgtgatgtgaccaacacctgtgatgatagcaaagcccctcctttcacagtctcctgactgttcggggaacctccttggtcattggtagaaagctttagaaaagacttagctttttagggaagaactaaaaaatctccaaaacatactagtcccatgacttcgataactgaaaatgtcctgggtgtaaactaacccaggaatgtggatcatacatgttttttttaaaaaaaatccctgaatcaatattttcctacaacacaccctaaaattcctatttttgtaattaatggttggacagtgatcagccatttaaacataggctttctggaataaccagacactagaatagtttccaaagtgttttgcgtatcaaaatcctatatacttagaagaagaactcaggataagaaaaaatcgctaggtcccaaagggttcatgactatcatcagatgcaactgcgagtggcctacggtcattttttcaaatgagaagactggagagagagaacaacagtaatcacaaaacctctgttgcccttagtccatgacaatgtttaaggaaactttaaaaaattaagccatcttctgaattgttttctacaccaaatctaaaatattaaaatgaaattattaaatatttaaaatggggtatttagtggaaatgcaatcagtagaaaacattgctttttagtgcctgctaaacaagtaaaggagaaagaatgaagagaaaacagcagtccttcctgtgtgacactcgtgtggaaatgacaggcattcacatgtcattgagtgctaactcaaaagctaggtggcaatgctgtccaatgtttagagatcttttgaaatataattttaccaccattcagaggtaagtacttgcttaacagaagtctttaatgttagtgaatgaatgtataaaattataaactatgcattttcaaagagtagcatgtattttgtatcgaatccaagtaaatttttttcatagctacctaccacaactgcaaattattcaaaataaacttggatacatatccttatggggatatgggaagcccatctatattctcctacttgatgtttttaaagattgaaactttattctgaaacatcaggctctaaaaaattccatcattaagatgaataaatgggaaatggtttatttgttacttcgtaagcataaatgggaaatgttggctgttagaaaatgtgcccagttctttaaaggtggatgttctagtaacactggattaacaagcaaacaaaactgcatgaagtgaacgaatatttcattggataaagttagcataggttttatctgctgggtttaattctcaatcccagaaaaaaatattcttcaaggggtatcagttatagtttcaaagaacaaaatatgaaaatattgtccagcaaagcaaatcattgatcttttttcaaaattacttatattttggaaagtctatatagaatatccacaaatttcttcagccctcttgttgatttcatattttcatgaaactttttcccctaataatttgtcttcgctctttaatcagtgctttactacattactcagcctgaaaaaatatcttttccttc

SEQ ID NO: 180652 - DNA, 967 bp, Homo Sapiens
actttgtacaaaaaagttggcatcaggctctaaaaaattccatcattaagatgaataaatgggaaatggtttatttgttacttcgtaagcataaatgggaaatgttggctgttagaaaatgtgcccagttctttaaaggtggatgttctagtaacactggattaacaagcaaacaaaactgcatgaagtgaacgaatatttcattggaaaagttagcataggttttatctgctgggtttaattctcaatcccagaaaaaaatattcttcaaggggtatcagttatagtttcaaagaacaaaatatgaaaatattgtccagcaaagcaaatcattgatcttttttcaaaattacttatattttggaaagtctatatagaatatccacaaatttcttcagccctcttgttgatttcatattttcatgaaactttttcccctaataatttgtcttcgctctttaatcagtgctttactacattactcagcctgaaaaaatatcttttccttcatctgacaatgtggaaataaagaactccatttctgtcattctggttctcttcagtgtccattgagaaagtttctcaactgtttgtaaaatacggggggaaaaaaacacgcatttctaaacctggtacttaaggttatactggattgtttgctacctaattagaagttattggggaaggggcattgtgtctttttatatgatttttagccaaatccagatgttctgatacacatttctgaatacctgtctgactgtaaatacagcctgtggaggttcaggttgataaacctttcacctgactgctccacagccatgctccttgccagcttctggcacattgtacatagatttgttgaatgtttaaatgatgttgtttttctaaatgctgttctctaaaacaattttttgaatttcttttgctttccattgttttggactttgtgtgttcgttttttaaa

SEQ ID NO: 180653 - DNA, 1645 bp, Homo Sapiens
  misc_feature (1434)..(1448): n is a, c, g, or t
ttggatctgaaatatctttacttttttaagagtaagattccatatgtctgtctggaagggagccatggttattcacacgaatatccctgtcacttctccagaggtgtcaggtaactaacacgagcattctttgaagactctgggcacatgaatgatacacagaattgaatgtttaaatttccactttgagtcctcatgaatcatttgagactagtaccagctgatcttgtgtacaggctcagggtcagtgcccaagggctcccgcgtgtgtgttctgatcttcagtgcgtagcacattctccatttagaaaagagtggtcagaataattgtggacggtacagtggctttttaaaactacagtctttaggtgtaaggtttggcgccgggagcaattttatgatcaaatatgatgaactcctaagtcactgaggtgtgattgggccaatgttggcatgaggttcttgctctacttccgtgtagagagaggtgagcttgtcctgttacagatgctgtcagacatagcgatagtaggcacctagggaggaagtggccgttagttttacactgactttttaagaatggagaatgcacgtgggtttctgttgcggatgattcatagtaagcaagcggttgatgctgttaataccggccccacccgattgacattaagtttattcagcttttaaaaagatgaagaactaaggggaacaaatttaagtttgttgcaacttagccacacatgcttccctggtaccagctggaatccgcagctcacaggcatcttcaggacacttcagtgtatatgacacagtactttgttagcgtctgcgtgtgtatggaaagttgacaaaaaatggcatgaaaagatcatgattggattttcttttaaacctgcccttctgtaaaaaatagtttatatatttttaaattagtaggtatgtgtggcttccttttttcctaacattcccagcaaatttttgctgctaagactatcactgttaaagtgaaaattacagggaaaaatgtgatgaatataccgtaactcaaaatgtgatattttcttaaaatcactcttttatgctttaggaactggttggtctccactttgattattagtgtaaagagcctgagtatacgtggatttcattgtaaaatttaactccttgtcttttacttggggcacggggcccctggagggcttccctactttccccactatgttaacaggtaattctgatttatgcctttagtttgacttatttttaacaaaatattagaagttatgctttaaaatgtttaatgtggactgaaattttcatcttttgtttgagaatctatgaagtgtatcatatacgtggcctaaagcaaggtgtgtattttgttattctgaaattgttttgcatctggacaaatactaaatatcccagtggccnnnnnnnnnnnnnnnaaacctgtgtatccatctcatccttttgcgcattcctagtaagcaaaaaaatttgttatgccatcttcattattcgaattacagactgaaaaatatggccagtttttaaagaagtttagattatgttttccatggaaggacaagtctgactgttcatagctgattttctttaagaggattattctgtttacaatttc

SEQ ID NO: 180654 - DNA, 1730 bp, Homo Sapiens
  misc_feature (1493)..(1506): n is a, c, g, or t
ttgggtatattcatgcaccgtattgattcatgctatagttacttaatcaaagatttttttcaaacctgccttacatataggcccactttaaaagcacctgactagcatgtgttcttgattgcaaaattggcagaggcagggtgtcaacttgattaggtgtttttatgggaatgtaatttgaaatcactacttcagaaatttgacttaaaattcttgagcacgttaatatgtttttaagatctgattatctttgagagatcttctgttaatacacattggttgttaaagagtacccaaattctaggacaatgcttaaagtgttaaaataccctagatactgtgttatgtgcaactgtagaaaccctccagaaatttccactgctgttcttcactttcatcttgtctgctatcaaaccacttctgacaaaattagctgttttgaattacccatatcactgccagttttattttaaaatattttgtgtttgaagtatctgtgcatgggatcgttgatgtttatcagaactgttcactttcagaaatgattttttaaagcattttgttgaaaatgcggttgcttttttaacattattttagagttgtatcaaaattttcctgttttctgtatattgttgtgtcatttcttggctttttaatattttgactacaatgccctaatgcgaagaagtatggacatataaatattacaagagaaattagttaatagtaaagggttaaaaggtaagtaaaatgtccatgaaaataaaattttctttgaacagtttaaaaatggaatcacaaaaatctaactgcacttgaaatgaaactggaaattttatactaattaaatcctttatttaccttttcatattttatcaatggaaccttttaattgctccttctatatcactcttctccttgcttggctgatctcattacatgactttcgttacagacagtgtgagtgtactagatttgtttgctgctaatccgttattttaagtgttgtcagaaggaaataacttcttggtttgaccaagtaattttgcaaagtccttctctacctgataacacgtgaatgtatagcagtaaaggtgaaaattgcaggccttgttttgttcttcatacccccttcagttgtttatgggttaatgttatttgaaaactcttcctttttttaatgtgtaaaaacaatccaaagagataaatccttgcatagacaccaaaaacagtgtctcagagaccttttcattttttccttagttaataactgtagtggatgtgaaaacaaacgagttgaattttaaaacatagcatttattagtgctatacagtcacattcctttcagccagtagtaaagttaaacagatgagtgatacagtacctgaatggtactgcttctgaggcaacactttggattgaaagtgctgcttttggttaaaggaactatgttgtggaaagcatattccagtgtaaatttgcagatgtgtgnnnnnnnnnnnnnngtcacttttcataaggtttggagtaagttgcagtggcttttgatcatagtttagcccatttaatggtccttttacctagaatgttcttaagcagttaatgacaatttggaatacacagataacttgtagcttaagatactattttcatttaattctcctgtggagaatattgctttattttttactagtttcggtcagttattaaaataaacatggaaggtttt

SEQ ID NO: 180655 - DNA, 777 bp, Homo Sapiens
  misc_feature (530)..(552): n is a, c, g, or t
gataatcaagcctccatatcagcaggactcttgacctatttttataaaggacttagaaatcttaagaacctcgatcaagaacctaaagctaccaaagatgaacaatctaaacacaatagtatccattggataggctttgctcattctcatggcaccagtactgttaaattcacaagctccaatctcaagtcatataggctgcaaaaacttgaggatgtagctgtttcccttcggatatacacataaaaagcatgtcttacatttataatgtaatttttaaaacaatgttctaaacttccaaatcacaatttcattgtttttagtatcctctagcttctcccatatggtttgggctttcacaggcaggatatacatagcacattccccatctcttagagaccttaagactgctctcatttgaacactttcccaaagcctcacttgaaaaaaaagacacacccaattctgtagggcagaagctggccttgctcgccaaccctccttcctcaaccccatctctgttttgcacnnnnnnnnnnnnnnnnnnnnnnnggaagttctcataataaggttaagagtcagggtgttggctgtacttgcccaaactacaaattagagggctactactcaattataacataaagaaagggaaaaataccatgtcaaatacatgcctcttcctttatgttctcaaggccaaccatgtttttctctagtagactgttggaaaatgaaaacggtaaggaacagggagggaagataaaacattatttttaa

SEQ ID NO: 180656 - DNA, 2067 bp, Homo Sapiens
  misc_feature (226)..(248): n is a, c, g, or t
ttaaaaataatgttttatcttccctccctgttccttaccgttttcattttccaacagtctactagagaaaaacatggttggccttgagaacataaaggaagaggcatgtatttgacatggtatttttccctttctttatgttataattgagtagtagccctctaatttgtagtttgggcaagtacagccaacaccctgactcttaaccttattatgagaacttccnnnnnnnnnnnnnnnnnnnnnnngtgcaaaacagagatggggttgaggaaggagggttggcgagcaaggccagcttctgccctacagaattgggtgtgtcttttttttcaagtgaggctttgggaaagtgttcaaatgagagcagtcttaaggtctctaagagatggggaatgtgctatgtatatcctgcctgtgaaagcccaaaccatatgggagaagctagaggatactaaaaacaatgaaattgtgatttggaagtttagaacattgttttaaaaattacattataaatgtaagacatgctttttatgtgtatatccgaagggaaacagctacatcctcaagtttttgcagcctatatgacttgagattggagcttgtgaatttaacagtactggtgccatgagaatgagcaaagcctagccaatggatactattgtgtttagattgttcatctttggtagctttaattcttgatcgaggttcttaagatttctaagtcctttataaaataggtcaagagtcctgttgttatggaggcttgattatcccagatattaggagtgaacatttttaataaatctttcagaaaatcttggctagaaagaattctaagttagttgtctaaccactgaaaactacctagccagagatcatttaatgagatattctttgatcttcattgcattttttttgctctggaaaaggtggttcaatttgagtttgttttcatgatttgattgcagcttacttcatgccaaggattttttagggagaggtcgaattatttttcatttggaagtcatagggagacaggagttgtacttatgctgctacttgccaggaacaggttgggaagaaaattgtggctgttggaattgatgatgtactggcctaatatagaaaggaatttgtaggcaggagtaaacgttaactgacggtgggttagtgccctgcatcttgcatatttgaactgtctagagttcctgccattgctgggtataaaacgaggagctctctgttgacctgtaaatcattaatacttcttgacttagagtgtcacttcactttatagatgacattttcctctttccccttgatattttctatgttgtgttagataattggtagatatatagttgtggtttagtacatttagggcttctatttatttagattttgtttgttggagtctgtttccaaaagggaatgtgccatttagtctgcatctgtatctttgtggacttgatgatcactggtttgattttgaaaaatgtcttttccagcttttagttactctcatcaaatgtcacatattttctaatcacatgcactcctttaccacagaggcacataatcatttggcctcatagcagttatccatggccgtactgtagtaaagttccttagaactttgccaggagtgaactagaaaaaagtgcttactagggcctaagagttgctttgtgccgtgtagtctggcctttgcactagtagatcattgctgacataggtcagtttagagacctttctgtgttaatgcctcctggtactgtcttaagatacgtacagtgtctgtttttagatctatgcatatgtcatgaagctccttgtgggctctgcatgaagctgctgctttgtttttgggttaacagatgtgcctgtcaactagcatgtgtattgtccaaattccataaacttaaatttttaaggggctgtgtggtttctgagctctatgtgtctttcctatccttgtaccttcaaagggtgagaaatgagatttatacatccaaagttagtctgataaatatggctttttgtttctccatgtaacctagactg

SEQ ID NO: 180657 - DNA, 1633 bp, Homo Sapiens
ggcagagcctccgccctcccatgttagcgcagcatgcctcacgcctgccggctgcagagtggctaccatgtggttgcagtgggtgatggcagagattcccttttgcattgagacggcccccatgaaccttactccccagcagagctggccttttaaggcaggtgtaggagaggagcttcctggaccaggctcctgatggcttctgtgggaaggagttgcactaaggagcccagagcagtcaagacatttgcagttcagtctaagcaaggttcaaagaggcttgggtacattgggcaatgagggtcttccttccatcaaggggttttgttaacctgccttttctgggagtgtcaaaagtggctctcagtgtgttatgaagggactcatcggccataacctattagtgggctactaatggtaattctccagctcacaagttcaagatagaaaatcttccccacttttttctgattttccagatggctgtgctcttccaccatctattcgaccctggagctgaaggtgtgtttggtggcctgtgatgttgcccaggacttgttgttcatcaggacttggacgagctcctgggccccagcctgtcttttcaccttagtgatttcttcactccgtacctgagacccagggtgttcaggctccctctactttttcctcgtcacctttcctaccctccctcaggccccaccacagacacctagaagatttcataccacattcatactgagatcaccagagtcagtgcatctctgcttccggggataacaaaattttaactcaggatgaactcttgagggatcaagaccctagaggtagaatttaggcttaggaacccctgacgcctccaaggagacagctgtactgcagtctgaatttgagaaatgtgtacatacacattatgtggggggtgggggagatctagtgctgattaacatggcatgtttttgtttacttgaaaattgcttctcaagatttaatctagttttcagaaaatttttaaatttacattctcatgtacaaataaattgtatgctttccggataagtgacatgtttatatggtgataaagggaattataatgctcttaactcttatgtagtatgttctcatcaaaatcaccaagcatgagaacactgtttagtctcattcatcactcagcacagcctctttctgtccacttcagggccaagtctttgccatggccccacataacgtgtaaattagcttcagggatcaaaaatctttgaaaacccagtttgctgagccttgaaggaagcctttagacccagcttcaatgaagtcacagctccctgagggtcctggtggactggaggcggcctcccaagcctgggagctgtgtgcctggatggtctcactggggtgatgacccaagctcatggctccctctcaacctctaacccttcttaacacagtcacccctggtcccctgagcactcactgaagtccctttgaaggacatttctagtctcctaagatgcctgtttcctccagctgccaccctcatttcaccagccaggtaggcaggttttctagcttcgtgctggcatagagaatccgtgccatagcagctgccaaaaggaaaggtgtgtctgtccaa

SEQ ID NO: 180658 - DNA, 902 bp, Homo Sapiens
tacaaaaaagttgggttcctgattatttctccatttggttgctgttggtaaataaaagaactactgatttgtatacgttaatcttgtatccagaaactgctgaattcttttatcagttctaggagctttctggaggagtcctcagggttttcaaggtaaattatcatatcatcagcaaacaggtacagtttgacttcttgtttactgatttggatgccctttatttcttgtcttattgctctaggtaggactccagaactatgttgaagtggagtgttgagaatgggcatcctttcttttttctgttctcagagggaatgctttcaacttttccccattctctattatgttggctgcgggtttgtcatagatagcttttattacatgaagttgtgacccctgtatgccaactttgctgagagttttaatcataaagtgatgctggattttgtcaaatggtttttctgcatctattgaaataatcatttgatttttgttttgaattctatttatgtggtgtatcacatttgttgacgtgtgtgtgttaaaccatccctgcatccctggtatgcaacccacttgattatggtggattatctttttgacatgttgttggatttggttagctagtattttgttaagaattttagcatcaatgtttgtcaaggatattaatctgtagttttcttttctggttttgtcttttctggttttggttgtagggtgatgctggcttcacagaatgaattacggagggttccttctttccctatcttgtggaacaatgtcaaaagtattggtaccaattctttgaatatctggtagaattctgtgaatcagtctggtcctggactttttttcttggtgatttttaaattaccattttaatttcactcttttta

SEQ ID NO: 180659 - DNA, 1556 bp, Homo Sapiens
  misc_feature (797)..(814): n is a, c, g, or t
  misc_feature (940)..(978): n is a, c, g, or t
  misc_feature (981)..(1271): n is a, c, g, or t
caaaagagcagaggcagggggaatgtttaactgtaaagtcactagttatagaaaatacagattacctgcagcgacgtctctttaatagaaatggcagccatgggttggagtctgttgatacgagttctggagagctaattttgtacccgtcttccaactctgtgctcggtgacctcatgttggtagcttgaaatttgccatgatgtgatcaagtgggtttcatactaggaatgcagggatggcttaacatatgcaagtcaacaaatgtgatatatcacagaaacagaattaaaaacaaaaatcacaggagatgcagaagcatttcacaaaatcccacatccctttatgattaaagccctcaacaaaatcggtatacaagagacatacttcaatgtaataaaagccatctatgacaaacccacagccaacattacactgaacagggaaaagtttaaagcattccccctgagaactgcaataagacaagaatgcccactcttatcacttgtattcaacatagtactggaagtcctagccacagccatcagacaagagaaagaaatgaagggtatccaaaccagtaaagaggaagtcaaactgttagtgttcactgatgatatgattgtacacctagaaaaccctaaagactcatccaaatagctcctaggtctgatgaatgaattcagtagagtttcaggatacaaaatcaatgtacacaaacagtagcactgctatacaccaacaatgaccaagctgagattcaaatcaagaactcaaccccttttacaacagctgcnnnnnnnnnnnnnnnnnntactcaggaatatacctaaccaaggaggtgaaagactgctacaaggaaaactacaaaacactgctgaaagaaatcatagatgacacaaacaaatggaaacacatcccacactcatggatgggaagnnnnnnnnnnnnnnnnnnnnnnnnnnnnnnnnnnnnnnngannnnnnnnnnnnnnnnnnnnnnnnnnnnnnnnnnnnnnnnnnnnnnnnnnnnnnnnnnnnnnnnnnnnnnnnnnnnnnnnnnnnnnnnnnnnnnnnnnnnnnnnnnnnnnnnnnnnnnnnnnnnnnnnnnnnnnnnnnnnnnnnnnnnnnnnnnnnnnnnnnnnnnnnnnnnnnnnnnnnnnnnnnnnnnnnnnnnnnnnnnnnnnnnnnnnnnnnnnnnnnnnnnnnnnnnnnnnnnnnnnnnnnnnnnnnnnnnnnnnnnnnnnnnnnnnnnnnnnnnnnnnnnnnnnnaggagttaaagagaaattatttaggcagatagtgagggtgaggaagttctcagtaaggttttccttttaatgaaaagcagcccccaaatcatcttgtttctaacaaagagcagcctgtaaaatggagctgcacacatgtacaagcaagctggaagcttgcatgggtgaatgccagcagttgtgccaataggaaaaggccacctgggactaggcatgttcaaaatggtggctccatcttcccttttcttttccaaccgtgtgtgcagtagggagcagacaacccaa

SEQ ID NO: 180660 - DNA, 1457 bp, Homo Sapiens
actttgtacaaaaaagttgggccaactaagtcaaccctttctagataatagctttctgcaggtagaaaaggtaatgattttgtggattaaatatttatattacatcaatggctatcctatataatttctttaaaggttatatccaggatttggattaggggattgttcattcattcagtaaacagtaactgcttttttatatgctatactctgttcaagatgcagtgttgagtgaaacagatcctgctttcttagagcttatattatagtgggggtgtggggtggtaaaagataataagcatgtaatgtttataactagtggtaatactatggggaaaatactttagcctaaagagtagaatgatttataggggggcaggtataaatgaggtatggagaagaatctatttttaaaaagtcattcaggagaggtccctaaaaatgacttactctaagacctgaatggcgaggagctgcctatgcacaaatctgggtaaagacacttccaggcaaaaggatcagcaagtaaaagtccctgaggtgggaacaggcctgaaatatttaggaacaacatgaagggtaatgaagagtgggacaaggagaatgatgtagaaggagacagtggaagccagaggctatatcttccaggactattagagctcattgtggggcatttggattttattctaaaacctgaagtaatgtaatatgaagtagattaacactatgtgaatatccaagaggaattttactacatatttgattactaggctcatctttttttaacatatatatgtattttaaccttatactcaaaattgacttagatttatataatagaattgaatagaggaagtgggagtaggagtagatggaattagacaaagtaagaagtaactttcttgaagatggtagaatggcactgtttacttttgaaagataaagtacttctttttacaataaaataaattccatatgtcaacagtattactcatttgctatctccattaaagatgacataaaatacgtgtggagaaataaagttactacttggccttggtaattgggtaatgacatagtaccagatgtagaaagcatctgtgtagataaagcttgctgctcttagatgaagtaaataagactgatgttgttgaaaaagattaatcatgagattgaggatactagaagggaggaaaatattatttgtgcagaaataaaatatagggttagaatagagatgataagaaactttgaggtcttcagggattttgttacataaagtatctaattgtaggaggtatttgataccctctaatgtctaatgtgattgttttgtttgggtaagatatattctatgtgtaaatttcagcataacttttcttctacaggattctaggagtgaagcagattgttactcgaccttttgtctcccaggctgtgatccacagatggaaaat

SEQ ID NO: 180661 - DNA, 2135 bp, Homo Sapiens
ttggattaaaaagcctatgcttgtgtaagtgaaaaaaaatcacattcatttgtttaaaaatgtaaagctattttgtagaggctcagtacttttccaatgcactgttgtatgaatgcattaaaaattgtaaagtaccatgcttagaactgagaaaactgctttttgtgagccaacatagtaacaaacacaccaaacaaagtacaaagctgcttttgtaagtgtgtagatgtcaagagcagaacatatctataatatttaatgtgtgaacagctactgtgacatgcaaaggaaaggacagtgcagaattaaaccgtgttgaagaccagtggaaattgtataatttaacttggatttaggcaggaagtgaaatatgggaggagtaaagaaaactgaagaatttaaagttttcctgaagacagtaataatgcagacacaaactggtttcatatggtgagagcagccacagcagcagcttgacctggtattctacctgagtagatgaagcagaagatcagcaagtttggcagagttttggtttaagaaaaacaaaccactactacctagcacaagttaaatttacaagtctgctcctcaaaaatgaaaaaatggaggaaagagactataaaaccacttttagcatatgaattgcagttggtacacatgtgtgtgttaataggaaagtctcgaatttgtgttgtttttgagatttgtcatttaaggtaccagtgcacacttgatcatatttcattactatctctaacacagtcctaacatctcaaatttaaagaccagttgaagattaagggatttttatcctttgttgaaagtcatgttgggttatttgaaattcaaattttaattgtgctgcccatatatgaaaatgagactgctgactcgctatctatggacatgcactttatgttggtttcttagtagtaagagtaacttcatgataaccccagtcttcttgcctaatttcttttttgagactagctggggttaggattagaatgactatggagcagatatttgttcttctgggaaaagctttaacaggccaaaatagggattgaacttgtccttggcctttatcaaagcaagctagctacccagacgtagtcaaatactctacaaaataaacaagtctgctttaggaattgtctgggtaccttcactgttaccaacttagctgtaaagattatttcaaagctcactcttccatgatttcttctggctttcaatcctatctaagtatcaaggaaattaacttgtaaatatggtagttgtttactaaggatatgtactgctcttgcaaggaaataatgtccaaacaaagcttcacttattttttttaatataagcagatttcactgtttatggcgcttatgtaatacattttatctttttaaaaatttgtccgtgtaaaagtcaggattcctttatatttgtgagcctccttttctcctttcctaaggatgtaatctacagttttcagatctgcagggtagtcttgattggctaaaaacaaatcaattttcttcttggcataaagtgtttcattattataggggtgttcattttaaatagtttaaaaacaattgcagcacattctaagcataagagaaagttattgacaacaggtaccttcctaatctcccaagacgtacttactcatttgtgaagtattaaagtaagaggtaactcaagcagaatgctggctatgaatgtagatattgaagctattcataaacactggaaatagaattttaagcttttagccttcagtggaatgcacatattggacatgtgcatgtgaacacctttttcagtagcactcacggatttccattcgattgtatagaatgaatacaagtgttttagtggaatttgctacttaatttttaatcttgcgatgtccgtgattattacatgcttactagtgttgtggacattgaagacaaggtcattcgtaggtgtcagattacaatggagaacaaaaatcgttttccccccacccacatccaaacaccattctcgagggagcatttcttgcaaaacaccttacatttcattttctatctttgcactttttcttaagtacagaaaagtgtctttaaaacctagttttgaacttc

SEQ ID NO: 180662 - DNA, 532 bp, Homo Sapiens
ttgggggagtgagccaccgcggccggcctctatcattttctgactcagcagctccaccaaaattgacatcctagcaaacactgtgaaggaattaacctaagtgcttccagagcatctcatgtaacctctatggagtaagtcactttttctgtaacatgtggcttttgaccttgatgaagactttgacttctcatccctgtctacatggaggaagatgattcagtggtggggaaaatgaacctcggtaacatttccaatgtccttcaagagggaaacaagttcagtgttatcatcgtggcattcgttagtttgttgttttttaaatcacttgtttaaatacaactttatttttttatacctacatagcacatgactggggggataaagcatgtataagttgggagagggtaaagaatgtgtgactatgtatacagaaaatagactaaaatgtgcagcaaaatgatatatactgtaatctggtttttgaagtatctactattctggaatattgttaaacaactttttgcttttg

SEQ ID NO: 180663 - DNA, 1536 bp, Homo Sapiens
gtgtaccatagggcacccccaggagtgatgtctgcacatccccaacagctggaaaagggctagggagagagagctccagaaggaagggaacaaaatactctgattttagatataactatcctaacaactattaatgaaactgctacagttttgcctagaacttctatcttttgaaaatctacaagccatagtaggggggaaagaggcagtaatgggagtaggatatatacactctatttggttaacatcagaaatgaattaattgtacaaagcaaaatttagaagacgccttgtgaacctcaattagagagaaagttatgtaactcgtgcactcagcaccatctgttaagaaattctgcagggcacgtaaccactgatttactaatttagtagcttttctttttcatctttatcaaaacactgttgctttcattttagacaataaaaataaccggaatttaaaaatgtcttttccttgctattatacatttttgtgctacgttaaaaataaagaaagttggctatgggctgtaaagtgctgacaccattggtgctgatttcagtttgatggtgggtgggggcaactcttaggagtcagaatgtcctgaatttccaagcaaactcagccgcctggcctggccatctcagcactgctcacagccagcatttgttttccacattcccttccctgtccccaccccaaatattaatacacacatccacatattcagtgtctccccataggcaaatgcttaaatctaaaatggtggcagatattttttactagaagattctatggctaaaaaacaataaccaaggttctgtaatgctggaaaatacagtatacaaaagtaagcaaatctcatgggaaatcattagcaattctcagtgcagtcaaagaaagttaagtgcttggagaaatcaagacagattgcagccctccacatctacaaggcaatttcttcactctctcaaattctctcctggacactgctttgggaaaactctacagcagcaggaggggagagggcagggttccacggcgaggaggtggccggtgaatgtggcatatgggaagctataaccacaaatgctcacagggaaagaacaaaaccaggtggatacagagggctgggaggcaacggaagtttcgtttggctgtttgagtcaccttaggcaaagagagtgacccagcattttctctaaataatataaaataccaaggttggaaaaatgataaattagcgatacaggaaatggagagcagcaagccaggcccctaaataattctggcccacttatcaatatgggttcacgcttgaattcctgacttactgtgttgcaactgccaggtccctttgctgcctcccctgcaggcctgcaggccacggggcggtttgtatttgcctggggaaagctccctgatgtggatggagatttgcaaccaaatgttgaagactgctgcctttccattgtcaaggagaagcttatcccagtagtttcccaccaaatcccaagctgcagtagctgggccaa

SEQ ID NO: 180664 - DNA, 1053 bp, Homo Sapiens
  misc_feature (572)..(682): n is a, c, g, or t
ctttgtacaaaaaagttgggtcacacttcaaggaggcagctctctagacaggaaagttattcacgtcccatgtcaattgagaaatgcaattttatctgctgcctttcattctataccctgcttctgaaccatcgtgttcaactgtgaaactcacactttggtgaccacgactccaaaactcacttaatacacccaaggtcagccccagtgatctgcttcatagcaaggactttgggtgggtctgcccagggagtagggcaccctcagagaatgtggctttggactttatcacagctggggccttttgtgtcacttaagatctaaacttgtaaccatgctagatgtgtttctaatgtgacaacatcacgaaccacgagtccagaagcctaatccttaatcctacctcctcatgatgaagtctcatgctctgtgctcaacgtggttagctgcacaagatgtaaaccaaagcttcactgaaccctcgacccaaatcagtaactcaagtgcgtcaatcataatgaacctccccaaactcagtttttatgattatttttgaggcagggtctcactcnnnnnnnnnnnnnnnnnnnnnnnnnnnnnnnnnnnnnnnnnnnnnnnnnnnnnnnnnnnnnnnnnnnnnnnnnnnnnnnnnnnnnnnnnnnnnnnnnnnnnnnnnnnnnnncgtcccacatcgcctggctaatttttgtatttttgtggagaggggatctcgccacgttgcccaggcttgaagccagatcaagcaattgggttcttcggatttctgaaatagaccccaatattctgcctttaccccagaggatgcagatgtaccttctctcaagccgatgacctcaaccctccccggtccctggagctctgggaaggtgagcgcgatctcgcgcccacaccccagtgctctgggtcatactgatgaaacctgaaaaacacgcccttcgtaggaagacggggactcgccagatacccctctcctccctcatccagctccagcccaccctatttctctcaacttcctccacctccccaggccca

SEQ ID NO: 180665 - DNA, 371 bp, Homo Sapiens
tgagccactgcgcctggcctttaatgtattttgaaagaaagcgccttataaatttatgccagagtgacaatgaaactgtagccatttgaatgttacacaaacccaggactggctacatgagtttgaggaggagtgtttccctgcctctctctttgcgctgtgggtgaccactgcctgtctgctgtcattacatgaacacttaagccactctggggtgtttcatatagaaataatcctacttttcatagtattgaagggtgtcatttatctttttggactgttgatcaacttcttttgatacttgtttaataattacatccaacttgttccttcctccttaaatcatatttatatatgcatctctttcaaaa

SEQ ID NO: 180666 - DNA, 1011 bp, Homo Sapiens
  misc_feature (668)..(769): n is a, c, g, or t
ttgggacagatcatttcaacagaacatagtaagtgcccattagaagtacagacaggtattctgagcacagagaagagcaattaatctaatctgatggttcagattgaggttagatactgttatttaatagtggatccaacaaaataccttatacctagatgatgctccttagtagtttgttgaatgaacaaactaaagacctgttttgcaattgctgaaaaattaaagaaggatatcaaaattgggggaatgaccctctgcagtttttcacctagtatctaagggtacaaaactaatcttctgaaagaagaaactaaataaaaaataatagactatagagccaaaagttggaatctttctttttctactgttactctgatggagaaattaagagattgggagaagatatagttatgggactataggccaaatgagtttccttataatttgtttggtattgagctggttctgtcttattaatatattctaatgttcttcttctgcttgccctctcaccaggcagcagctgaggacaaatcatttacttctaacctagcagaaaattacttagttttgcaaaattgttggagagtggtattttgccgtaatcttttgtgaactctctcgtattataatagccatttgtgaaaggaaactttttcccacannnnnnnnnnnnnnnnnnnnnnnnnnnnnnnnnnnnnnnnnnnnnnnnnnnnnnnnnnnnnnnnnnnnnnnnnnnnnnnnnnnnnnnnnnnnnnnnnnnnnnatcacatgtatatatgacttcatctcagtgaggaaataattattcagtaagtgatcattaggacagttgattatctgtttgagcaattatatccttcccttcagccataccgagaaacaaatggatttcagttggcttacaatttgtaagagaaaagtgttttaccataaaagttagcagaagagaatattttataatctttatataggaaaagcctttccaagtgtgataccattaccgga

SEQ ID NO: 180667 - DNA, 900 bp, Homo Sapiens
ctttgtacaaaaaagttggcaagatataaattatcaataaaaattgcccataatctggcatgagccactgcacccagctggcagatacctttcatcttagagtgatccactactaagaaatcttcccaagaaaattaaagaggacaagactgttctatgagaagaaattcctaagtcctcacgtggagacctagggaggagacgcctctacctgggatttcatcatgtagatgcacccgtgtagtgatacagatctaatgagacactaacatatcacacatgtgggcagttggatctgttaataaggacatgctgctaatgaagttaatactagaatcagagggtacttgtgggtatgtggtaacttatataaacagagcccctgtgaagcatctgtatccgaatcagtgataatctatcatcactatcggagaaaaacttcatgtgcacaaaagcaccagtattattgcctttatgtttggggtttgcctttgcatataggttcttgtttcatgtgagtttaccactagaaaaagttactctcttttattattactgtttttgtattacagaaattgatgacttggatgccattgtacctgcagtaaagaaattaaaagtactttcatactgaaaacaaatcaaatcatttttactgtgtaaattgtattcttaacattttgtattttgtaggattgatcttattttgagacaagggttgtaaaatgtatttgctctcagaattcatccccttcttagtattaagtcattcttcatctgtgtaatttttattaactttgagattcttatacagaaaatagttgccagggtaaggtaattaactttagatcccttcatttctaaagccattattgagtgcttaaaatttaaggttgtttt

SEQ ID NO: 180668 - DNA, 1248 bp, Homo Sapiens
ttgggccacctcttccagctccaccgccggcgcagcagggaaaggcaaaggcaaaggcggctcgggagattcagccgtgaagcaagtgcagatagatggccttgtggtattaaagataatcaaacattatcaagaagaaggacaaggaactgaagttgttcaaggagtgcttttgggtctggttgtagaagatcggcttgaaattaccaactgctttcctttccctcagcacacagaggatgatgctgactttgatgaagtccaatatcagatggaaatgatgcggagccttcgccatgtaaacattgatcatcttcacgtgggctggtatcagtccacatactatggctcattcgttacccgggcactcctggactctcagtttagttaccagcatgccattgaagaatctgtcgttctcatttatggttagtaggaggtttattattcttttttcccttaatattattactactatttttgctttctgtcctttttgcctctaagagcagtctggcaggccttctcaagtaaataccaaccctgtttctgcagcagcctcagcagcagctcagtctagacagggtttccttctttctgtttatttttcttgctatcagagccctgatgtgtacattttggaatgctggagtagctgcttcatttctattcctccatctcccctccctcattgaaggggctggtggaactagaccagatgtctaacaaaccccgattgctagagtgtctggctctgtacgtgactgaccaatcataatacggtgtgccaagttttttttatacctctgacaacagcgtacaaaacctggactgtttcttagcacaaagatttttttcttttcggcctatttaatggtgtttcctcaagctctccagaccagatgttctgtgctgtatcagaactgtaggcaatttaacagctttatagccttccccctccccaaacactcacagtttgccatatctggcagacttgcatatagtttccagctgagaagtaaatgtaacgtcctgagtatctgtcagaaaaaatactaatgaatacgatcaatcttatgagctgccccaaaattgtttcagtatgttaacaattggattacagtaaagaacaagttgttaaagtatacttatattggctggaaacattgcatcatcagaccttgatgaattttccacttgtttcaatctattttggttttcattttatcacctattgctaaaagtttc

SEQ ID NO: 180669 - DNA, 1132 bp, Homo Sapiens
  misc_feature (166)..(190): n is a, c, g, or t
ccacctcagaaagttttaaaaagttggattgttcggtttcttattgttttgggaattctttatatcttttgaacgcttttttttgatacatgatttgcaggtattttctcccaatgtatggctggtcttttcattctcttaacagtatgttttgcagagcaaaacnnnnnnnnnnnnnnnnnnnnnnnnngacagagtgagacccaggtgggtggggagtgggggaagagtataaagttggctggattacaggcgtgagccactgcgcccggcccattaactaagattttgatagtgctccttatggtagcactgtttgatttaggctcttatttctttcagtttgtggcttgttacgaacgtggcttaaatagcttggtcaggtcatctactagaataagtgccaatcagatttacagttatgggcttgcgggattgttgtggctcttgttcctttcaccgtttacatcgttcacctaaatgtcttttttgacttggtgtgatggagctcatggctagcaaaaggggtattgtcaaaataagggggtacatggctgtagattgtctttaaaaagtatcttgtgaaactgtctaaaggctctcagtgtccctcatagaaacagtgaaaaatggagtgctaccaaggcttgatcaggattccacatggagaggcctgacctggtgttgctccccaaaacttagctctgctctactttggagagtctaggagtggcctggcccattgcgtagggacagcttttaccgtgggaaaatggcgttgttggaaacaatattttctaaggtagattgcttgttcaaatgaggagtgctatgttttcctcctaacagattgccatttgtatttcttgtagaagaactgaaagaacacttgctgggagacagcgctattgatagaatcttcaccttggggaactcggaatttcctgttagctgggacaacgaggtcaaactttggacatttcttgaagatagagcctcacttcttttaaaaacatataaaacaactattgaggaagataaatccgtcttgaaaaaccacgatctttctgttcgtgcaaaaatggccatcaaattgcgcttagtgagaaagagattttggaaaagcagtaaa

SEQ ID NO: 180670 - DNA, 2902 bp, Homo Sapiens
  misc_feature (2574)..(2597): n is a, c, g, or t
ttggcactattgtaattaatccagcaattcttgaaccatggttttatctttttcaggattaattacaatagtgctggattttaaagataaggttgaccatataattgatatctgctttctgaagaatgagaaatttatcaatgccatgaaagaagcatttgaaacgttcattaacaaaagaccaaataaaccagctgaacttatagctaagtatgtagattcaaaacttcgtgcaggcaacaaagaagctacagatgaagaacttgagaaaatgttggataaaattatgatcatatttagatttatctatggcaaggatgtttttgaggccttctataagaaagatttagccaagcgcctgttagtcggaaagagtgcatctgtagatgctgaaaaatcaatgctgtccaaacttaaacatgaatgcggagctgctttcaccagcaaacttgaaggaatgtttaaagacatggaactttctaaagacatcatgattcagttcaaacagtatatgcagaatcagaatgttccgggaaatattgagttaactgtgaatatcctgacaatgggctattggccgacatatgtgcctatggaagttcatttaccaccagagatggtaaaacttcaggagattttcaagacattttacctaggcaaacatagtggcaggaaacttcagtggcagtcaaccctaggacactgtgtgttaaaagcagaatttaaagagggtaaaaaggaactccaggtctctctttttcaaacactggtgctgctaatgtttaatgagggagaggagttcagtttagaagagatcaagcaggcaactggaatagaggatggagagttaaggagaacactgcagtcattagcctgtggcaaagctagagttctggcgaaaaatccaaagggcaaagacattgaagatggtgacaagttcatttgtaatgatgatttcaaacataaacttttcaggataaagatcaatcaaatccagatgaaagaaacggttgaagaacaagcaagcactacagaaagagtatttcaagacagacagtatcaaattgatgctgcaattgttcgaattatgaagatgagaaagacacttagccacaatctccttgtttcagaagtgtacaaccagttgaaatttccagtaaagcctgctgatcttaagaagagaatagaatctttaattgaccgggactacatggaaagagataaagaaaatccaaaccagtacaactatattgcatagaatgttggccttgcagcatttggtgtcatatgcagtagccagtggataaactaacctgttgattcaatattatttgactccttttttactaccgatgaccaaatgaagcagtgtaattaatggaaatagttgagtggactttttctcagtggttaacatgcccattttaaagagtaatacttacctttaagaagaatgttgttgaactctttgcatgttatttagtatgatgtgcagaaaacacttaagaacgtacctggtcttcatgaattcctctttggaactgggaaagagatccctgtggctattaaaaaggggggagggttcttacacaccattaattatgaagcaaaaggtttatttgcttaaaatgtcatttaaagatacttaaactgcatgcaaactttatttactgtacagagttctggatgtatttatcaaatagaaaaaccacccttgacttggttgttcacccgttttgtgatttcccttgaaaagagaaatgaattgtcatagctattgatattttactaggtgatgttctgttacactgaaagggatgttttttaaaaaaaattatttggaaacaagttttcaagtagggggacagttgcttacataatatcttgtatattcacatcctaaaaattttcatttatgagtatgggatgtgtgtatatggcttagccccaagttaactgtgctgattaacaagtacttataaaaatagctaaagtagaaaattaatgatcagttgtactagaggaacatcatagaagagaaaaatccaactctttatattaaaaatgaatacaataagaaaattgcaaaagagaccaaaatgaacgtgttttgtaaattgttacaggagcaaaaactttgcaactagttttcaacatactttagactttaaatgttgtttggacagttttgtcttcaacttggaccaattgtagattgttacaggcttcctaggatttagcattcctattttctctaccaaagttttttttagaagcatcccaactcttctctttgttgataaataagcctttcctgtcatcttcattttaacttgctaaaaccctagatacaaaggtcctccctcatttttcccacagagcccctgtttgggaatttgagattctgtgtcatgctggttttcctttcagaattgcttgaaatcgagttctcttagccactggacacctagttttcaggagaatgtcccaagattgtttatatatacaaaatggcaaaagtactgtttttcgaattgataattcaagcaaaggcttctctttactgtcactgannnnnnnnnnnnnnnnnnnnnnnnccttgtttctatttccttgaagctttgaagggaggagaagcagaaaattttgtttatgtttgttaaaaatcagaactacttaatgctttttgccacagcatatttccttgcctgttggagccgttaggaagattacctatgtcctaatcttcaacctgagaagatttttgactcttgtgtctactgttgattgtttgcttgagttctcaaagacctgtgctcaggtattttaaaagtcgtctatttctttctagttgcatcaacttgcacactggtgtctaactatatgtggtattcggaacttg

SEQ ID NO: 180671 - DNA, 916 bp, Homo Sapiens
  misc_feature (275)..(298): n is a, c, g, or t
ttgtacaaaaaagttggcttcattttaccttatagacataaaaccctagatacaaaggtcctccctcatttttcccacagagcccctgtttgggaatttgagattctgtgtcatgctggttttcctttcagaattgcttgaaatcgagttctcttagccactggacacctagttttcaggagaatgtcccaagattgtttatatatacaaaatggcaaaagtactgtttttcgaattgataattcaagcaaaggcttctctttactgtcactgannnnnnnnnnnnnnnnnnnnnnnnccttgtttctatttccttgaagctttgaagggaggagaagcagaaaattttgtttatgtttgttaaaaatcagaactacttaatgctttttgccacagcatatttccttgcctgttggagccgttaggaagattacctatgtcctaatcttcaacctgagaagatttttgactcttgtgtctactgttgattgtttgcttgagttctcaaagacctgtggccaggtattttaaaaagtcgtctatttctttctagttgcatcaacttgcacactggtgtctaactatatgtggtattcggaacttgtaattcttattgagcagccattgcctatattttctcagctcctcactgatttctttatatgagctcagctgacaagcaaatgcagctattttgtttaccctctcttcataccgggaccatcaacaacagtgttctaactcatccctgatggtctgtgagatgtagactattacacaagattcaagttactcgtaagcaacttttagatagagttggtcctgttaggaggagactcttgatgtcaccttcagtatcttgaaagcgggtcccctccccgaggctcttaattctttgaaaacttgatgctgtttc

SEQ ID NO: 180672 - DNA, 2299 bp, Homo Sapiens
ttggcttctgtctgcactcagtttgtactttgggaattggagaattgggtaggagctgagcatgggctggaaaagagggcaggagtagacctatcactggataggtcataccttgaattgtagtttatttccatttacttttcagagtcttgatttgtgcattctgttcagatttttaggtgaattcagtgggagacgggagaagttagcttactgcatctgaaccagaaaacttccttaaaatatttttgagtgtttaatattgtatctcatttattttccaaattttgattaattaatatattatttacttaaagaatcatgaaaggatttaaaagaattataaaatccaggattggaaattaccttagaagtcatttaggccatttacttttgacaaattctcttcacctcaaacaatagctaataatagctaagattgactacgtacctgccagtgtattaagctcatggtctacattaattcatttaattctcacaaaaatcctatcaagtttttagctccattttactgatgagaaaactaaagtttagaaagccttctcaagatgcggtccttggaccagtcatattgccattactttgagagcctatgaggaatgcagaatcttgggtttcaacacagatccttagaaccataatctacatttggacaagatccccaaggtgattcatttgcacattaactttttcaatgcactggtttaaataaattataaataacttgatgaaggtcacctagcgtgcaagttacctttaggatcaagagagtaagcagtttacctttagctggagaatgctctaacatagccagttgctagaattaaactgtaccttatgcagtttgaattttctttgtttcttgaagaagttagggcacaaataagctatttattctgttatctgtacttttcaaatactatttatgcagagtcaagtatccttagggaatgcctgtctacattgaaaaggacttagaggctaattatcctatcatctggtatatcaagagagatgaagaggaaacatggcagtctttgaaataacattaagctaatcgaaatttagcacttattcagattgctacccttaaataccttccccacaaagaagccagagtgtcattttaaagaataaatcagatcatgttacagctttgtgtaaaatgctccaccagcttcctgttgctcttaaattcagacaccttgccatagttcagatgactacttctttttttagctttatcttaaaccagagctccagctctttccatatacttcaaccatattgacctttcatctctttcttgagcatgacaagctctttcgcattcacatttgcactacctcctcctttcatttggattgatctccatgaagcttttcttacatcggctcgcagttcaaatgttacctcctcagagaagccttccctaatttaccatgttggaaataccctttcacaaacacgtacctggtcatactgcataatttgacattcttatgtagtatttatagcatttttcagtaccagaaagtattttatttacgtaatttgttacttctctcgcgtaccaccctcaggagaacgtaaaggtccaggagggtcagtatctcatcggtttgctgtaatatacccaaagcctaggtttttgtgaacatcaaattagtgtattcatgtaagactctgagaatgggtctggcatattgtacacacttgtcagctgctgctattgttgttagtacaagtgatgatagtgataatatatttaggcatttgtgaaactcaatggaataatttattttgaataaattcaaggtaatatctaattattagaactgagtactgtagttaagcatttctatttttataggattgaaaaagtgaaaacagtctaaataatagttctttgattggaagtgttttccccatgtttttctcttaggcagttgtgatcagaccatcaggatatagagatgaggatcctcagaaacacatccatctcctaaaattatgaaccagctggggcatggagtttttgaagtcacttttgaacttttcagctaaaagccagttttgctggaaatgattgctcctagatattagattcaaactgcttttctccctaatctagacttatgcaaaatcaggcatcatagtatgttcagagtgatattcagtgttgtatgcttcactgtatggcatttttattggtgcagtcattgaaataaatgtatgtttatatagcattctgtatatcatgagttactctgccttt

SEQ ID NO: 180673 - DNA, 1318 bp, Homo Sapiens
ttgtaagcatcaatcataaaatcaaaaccatgaggtgaaaaaacaccctccacgaagatagggagaacaaaggacacttcttcatcaggagcagacagtttgccatggagtacatcacccggcccagacgtgacctccacagccggatagaggctacaaggtaagagcagcctgtaagtgcacaaataaattcgaggctctttctagccctcaattactgggtcctgtgaattctaatttaactttaaaagatccctcttgttaacaccactggatttcggcctggaatgctgaatatgctgcaggctgcactgaggcagaaaatacagcactcgcattgggaccagaggtggctttgggaagagaccctcggcatcagagaaccaggagggtggctgctcagcatcagcccagacacaaggccaaatggtccgaccgggggccccgtttccaaagccagaaccctgagaaaaggagcaaagctgacagaaacgacgacattgcctgcagctcgacaaggctgggagggccactggccagggtggccgccagcctctcgcagttgacctatgggaggccacccggagggccccacccatgcccagccatgaggcctcccctgcctcccgaccatgggctggtgcagacgccggttcccccaaggagtgctacaccgtgttccagaactcaagtggctggcacattccgctggggactcggcactcccctgcagctggcttccttccctagcacctgctgccacacggtggctgaccgcgaccctgagcctggcccgtccctccctgctctcccctgcacattatttagttagcagccatccctccactgatttcaaaccttcagggcccatctcttctagtagtttccaaactggctttgtggccttcttggggtctgcaaaggtcccctgggagctgccctggggggagggtgggctgaccaatggtgcctgtttatcattgggatgaccaggaggaaggcgcaggttgaggactgagctaatctgaaatgaacatattattgacaggcaggctgaggtccacagaggccagggacgcttccatctgaccccttgtccagcgctccttgcgcctgtgctgtgtctacttcctcgaagaaaagtccacacttccaactgcaaagtgccaagatgccaccctgggcagcaccaggccctgggagtgctcctggcctccctcatcgctgggcactgggagccgtgtgtccctggctgcctctgaggctgtgatttaggaggctgaagctgacccaccgctggcaccaagcgtccacccaa

SEQ ID NO: 180674 - DNA, 476 bp, Homo Sapiens
ttacgcacagcagtgaaccaaaaagccctcccagaccaaagcacgagccaaggctaccctgcacgctctctgtgctgctgataatcgagtgcaggggttcctcttgtcctcggcggtctgcgtgctgaacagtcgtcctgcctgcaagctccaggctgggtttcgcctggggcccaactgggctgtggtcctccgaggacacagaattggttttcctgaaaagacaaatatgcagaaagaatgagaattaggaagacacgagaaacaatatggtaattcgtcccatcaagggtgtctagcagaagctagcgtggacatctctaagtcgggctgttgctgaaagagaaatccacaggaccaaatgccacagtgtcagggtgtggttttggcaaggagccctcacagatgtcatcagtgtaagatactgtgtcttctcagaaccgcagaagcgaaactggagggggtgggctgctgcc

SEQ ID NO: 180675 - DNA, 1711 bp, Homo Sapiens
gtaaccttcagagattcttagaagagttgctcattcacacccacgcccttgcccaaggctggcccacttagagcgaaacttaacttttgtctggatgggaagagaagtaagtctaccccgaggttgccatgttgaagagtgagaggtccaagtgattctgtgcattgaaaccaagacaccccacccagaacacttcttccctccctcagcccaaaccaaaggctggggttctcatctccaagtggctgttctccaactttcccaagccgcttgcattccccagactggactactgtggcggttaggttagatttgaagacggggcccaggctgggtatgaacgggtgcagccctcttctcctcttcccccccacatctctcatgagagaggtagtggcatttccttctcagggagcttcaatgggaaaggtctcgaaagcttcaggaggagcagaataccaacgcagggggatggctgtaacgatctcaccgtctcctaacctcagtcccttttttgagagtgaatggtggagggtgggaagggacccagatttgtagatctctttgtctgggggaggggaaggatgtggtttgcagagcggaagcagagtttggaaacgcatgagagcagagcttcgtgtgttcccaccctcagtgaggaggtgtgagtgggtgagcatgtggagttgggtgttcccaccctcagtgaggaggtgtgagtgggggtgcatatagaggcagtgcctgctgtggggtcacaactggtgcatgccagcgccaaagggacctgtctttaggggtcatttcagccagctcctcccatcacagatgacagctccaagcctagaaggggctcagtgacagggccaggacaagccctcaggactgtggcctcctggcccttggttcccctgccccacaacatggtctccacatggctggctggctggctgtccctgtgtgtgtgtgacacacggtgtgagtgcagggctgtgcccggggtgggagggtgtctatgtggcactgactgtcttagctcagagctggtggatcctctccatggacaatgacactttaaggattgtcttggtttgtttttcctatttgtggggtattttccccctcaggctcctgggtctgctgctgcctcaaggtgtcctgaccttgaggctgatgaggggacccctgcctgtttcccccatactgagttctagggaggtgctcaccccagactcttaggaagggtctagagaaatgagaggagcccaagccaggggccagctccgagaaagggtaacctccacgcttctctctcccaaattggaaatgaagacaggttttcaaaggcacaggctccccctgccagcttctaggatcttccttggtgtgcaatgggccagttaggggtaggcagcttgcacccagttctcctttatctcaacttattttcctggggagaggtgcctagagggattgaggtaacttcaactgggaattccaaggaaggtgggcaagtagccttggctctctcccaccatgtccatcaggattgagagtgtgtctagctcccgaccactttgtcttgacctactgaaaaattgggaactgaggggtgccttcattcccctttgttcactttctccagctcaacttgggacttgggtggtgggactggaagacctcacccctgctctcgtcccgcgcccctttc

SEQ ID NO: 180676 - DNA, 1073 bp, Homo Sapiens
  misc_feature (553)..(561): n is a, c, g, or t
ttttagagtagcagggtgccctcaactccagtctagaagtgggcaaagttctcacgttggcagtactgcagtgtgggacaagagaagcagctggcccagaaggcagcgtttgttcaaatggtcatggcacctgtgagcattgtattgccgtggaagagctcaagtcattgcctctgctaaagtgcctctgaattcctacacagtgaacttagagcacaacagggcgggaacatggttgttttccattcttgttcagctaggcttacacatcctctcactcccaaaaggcagagtaggcttgcaccccacacctgactgggctcagctctttggcaagtgattgcgtagctgttctgcctgtgactgcaggccccggtctgcaggcgggaaacaacaggcagttgtgtcctgagccctgggaactggagatctttccacatctgttcgcctagtcggggggcgggaggaaatcaccagaaccttcaaacatggggccagagcagggagacaaaggggaagccttaagccgatggtgaccccaggtcatatgagnnnnnnnnnaggcctcccccatccactttcatcccctcaggtccccgacactcagccttttcatccttctccaggtcagcaggatcaggttaatgtgacttgaccagaaagcttatcaaatgaaggcagagacaggtgtttgaaaccccttccctgctgaaagctgggttgaacaaggttagcagcgtagctgaggccaacatcctacactaattgcattttctttcttggagctccttctcttccccttctttgttctctggcttggaacccctcaaggtctccgagagccagtaaccaaaacaaaccattcaaaaaacgaaggatttagggaaaaaaaattaggggatgtgacattctggaccaaacagtggccattatacaccagagcctaggaaccagcatttggaggcatccggccacttccgcccagtgggcatgccgaaatcaggaaatatgggggtatcagaactgatggcacaaaccttttctcacattcacaatcaggatgtcatatccaa

SEQ ID NO: 180677 - DNA, 977 bp, Homo Sapiens
  misc_feature (809)..(818): n is a, c, g, or t
ttgggcaccatgcgcgcagcagccatctccactccaaagttagacaaaatgccaggaatgttcttctctgctaacccaaaggaattgaaaggaaccactcattcacttctagacgacaaaatgcaaaaaaggaggccaaagactttgtaagtttgttcagagtctcactttgtgaattttaacaaattatctttaatggcagaaggattgagaatgaatggaagagagtgtgagcatttagtttagccagatcagaggagttaattgcctgttgtgagtaataagtaatattcagctgcattaaaaaataaatcttgatatggcattaaattgggtaggagtttttctctacacaggctcataaaaatgggttctatagcaaaatgttgtatcaaccatttttagtattgccttattccttagagaaatttattctatgtctttttacaaataaaatgaattctgaagaaatatgaatattcacttttatgtcttttgtagtggaatggatatgaaagcatacctgagatctatgatcccacatctggaatctggaatgaaatcttccaagtccaaggatgtgtaagtacactaatacactaaactatcattatcatttacaagagaagcctatgcattatctctatatcccagcaagggataaatactgcgcacagtagacttcatttcttttaagtaacatgccaaataaaattagactatcagtaccaatgtaaattgaatacaaatgtgtacacacacatattggactttatctatttggattttttcaaattttattggcaggnnnnnnnnnncataactatagtaactctaagggaagttttgcattttgtgaataaattttaacatatttattaaactacagtttcagtttgtgaagttatcaaagtgtaacagccattcttatttcatttgtgcttacattttaaaaattgactaatgtatgtacattt

SEQ ID NO: 180678 - DNA, 855 bp, Homo Sapiens
  misc_feature (255)..(473): n is a, c, g, or t
  misc_feature (726)..(742): n is a, c, g, or t
aattgtacaacatctaacttcaatgcccaatcttataaaacaaaagtaaaatgtctttatgtaaaaccccattatatttacagttcccaacagacccaccaactcttatatacccttatataacttgtttagaatttagccatgtgcatttttaaactgtgtttgtcaacattaagcctcagtacagtctccaaattatatgccaccagaaatgaaattcagcaaaggacaggattgtttttaacatacgcaagnnnnnnnnnnnnnnnnnnnnnnnnnnnnnnnnnnnnnnnnnnnnnnnnnnnnnnnnnnnnnnnnnnnnnnnnnnnnnnnnnnnnnnnnnnnnnnnnnnnnnnnnnnnnnnnnnnnnnnnnnnnnnnnnnnnnnnnnnnnnnnnnnnnnnnnnnnnnnnnnnnnnnnnnnnnnnnnnnnnnnnnnnnnnnnnnnnnnnnnnnnnnnnnnnnnnnnnnnnncccaccaaaccaaaaatatactatgcaaggaataattctagaagacattacataatgcaatacttgcaacatttgcaactaattttcccatagggataaatggaaatttcaacttatttcaaattttgcacatattatgaaaccttattaatgtatttttatcaaactaaatcagatttgtatttgaattgttaggaaaaaccatgtgcagttttggctgataattgaaggaaaaatatcaaatgctttgaannnnnnnnnnnnnnnnncaaaccctctgcagaggtaggaaggtatgaatttcttttttatgtcaagatgcaaaaacaaatcatgatgcttttgttgggagaatttttgtattcagtattttgtatgtacc

SEQ ID NO: 180679 - DNA, 937 bp, Homo Sapiens
actttgtacaaaaaagttggctgcaggcgtggggttccacgtgggaggaatccatcccctctgggagtaagaaatgaccagggtccgggtgagttggcgttccatttctcctaaaatgccatctccctgaaatgtccctgtgccatgtgttgttttctttattgtcaggcccccagtacggtattttatagctatggatgtagggacattaagatactaaggacatgtagctagcagatgatgtcaccagggtctgcacagagagttttcactggcccatcctgcctccaagaatttattccactcctcagagcagtgggctgtgccctcctggggagcctctcaaagcctgccttttcctgccagacatttcactcacattgaaagtcattccaagctattccatactcatcccagtgctaagtggtctcagcaaaacagatagaatgataaaccacggtgcttttcttcaaggagcttaccatcttgatgaacatattatattacctgtacacaaaaaaatgcatattaatagtgataatttattaactatgagtcaaaaacgaggaaattcgttaaatggcagcacagtggttacaaaatcactctagaaatgcttttcaactaggctatgcatcagaactctctgtggtgttttttaagaactaagcttccttctctcttccagacctagtgaaaggagagtttcactccttttttattctgttgatctttgtacatccaaaggtttattgtgaaatatctctctatacactataagtgtctctagggtaggtaaaatgagttattcatcctttatactcaagttgatttgttctctttcactagcatgtctacatatttaactgttccagtaaattttaaattaccaagtcgtacttttttaaagagagttttcagttgtccccataaaacc

SEQ ID NO: 180680 - DNA, 543 bp, Homo Sapiens
accgtgcctggctgcatttcagtttatttttcagtaaaactggtcaaccatccacctcactgcactaccgtggaatgacttaaattttgcgagagcatttgggcccacagtcaccgcttgctgaagcagatgggatgcctggtccaaggtcacgattattaaagtagacacacggggcactttgacccacctgtagtacatttctttcacagcaaggcagtgcaaccggtagcacatcgggctcttttagatgctgctccagccttggtccggtggatcatgcttggtttagaagctgggttgtctttctcctgcccccagtcctgtctttgcttttatagtgcatcatacaccacgtagaaccgagccaggttcctgccatgtggacgctgttcctgcctgagagtctcttagaggaaggctgggaacactgtggaaagactgggcatctctgcaggcggagctgaatggatgtgaaacccctgtgggcatgtgcttccgagttcctcagcaggcatttgtgttttttggtagaaagtttgc

SEQ ID NO: 180681 - DNA, 1511 bp, Homo Sapiens
  misc_feature (849)..(945): n is a, c, g, or t
ttgggattgattttcacattttaaatacagaaaggcaaaaagaagatatataaaactcctgtggtatcaccactaattgcaaagtcagtgtgaaaatgatagtttattattggataatttttctatgcatttgtattattaatattgataaaaccattagcaataatagttgtgatttagtgagcaattattacatgccaaccagtgttttaattttttacatgtgttaattccttcaattcacaaaaaacagccatgaaatactcttattatttgcattttacaggttccatgacttgtctgaggtatcacaactcttaaaacttgaagtagagcttatgttctcaaccactttactataattccgttccaactgtatgttcacacagagagatacctttttgatagagattttttaaacaagcatagatttataatatttaattttgttttataatcttgccttttttcactttaaaaaatgtgtatttaagaccacttagtacaccatcacgggatgcttgtactagggtggaactggaaggagcttagaattatgtcttagaataaacagtcttttgtatctgagcatttgggcaatagggagaagaggaatattagagataaggttacgtgatgttaccatttactaagagggtggttgttgggaaaggaccacatttgccaattctggcagtgttgagcttgggaccatcataggaaatgtgttttaggcaatttgaggatcaacaacatagaactggcaattgaaatcaatgaagttacttaggaaagaagtataaaatacaagtaaagaggatctagaagaggctcctgcagaaaacaaannnnnnnnnnnnnnnnnnnnnnnnnnnnnnnnnnnnnnnnnnnnnnnnnnnnnnnnnnnnnnnnnnnnnnnnnnnnnnnnnnnnnnnnnnnnnnnnngttttaaacaatttagcaaagtacctgacaagggatcagtaataataattagcagttttaataattctggggaaccaaatacaagggtaagtagataaagaaaaggtatcagtgacatcgttcatgaatagcagtcagagttagattaatccagctaatatttttatctgttcattacatgtagttaatagaatacaagaatagaatcttaagatctaacgcttgagttcttctaagtcagtatttctcaaagttcctcaagtcaagtccacctttgaggatctggtgaaatctgttagtcctagcctcagtaaattgcacttgttcacatacgccactgtgtaaacaaacatgaaagatgtttatgaactcccagaagtatgttcatcccaaattaggcataatctgccagacagaaatccaagttttctttttgccagttccctcccttctgctctgttactcagccttcactctattaggttagaggtcaccaaagtctggcttagagtctggtttttagggctcatgagagaataaatatttttatgttttttaaatggttt

SEQ ID NO: 180682 - DNA, 1374 bp, Homo Sapiens
  misc_feature (374)..(385): n is a, c, g, or t
  misc_feature (946)..(1018): n is a, c, g, or t
  misc_feature (1205)..(1270): n is a, c, g, or t
tagggacgtgagagctcattctagtattctctccacttctgtatatgttttcagtttcttgccattgagtttttcgaaaaattaaagcaggagtatgtgagaaaagtgtcagaagtacagtcatcttcaaaccacaaaataagtgagctactggacaaaagcagctaactaaaagaaatttaaagaatcagtgacactttctgacaagagagcttacaaacataccatgactgagcaaaatgtgtgggattttcttgtttctcttctgggaaagggaaaagggttaaaatagcttgagcaactattattcatgaaatgtttttaactaagtcactaacaaagatttgcctatgtaagctttgatttctataacnnnnnnnnnnnngaagcattcattgtgttaacacaaatgtagagctgtaatgtgaaacttcagggagccggggtaaaactccctttcagatgtcatcagctagttttgagtgatcgacacaggtcaaacttcatagtgccaagctgggcaatagagacagattccaccaccagtctgatcagctgccattctctcgccgctcttaggggaaaaaactgtacacattagcaacttcccccaaaatctcttcttgctacccaaagtcatatttgatttttatcttcatactttttcatattataaacaacacattcttcatgatatctaagagatgaattatacaatttaacacataatttgttatacttagagctaagagattttcaatttcatttaattcaaatcgttcctttatcaaatgtggaaagtgaggtctagagaggttatatgccttacttatgagtatctgaaagtaacaaaaactttgaaaaggtttaatcataaaaccaaagttaacataatattcaactgccattttaattaagcattcaaactactctgttacagaagtgnnnnnnnnnnnnnnnnnnnnnnnnnnnnnnnnnnnnnnnnnnnnnnnnnnnnnnnnnnnnnnnnnnnnnnnnncaccagtgaaaaactccacacctgaactcatatgatgggttacagccacagctcagccaaaactttattgtgtgcacaaaattactgaaaatattgtataaaattaccttcaggctgtctacagtatataaaacataaatgaatgtttagtcttaggtcccatccccaacatatctcactacatatnnnnnnnnnnnnnnnnnnnnnnnnnnnnnnnnnnnnnnnnnnnnnnnnnnnnnnnnnnnnnnnnnnacgtttgtaaatgtatctgtgtataacaagaatatgagcacttatatataaatgaagacgcaaaggaaaatgtccagaagaaaaaacagcaaacctttacccaa

SEQ ID NO: 180683 - DNA, 1594 bp, Homo Sapiens
ctttgtacaaaaaagttgggtaaaaagtccaaggatgagattttgtctttcatgttattgtagctggcatgcttcaaaattttgagcttactgggactgacagcctctcacttcaatctgagggattgacagaatttaaacaggctcattgattctgtacactctacccttcctgtggcaagtgataatgggatttcattaatgaatcaatttgttttacaaatgacatccactgtggcattggaagacagttgggtctgactcaagtttaacatttcttaccaaacattcttaagtatgaaattggtcctttaatccaaatgctcttggtcatggctgtcctttgcggattacatagcattcaggaaagtacaaaaactaaacactaaatccccaactggccccaaagaccttttatgatgtgagagacaagagttcaccccagattaatttcttttatcattggctttatactctaacatatagatactctctatagcaaaaaagggatgaatggctttcaatattcatttctgtttatttttgtgagggaaaataatatatcaagaaaattttcttccacttagaaagctttaaagctgaagtagaggtgcagtcaagcttggatctgcaggaagaaccactaggccactgagtcatacttgagcttttcttactactgccccaatttctaaattgtgcataaatacaatcactctcaatttttgaagggctaattatctactttgtgggtgtgttttgttttttcttttcagcgtgtagggcttgggctctgtttccttttattagcatgtcacctgagggtggaacaaacaattggaaataaaatttgattattttatttcttataaagtattaatttcttaagggggtttgaaatcattggtaaaattaatatcagtacattatatgtcataaattttgattatctataatgtcttttcttatctaccacaaataattgagagttggctaaattcttgcagaatatatgggaaaaaaatcatagcaaagaattcagcttccctcaaaagaaagctatttttgtttccttcactccactaaatttgaaccagtagcacggatcaacacgacttctgcaatgagagtataacggtagctcttggtacagtcatattcatatttttaaatctttctttgaccaaaactattgcattgttttcattacattttgactgcgttacttattaaggccgaatgactttgacacccccgtggattatttttatgatcacatcaaatttaaacaatgtccaaagtgtaactttaatgttatattttgtttcaaaccctctggtctaagattattgagaaagatgttttttcctcctccctcaaatatgttatctcttcatatataaaaaaataagttattccatgcttttcaggaactgtaaaaattatttcaaaaagatatttgaaaaaagttttctctattctggacacaaatgctttccatttatttccaaagaagaacgaagaaaaatgggaatcctaattttaaaaaaatatatgtagtagtatctgcctatgagatatttcagtctctaat

SEQ ID NO: 180684 - DNA, 1444 bp, Homo Sapiens
ttggctaacccaccccttcctttccagtggcagagggcaaagtgtgtgacccactgtgctcctctgggggatgctggggcccaggccctggtcagtgcttgtcctgtcgaaattatagccgaggaggtgtctgtgtgacccactgcaactttctgaatgggtacagtaaggggagccagtcaaggatgggtgggggtggggccctgcaatggaactgttcaggtggcatacaataaaagtctttagacagctttctgcatgtgccttggtgggattgaggtaggagacctgtggttgtgagatcggagcatgaaggtcaggacttggaagtgacccccccctccctttattccccactacagggagcctcgagaatttgcccatgaggccgaatgcttctcctgccacccggaatgccaacccatggagggcactgccacatgcaatggctcggtatactagtagcaccaggatctccaagggagacagagaaggggcaatacttggagcatctggggaatgatatggctaaggatagcacagagaggccagataatgctagggcctgcagatagaagatcctgaatgtctgggttggtctttgctgggaggtatggaattgaccttgggatctgattcttcctgaccttctctcttccactcagggctctgatacttgtgctcaatgtgcccattttcgagatgggccccactgtgtgagccaccgcgcccggccatggaatgtattctcttttatgtctctacctcctacatcttatctccaggttggatgattgatgagaacattcgcccaacctttaaagaactagccaatgagttcaccaggatggcccgagacccaccacggtatctggtcataaaggtgagtagggagtaggaggtgctaaggaaatttagaaaaaggaggagttggctggaaccaggattccccctaacaatcacctatcgatatagagagagagtgggcctggaatagcccctgggccagagccccatggtctgacaaacaagaagctagaggaagtagagctggagccagaactagacctagacctagacttggatttataggaggacaacctggcaaccaccacactgggctccgccctcagcctaccagttggaacacttaatcggccacgtggggtaagacaacttctaattacccaacactttgcaccctgagccctcacaaaccctacagatacccagattaactactcaaaggcccccatggtgaatgtagatttctcccttcatcttaaccttttccttattttttcatcctagagccagagccttttaagtccatcatctggatacatgcccatgaaccagggtaatcttggggagtcttgccaggtaagttctgttgctgataggctgggttttaggatcagattgatacgagtattatggaaga

SEQ ID NO: 180685 - DNA, 1672 bp, Homo Sapiens
  misc_feature (678)..(776): n is a, c, g, or t
  misc_feature (807)..(826): n is a, c, g, or t
  misc_feature (832)..(840): n is a, c, g, or t
  misc_feature (1546)..(1571): n is a, c, g, or t
ccgattctcaggttgattaatactgctaatgcaaatgctcaagtagatgtttaaaaactttacaaaatagattcaagtgatactttcttttaaaagtgaagagttgatgattacacatagtaaattcatgaactacagtaggtttgtatcaaacaattttttttaatgaaaatctgttgaggtgtacacaatatgcttcttgattgtattagtccttggtctctgctagacctcatgagtttcatcatttagaaaaggggtagaggatgaactaatgtctccttcagatgtaaacatgaaatacctagagttttacttgcttttcaatacactgaataattttaaatgattctgacactgatgtagaccctttgacttataaattctgaggaaacaactgacagcataaaatatttacattcttataacacagcacagtgactttcttctttcaagattgtagctcagagaaaagatacaggattcaattgggggttcaataggatagaaatggagagattcctttgtgttgtagtagaggcattttcctaaggagtatagatttatactttgcattttcattcatcatcccccagaatcatggtcaaggtgtaggtcactccacacagctgatgctcaggttattcccttgtgagaattatgagaataaagctcccnnnnnnnnnnnnnnnnnnnnnnnnnnnnnnnnnnnnnnnnnnnnnnnnnnnnnnnnnnnnnnnnnnnnnnnnnnnnnnnnnnnnnnnnnnnnnnnnnnnaaaggttattatatatgtaccactaagcaannnnnnnnnnnnnnnnnnnnttgggnnnnnnnnnccctaatattatttgggtgtcccctgtgcttctttaggatgtagttataactaaacctgttatacttgaacatcactaagagaagtaaattattatgaagctagcaaaaatcttgaggccaaagttgtttcttaacagctttaataatgcttgttgattttgaataatcctttaaaaagtggaccatttgcttattttaatatcacgtcagtaaaatgttagtattaaaaagatcagctttttatggcattgaagaatgtatctgctaagacacaaaaattgcatggtaagtataataggtggaggaggaaaggttgtaggccggatgaaaatttaactgactagaacatttattcaggagtgtaattattttcccttaccccaatccctgtgtacgtgttgggtatagttacgacattatccggatttgcaaatagacacaactttcagtcttaccctgtttattgtttaagagtgatagactgttgtcctcttgctggtggaaaatctaaggtggagcccactcttctatgctgaagttcaccaggcagagcagttttcttacaagtcagctactctgcttggtttattttaggttttggtacttcacgtaagcactgttagaaggtacaagtgtattaatatcactagttttgaggcgcttgggtacatttgtttttaatatatttagaatgtgcagtaaacnnnnnnnnnnnnnnnnnnnnnnnnnnagcaaacttgttattttaggtccaattattgagttgacagtctactgtgagaatgagatgacatatctactgtgagaataccataaatgatgaatagttta

SEQ ID NO: 180686 - DNA, 1027 bp, Homo Sapiens
  misc_feature (242)..(266): n is a, c, g, or t
tgtacaaaaaagttgggactgttgtcctcttgctggtggaaaatctaaggtggagcccactcttctatgctgaagttcaccaggcagagcagttttcttacaagtcagctactctgcttggtttattttaggttttggtacttcacgtaagcactgttagaaggtacaagtgtattaatatcactagttttgaggcgcttgggtacatttgtttttaatatatttagaatgtgcagtaaacnnnnnnnnnnnnnnnnnnnnnnnnnagcaaacttgttattttaggtccaattattgagttgacagtctactgtgagaatgagatgacatatctactgtgagaataccataaatgatgaatagtttatttgagaacttttatactcagtggtgttttatatattaagataaaaatatgtacacacatgcatgtcacatctctctactgtggagttaatgtgaatttttaaaaaatggaattgcaaccacaatcatatctaagagaacattcactcctagtgagggtttacaaaagctactaagagaataaggtagatgataatgcaaagggtcatgatttggggttatttttgttttattttaaaatttatactgctacttttgaaagaattgtttttatgactatgctctttttgtgattgaaaagtcatctaatagaagctgtatagaagctactttttaattgctggcaaacagctttaagtgcactttctttgattacacttccattttttgttaaacttgaattttctgaagccttttatgtaccactaagcaaataactttaacctttaaataaagcaaatttacatctttattgtatttctacttgttacaaaacatacttgctaaagtaacttcagtcctcaaatataactgggaaacaattatgagatagactcagtctccccctcccacccctttttcccctgccatatctaattaagcactaactgattttattactttattgcctttacactgcttattctttttgactgaattc

SEQ ID NO: 180687 - DNA, 943 bp, Homo Sapiens
tgtacaaattatgttggccaaagtgagtcacatggctaagctcaaagttaggaagcagggaaatagactgtatctttaggggaggaatttcaaagtcatatgaaaaaaaaggtatggatactacagccagggatgaacatttggagccagtaatgatattcacccctgtgtctgtgtgactcctaagaagagccaagacttgttaaagatgagcagagaggtaaattagtttggagatggtgaagaagcagtttggggatactttggtctgcgtataacattgaagacacctgtctttccttgtataccaggggttgcaaactatagcttattgggccacatcctgcccaaggcttgttttattggaacacagccatgtccagtggtttgtgtgtgtcttgtgtgcagctgctcagccctgccacagacagttgaatacttgaggcagagactgagtggcctgcagagttgaaaacattgactaccgggttctttgcaggtaaagttagctgactcctgtttgatatgatgcaactggatagaatccatttggctataatctccgcctctctacctgcccaccccatacccgccccagttccttttaggattttcctactgtgctttgcattctcattattctgtgtttttataaaataggtaaaataggaggtaaagttatcctggtgcctggctgttggcactgatgaccaatgcaatttgcatccacaggtcataatccttaaagtttataaggcgacaaattgcagattagaggacatacaaatgagggagccagttgctacttttgcctttattattaatgttttgtggctctgcgggtcattcatgatgttagacaatagggtgattatttctgttctgctgaaagacaatctgattgtgttttgtgtagaatgaggcactgatccgctctgcctgc

SEQ ID NO: 180688 - DNA, 1630 bp, Homo Sapiens
  misc_feature (1415)..(1428): n is a, c, g, or t
attgtacaaaaaagttggactttttataaaaataaatttatttttagtccatcaaggtgtctgaagattttatgcctaggtatctccatatctaacttgataaggaaaataggataaacaatgctggtaatagcaggaaagtaagtatttgaataagatgtcaaactgatatttcatgtgaacctaactcattttatggtaactaataattatcttatttaaatcaataggtaaaacctgtttagaaattaaaaatgagttacgatttaaagaaaattcagatgactcattgtgagtgctagttctcttgtaggatgccactggaaatgttgaaatgaaaaatgtaagtatatcttttggtggaaaaaaggatagtctctaggacacaaaattactgttttatttttttctcaggagtttgcctaagggtgtgacagatgatctctgtcacttgtcttagttgtgtcctgcaataaactggatgctttataaaatactagacctgtgatttcgtatgctgtaatatttcatttctccatcacccctccaaattatttcttagtttggagtaaaataataaatgtattatagtcaacatctcttgacccctctttagtttcagctaaactaagcatgtgtgtttgtgtgttcattttatagttcatgtgtagaactatgtgaattaaatttaagaaacatgtaaagtagaggaaatagttttctggagaaatttttcctttttggatattatgcccttttccattgcttttctctgcttgaaagcaaaaaaaagtaccctacccctgttctcctttagggaaaaactattcctataaagtatttttaaatcgtgcaagtcattgcctagggttagctaaaacatttctttttaaaaaggagaaaatgccctggctttaacattttcttgtatttgtatctattaagataaacagtttactttgatacagtacataccaatctacttaattttttttccaggattccttttactatgtttggtctgaccttttatgataacttaatatgggaacaaattagcatataattctattttccatgtgacctcaaccagttgcagaattgtaccactactttagggggggcaatttgacagtttatgtagactatagcattaattgttcccaaatgttcagtgcatcctggctaatgtgttattgaaggtgttttcacgtaagcagttagaggaagcacttcacccctattactaagttattaaaatgcctcctaaaggtagcattttaaattagtatacataattgattagtaatttgtcttctcccaagcataaaacagcatagcagagttaagtgtgaccagtgaagtataagatattagggattgatggtgacaatgatcatagcaactaaatggannnnnnnnnnnnnnagattcagccgttggtctttgaaatttcctgtgatgtgtttcaatctagatgcaaagaacatggaaaaatcaaagtgctcgagtggttaaatatgttttgggtattcctgtttaaagactataatacttttccaattaaaatcctcggttgtcacggcagaagaacgttaagctgtattgattgcccatttttactgaaatg

SEQ ID NO: 180689 - DNA, 1569 bp, Homo Sapiens
  misc_feature (421)..(434): n is a, c, g, or t
  misc_feature (763)..(783): n is a, c, g, or t
  misc_feature (1338)..(1373): n is a, c, g, or t
ccaggattccttttactatgtttggtctgacccttttatgataacttaatatgggaacaaattagcatataattctattttccatgtgacctcaaccagttgcagaattgtaccactactttagggggggcaatttgacagtttatgtagactatagcattaattgttcccaaatgttcagtgcatcctgggtaatgtgttattgaaggtgttttcacgtaagcagttagaggaagcacttcacccctattactaagttattaaaatgcctcctaaaggtagcattttaaattagtatacataattgattagtaatttgttttttcccaagcataaaacagcatagcagagttaagtgtgaccagtgaagtataagatattagggattgatggtgacaatgatcatagcaactaaatggannnnnnnnnnnnnnagattcagccgttggtttttgaaatttcctgtgatgtgtttcaatttagatgcaaagaacatggaaaaatcaaagtgctcgagtggtttaaatatgttttgggtattcctgtttatagactataatacttttccaattaaaatcctcagttgtcacgcagaagaaggttaagctgtatttgattgccagttttactgaaaatgcttagtattttacagtatcaccaaatatattttgtttagccaaggtataggaaaaataaaataaattgtataggttgacttttttctaaaatgtctttattggattgaatgaatgtttatacctgnnnnnnnnnnnnnnnnnnnnnttcctttttctatcagagtcattcttttgacaatcagatattagactaggtttaaaataactttctaatatgactcatatttatgggaggaaaaagacttgaaagatattcctatgtgtactttaattttctgtaatagtccctctggaatagaatatctcttcctcaaacaaatctattggctcatttcatatacaagaaaaagttgccctaaatggcagagtttcatctctgtaaagaaggctgacatccacttccttcacagaatccctgcatttgggtaattgagtaatgatagattaccttgccattgggaaataccttgttgtggcctttgtagcagctataggaagatggaagaattcttttgtatagacaggtctctagcctctttggtgtggacactgtgaaggggtacatctggtgagaaggagtgcttagggaaggaactgggaaggtccacaaaggctgatgatgacaaagaatccaagggctatgatgaattcttaagcttagatctcagagtcataaagtaaatttattaggctagagagnnnnnnnnnnnnnnnnnnnnnnnnnnnnnnnnnnnncagattgttaagttcacatgcagttgtacaaaataatacagagatctttgaacactacccagtttctcctaatagtaacttcttgcaatatactgtataacacagcatcacaacctgggatactgacattgatgcagtcaagacagagaacatttatatcatgaggaggatccctcattaccgccctttgatatcc

SEQ ID NO: 180690 - DNA, 3102 bp, Homo Sapiens
ccaactttgtacaaaaaagttggcttaaaatagcttctttctgagaattagatctgtgaaggtgtcctgcacagttcttgtagatgtcattttagtttgtggttgacgtgcatgcatttagcatgttgcttaaccgtcctcattcgcctcccagttctttgttgccttcatttggggggatgtgttttctgctggatgatttactgctagacatgaccaaactctgagtataagacttggtgtttggcagctggttccagtgctctgctgagaagtagttgggcccagcctggggcattgtagtgtcctggaggccgggagctcctgcacaggggttcttttcctggttcagagccttaggtgcctttccacttttcacgtaatcttttcctaggttggcttgctgcttactttgcagctgttgcagggattcacatggaatggagggctcccttttattgtggattatttctttgataatttacccatgtgctttttcattttcaaaaacccagtggtgtttaagaatgaaagattcttgaagaacaaaaattgggttaaatttgtatctatcagaaaagattctatcctctgatgctatgtaggcacattgaatatgcaggctaaattaaaaacagagtaaaacctttttataatatgccaattactatatctaagaatgtttatacaggctgaaattttgtaatggtatttatatctgttttcctttttaaggaaaataatatacttttctaggcatcaaaaatatctgcccctttcactaatgctgatgtaccaccttcccccaacccccaacgctaaatttgactggcttaaaaacatctgccccctgaactatatctggggaggaatattaataaaacaatgaaggacttcatggtgtctagttatataattaggaaattggttagaaacgtggctaaaaccagtttctttcattaaaagaactagtgtacatttaaaaacaaaaaccttcaggaaaaagactctttgatctttaagtcaaatagtatttttggttaacacagcaggaaggggaaatataccaatttcagattcttttatttatgcctaagtagaggttgtaagcagctaaggaagtgattaaaatgtagtctagtaaaaaatggtgctgattacttggaaagcagtttacatttgcaaaaaaattcagtattatgaccttcaccaacttttacacatcatatacttgggttattacttatggtatagcttgtgtatggaatgcaagggtattttcaaattgactaggtcttgctggtcatcttaaaatatgttacaatattacaaaattgaaatgtaatattttttaatagaaggaaaatataaatttaatatctgggcaattgagacctttaaacttactttaaaagtatgatcttgatgtatatgatactgttttgtctttgctatattaacagaattagaggggtgttctgcaattcaaataccttatatattccaaattttattctctataatggacttttaaaataaaaggtatatgtgcttcaagagggcaaaatttgaatcatgagctaatttgctaagcatcagattatagaaaagcatccttgattaatttggaactgtgaaagggggcgggtaaaactgttttctgcagaaatttactagtgcagcaaccatttaaattaaatgtttgttaacataatagtgatggcattttctcctccccctccttgtggttttgtccaactagatgttacagtggcagttgcactgactgttaagtgtttaaatgatgacaccattatgtgaagtgattttgaaatgagagattccagccaagaattacatctgctcccatctccttcaaatcatactctctggcagtacagattatgattgatttgtttgtgacagattgcaggaaacagtcattgatttttcaatattttaccttaaaattatttacagttgtaaccatggggaggtattttcatgggctgtcagcccctgaaagactaggataatattccctgctctctgacaagacaaattacctgtaatgagtgcagtagctgaagggtatacttttattttaaaatatgtcaataaccccagtgactaaacgaatattgatttagcataatgaagcctgagtaacgtgaaaatgagctttttcaaggggcatggtaaagtctttctttttagctggttgtaagaagcttttgattcttttcagccagctggtaggaatatagaattttataagcaaaccatcaggaatgatagtgttgtttctgataagcaacatccaaatattttgaccctgcttttagtggtttttttcaaatcttattttgagtcttacttttagtcatagaatagctactgatttgatgcggtctttaactgacttaatatttttacaatttcaatatattttgcattggaatctccagtaatgaatattaaaatatatgtacaatcatttgtagatgatatcaattatattaagacatttcagatgggctattgtagtatttaatgtgccgtattttatggtagaataattctcagtctctggacatcaagattgctttcagtgggaatgaagattaatttacttcagtcctgattttttaggcatcaatgcatgttttcatttttgtcagacttttaccctcttttaatgtaattctcaacttcttatggatttacttcccaatacataaaatccttcaaaacaagaatgataataatttttatactttttataaaaataaatttatttttagtccatcaaggtgtctgaagattttatgcctaggtatctccatatctaacttgataaggaaaataggataaacaatgctggtaatagcaggaaagtaagtatttgaataagatgtcaaactgatatttcatgtgaacctaactcattttatggtaactaataattatcttatttaaatcaataggtaaaacctgtttagaaattaaaaatgagttacgatttaaagaaaattcagatgactcattgtgagtgctagttctcttgtagatgccactggaaatgtgaaatgaaaaatgtaa

SEQ ID NO: 180691 - DNA, 978 bp, Homo Sapiens
  misc_feature (372)..(389): n is a, c, g, or t
  misc_feature (413)..(569): n is a, c, g, or t
  misc_feature (616)..(650): n is a, c, g, or t
ttcatgatgtaaataatcagcaaactaggattagaagagagcctctcacctgctaaagggcatctgtgaaaaatctaagcaaatgtatgtaatagtaaaagactgaatgctttccttctaagatcaggagcgagacaaggatgtctgcttttactccttcccttcaatattatactggagtaagagcaattgtacaaggaaatgaaataaaaattactcagattgggaagggagaagtcaaactatactgtctctatttgatcttgtatgtagctaaaaaagtaaaacaacactattaaagttcataaacaattgtagcaaggtttctggatacaagataaatacataaaaatataaaactcaattgtaaannnnnnnnnnnnnnnnnngagatggagtttcgctcttgtcannnnnnnnnnnnnnnnnnnnnnnnnnnnnnnnnnnnnnnnnnnnnnnnnnnnnnnnnnnnnnnnnnnnnnnnnnnnnnnnnnnnnnnnnnnnnnnnnnnnnnnnnnnnnnnnnnnnnnnnnnnnnnnnnnnnnnnnnnnnnnnnnnnnnnnnnnnnnaccacattggccaggctagtctcgaactcctgacctcaggtgatgcnnnnnnnnnnnnnnnnnnnnnnnnnnnnnnnnnnngtgtgagccactgtgcctgccactcgattgtatttctgtacttaacagcaaacaacctgaaaatgaaataaagcaattttattcatcatagtgtgaaaaagaacaacatacacaggaataaatgtgacaaaagagcaaaaaacatttacctccaaaactacaaaatattgtttaaataaattaaataaccgaataaattggaagacattctgtgttcatgggttggaagacttaacattgctaagacagcagtacctacaaattgatctacagattcagtgaaatccttatcagaatcccaggatcccatgacttctttgacaagttg

SEQ ID NO: 180692 - DNA, 1258 bp, Homo Sapiens
  misc_feature (714)..(724): n is a, c, g, or t
tgtacaaattacatgctggggatataattttgttaaattacatttatatttaattaaacatgaggtccatttagattttgggttgattcattcatctgtgattactgagcatttgccatgtgccagtcaatcagtattaggcaccagagttaccacagtgagcaagagagacatggaccccttctgcaagatgcctagacaattaaatggccaatgaaactaaagtgaggtaagggttctgatgtgaaaagctgagggtgtgatgaggacaagtggcagaaagttcacctggcttggtggaagggaaggtcagagaagacctcttagaggactcagtaatgtccattgaggattttaggttgaagggaatgtttgaagtttgagggcccttttgaggaccaccaagaacttcactgtgctgtaggatattgagcaggaggtgaagctagagagatgtgtaggccacattgcagagtttgaacttggggcaatgggaagccattgaagggttttaaacaacccaagtggtgcattcttctgtaaatgttagagagatcagtggctgccctgcacatcaaaggggagaacgattggagacaggcagattagatggaaggacggagttgtactccaagccaaagatgatggagagtgaattaagttagtgcaatgggaccaagtctagagctatttagaagtgagaagtgacacggnnnnnnnnnnngattgattggatgtagaacaagttggataagaatccaggacaaccccaggtgtcaggctggggcagctaggtaggtgctattgccatataaagtgttaaaaaagaatagagaaggggctagttgtcgggggaaggagttcagttttagacatgttgaactgcaaggagatttgatactataattaaggaatgtgttttaataaatttaataaacaatgaacacacattattcgcatttcccaaacaatttggatggtagatcaaaaagaatgagagtgaaaataaggggtctgtgaccactcaattaagattgagctaagagcaaggtcaagttcaaacccactataagcttcttgcatccatggtcactgactgttttcttactgttagctgtcctgttggacagtgtaacagtgagagagcatatacagattagcattgaaaaggataaagtgacatgtgtaagggttttgaaaaagtattatacaaatgcaaggcagatatattgaaataaatgcttattggcaaaatttc

SEQ ID NO: 180693 - DNA, 2079 bp, Homo Sapiens
  misc_feature (418)..(445): n is a, c, g, or t
  misc_feature (797)..(841): n is a, c, g, or t
ttggcaaaagcatgtgctggcaaacacgttactgtatgaaaacatacctgagtccatttgaataatgttttattagtactttcggaaatgtcttcagttctgtattgtgttcacatacacaaacaggctttacaagattgcttcggtactgtaaactctggcagagagtaattttgtaggcagtttggtggtgagtttgtgctgcaggctgcctgtgggatgtcagcgttctggtatctgcctgagaacctgggctctgagacgcacaaccagtgcacctccataggagaacagtgcagccacctaaaagaaaaacgaacgaaggaccagcctcagaggctagaagttaaaggaatacagaattagatgtttgctggttttctgtgcttttttggctcctaaaataccaatggtggannnnnnnnnnnnnnnnnnnnnnnnnnnnagaaataaaaagtcattcaagccctttgtgtgtaatagcccccaggggtggcagctgtgcagtcgcatctctttggcacacaggatctgttcacgtgtgaactgctgcgctacacatcagtgttaactccctacagattacactctaatcccgctgctcccgaggagcggctttgctaaatcgggtatatagtatatgcctttttcctcgtcaaactgcctaagtaggggttcgttctctccctgaagcacttgttcaactcctgttaaagccgcgtgcctcaaggggaggctggaccccaagtgtttacccacttaaatatgttctggggtttcaggtaaatgtttgtggnnnnnnnnnnnnnnnnnnnnnnnnnnnnnnnnnnnnnnnnnnnnnaattgaatgcaaaaaatttgtgttgtgatacaaattaagtttgtgacaagaaatgcccaaatccaaggacataaaaggtcaagctcagggaaggaacctccttttcactcaggcttggggcctccagcgaggtttccagagcattccatggtatgagagacagtgaggagggagggcacctggcgcgggcacttccagcgtcctggctcttggcattgtccgtcttaaccttatttacatggagttctttgtatttgtgaatctgtttaactggtttgagtttaccaaagagtgacttatccaaaattgtctttgacaaaaatatccattgctttgattgtacagttcaggttcaaacattgtaatgggactgttaaggggcagaaaattgattgagtttctctctaagaatcatgattccacattttgcaagttccacttgctcccattcgtgttgctaacactttaccctttccactgctcgcagtgttaagaatgaattctcaagccataacacagtactgtaaagttccgcagggcttcgagggaggcagcgcctaggccagcacggagctgtgtagcctctctgagcgttcgcactgtcatgcttcccaggggtgtgactggtgagagattaactccattcagatcgggcagcagcaattaattgtgccttgccgcatgaggatgtgtcaggaggattaacatgaccacagaaccgaaacattctctccctgaagttcacttcacgtctccgcagacgaagtacgctgtgtaactccttagagcaactctttttggaaagcaaagtccctatttctgtacagttttaggttaggtgtttcatttataacagatgcagaaatcaattaagataaagtgatatgtgaagaaatcttttacagtaaaatatatcctgaattcatataggcttgttcataattgagtctcttcttgagctaccttttcaatattagacaatgtgaagacagtgacagcgtccttttctagagatatttagcctgttattacaaactgtgaagacaaagaattttatacttttactaatgtttgtggttttaaacagttattttcattctaatcagttctctaccctctaatttctactaaagctgtaaatacatttagaaattatatttgtaaatacagtatatggagacaagttaattttttggtcagtggaaaaagcctcccaaccaattggctctgccttggca

SEQ ID NO: 180694 - DNA, 915 bp, Homo Sapiens
ttgggttgtgcattttattcagcagcttttgtcagatgatgtttaaggattcattgtatctttgcagccgattagggacagttatctcatgtttaggttgaagacagcttggggatggggtgctgttttttctagattcacatgtttttaaaaagaatgtttactgtcaacatgggcatgtatatttgacctgcattcaaacagctgaacgttattttaatagagaataatcaggccactcctcactatgggagaataattgggaagtatgcatacagctagcattgttaagtactaatggcaatcttgcttcggtttacttctattgttgtttttaatgcttttgtcaatcctttttattcctgctgtatattgaggctgttttgcatctttggcttaactacctataatgccgttttattaaaataaaatgtattatttcctggacatatgtaagacaggcagggaatacattacagacaagttaatgtgtcttcaaccctgtctttgcgaagtggaattgtgttttcctagcatgtagaatacgaaggggttgagttctctgaagtagcaaaactacaaaagattgccggcttctgagtaaaatggcatcttacctgtcccattttagtaattcttgcactatggcatatatagtcctttaaaacatataagacaccccacattcaaatactaattgtgatatttattaagttgaaccttgtaaaattgccatttcagtaagttagaaatgttgaatatcagcagtttcatatggctcactacagtgctgcccagtggaaatagaatcaaagccacatgtaatttaaaatgtttttgcccaaagtcttggaatccaatgtgtattttacacttagaacatgccggtcagacgagttaaattttgggtgcttg

SEQ ID NO: 180695 - DNA, 1133 bp, Homo Sapiens
  misc_feature (202)..(241): n is a, c, g, or t
tccctgggtgtttctaaagcttctcatactgcaggcagctgaattttacaaaatttacagttcactttttaaaaatggcaataacagccaagtgtggtggtgcacacctgtagtcacagctacttaggagggctgagatgacagcattgcttgaacccaggagagtgaggccagtctaggcaacatagcgagacaccgtctnnnnnnnnnnnnnnnnnnnnnnnnnnnnnnnnnnnnnnnntggcaataaccccatgtaaaaatatggctctggtactcatggcaaatttttgggaaaggaatgaaaatctgcaatttgtgagaagatgaaaatattacctgactgctgaaaactttttggctttggctttgtctagaaacttctgatatttggcaatcttctcatccagtgctttaataacggctttggtgtcgtttcccacattttcctcctcaggctccgaggaagactcttccgcatcatctctttgttgctcctgttcctcctcctcttcatcagaaaagctctcaagctcttcctcaagatctgacacctccacaggaaccaggtcatccccagaaaactgaggcaccacgttgattttaccaaagttctgccgaactcgtgtgagaatctgctgcatctctgtgttagcatcacagtgactgttctcttctgtttcttccttaatgatggattctgacccttcacctgcagtttctgtgacttcctcccctggattgttctgggctgcttctgggacaacttccaaagatgaggagggtagaagctattaaggggtggaaatgggggaaataaatagaatcagaaaatgaaaaatggaatttctgaactcatatcttgctcttaaacagtcctcttctcaggactaagggaaggtattgaaaacacccaaatttgagtcatttcattaatgtatttttaaaccaatgtacattaagcccagagatcagtactaggatcaaaggaatacatgtgtagttccacaggatgaaccaactaagactatttaaaccattaaaaccaaccaatgatttatcatagaaaagcaaggctccctagaccttccctagggggctgctgatataagcacatgcaaaatcagcaccaa

SEQ ID NO: 180696 - DNA, 1256 bp, Homo Sapiens
  misc_feature (1028)..(1050): n is a, c, g, or t
  misc_feature (1173)..(1183): n is a, c, g, or t
gttagaaaatgctatagaaacagtttagacagaagaaatctctggctttttaaaatacagagtaacagctggtaaacaccacatggtgaaaagctatagcgtattatacagacaatctgccttggagtttggggcattttaacaacagcttcagcatcaaacaaacaacaaaatggcctctgcaaattaagggtgtagcctgcagaaataacaaaagactgcagatacaagagttcagctgaaatacaacaatacttttaaagaaacttgtagtacacgttataaaagtagagcttgtactttgtattaaaactgtaaagtgtgaagcaattagaaatactgtaatgagaagctagggagaaaataccttatttttttcatgttcattttttagaaacatttcagaaatacttaacgacattcactctccaatatgagattaggttttatcgacacagatttcttgatctgaataataattctgacaatgagacccaaacaaataaaaggtgatttttttcctctctctctcttttaaaaagatcttttggtttgcatctataaatttgtaaattaattttaaattatttataaaatcattggcaatgtagcatctctcttaaaaatatatatttaaatatattacagaaggttttaaccctgtccttctaagacatcaatcttttaatatctcctaatagctaattttctttttaacacgatggaaaagattttttaaaaaagcaaaggactgatcgaaagaattcacagtagctgaaattaaacatttcatatggagtaacttaaatttatctaaaacacttaaatatatctttatacacaaattttgtagtaaaatatagctataagtgacttaaagactctagtcttctttgaagacatctttaaacttttttatacatagaatatgctgaaacaataccattccaccgaaggttaggcaaagcgcaatattttcaaacacaggtagcgtaatctaggtcctccactctgatacccttctgttnnnnnnnnnnnnnnnnnnnnnnnttctctaaactcatgtcttcttcgtttgtatatggaaatctagaaatttttcagtagatcaatgtagatagcctggaaatctcagccctaaagtaatgttttagttaaaatgttccttattgnnnnnnnnnnntgttccttattgaatgtgtatatctatcaggtaagtcatattattactcaacgatttggtaaaaatgatccaa

SEQ ID NO: 180697 - DNA, 956 bp, Homo Sapiens
ttggcggaggcaggttggagccgctgccgtcgccatgacccgcggtaaccagcgtgagctcgcccgccagaagaatatgaaaaagcagagcgactcggttaagggaaagcgccgagatgacgggctttctgctgccgcccgcaagcagaggtagccccagggaggggagggaaagggacggtggagacctgggttagaccaagggttatagaaggaaagagagctacctcagggcttgaatgtggactagtcgtgaggagcagagtgcattgcttcctctagggttttatttcctccccaccctccaaattgttagctcacagccttacaggaaaggacgggggcgggcgcctgccctcagtctgatttctgagcgtccctgggtctgaccttaagggcaagggcagggagcttcacatttcaaatacagttgtggttacggcagcccagtacttttggccctccttgctgttcggttctcctcccttctcccaacctcctcactggtgttgctgggtgtggtcctcaatacagaatagagacccttgggcctgtgtcaccagacttctgaccccttgggcaacagccagatggagactggtcgccttttgagcctcagctctcttcctcttgttctcctagggtgggagtacagcagccaaacgctgaacttagtcccatccacttccatcttatcctttgtgcccttcatccccctgcatcttgtcctttttgccctctggtacctcccagtgccccatcatctctacccccagggactcggagatcatgcagcagaagcaaaaaaggcaaacgagaagaaggaggaacccaagtagctttgtggcttcgtgtccaaccctcttgcccttcgcctgtgtgcctggagccagtcccaccacgctcgcgtttcctcctgtagtgctcacaggtcccagcaccgatggcattccctt

SEQ ID NO: 180698 - DNA, 2257 bp, Homo Sapiens
  misc_feature (1055)..(1066): n is a, c, g, or t
ttggctttttaaaagaagaaggggccaacagggccttaatcatgagctctttaggaaaaggcaggatttcatgtcatgatacaggacttgcttattaataaggcattcaggttgctaaaatatgacgagacatggttccaaagaaaagtagtgtttttccgctacttaaaacttcccatcagtttttaagggtttatttgacttagcagttcaccaggggcttaaaaactactctaggctgacaaaattaaagaagagtaagagaagacagaacatcctagttggctatagacctggttgtaagaaacccaaaacagaagttttcattgcctttcaaaagaatggttacagaaactaagtgaaatcatggggaaaatgcttatgctaaaatattcatgaacaaaacaggatataaagtacagtatggttacaactaagcatactgcatagttgcctgagaattttttaaatctacatggaaaaagagaagtacattgaaacattaatggttaaaaaaaagattaatagtggttgtatttagggtgtgggactatggtgactgaaacttgaaaaagattcagtgctttttcaaattccaagggatgccagaggccaaaaggtgcatttaacttagagtaaatgaatattaaccagattttacaaatttgaagtaaggtggtttggcttactgttagctaaaaaactaaaaaactaccgttagctgtttttgtcagtatgtaatatttaagatgatgtatgaaagaactgttagaccttttatttttattctgttttatatctgcttctaaggaaaaaatatacagaggagaagctgttcgtaaaggaactccagaatgtagtcagccctggaagatttactctagaaaaaccacaacgcagagtctaagaggtggcctcccaaagccaaataaagcagttccaagtaagaaccacagaattgtactttatggaaaactggcaacctttgaaagcatgtgcaacattccaaggacacagcactgaaagctaacatccaccagttagccgaagaaagnnnnnnnnnnnncccaatcactgccatgtggctggttttccgtagagggctaaaactcttcaataaggaagtacttcagggaggcctatatattggcacccaaggaatgccaggactgccacctgctgctccagcgttagcctcactcgtgtgcttactcactttgactgcctttttgtctatttctgggaggttggtagaatgaaagggatgctccaaggcaagcagatggcctgtccacctcctatatattgacagtgccaatgagtgtagagtcttgttacaagaaacaaagtcatgagaaatgccaggcttcctgttacacccaaagactgctggccctcctactctatcctttagaccagaaactttttcttctaagcacttgcctaccgggaaaggttgaggagtcttgttttaccgtacgtagagaatctacccacaggcactgaagcggctgagcaattaggatggacttcccaggaccagcatggcatcaatccagaactattgagcttatttttatccttaccagtagttggcttactccaatcagaggagtaatgcaaattattataagtacatttagaattgttcttttcaggatcaaaaccacatcacttacataagctttgatctaccagggatgttggatgacagttcttgtccacgtctcagattaagaacatcttattttaccttgcagtgaaagtaagtgaacacagtctcctgccccttatgctggagcagtttccgtttctttatgtttctggcccaacactaagcaaaatgtggaaacagcaaattgcacaggttgaacagcttaagaaagaagcatgtagagaaaatcgatcaaagaagaaactccaagatgaagtaagttactgtcagtcttaagcataggaatttaaatgagaagagcttatccttaagaatttagtgaacagcattattaacctacttaacttcatgtcccccttcaagatagaagaagccctaagaaggcatgacctccttactacccttgtcaagaaagaatatgaacataacaagagactggtatgtcaagagcaagttgggtattataattctgaatttgttatattcattccctttatctgtgctagctgggcaacagttgcacagacccttaacctcttaacacctgcatgtggaagtgttgcctaggtctttaaccaaaat

SEQ ID NO: 180699 - DNA, 1082 bp, Homo Sapiens
ttggcttaatcttggtgttttctattataagaagaagattctgggactatggccgcattgccctggtgtcagaagcagacagcgagtccagatttcagagattgtcatcgacttcctcctcaggtcaacaagactttgaaaatgagctgggatgctgtccctggctgactgccatcttccgtctgcatgatgaccagatcctggaatggtgtggggaggacgccatccactacctgtccttccagaggcacatcatcttcctgttggtggtggtcagctttttgtccctgtgtgtcatcctgcctgtcaacctctcaggggacttgctggacaaagacccgtatagttttgggaggacaacaatagcaaacctacagactgagtgagtatggagcccgtggggataggtgctgatgggtgagatcaaggagaaggcaggtcaggagcccggggcaggccagaggtactccaaagggggccggctggtatctgaaggccccttgcagctagtgtgttgttgagctgtgggcatgaacatgccacaggcagacactgttttgccagggttttaagaaacacggagggtcctgtggatctggagttcatttgtcaggacagggatggggacccctctgaagtattcactgtgggctgaggggtgctggccacacaacctctgtgggaggcatctcttgcagtgaagctgttggtcctcagttcagtgcccactgagggtaaccaggccccagctctgcacccccagctccctgcctgggatcccagccctgatggcaggtggtttccctctcagcaatgacctcctttggctgcacaccatctttgctgtcatttacctcttcctcactgtgggtttcatgcggcaccacactcagtccattaagtacaaagaggagaacctggtgagtgaggcgggacttagggacatgtgctgggagggactcaggtgggagtcggagtggaagggcctcccaggctctgccacaggccctgactgcaatgagctctgggagggcctcaagagccccgcttgcttattcttgctcacacttggcaccatcttt

SEQ ID NO: 180700 - DNA, 2970 bp, Homo Sapiens
  misc_feature (119)..(130): n is a, c, g, or t
  misc_feature (1566)..(1574): n is a, c, g, or t
ttggcttatgaatgcgttcagtgtgggaaatcgtatagtcaaagctcaaatctttttagacatcagagaagacacaatgcagaaaaacttctgaatgttgtgaaagtttaagaaattgnnnnnnnnnnnngaatcagcactcaggtctttttcttcagaaatgaagacaaaatttaaaatatgaaatgatgcagaatagttttttccctattgactgtcagaaaatccactgggaaatgtaaaaatcttcactcaccattatgatatttatcttgaaagaaatggtgtcatacctgcctagaaactgaaattttaaacttaattcaggtcttaatgcctaaattttccatgtgatgtttatagtctgtattacttctccaaataatgaactacctgattcattgtccctttcttgaaagtttcttttttaagacaaatacattatttctgcattgatcattgaaatgttctttatatggatacattcccttatatattaaaaggcaacaggaattacaaagtctgaaaaccattttaaaccatcttttaaaaatttacccttatttccttttacctaatttgaatatgcatttgagaaaataagaggataaaggatggctaagagcctcaaaatgaaccataagatctcagataagaagtgatggtgataaaacatcaaaaagtgaatggaacaccttgattggggaagatatgcaaatactttgatctaagaattgaaatgtatcaagaatttatattttgcctgcaggaaaattcaaaagctactcatcctctctataatttggagtcatcttactaatgaaaataatgttttcccatatattattaaaaagcatacagtctaaataataaacagttgtaaaataatgaaggtagaaattataacactagggaaaaatttgtagcggatggcagtgttgaaggcaaatgtaaacataagggtaatggtctgtcatggcttttagaaaaagatgatagagttcatcattattttgccttcatctttgttaaggacagaaaattccctgacaggtgggcaagtatcaggttacctattttttattcctttggtacaaaagggttgaacgtcaggctaaaaaagcagccatgcatttattattaaacattttctaccgacaaggcactgtgctaggtactgtaatcctaccataagtaggtaggtatttcttccactgtaaatcataggggtttgctgttttatgtgagttagcctcttccccttgtctgagcattcctcaggggaggtcacctgtgaggttcccagaactgtagttttttttaccagggtgttgtatttggagggggaggaggactcggctcaaaagagctagctggctctccggtgttcagaggtgagtccacgatactcttaccacaatttggaagtttgtgaatctttttaaagaactaatcaatctctaatagcattgaggttgtacctacatattaagttgaatggactgttctatttaaaaaataaacaactagacaattaactagtttattaacctatcacaattgaannnnnnnnnaattttcagtcttaacacattttttaaaatgtattaaagtaatacattgtagtagtaggattatatactccttggctgagaattccaagtactgtggttctactgtttagtggaaaactctggaagttaaaatatagaatatgagaggaggcttttttataatgggcatcattgtgtggaaaatgacccatgtgaatacaaatatttcctagttcagagattttggttatatctggtgcttggatcaagtttaaaaatggaaggtgagattttgcatgagcctattaaaaagcatagtaataaatgcaaggccagctggtggaaaagtgaggcagaatggagcttgtttataggttttctgataacaattataaaaaatgtgctttatagattaagatttattgaagtataaatatgtagtaatgatataatgtattttaagttatacaagaaaatgtagggacttttgtttgggtctttttctctttgtggctgaggggaaacaagtcagtgtccaataaagctgtaaactcctctgctctaagataaatgatgtgatttatttatttataactggcttctttccaagtaggttttcaggtggcatatttggaagacggctggaatgacagaattcttgtatcagagtaggtaagaagggagcaacctctcaatggctattatgtcatgctttttaagatcgtatgcggttcctatatacaaggaagcttccctgtggtagatttgtcataaatgccaaagatatttggtaatgtgagtgtagaaaaagtagtatgagggttggcaaatactgtttttgtcttggcagctctaatatctgcattgttcagaaaggattctgaggctaaggcaaagctctgtgggaaaaagggactggaccaaaaaaaactggatggtggcacacaagaagaggaaatgatgagatgtgtactttctatctctggttaggcttagtccccactagacaaattgattttaaatactatgtagtgatttttaaattccatccacacattcattacccacacagataatcatagaaatttgggggagtgcctagcttctgatgaagtggtgatatggcagttgccaagcagtggcatcgccagagtatctgtttggttagcaaatgagcagtcattttaggtcatgcagattgctgatatctgcccagtagccactgagcatttgctggttttttcttctggctttcttggaggttaagctctctgtagtcatacccagttggtacttgatctttagcaatatgtctcatattcatgtaaattgaagggagggttacatgtactgaaataatctgcatgctagcattggcttagacaccgtacctatctcacttagatttgtggactag

SEQ ID NO: 180701 - DNA, 1822 bp, Homo Sapiens
  misc_feature (1612)..(1667): n is a, c, g, or t
ttggaaaagaataagaaattcattgtttggcccatcctgaaaggtgaggtggcgagacagtggggtgcctccgtgccgcttcgtgcagcagcaagttcagcctgagatgctggctgtactcagcctttgcaatttttgtagatgtagcttaggacgtgagttatttttccgcagactggccaagagccaggttctaagcttggacctaaggtagaaagctgcccatcgggggccctagctcagccccaccaggccctctgttgggcctgcacacagctctgtggctagaacactccaaggcccttcggtacccatcagagtgggccccttgccaggtggcttttcagttacagagtccagtggaccattttgtagaaccatgcagctccctgcggaaggtggggtagggtgggaaagaggagcaggtctggaggtttgtggaacccagtcccctgcagaatctgtaaaacctaataaatcatggttgtggccattctcacggtggtgattgtgattagacgacccccgggaagcccagacactcggggcctggagttcctccccctgcctgacctagaagcagaaccgttttcagcgctctgccctgttggctttaaggctttgtcttaatttaaggaaaaagatcctcccgggttttatttctctctttcttgagtggactgtttccctataattaaaagaggtggtgagtcctggggcagcttccgcgcctccctgtccacgtgctaacagatcaggacgcccccagcacccctgcctgcttttgctggtggcagtgacgggaccccgactcctcactctcgggccgcagacaatgctgtgagcaagtgtggccatgggcacagaatgtccctttggacgccgctgctgggggctgccaggggccctctggggtcgtgctttgaggcccgtccggttcacgagggggtccgggcagcactgactgcttccgacctgcaggaggcgtaggagcggccctgcgggccctttcacggcagctgctgctgtatagatttgtctccactcagtgacgtgggatttttttgtcttccttttggctttatttttaaactgctttagatattactgctcagtgtttgtgaactttcctagttctctatgttgttagtgcagccagcacccagtggggacctactagaaaaaggaactggcatgcacacgtgcccagcaggaaaagcttcgtcttcacgtcggctgctgccatccagaagaggccctggagcctcacgccgtcgaggctgctctcaggcgttctgttccgggcgaggcttgtgctgcaaggaagggcaccagcatgcaggctgccactggagggtccgggtgctgcgggcagagttcagcgcttgtccaccctcccttagctctgactcagtgcatcctactgtggggacatctcgtgaggggacacgaaatgactgatctcaccctttcccagtattcagagctgtgaacccctgtggcgcaggactggcctgtgtctgttattttggttgtaaatcattctcctgtggaattggcaaaagctacatttttactgtccttaccagcaacagtttgcgtcgtcacatgnnnnnnnnnnnnnnnnnnnnnnnnnnnnnnnnnnnnnnnnnnnnnnnnnnnnnnnncacgcagcacgagtgtcattcatgctgctgtcccctggtgaagtgacaagtacaattaaaggtggctctgaaatggcctctggtttcttgggagtcgggcaaggaacctgcaggaggctttcccagcaggtgcacataaatgaagcgctgaaccc

SEQ ID NO: 180702 - DNA, 907 bp, Homo Sapiens
ttggctctttcattttcaaagggttcccagtttgtagagtaaattatatgaccgtccttgttctaaacctttcgtatacattaattcgtttaatcttcacagtaaccctatgaggtatatgagattattaacatcattatacagatgtagaaagtgaagcatagagaagttaaattaacctgcctttgatcatactaggagtaacttgcagaaccagaattcaaatccaaacaacagcttggttcctagtcaccgtactagactgcctccatactactgttctaaatctttaatattttactctgcctgtcgtctttcctctccccagcaaagtaaagcaggtaaattaaaaccataaattcacagatgaatttatggttctccagagtgaatttcctccacttgctactccctcctttacaaatctgtcttcatctctactcggcctcactttatccctccatttcataggaatggacatctctcctcctgtctaaaacttgtattctagccccatctcaccctgcattttgttggactttgttctctaaattactcttctctttttcttgggccttccgtttccattgttccactggcttttcccattcagcacgtgaagaggatgtcattgttgaaaatgtatatcactcttttaagaattctgctttactattgggagaggtttttaaaagtttattaataatataatgatgataatggctactaattgttaccctatttaaattccaggtactgtatataatatctaatccttttaacaaactacaaatattttacggatgaagagatggaagctcagtgggctacataactttcttagcttatgaatagtagcgctgaattcagtctcatatttgtcttaatccaaagcccattctatttc

SEQ ID NO: 180703 - DNA, 1782 bp, Homo Sapiens
gccctcggtctttaaaaagaaatcgcgtgtcacggtcacctgcaaagtggagcatgagagcttcgaggaaccagccctgatacctgtgaccctctctgtacgctaccctcctgaagtgtccatctccggctatgatgacaactggtacctcggccgtactgatgccaccctgagctgtgacgtccgcagcaacccagagcccacgggctatgactggagcacgacctcaggcaccttcccgacctccgcagtggcccagggctcccagctggtcatccacgcagtggacagtctgttcaataccaccttcgtctgcacagtcaccaatgccgtgggcatgggccgcgctgagcaggtcatctttgtccgagagacccccaacacagcaggcgcaggggccacaggcggcatcatcgggggcatcatcgccgccatcattgctactgctgtggctgccacgggcatccttatctgccggcagcagcggaaggagcagacgctgcagggggcagaggaggacgaagacctggagggacctccctcctacaagccaccgaccccaaaagcgaagctggaggcacaggagatgccctcccagctcttcactctgggggcctcggagcacagcccactcaagaccccctactttgatgctggcgcctcatgcactgagcaggaaatgcctcgataccatgagctgcccaccttggaagaacggtcaggacccttgcaccctggagccacaagcctggggtcccccatcccggtgcctccagggccacctgctgtggaagacgtttccctggatctagaggatgaggagggggaggaggaggaagagtatctggacaagatcaaccccatctatgatgctctgtcctatagcagcccctctgattcctaccagggcaaaggctttgtcatgtcccgggccatgtatgtgtgagctgccatgcgcctggcgtctcacatctcacctgttgatcccttagctttcttgccaaggatctagtgccccctgacctctggccaggccactgtcagttaacacatatgcattccatttgtgatgtctaccttggtggctccactatgacccctaacccatgagcccagagaaattcaccgtgataatggaatcctggcaaccttatctcatgaggcaggaggtggggaaggtgcttctgcacaacctctgatcccaaggactcctctcccagactgtgaccttagaccatacctctcaccccccaatgcctcgactcccccaaaatcacaaagaagaccctagacctataatttgtcttcaggtagtaaattcccaataggtctgctggagtgggcgctgagggctccctgctgctcagacctgagccctccaggcagcagggtcccacttaccccctccccaccctgttccccaaaggtgggaaagaggggattccccagcccaaggcagggttttcccagcaccctcctgtaagcagaagtctcagggtccagacccttccctgagcccccacccccaccccaattcctgcctaccaagcaagcagccccagcctagggtcagacagggtgagcctcatacagactgtgccttgatggcccgagccttgggagaagaatttactgttaacctggaagactactgaatcattttacccttgcccagtggaataggacctaaacatcccccttccggggaagtgggtcatctgaattgggggttacaattgatactgtttttgaaactacatttcctacaaaatatgaatttat

SEQ ID NO: 180704 - DNA, 465 bp, Homo Sapiens
ccttaaaaagccaactttgtacaaaaaagttggcataacttgaataaaaatatagaaggcaaagaagagtgctgggcaagatgtgttgggtgttagatctgcaatactcttcatagtgtaatggctaaatgtaaagtcttacgtctcggttcaagaaagcacgttgctatatgaaatttcagaaaaaagttttgttgcggggggtgggatattgatcatttgaacatatgccagttgtttctcctgccctaggggaggttggcacggcaaccttcccactccgtaggtgggtagccttgctgatggggcacgtcgtcaccaagggacctgattgttgtcatggttttgtcttgtcctcctccctggtgaaagtctactgcagttttattctcagctctggaaggagagggaacgagcctctgcctgtgtgtcctgacccctcttgccttgtttttgatctgctca

SEQ ID NO: 180705 - DNA, 476 bp, Homo Sapiens
ttggaatccatataacgagatgaagagcaccagtaaagataacataagtaaatataaaagtacaaattatttttgtttgtaactctttttacctgctatctgattttgaaagatgactgcatgaagagataattagaagactgtgtcaatgggcttatgacatgtagatatgtaatttgtatgacaatagttatacatatgagggaggagggaagagacatattagagcaaagtttttatgtattactgaaattaagttggtattaatttgattattttaaggtgttcattgtattctcagagcaatcacaacttataaatgtaatcacaaggcagagttggtagaaggggtgaaaaaacatgatccaactgtatgctatgtatgatagacacactttagatttaaagacataaatagactgaaagtaaaagaattgaaaagataaaccatgcaaatagtacctaagaaagagcta

SEQ ID NO: 180706 - DNA, 731 bp, Homo Sapiens
  misc_feature (49)..(79): n is a, c, g, or t
gcatgccattgcattccggcctgggtagtaagagcgaaactccttctcnnnnnnnnnnnnnnnnnnnnnnnnnnnnnnngacaggagggtcataaggggagggttgactgtgtgtccctccaggttgtgcagaggggattagaagtaagtaggttagaggggaggtggagggagtgtgctggggtgtgagcttttatgatgctgaaaggatcatgatatgctaaggacaggatagtgttgggttgtacacacaggtgtaggcaatcctggtggctagtatgtaaaagtgaatgtcctgactcccttagagggtacctgcagagtgcccttggagggactagtgctggagaaattaataggagaggggacgggcatccattaaccttttcttgcctgcagcctgtagggtccagcgtcaaagcgaatcatggggtccagggctgagctgtgcactctcttaggcggattctccttcctcctgctactgataccaggcgagggggccaagggtggatccctcagagagaggtgacaacagagggggtagggcccggggtgagctcttctcacgagccttctgctgggggtggggcttcacaggaggcaaaacataactgtaagtttagaatgggggtgagaggctgtcatctggagggagagcggggggcctcagtagcctcttgagggaagtgggactcctggctccccaggcctggcctactcaatctctc

SEQ ID NO: 180707 - DNA, 1014 bp, Homo Sapiens
  misc_feature (132)..(153): n is a, c, g, or t
ttggctttgcttccctaagtttctcttgccattatctcattaattcagatctgtacctcattgctgctcacacatatatgtttcttaccttagcctgaaccttctcaggccttgaagtcattattctactcnnnnnnnnnnnnnnnnnnnnnnatggcactagagaatgaaaacctaaggtcttagaaaatcttaacttgaaaaagtctctaactggcatgatttgattacttttttcccctgtggacaaataattttctttcctatataatagatttttagtaagtgaaacctttgctgctgctttcctgggtttacattagttttttcctgcccttaagaataatttatctgtgcttctctgatgactgttaatttctaatagtgcaggaagggatgagcttttgatttcttctcactcccctcctcaccctacttccaaattacacactaacttctaactcttacagcctgttggcacatacacaagatccacgagaccatgctcctcagaagctacccatgtcctttctcaccatggtgtggctcttggagccctgagtatctgtgactacccactccaaaggttgactgtaagaggagagcggccttcttaattttgcatttcttaattttgtttttctccattcctgttttatgacttggccttcagatgcttcctactctggcctcctccttttttctcctaggaattgtttccaggtaacctaccatgtgcacttctcagctgctctgctcacctttgcccaccttcccgtgaccctgagagtacagatccgaataatgtggccctgtgcagagctcagagaactgtgaggactacccatgcctgtcagactctgctcacggacagagatggatgggtaaatggtgctgttggagacatttttatcttcataccaggctctgtttcatccctgcaccccgcacccccactcactcccctgagggggtaaaatgactatgtggttgacctgaagggtctgattccct

SEQ ID NO: 180708 - DNA, 846 bp, Homo Sapiens
tcacacatgaaaagatggttttcttttctctcctgcctctgcaggcaacatttcatacaccatttagtcacctaggccaaagtccggaaggatgctcctcttacacttttccgaagataatgagcccagccaaggtaacttttggaatgtttaaatataaaattttatgagtcatctcaagaaagaaggaatagtaatctcatatactctcccttctttcccttggtaatatggacaaaagagaagctaatgatttgcttttcaactctttaagagttttaccaatggaggaatcaggctatgggaagtatctgctatgcaggaaaattagaaattctctctgcagttcccagaactgggatcctcctcttcagctggctgcttagtgctagctgcactgcaagcagcacagcacctcagccttgcagctgtgtggcattagtcacttgaaggaccagggctgtgccagcctcccttggtcccctgagtttggaggccactcggttcctttatggatgaccagtatctcctaaggagagacatgatgacgtcttcactttcagagttacagtaagtaccaacagatgggaggttttgtgggggctcacggctgccagagccacccccaatcacagcagcccttccatcagcctgctcacgggtgtattctctcccaggctggttaagtggctgctcacgtctttcactgtgtttcctagttgcccacgccctgtggcatgactcgaaggggattgtgacaagaccagaagctgagctataggaaaaggcttagcaaatattgctgcaagatctcaaagtggggcagtgggaattgagcttgttttc

SEQ ID NO: 180709 - DNA, 1050 bp, Homo Sapiens
  misc_feature (960)..(993): n is a, c, g, or t
tccagcaggacatagtggacctcacgatagcgcggatctaagggggagaccgccaggaagtcctcctcagccagctcacagcaggagacgccagcccaggccagcagcgtggccatggatgccagccgcctggcatccaggtcaaaggcaaagatctttggttcttcagaagagcagccaagtgactggtctttattgcctggggtggcacaggcatccatgacatgggagcctggcgggggtccagcagcatggctgggagacagctggccctgtcctgcagaatgaggtgtccggcccggtacagtgggtgttcatgcagatctgtctgggcgggaaacaccagcagctccggcatcaaggggtccaggagaaaatgcttccccttgagggctcgtaagtcatcgaggctgccagggaagaaccattcattcatcatttcctgaatttctccctgccaggccctatttcaacggtccattcatgcaacaaatgttaccacagctatggagaaatcaacagggtgataagggaatccgggatccgcagttgagggaatgggttgtcaagccagacttatgggtcaggagccccctctactgtttaccagcagtgggagcctgggcaagtgattcaatctcaagccccactggcatctctgtaaaatagtaggtgtgaggattcaatgagccaatatatccaagatacttacgtgccacaatttaataaatgttagctattcctgttgaagcataaccttggagaaaggttactttacaggggggtgaggagtggggaagtgagagctgagctcattcttgatggatgaggagttagtcatgtgaggcgcttaggttaaaactacattcactataactcagtaaagcagtcccgcccactctccgacccatgcagaaataggcctagggagtcacatgtctcagttcagaaatctatcgnnnnnnnnnnnnnnnnnnnnnnnnnnnnnnnnnngttctctgctattccaccctggtgtccaagcaacatggtagggcagaaggaagccaa

SEQ ID NO: 180710 - DNA, 619 bp, Homo Sapiens
ttggcctacctagcctcccagctgcctcgatttgtgcgtgtgaacactctcaagacctgctccgtttatgtagttatttcaagagacaaggtttctcctatcagggtcgggcttccaggtgagagcttagagccctggctgtcctcatctagggaggtgtctggggtactgggaagagaagtggttggatagttgtgactttgctctctgggctttgttcctacctttccagcagtttctccatctccaaggtttgttttcctcgcatcccttaaacatcgaactcctaggagccccatcctacattcttccggagctctccgttttttctctaactttagctcctgcctcccacctggtgattctcaccgcccagtgtagacttcccttttgcattcttccctccttaggttcacatgaatgcaccacagatgccacagtcgctgcattcatctttcctctcagactttacacttagtacatccccagtttaatctaacagatgtcaccgttttccacccatttggtcaagccagaaaccgagtcatcctaggtgcttccttcccctccctccaatcatttactcctccaccttgagcatctttctcagctccactcc

SEQ ID NO: 180711 - DNA, 1472 bp, Homo Sapiens
ttggccagatctggagtgcgagcagatccgtctgaagtgtattcgtaaggagggcttcttcacggtgcctccggaacacaggctgggacgatgccggagtgtgaaggagtttgagaagctgaaccgcattggagagggtacctacggcattgtgtatcgggcccgggacacccagacagatgagattgtcgcactgaagaaggtgcggatggacaaggagaaggatggcatccccatcagcagcttgcgggagatcacgctgctgctccgcctgcgtcatccgaacatcgtggagctgaaggaggtggttgtggggaaccacctggagagcatcttcctggtgatgggttactgtgagcaggacctggccagcctcctggagaatatgccaacacccttctcggaggctcaggtcaagtgcatcgtgctgcaggtgctccggggcctccagtatctgcacaggaacttcattatccacagggacctgaaggtttccaacttgctcatgaccgacaagggttgtgtgaagacaggtgggtgcaacttgggccaggccctgtccctagatggcacttggtgacacacactcccctctctgctgcagcggatttcggcctggcccgggcctatggtgtcccagtaaagccaatgacccccaaggtggtcactctctggtaagtccttctgaagcatggtggcccctggggaccaggcctgtctggtggaggtctccttggggatgtcaggccgaagctgcaactggccttgggaatgttaagctacagggtctgtgcacactcagaaacgttgggtctaggacagcctccaggacacagcagggctgtgccacaaaatggtgagagacgggctcagtggcgtcaagggcctgcctagatcagacacacctcgccttgagagctggaaacaccgtggccgtgaaaccatctctggagggaaggctgcttcacggactgaaggacaggcagcttgcatgctttccctggttcttcctcctggatacttttaaccaaacagggtcatgcttagccagggctgaatatcagagttggtcagaatcaggtcaggaccccagtgtcgtgtactccccatctgagaacgggttggtagtggctggtgtggctgtgtgccgagggtccgtggtccctgcgactctcaggacaccgctgcacgtgacagctctcgcccccggcaaccattgctgtgtgtgccacctggatctgcagggcctggggcagagggtggtccgagttgggacaggtttccaggccagcacaggctctcggggaggctgtgtcctgtggaggcctgggctgggggagaggagccggccgtattgaggtgggtgcttctgtgtgtaggtaccgagcccctgaactgctgttgggaaccaccacgcagaccaccagcatcgacatgtgagctgtgggctgcatactgaccgagctgctggc

SEQ ID NO: 180712 - DNA, 1320 bp, Homo Sapiens
ttggctataatatttagaacttctatgctaatagatgacatttttaacattgtggcttgattattttaagttttgctttaaaagatgtttgtttttatttgaataaaatacttaaaagtttttgttttaggttgcatttacaacaagaatttatcatccaaatattaacagtaatggcagcatttgtctcgatattctaagatcacagtggtcgcctgctttaacaatttctaaaggtaaatatttctagtgaaataagctgttctcattgtctaataaagcttcattcttagatctacttatctgagtatttttattatggcagctttttggtaagagatggggaagcaataaagttacttttataatttttgttcttttagtggtgttgattaaagatactttgtgagaagttgttaaaattcaaattgtggtgagtaggcattatttgcctaatgagttaccttcatctcatcttataatagcaaaatttattttaatagacttctgtatttttcaatcccaaaccacttggacatctcacactaacttgcggcctttttaccaagaatggtatgatatacctaaacttaatagagcttttgaatcctgaggtttccactctaggaaaattctgactttgctttcctgggttaatttttagacaaatcttcagtcatgttttatgtaaccatgataggttgtttctacctaatgacagtctaaaattatataatcttcgaaagatctgtagatcaattctggtctcttaataggcatctgttacgttatatgtaacaagttttccggtctccgcatgaatatcccaggtgaagttgtaataattaacactatttcaccattaattgttttttgattttatgagttcagtaagtacaaaaaagctttttcaaaaggcaaggcattgtataaaagtttcatatgtgtatatactgcacttgaatctcatggagagagactgtagcagtagcatttcccaaactttattgagtagaatcacttaagggagaaaaagaaacaacttaggcagatgctgccataattcgagtgtttttaaaattttacacctgtttttcaccttcttggatgctttctaatttcttttcaaatcatgctacatacctaaatatcagtttccaagtttttctactactgctgggagtgtacagtaacactgaaaactgtttttgtaagggcagattgaattggtattgttttgtcgttaaagcaacttacttttttggcagccatactttgctaacttattaaactagcagtcacaactgaagctaccttttt

SEQ ID NO: 180713 - DNA, 1140 bp, Homo Sapiens
ttggcttacaagatggggaggaactatctcgtgaacagagtgaaaaagggctctcttggctgagggagcatgggcatagctatagaccagtaacgtccagcagaaatataatgcaagccacaaatgcaatgcaaaccagattaaacagaagttcaaagaaagtgtgaagttagctgtaatagtatatcttatttaattcaacaaatactaagtgttaccatctagcagatagccagtattttaaaattataaagatattttacatgctttattttgtgctcaaataaatcttcaaaatctggcatttacacttacagcacatgtcagtttaggctaatcatatttcaagggcttaatagctacatgcatgttgtagctactgtgtttgatagcatacgtatagatgatggaggaaaagcccagaatactaaataaaccatgagttctttgatatgcctctggcacagattctaggtggagactggtggaagatgaaagggaaatgtagtcagatatcagagcatgaaggcctcagataccaagtcaggggatctctccatttaatcataaaggcattgtggagcctttgccacctttgaaagattttatatagatcagatttgaggttttgaaagattcctctggcaaatgtgtgaaggatcaattgtgggggccacagtgcaaagaaagttggaggtatttctcaatctgttctgtttctctgtgtttaatggaattttcatataaaccccagcaattagtagacaggcagcccttctgaattagcagtgtttcctgagtttttaattctactccagaacttcatgagaattaagggtatggtggaagcagagctaagaatatcaggtgttaagacagaaagtctggcatgtggacaccctgagctcaggcggagcagcccatgaagtgcggttcttagtcaaatagactctgtctctctaccaaactatggtgcacaggcagtacaccatcaccaaatgcatgtgtgcaggctcagctgtctctgattgtaagggtatacatcaaagggaactatccactatctctcaaacacctttctttgccaagatgctttcttacccctaaactctagatataatccttcctttgaggtaaaaa

SEQ ID NO: 180714 - DNA, 4623 bp, Homo Sapiens
  misc_feature (3742)..(3998): n is a, c, g, or t
  misc_feature (4294)..(4304): n is a, c, g, or t
  misc_feature (4503)..(4512): n is a, c, g, or t
ctttgtacaaaaaagttggagttgataacattgttgttcagaaataccacactattaatgggcataattgtgaagtgaaaaaggccctttctaaacaagagatgcagtctgctggatcacagagaggtcgtggaggtggatctggcaattttatgggtcgcggagggaactttggaggtggtggaggtaattttggccgtggtggaaactttggtggaagaggaggctatggtggtggaggtggtggcagcagaggtagttatggaggaggtgatggtggatataatggatttggaggtgatggtggcaactatggcggtggtcctggttatagtagtagagggggctatggtggtggtggaccaggatatggaaaccaaggtggtggatatggtggaggtggaggatatgatggttacaatgaaggaggaaattttggcggtggtaactatggtggtggtgggaactataatgattttggaaattatagtggacaacagcaatcaaattatggacccatgaaagggggcagttttggtggaagaagctcgggcagtccctatggtggtggttatggatctggtggtggaagtggtggatatggtagcagaaggttctaaaaacagcagaaaagggctacagttcttagcaggagagagagcgaggagttgtcaggaaagctgcaggttactttgagacagtcgtcccaaatgcattagaggaactgtaaaaatctgccacagaaggaacgatgatccatagtcagaaaagttactgcagcttaaacaggaaacccttcttgttcaggactgtcatagccacagtttgcaaaaagtgcagctattgattaatgcaatgtagtgtcaattagatgtacattcctgaggtcttttatctgttgtagctttgtctttttctttttcttttcattacatcaggtatattgccctgtaaattgtggtagtggtaccaggaataaaaaattaaggaatttttaacttttcaatatttgtgtagttcagtttttctacattttagtacagaaactttaacaaaatgcagtttcgaaggtgtttccttgtgagttaacaagtaaagaagatcattgttaattactattttgtatgaattttgctaaagttaactgtaaagaaacacctgctgacttgcagtttaaggggaatctattctccccatttccaaaccatgatatgaatgggcgctgacatgtggagagaatagataatttgtgtgtttgcaatgtgtgttttagataaataggattgggtatttaaattagcatttgtgaatttaatagcattaagattaccttcaaatgaaaaaaaatctcaaaatttctatttggtttttgtgcattttcttttaaaatgtaatcatatgattttagtgtgttagacttgctgagtcctagctgtgtttagaacatctctattctacatttaccttggtcaaatttgaactgctgccataggttttgggtgtaaagaatgtttactgccctccatttaaattctgaaaagggatggtggatgttttccctctcctacgttagaaaccattcttaaaaacttttgaaaatatagaaccattaagcctgctatatctgagcaaattaatgggtaccttttttttcttatttaaagcacaagaggcccataaatcttgagttactttaaattcttttttttgatacaagttttcagagcaagagaataaaaatcatgtgttattaaacccctaactggctggcatgctttcctgtttgtattctatacattttgctggatgaaaccaaggatagttcaggtataattgtccaaaataacctaactgcagcagaaatgtagcacagttgcttagtacaggcttctcacttcctacagacctgaattcaaatttggatagtctgagttcttaaattcccaaagaacacactgttatttcttgtgtatatttcaacataaatcatgttgttaccaatttgtttggaaggccctggttgagaagagttttagttaataaggtcatatatacatatattaatataaaccaatgtctactgttttgctccagctagtgcttacagtttcattcgagccctgagtatgtgccctgctgttactctctttggtagttgaacgttgaattcaagtcttttgttttaagaagtactaagcaaacaagcaataaaaaggggaatggggtgtgctagtgtttgaatatgctctcttgttgctctaattctgtgcctctgtgcattaatatttggatgcatgcaatgccagcatggaaattggtcttcacatatactgcagttttccagaaacattcacaaaccaataaatgtaacagacattccatttgttaatgggcatatatgtgaaaagcagtgtagaaaataggctaatattagaaaatggttaagtcctaaataacttcaagtgtggttatataatggacactgtcaatgttcataacttaaacctgggtacctggtcaaaataatgcttgggaaacattaaaattgagctaaattgtctcaagttcttttattcatataaataaagtttaaaggaatgggggagattaacatttcctgttttatgtttgtgaaattgtttgacacaaccttgacagtatcctttaatggcatgaggttaattgtactgttaaccaactttctatgttctggaactagtattatagtgaaaacatttacagtaagttgatgtttacaacctataagcaggtgaaatctgtgtatgtgacctgtttataagttgtattagcttagctcttgtgaacagtgtggaaaagtaagccatgaggagagcgatttaaccacctttaaaggacctaagatgtgctttttaagcacagtgtggatcacagaaactcactaagacaggacttcagcagccttttgtgtttggacaagtcagcataaataaagaatgacaaggcagcagcaagagcttcaactacagagaagtgaaggcataagatactatgatgatagtgagcaactttccaaaagctagttaaatctgcttattacaactgaaatatcgaagaaagtctagcaggaaggagctcttcgccttttggaacatcaatgagagatagttgccacagtcactaggtctagcatttagacctgcaaggaagggcaataagcattaggtaaggcttgaatttgaattttttcactaattaaagagtaattttttgtaaagcaaggtaagagtaatctttttgatttgcaggttgaatgagaaccctacttgcctaaatgaggaatgtctttcctaccatctaaaatacgaaggtttctggctgggtaaggtttgtagttgacagtaaaacctgatgacaccatttgtttccctgcaagtctacattacatatttcacaactttgtccctctctagtaggcacattggaaaaattcttcaactgaaaactaccttggtaccatgtcctacacgttttaaaccttagttttaaaaattcccctgcgaaatagccataagtattcatatcaagtcagttgtgactccttgtgtatacaattcattttttgtgtcttcagggtaaactcaatttttggtaaagtggtttcagcttttgtgaaaaccgtttttgtgtgtaagcatgacacacaacagactcagtaagctgcccatcctcatactaggaaaacaccttcaaaggaacattnnnnnnnnnnnnnnnnnnnnnnnnnnnnnnnnnnnnnnnnnnnnnnnnnnnnnnnnnnnnnnnnnnnnnnnnnnnnnnnnnnnnnnnnnnnnnnnnnnnnnnnnnnnnnnnnnnnnnnnnnnnnnnnnnnnnnnnnnnnnnnnnnnnnnnnnnnnnnnnnnnnnnnnnnnnnnnnnnnnnnnnnnnnnnnnnnnnnnnnnnnnnnnnnnnnnnnnnnnnnnnnnnnnnnnnnnnnnnnnnnnnnnnnnnnnnnnnnncccatctcaaagaagaaaagttaccagatgtcatgggtaaaggttggtcttcaagtggcctcataagttgtcttgcatttaaattcagggaattcattggaccaataggttacattttcgttccttttttgttttggttcatctgttaagcagtgggggcctaattactgctcctttgtaaaaacacattttcccaaagaacactgaattaccgttcaaactggttgttgatgggtaataagggctgtttttgctgccccaaaagggcttaacaatttaagcggatagtttacttnnnnnnnnnnntcctttggagacatactgaaaatgcaaactagtttctaaattatcaattccctacatgaagaagcagtttgccagagtttagtctcagaaaatgactgggtgggctctatttaaatcagaacccaatttctacgcgtgttgaataaggaacagcctttgatgaatttccttcacaacatggttttagtgaagcaaacannnnnnnnnnaagggcattgttctttctagtttatttctttttatgaaataaaattattttatttaaacagttccattgtcgtttctgaaaactacagtattctcaaaagttgtagcagca

SEQ ID NO: 180715 - DNA, 1540 bp, Homo Sapiens
  misc_feature (1035)..(1043): n is a, c, g, or t
ccaactttgtacaaaaaagttggatgaaggaggaaattttggcggtggtaactatggtggtggtgggaactataatgattttggaaattatagtggacaacagcaatcaaattatggacccatgaaagggggcagttttggtggaagaagctcgggcagtccctatggtggtggttatggatctggtggtggaagtggtggatatggtagcagaaggttctaaaaacagcagaaaagggtaggtatctttaaatttttattatgatgataaaagaatatgtggaactgttcactgagtgtaataatttttttatcctgtattattcaacaggctacagttcttagcaggagagagagcgaggagttgtcaggaaagctgcaggttactttgagacagtcgtcccaaatgcattagaggaactgtaaaaatctgccacagaaggaacgatgatccatagtcagaaaagttactgcagcttaaacaggaaacccttcttgttcaggactgtcatagccacagtttgcaaaaagtgcagctattgattaatgcaatgtagtgtcaattagatgtacattcctgaggtcttttatctgttgtagctttgtctttttctttttcttttcattacatcaggtatattgccctgtaaattgtggtagtggtaccaggaataaaaaattaaggaatttttaacttttcaatatttgtgtagttcagtttttctacattttagtacagaaactttaacaaaatgcagtttcgaaggtgtttccttgtgagttaacaagtaaagaagatcattgttaattactattttgtatgaattttgctaaagttaactgtaaagaaacacctgctgacttgcagtttaaggggaatctattctccccatttccaaaccatgatatgaatgggcgctgacatgtggagagaatagataatttgtgtgtttgcaatgtgtgttttagataaataggattgggtatttaaattagcatttgtgaatttaatagcattaagattaccttcaaatnnnnnnnnntctcaaaatttctatttggtttttgtgcattttcttttaaaatgtaatcatatgattttagtgtgttagacttgctgagtcctagctgtgtttagaacatctctattctacatttaccttggtcaaatttgaactgctgccataggttttgggtgtaaagaatgtttactgccctccatttaaattctgaaaagggatggtggatgttttccctctcctacgttagaaaccattcttaaaaacttttgaaaatatagaaccattaagcctgctatatctgagcaaattaatgggtaccttttttttcttattgaaagcacaagaggcccataaatcttgagttactttaaattcttttttttgatacaagttttcagagcaagagaataaaaatcatgtgttattaaacccctaactggctggcatgctttcctgtttgtattctatacattttgctggatgaaaccaaagatagttcagtatattgtccaaaataa

SEQ ID NO: 180716 - DNA, 1370 bp, Homo Sapiens
  misc_feature (487)..(743): n is a, c, g, or t
  misc_feature (1039)..(1049): n is a, c, g, or t
  misc_feature (1248)..(1257): n is a, c, g, or t
ttggcagaaggttctaaaaacagcagaaaaggggtgaatgagaaccctacttgcctaaatgaggaatgtctttcctaccatctaaaatacgaaggtttctggctgggtaaggtttgtagttgacagtaaaacctgatgacaccatttgtttccctgcaagtctacattacatatttcacaactttgtccctctctagtaggcacattggaaaaattcttcaactgaaaactaccttggtaccatgtcctacacgttttaaaccttagttttaaaaattcccctgcgaaatagccataagtattcatatcaagtcagttgtgactccttgtgtatacaattcattttttgtgtcttcagggtaaactcaatttttggtaaagtggtttcagcttttgtgaaaaccgtttttgtgtgtaagcatgacacacaacagactcagtaagctgcccatcctcatactaggaaaacaccttcaaaggaacattnnnnnnnnnnnnnnnnnnnnnnnnnnnnnnnnnnnnnnnnnnnnnnnnnnnnnnnnnnnnnnnnnnnnnnnnnnnnnnnnnnnnnnnnnnnnnnnnnnnnnnnnnnnnnnnnnnnnnnnnnnnnnnnnnnnnnnnnnnnnnnnnnnnnnnnnnnnnnnnnnnnnnnnnnnnnnnnnnnnnnnnnnnnnnnnnnnnnnnnnnnnnnnnnnnnnnnnnnnnnnnnnnnnnnnnnnnnnnnnnnnnnnnnnnnnnnnnnncccatctcaaagaagaaaagttaccagatgtcatgggtaaaggttggtcttcaagtggcctcataagttgtcttgcatttaaattcagggaattcattggaccaataggttacattttcgttccttttttgttttggttcatctgttaagcagtgggggcctaattactgctcctttgtaaaaacacattttcccaaagaacactgaattaccgttcaaactggttgttgatgggtaataagggctgtttttgctgccccaaaagggcttaacaatttaggcggatagtttacttnnnnnnnnnnntcctttggagacatactgaaaatgcaaactagtttctaaattatcaattccctacatgaagaagcagtttgccagagtttagtctcagaaaatgactggttggctctatttaaatcagaacccaatttctacgcgtgttgaataaggtaacagcctttgatgaatttccttcacaacatggttttagtgaagcaaacannnnnnnnnnaagggcattgttctttctagtttatttctttttatgaaataaaattattttatttaaacagttccattgtcgtttctgaaaactacagtattctcagaagttgtagcagcagt

SEQ ID NO: 180717 - DNA, 633 bp, Homo Sapiens
  misc_feature (296)..(306): n is a, c, g, or t
  misc_feature (506)..(516): n is a, c, g, or t
cccatctcaaagaagaaaagttaccagatgtcatgggtaaaggttggtcttcaagtggcctcataagttgtcttgcatttaaattcagggaattcattggaccaataggttacattttcgttccttttttgttttggttcatctgttaagcagtgggggcctaattactgctcctttgtaaaaacacattttcccaaagaacactgaattaccgttcaaactggttgttgatgggtaataagggctgtttttgctgccccaaaagggcttaacaatttaggcggatagtttacttnnnnnnnnnnntcctttggagacatactgaaaatgcaaactagtttctaaattatcaattccctacatgaagaagcagtttgccagagtttagtctcagaaaatgactggttggctctatttaaatcagaacccaatttctacgcgtgttgaataaggtaacagcctttgatgaatttccttcacaacatggtttttagtgaagcaaacannnnnnnnnnnaagggcattgtttctttctagtttatttctttttatgaaataaaattattttcatttaaacaggttccattgtcgtttctgaaaactacagtattctcagaagttgttagcagcagt

SEQ ID NO: 180718 - DNA, 1461 bp, Homo Sapiens
  misc_feature (877)..(897): n is a, c, g, or t
  misc_feature (1003)..(1011): n is a, c, g, or t
ctttgtacaaaaaagttgggtgactcttacctaacatttttaaaaacttctatttattttaaaaggctcttgggtggcacctcagagtcctctgcattcaccttcggtttattccaaggtctgatgggtgtaaggaggtccagctgtctgcagctctccgcatcagcctaagctacacctcaatttccgagctacaaggatagggtatgaagtcttgatttacaaccctctccccacctcaaaagaaagaactcattagttataagtgtcctgttcaaatcacaatccagtgcaaacataatcacaaattgcatctctggcacatctggtgcttttagcttctgcacaaattcaacatggtaaccctcacagcattctagggcataaaagggtcaagtacaataaatatccactgtaagtggtcataaggaagaaaatcaccctgccacacagtcagaatgttttcccttcagctctccctaccgttgagaagcgctataaaaggaggctttagcgtcctctaaagtttaccattatattcactaaagccaccaccttgataaagttactaaagccaagatgggttacaaagttagataagttcattaaattcaactccccaaacaattacgtttatctatgatgcctaggcgagaaaggcctgtgaatctataaggtaggagaatggggaactaagattttaggccttaaatatgttggaagaatttttcctagttcccacaagcagctactgtaatgaaataacaggagaaaatacagagctgatggttttgctattgtgcttaaaaaactaggcttcctcagtgaagcacctgataaacttaggtggttggattacagtggaaagtccactttnnnnnnnnnnnnnnnnnnnnnaaaactggcgactttttccatccccaatccctgcactgctgagacacaaaatgagttttatggcaaaggatccttaatccccagagacgctttggcttgtggtgcnnnnnnnnnaaggcctctctgctctgcccggtaccatgggtcgaacgaggggtgtataaaatgggggccttgggaagcctccacggtacagggctgcaggcccctcagatgtgaacatgagacacccacccagcaagacctttacacagggaacttaaatctaaccttgataaataaaaccaaacgtttatttacaccaaagaattccaacactggatctttcacatatgaaggacaaagtattatatatatacacacagcaaggggtggcggggctgtaacaagagagtttatagttttcccacaattacaggtctaccatttcagcttcaatggagatagtggctctgctcctacctctcaagatacatttacaagactgaggagcaggtcttctcactggatggcatgtgagggaaggggacggtcggaggaaaagccaacttttttgtacaaagt

SEQ ID NO: 180719 - DNA, 935 bp, Homo Sapiens
  misc_feature (591)..(599): n is a, c, g, or t
  misc_feature (705)..(725): n is a, c, g, or t
ccaactttgtacaaaaaagttgggccattttgaattcatttagttactgggcataacttactgctttttacaaaagaaacaaacattgtctgtacaggtttcatgctagagctaatgggagatgtggccacactgacttccattttaagctttctaccttcttttcctccgaccgtccccttccctcacatgccatccagtgagaagacctgctcctcagtcttgtaaatgtatcttgagaggtaggagcagagccactatctccattgaagctgaaatggtagacctgtaattgtgggaaaactataaactctcttgttacagccccgccaccccttgctgtgtgtatatatataatactttgtccttcatatgtgaaagatccagtgttggaattctttggtgtaaataaacgtttggttttatttatcaaggttagatttaagttccctgtgtaaaggtcttgctgggtgggtgtctcatgttcacatctgaggggcctgcagccctgtaccgtggaggcttcccaaggcccccattttatacacccctcgttcgacccatggtaccgggcagagcagagaggccttnnnnnnnnngcaccacaagccaaagcgtctctggggattaaggatcctttgccataaaactcattttgtgtctcagcagtgcagggattggggatggaaaaagtcgccagttttnnnnnnnnnnnnnnnnnnnnnaaagtggactttccactgtaatccaaccacctaagtttatcaggtgcttcactgaggaagcctagttttttaagcacaatagcaaaaccatcagctctgtattttctcctgttatttcattacagtagctgcttgtgggaactaggaaaattcttccaacatattttaaggcctaaaatcttagttccccattctcctaccttatagatt

SEQ ID NO: 180720 - DNA, 1569 bp, Homo Sapiens
ttggcaatgggggaggaccctgaggcggcctctgtgagccgacaggaacacgtggtcgatcagagagagactcgaggttcgtgaacggatggggaggaccctgaaaagcactgtggaatacaggtttctagtaacttcaaaatcacatcatttggactggaacccaaagatgggatcttctgagaacatcagagaaaagctgcccttggcatcatcactgcaacaaaacatcaggatcttgaaccttggggtcataatctcacaactgagcagggtcactcttggaactctacatccattgaaacccttaaggtaaagctaatcagggaagtttctccccagaagaagatggcatccttgatgtgagcagctctttctgaagatcatggatcaagacttcttactatcatgagactcttatctttgaatgtttttccgttgcttccgcctctgtgaacaacagaagtgagaagggggtctgttttgtgcacttatggggtatacttttatttgtgaagggctttgcagccagctttatacatggataatcttataacttgatagataaagatgaaggcccagtgtatcataggtgagaaacttcaatggtacatatggtgcctcataatcattcagaagcagaacattggttcactcctcttaacccacagcatgggttaaagagaccattgccaagaggccttccctcttctagaagggcatcatttgttaggtcctttttccatggtttggaattaaaaaggcaatgactagaaacatatccctcatggtagactctgtagcagattctactgtaaaggctacacaacagatgttaaattctcttgtgaaagttatgctaaaaaatagaattggctaaacaggaaagtacctgtgcagatgctggcacttaaggcctatggagaaaacatcaggtgttatagagagtctgttgtagggaattaacgaaaagaccactgagttaagtcaaagaatggtctatttgagtttaggtggtctggtttatggggaccctggctaaggagcatactccaaattcttggtgttaaccctctcagtagtcataagaatagtctccctggtgcactgtattctctcaaaggttttaaatgtttgcatgaagccatctttagaacgtcagatggtctctcttcaactggaatgacaagagctgaaagaaatgtgtgaccacgaggacaccgaaaccgatgagtgacatgctgagactggaaatccaaaatgatagtaacggagagtggcgctaacatcctaagttttggtcacactcttgcctaagtgacaacctgacaaagggggaattttttaaacaaaatgatgggaggccattgttttggactgagcactaggtcccaacagaccaaaccgaaccaaaatggcatcattcgtgctaaatgtgacataatcgaattaagactttaaggaaacacatgggtcctagaatagaccaggttttgtttttctcttgcaacagactttccagcataagtgatatcctcaactcatccttgttcttacctttgcaaactc

SEQ ID NO: 180721 - DNA, 1621 bp, Homo Sapiens
ctttgtacaaaaaagttggcaggtatgttctcttctatctacacacaaaaagtttattttccttcctcttatttgatatcagaagaatgacaggaatcagtttttaacagagatagtttttccgtttctccattgtgttaatcagagcgcagacttacattctcagtcatttatcttttctggtggagaataaaaagtcacttatagttaaagatcagaaaattatcacaccaaatccattacatatgttagaatcaataatttactcaaaaatcagcttttataggtatgttggcaccttatccaagaacttatccctgttccagtacccctgtgcttcattcagtatcagtaaccctgcaatgatttttacaaatatctttttctagtgggttttttacttagaggaaagaactttgtaatagctcttaatgtttatatataagagaagacagaatggaaaatgttttttgaagtcaaatattgcatgatgtaaagaaaaaactttaaacttaaatgagtaggttgtcctgaattacactggtaactctctacttctttattaaagaagttatagtaagatgcctttgttacctgatttcagtgtacattgtttttatgtggttttctgataatgtcctgtcagaattgtattggtttaggccaaaggccatagcaaaaacatagagaacaaatatgatcttaaaaatagattgtaacattttaaacaattagtttagtaatttgggaaatagtggatgcataatactttaacagaagtcacacatctgtaggtttatcttttgattattctcctgaggcattagatagtttttctattataagtgacagattgactcacttaatataaataagtagcatacactaaaagcttactatgtgccagatactgtgctggacacttacatagataagccattgaatccacacagcagccctgtaagaaataagtaaaatctgcataaagtgttgaaataggaatatacatttcattatgaaaaatgaatagattatgcctatctgaatcaatattgcattcaaataagtgattacttaaatcatatatcatagtttacactccttaaaaaaaggtacataaattcagtgaggtttttttcttaacatacagaagtactaaatactgcttgcagtataatattgatattggaagctgcagtttccagaataagtggagtaataactaaacagacatttaattttatttcaatatctatggaaaaaacacttattaaatctccctgtattttatgttgtctttattacagaatcacttgtctgtttgttgtgtgccacttactgacaaaactttaaacagtacttgatgccagctctctactctgtggctgtgggacctgtttcttttaggtacttgtgcttattaatctacttactaaattttcacattgacatttttggggatgatactaccatatacgaaatggaaaatgtaatatgctcagtgcttctgtaaagatgcagcaatactgggtattactttaccatcagtaaggcatctttgacatgagcatataatatttttggttgactcagcaaaggggacactttggggactaaggta

SEQ ID NO: 180722 - DNA, 1433 bp, Homo Sapiens
ttggcgatatattgcccttcttcccttagaagaactgctgaaccgactctgagaaatttgaaaacatctggagaaaatgacccattggtttcataggaacccattaaaagccacagctcctgtgtcttttaattactatggtgtagtcactggcccttctgcttcaaaaatatgcaatgacttgaggtcatccagggcacgactccttgaactgttcactgatttgagctgtaatccagaaatgatgaagaatgcagcagattcatatttctcacttttacaaggtttcataaattctttggatgaatctacccaagaaagcaagttacgatatattcaaaatttcaagtggactgatacattgcaaggacaggttccaagtgcccagcaggatgctgtttttgaattaatttccatgggatttaatgtagctttatggtataccaaatatgcttcaagactggctggaaaagaaaatataacagaagatgaagcaaaagaagttcatcgaagcctaaagattgcagctgggattacaggcgtgatccactgcacctggcctcaggtatgtttttctatctacacacaaaaagtttattttccttcctcttatttgatatcagaagaatgacaggaatcagtttttaacagagatagtttttccgtttctccattgtgttaatcagagcgcagacttacattctcagtcatttatcttttctggtggagaataaaaagtcacttatagttaaagatcagaaaattatcacaccaaatccattacatatgttagaatcaataatttactcaaaaatcagcttttataggtatgttggcaccttatccaagaacttatccctgttccagtacccctgtgcttcattcagtatcagtaaccctgcaatgatttttacaaatatctttttctagtgggttttttacttagaggaaagaactttgtaatagctcttaatgtttatatataagagaagacagaatggaaaatgttttttgaagtcaaatattgcatgatgtaaagaaaaaactttaaacttaaatgagtaggttgtcctgaattacactggtaactctctacttctttattaaagaagttatagtaagatgcctttgttacctgatttcagtgtacattgtttttatgtggttttctgataatgtcctgtcagaattgtattggtttaggccaaaggccatagcaaaaacatagagaacaaatatgatcttaaaaatagattgtaacattttaaacaattagtttagtaatttgggaaatagtggatgcataatactttaacagaagtcacacatctgtaggtttatcttttgattattctcctgaggcattagatagtttttctattataagtgacagattgactcacttaatataaataagtagcatacactaaaag

SEQ ID NO: 180723 - DNA, 975 bp, Homo Sapiens
ctttgtacaaaaaagttggaaataagtagcatacactaaaagcttactatgtgccagatactgtgctggacacttacatagataagccattgaatccacacagcagccctgtaagaaataagtaaaatctgcataaagtgttgaaataggaatatacatttcattatgaaaaatgaatagattatgcctatctgaatcaatattgcattcaaataagtgattacttaaatcatatatcatagtttacactccttaaaaaaaggtacataaattcagtgaggtttttttcttaacatacagaagtactaaatactgcttgcagtataatattgatattggaagctgcagtttccagaataagtggagtaataactaaacagacatttaattttatttcaatatctatggaaaaaacacttattaaatctccctgtattttatgttgtctttattacagaatcacttgtctgtttgttgtgtgccacttactgacaaaactttaaacagtacttgatgccagctctctactctgtggctgtgggacctgtttcttttaggtacttgtgcttattaatctacttactaaattttcacattgacatttttggggatgatactaccatatacgaaatggaaaatgtaatatgctcagtgcttctgtaaaatgcagcaatactggtattactttacatcagtaggcatctttgacatgagcatataaatattttgttgactcagcaaaggtgacactttgtgactaaagtatcccattatatataatgttttttgaaatgttggaaattttggggaattatcaaatgtatagaagttgcatgaaggttatagagaggtgtaactgtttgttaactattacatggatttcatactaggcagtgacaactaacatgttacttcaactaaaagtgtataatgggttgtctttttatttatgaaaataaaagtaattttacttac

SEQ ID NO: 180724 - DNA, 915 bp, Homo Sapiens
  misc_feature (103)..(131): n is a, c, g, or t
tacagacgtgagccaccgcgcccagcctatttttattttttagagataggatcttgcttttttgcctagcctgctcccgaactcctgacctcaggtgattttnnnnnnnnnnnnnnnnnnnnnnnnnnnnnaagatccagctgtgattataggtgtgagcaactatgcctggcccagaaatttggattttatcccgtagaaagcagttttaaaaactaaacttgcctccactgattttcatgttaaggatccggtggaagggacaggcagtcaaagcaagagggacaagtggagaacataaattaaggtagtgaccataaagatggaaagaccatgcctggcctcttggaatatttaataagctaaaaaattcttatacacaggtagattaattaggtagccaggagtggcccctgaaagtatgtctggcaaaacctagaactgcatcctagccatcactgtaccttctgccctccctgctgtctcctctgccagttacagttaaaaggttgtgggtgaggacgctgggcagagtcccaggcgtctgctgtcagctccccagcccggcctgcctgccgagccatctgggcgtcccacggtggagagtgtggtgcttgtgacgcggtggtgctgggagccatcctggtggcagatgtgggctctcactgcaagtcagtgtaagtccccagggactgtcagcagcacgtcctgctgcccctctctctgcagaagccctggtaacctgcgtttggaaaaatctctaacgatttctgaggagctgtcagccatgtccttgtccaccctgtgtggggcacggcttcgacatggctctgctcccgtcgtgggctgagaagagcagtggggctgtgccttggaaaggaggccctcccgacatgcctttgtgcgaggtccctg

SEQ ID NO: 180725 - DNA, 1366 bp, Homo Sapiens
  misc_feature (601)..(610): n is a, c, g, or t
  misc_feature (1127)..(1173): n is a, c, g, or t
ctgagccactgcgcctggccatgagtgccttaatgcttagaatcatctagcaaatatttttcaaatatggctagaaacaaaattttctttaatcattatgcattttacagtgccaaaggctgtcagagtatattttttccccctatagtgttcttatggctcagtgatgaataaggtggatttgatctgtataaaaacacagacactgatgtgctcagtcatacatctttagacctatctccatttctctgccccttcccctccctttacattatgagagctctgcaggttcccttatggaagtcacagaaatgttttttcagttacaaggtatgatgaaaatggtctgaggtctattcctacttatcctactagattgcctcttggtgcttattcaaattcttgatcctgaattcctttaatcaagtaattatttcaaagaacataattaggtttccatagggtcgttacttcttttatattcttggttctttttaccttatccacccgtatctttattttcagggatttccatatccatcagttgggactgaaaactaatctgcattaaagtagcagttgttacttgatatgacttacnnnnnnnnnnctcatggatatttgaatgttacaggatttgggaaggtaatttttttaaattactgataaaaatcttgtggaggattctgattctcaggtctggaataacctgcattttttgaataagtggagcattcacatgtggtttaaaattcaaaatatgtaattgatgacaccatatccgagccattcagtttccttctcaggaggcagtgttgttagtgggtgtgtctgttgtgtgtgttcttctagagatagtttatgtttatataagcaaatgcagatataccttcctctcattttacatacttttcagttttctaagcctttagcaaaagtatataaattaatgttatgggattttacaaaaggcagaagccttcaagactataagcagtgcagacagagtgatttgaatgataggaagtaggtatgctaagtaacctctgaaatgacacccgcacaccacaattttcactttctgtgcacagagatggtactatctgtagatttccagagttttgccnnnnnnnnnnnnnnnnnnnnnnnnnnnnnnnnnnnnnnnnnnnnnnngtggtgagccttagtactagaaatagtaaagaattagcaggtgaagtttagcagattttttttaaattaacattgttagtttaatttcagttcctaatagattgatgaaataaacattaacaagaatgtgtaaacatctgtaggttaatgggtgcaggactaaagcattttaggtagtatcatcatacaaaaa

SEQ ID NO: 180726 - DNA, 972 bp, Homo Sapiens
  misc_feature (206)..(615): n is a, c, g, or t
  misc_feature (680)..(689): n is a, c, g, or t
ttggggaaatcatatttctccccaggacctatctgtttcgggggggcattatttgccagttctttctttgtccctcggaattttccaggcaaaccttctgccatcaatttgctgtcttttgcttttttgtcctttttcacttcaagtaaataaacaatggagagggaggagcaaatattctgacaggggaatgcagtgccattagnnnnnnnnnnnnnnnnnnnnnnnnnnnnnnnnnnnnnnnnnnnnnnnnnnnnnnnnnnnnnnnnnnnnnnnnnnnnnnnnnnnnnnnnnnnnnnnnnnnnnnnnnnnnnnnnnnnnnnnnnnnnnnnnnnnnnnnnnnnnnnnnnnnnnnnnnnnnnnnnnnnnnnnnnnnnnnnnnnnnnnnnnnnnnnnnnnnnnnnnnnnnnnnnnnnnnnnnnnnnnnnnnnnnnnnnnnnnnnnnnnnnnnnnnnnnnnnnnnnnnnnnnnnnnnnnnnnnnnnnnnnnnnnnnnnnnnnnnnnnnnnnnnnnnnnnnnnnnnnnnnnnnnnnnnnnnnnnnnnnnnnnnnnnnnnnnnnnnnnnnnnnnnnnnnnnnnnnnnnnnnnnnnnnnnnnnnnnnnnnnnnnnnnnnntgtcttaggagccacatttttaattcctgaattaattgcaacttttttataccacccacttcagnnnnnnnnnntgaggttgtaaaaactgttctaagaaccaacatgaaccaaaaaataaaggataaagaagaaacaatagcaataaattctgaatgagaggaataagagcaattaaacataaaacttacttctgagctgtccaccaacctataaaaagaaaactggttgcagaattcttttttgtgtgcaattttaggaaacagttcgtcagaaggaagaaaatttttgcccagtgcttggttctgaaggaaattcgtcaaggattctttgtttgaagacattgaataatgcccc

SEQ ID NO: 180727 - DNA, 1046 bp, Homo Sapiens
tgggatgcagagtccagctgcgctgcacagcctgggcagcaggctgagtatgggctcctcactcccacctcctggccttcaaggccccacttggttgccccagacagccatctttgtgaacacaggtcttgggaggaagcggctggacttcatgtaggcagagatcttctccaagcccgagaggggggaaaataaggccagaactcaaggtcagctgcccatgagggctggcacaaccccactgcagacacagcaggtcagggccctggccacagcctttccatgtgggctcaagtgctgaggcatcacacagcttcttagggtccccagatctgcggagttaactcttccaacttcctttaagtaatgttgtaccacagtaacagctaacacttatgaagattctacacggtgctgggtgctctgtacccaagagaaattacaacgtaagcttagaaaacccactcgactactctgcaaggctgaatctattatcaccatttctcatgtgggaaacagaagttcagcaacttccttacatttaaatacctagtaaggggaatagaacttcaatgtagcctggttctgtctctctccagttctggcctctttctgccaaattctcttcttcttctgccccaccacccctcacaccaggccctgtcactccttgactgcacaaacagtctccttttccacagggaggctcttggcttgtctgggtatagagacacagaagggacctccagcagaacaaaggggctctgaacacactcacccaatgtctcagtaaaacctggatgaaagtggaatggggagtggcagtgcacaagaaaatcaaaggcgagactaggctctaatcattccccttaaagcagaaagtccaaggttctccatctggtatcttagcaaaatctcactgtgccctaacccatggcatctccagccctgctgcagatcaggctacatgacactcagatgtgctgtgcacaatcttaccaggattgaatgcccagataaggtattcaaaaacatccggctcacac

SEQ ID NO: 180728 - DNA, 1487 bp, Homo Sapiens
gcgtgtatagttttataacatggggatggggacaaaaaggagggagaagtctaaaaaacaaatggagcggggccacaggaattgtcagaaatggaggtttaggctgtccatacaggattcagcaagtacttggggactgcgactagaagaagccagggtggggaataagtagctgaggaggagagggagctgatgtggaggagagcaagggcaacttcaaggaacaaaagggaagctgcaaggcaccagctccattaattcagcaaacattccttgtctgtatgccatgccagggtccttgttctatggttctctcagtggggtagctagaaacttgcccaacagacaggaacagacagaagccaaagcaaagaattcctgaaggtagccggcctgctgccaaacctgggacaaactgtatggaggcgcagcgtgtgtagccagaacccgagttaaaacctaggtcccaccctggccggtctgactccacggcttctaggggttggttgtgcgaagctgttgagggctgaaggcgctaaccatcaaagatggaggtcgggtggcagaagatggggtgggaggcagagagtgagtacagcgaaggcggcctcaactggataagaaaactccagacttgcgggaaaggcctgagctcgcattggacgctctggggtgccacagtcggacactgtttccgggagacctccgcctctccgcgcggatgaagaggctgcagacgccgaagaagagctcgagtgcgtggggcactgatggggatcggggtgggcacacagcagacggcctgggtacgcttctttcctgacatggtctccaaggttagcaaagcttccaaacgtttccaggcctccagcctggaatgcctctccccccgctccccgacctcttccaggaacaccccagctcagggctccccactccccttcctgcgaattgaagctctgtgggctttgcggtccgggcgggcgagtacctggcggccggggctgttctccaggagtttctgcgcgaaaagtttcctaggagtgacgggatggcgtgggctcaggggagagtagaaacgctcccgggggctttgcagggaccgagcagctgcgggagctggggagcagtctgactgggactccctggaaggccctgccattggggctgggcggcagctcggcgtcgaaaaagccgggtctgaagattaatgtgccgaggccggagaccctgaggaccaagtcacgggacttgcccttggtgactcacgccttgaggccgagcagcgcggaaggcgctcaggccggatctggggtggggcccagccgagccttggtcttgtctgtcagcagcggcagctgcactgcgtctcccaaggtggctgaagctggccagctgcgggctccgcgccgctcgtcccgggtctatgggtccattccccacgcccacccggaccccggggtcactcgggtctccgtctgtgccaa

SEQ ID NO: 180729 - DNA, 1589 bp, Homo Sapiens
gacttagaattggtgatccaggccgcctaatggcatcaaataatttgttatatctttaatttattgaaggatcaccacatgcttttaaatagcatggagaaatggaaagaatagggactttttactcaggtaatacccagcctgctacctaacaggttgtgttgtactaaataaaatggtacataagaagaaacactgtaaattatatagtgcgaatcaaatattgttaataaaccaatatctgtatatcctatgtcccggattaatctttaatttagatactccttctagttatctaatacacagcagagtgagaaaaatcattatggattaggttctttagtaagaaacctgagatggacttctcattagcattaactagttattgcccagctttggagagccttcttttggcttatcatttattataagcccagaaataggtgactaatcagagataaatgtatgggttgtctgtatctagttttatgccttttttttgcctaagacgtagtcaaattaatattttaactaatacatcttagcagagtttagttaagcacaaagttaacagtgggtaggattgaatcttgaaagtaatcatgtctgtaatgtttttcatgcatgcaaaaagcacagacaaaaccactcatgccctattaataaacaaaatacagatcaaagttttcaaaagtaatcactctatttattctaaatgtctgtggctttaggaaaataccaccagctagtacttacctatttaaagatgtagaatttattatcctctaatattcttatcagttgtttccacaactttagtttactattggactttcaaaaatttaaagaattacaagtaaaattcattaaacacttgtgtgtgaatagtaatacacagtaattagtacagcatgttgcttcttcaacaaattgagttttcagggaaatcagcaagtaaatgaaatataaatttttggtaaaagtatcaaacattcatcttgcccatttttcctcttaaactttattatctaatcaaacatagttttccataagatgtaataaaatatagataaggttggaatatttgaggatccatttgtggaactgaatttaatgagacttcattggtgatacactcaatttttactgggtaattagctaataatgttggtcactgtctcacagttcaagtagctttaagatgatgtggcaaggaaaacacaaagcttttgggtaaccagcgttcttaaatgtatggtttttgaccaggtgaaccctttagaagtgatttctgttttaaaagtatgtacttaaaatacctttggctgtgatgaatgtagatcccagcagaataccaaaatcctattttttttgactgagtatttgtagatgcttaatgactgaaatgaatttggaggcactgatgaaagtgatttttttaaagttctcacgtactgttcaattatttaatgttaagtttagtatcaagatacagttgtttttaaaatgccaaaatgctgtttattatacagaatattttattacatttgcaatatctttgtatatagtgattttttcttgataataaa

SEQ ID NO: 180730 - DNA, 897 bp, Homo Sapiens
ttggcgcccactcgctgcggcgcttctggctccagaccgccctccggatcggaccctgcgaatggttttggctatatcttcatgtaggacctactccctatcccgtcggccgcggtgaatcccacctgcggtgctttaacttgtgtaacagagatgctgcctctgggagaggcggggagggacgggccaactggagcgggcggcgggagggtggagggcggggcgcggcttggggcctgggttcctttgccccttgcccaccagggaggggtgggagacgagagagggtgaactttcccctgcgagattctggtgaaaggggaaatatgcttcgagtcagtaaagctgcgcaagtgcacagtcaaggagagagtcttgggaaaaccaaggatagttcccggagatgacttttggactgcggaaacgtttgtcagaggaaagaggcttcagtttaatgtgagatcattggaagttgaactattcaggcggcgagcagagcccctttctccatcttcccactgtatggtcttgtcccttagcctataatttcttataaagagcgttttgaagactaggtttttactggcagggccctgattcaggctcacagtataaagagagaagtcagagaatcctagaaatttattgcttgaagaaggggttggtgtcctcatatctcaccttcctcaggctgggcttcatcaccaggcctcctcacagattcctgtcccttctgtgtcctggactccggatacctcaactctcagtactttgtgctcagcccaggtaacacgttttgttgtgtcctcagtgcctggcacttagatgctcagtttgttaaatggatagtgggagacacaggagtgtcaactattcacacatttgattggtgagccc

SEQ ID NO: 180731 - DNA, 1055 bp, Homo Sapiens
ttgggttttggctatatcttcatgtaggacctactccctatcccgtcggccgcggtgaatcccacctgcggtgctttaacttgtgtaacagagatgctgcctctgggagaggcggggagggacgggccaactggagcgggcggcgggagggtggagggcggggcgcggcttggggcctgggttcctttgccccttgcccaccagggaggggtgggagacgagagagggtgaactttcccctgcgagattctggtgaaaggggaaatatgcttcgagtcagtaaagctgcgcaagtgcacagtcaaggagagagtcttgggaaaaccaaggatagttcccggagatgacttttggactgcggaaacgtttgtcagaggaaagaggcttcagtttaatgtgagatcattggaagttgaactattcaggcggcgagcagagcccctttctccatcttcccactgtatggtcttgtcccttagcctataatttcttataaagagcgttttgaagactaggtttttactggcagggccctgattcaggctcacagtataaagagagaagtcagagaatcctagaaatttattgcttgaagaaggggttggtgtcctcatatctcaccttcctcaggctgggcttcatcaccaggcctcctcacagattcctgtcccttctgtgtcctggactccggatacctcaactctcagtactttgtgctcagcccaggcccagagccatggctatctcctcttcctcctgcgaactgcccctggtggctgtgtgccaggtaacatcgacgccagacaagcaacagaactttaaaacatgtgctgagctggttcgagaggctgccagactgggtgcctgcctggctttcctgcctgaggcatttgacttcattgcacgggaccctgcagagacgctacacctgtctgaaccactgggtgggaaacttttggaagatacacccagcttgccagggaatgtggactctggctgtcttgggtggttttcatgagcgtggccaagactgggagcagactcagaaaatctac

SEQ ID NO: 180732 - DNA, 840 bp, Homo Sapiens
  misc_feature (350)..(369): n is a, c, g, or t
  misc_feature (372)..(651): n is a, c, g, or t
ggagtcacttcagcattgccataaccagcaaaggtgattgcagcggtgccattttcttcatctatctctcaatctccgcttcataacacctgtaaagatatcatggctgtaagcaggtgagtaaaggtttagtactcagcctacaagacttatactgtagtgataaaattattacatgtgtctataatgaaacttctataatcaaatggttgtttcagcaaagagaatacaaaagagtggttgaagttagttatctgctatcaaaaaaggacatcccaatcataatattgctgggcaagtctcttacatgtacctactcaacgtgatttaatgtctttgagaatagaggnnnnnnnnnnnnnnnnnnnngcnnnnnnnnnnnnnnnnnnnnnnnnnnnnnnnnnnnnnnnnnnnnnnnnnnnnnnnnnnnnnnnnnnnnnnnnnnnnnnnnnnnnnnnnnnnnnnnnnnnnnnnnnnnnnnnnnnnnnnnnnnnnnnnnnnnnnnnnnnnnnnnnnnnnnnnnnnnnnnnnnnnnnnnnnnnnnnnnnnnnnnnnnnnnnnnnnnnnnnnnnnnnnnnnnnnnnnnnnnnnnnnnnnnnnnnnnnnnnnnnnnnnnnnnnnnnnnnnnnnnnnnnnnnnnnnnnnnnnnnnaagatatttcttataggaatgatgtcagtgtatgctcttcacagaattctcagaaaaaccaaccattcactcaattttcaattagagaaaataatttagattattttagaaaacacccattcattgtcctgtttttctttcctccagaatcccagccattcttctccccaaaacttaatctaaagccaa

SEQ ID NO: 180733 - DNA, 936 bp, Homo Sapiens
ctttgtacaaaaaagttggctgtaactgctgcccatctgtcgatgaaggagcagtttcagaactcagacttgagggaggaaaagtaattaatggaagttatagaactaaccaaagaccttctgtcaactcaaccttctgagacgcttgcaagttcagacagttttgcttctactcaacctactcattcatggaaagtaggagacaagtgtatggcagtctggagtgaagatggacagtgttatgaagcggagattgaggagatagatgaagaaaatggcaccgctgcaatcacctttgctggttatggcaatgctgaagtgactccactgttgaacctcaagcctgtagaagaaggaaggaaggcaaaggaggacagtggcaacaaacccatgtcaaagtaagtgactttgacttttccattttaggtgcaatcttccccatttggatacttgaagtagtctgcagagagaatctatgcataagaaagttgtaatactgttttaccgttgttttgaagattagcaacaaagggtcaacattgtctgtgtaagtgtgcctaagtaaagtgaagataattttgattcccatttaggcattcagtaaatattaagaagataactatgtacaatgaacatcttcccagcatattttataagccaggtactggggctataccacaggagaccacctcaggccttgtcccaactgagtttatatttagagaagaaaactcatcattaatgaagtgctttaatagtacagtgtaaacattacaaaggagctataacaggtactgtaagggaacaagaggtactcagcctccacttttattattagggcagatttctttgagaaaatgacatctaaactgagatttgaaaagagtaagagccaagtacaaagctacaaggcggtatgatgttgatctgggcttg

SEQ ID NO: 180734 - DNA, 1592 bp, Homo Sapiens
acaacgtccagcccaaaaattggtttataattaaggaaaatgcagcacaatgtttaactgcattaagttattggataaaaagacaaatacacttgtaggagagcttctgtggtttactgttcgaaggcacaaatgcctgttgctttggcttccatatcagtcagtataaaaatcacttgatgtgctttgtgcaaaatttccaggaccttatgttttatatgggtgtcatgaagtgaatggctgaaagctcttcatagaaggaaggtggtttacatctgtgtgcctaggtgagactgttttagtaggtttcatagcagagtaacaaacaggagaaaacagcttctaatatttgtcatgatgtagtcttatcagtttaacttcttagcattttgagtttatccagttttctcaagtaataaaaaatactgtctaaaggtttatttggttttctcttgagagagaaatagtaagatatgcatagttaattctacacttccactatgattgaatgagaaaagacctttatcaaaactatttgataggttacgggcacaaatagattagcttttagtacaagttgaatacttcatgctgctgatacggaacaatggattatttgattcgggattttactggaaatgagcattatggccttgaccttttcccatctctgtgatagacaagattttcatcttttttaacttcacatttttctcctgaagtagcagcacttgacatgagatttatgaaaaatgtgtgctttcagcattgtgtaaatatttattttacagagccataagtgtgatccttggtgacaggtggaagaaaatgaagaatgaagagagaagaatgtacacattagaagcaaaggctttggctgaagaacagaaacgtttaaatcctgactgttggaagaggaaaagaaccaattcagtatgtttcaataaatagtgtttaaaattatcttgccttatccgtgcaggtgtactggcatgttggagcagttgttacaacctttaagaggttgtgttgatgctgtctctagcatttttatacttcaaaacctaataatgttatcacatcatcatataaagactgcctttcctcaagggtcatttactctcatagcatggcaagtcgaaatctcaggcaaacttcaaaagaatgtttgttctaaacattgagttggaaaaataattttggaatgcagtgtttctagttgggttgaaagataagcattattaatccattaatatcacagtagaaaatttctctaataattttgggattgtctcaacagctttttttccttaattggtgagggaccaataaggctggaggtgttggggtatgttagctgtcattcatggggacttgtgccattggcacagaatttctagattgaaaaatttcaaggaggagaagaaataggcccaggaatggtggcaaacaagtctatatgataagctatcttggatagacttgtttcttataacttttccattactaaactagcatcttttagttcagcgtttttagattaattgcaaaaaattacatgtgatatagtggggtcaatttgaagtatcatt

SEQ ID NO: 180735 - DNA, 1381 bp, Homo Sapiens
  misc_feature (1159)..(1172): n is a, c, g, or t
aactttgtacaaaaaagttggctgtattgtaccctttaaatgaaatgaagcagaagctgggagtcggcctttcctctagtaaccaccacatggctcagcatctgtgccaaacataggcgctcctagtctggtcagtgccaagaggctaccagaacatggggcaggtggctggtgttggtgtcccagcctaagagccacctgctgcagttaccatggcatgctgagttgatgcaccaggtggcagcagccatccgttattatttccaatggagacctagcccaggccaaggtaaagttagttaatagcattgggatatagtcactgtaatggtgctattaacaaacagtcaacaccattgtattttttaacttcgtgttctgtatctcctcagccatgtatcttaaatatattttgtcatcataatctttctttatggtgggggcagactttgcacttactgcagtgcaacacttgcactttaattttcctccaactgtctaaaattagagcaaatacattggcaatacagctgcttttgctctgagctacaatcatggcttttcatgttacttaccaagtggtgtttctggttaggaatcacagctgtaaaattgatttcagttcatcacacttcttcatgatgttgcccctaaattttgcacactatattcttgtatattatttcaaataaatggaaaaaaaagttgcttatctctgacgtctactgattgattgaattgattaatcttggctgaattttatttatgagttctcagaataacaggttcaggagatgagatggaaaacataaggcaaattcctaacactgctaattaggaggctgctgataggattttaaaaattaaaaacaatgttaatagtggaacaagagccatcagaaaataaggacttagattatctactatttatagagaattgctatacaataaaaatttttatttttcacgtggcatttttgttacacggttaaacagcccaaaggtctgcttttaataacatgacaaagtgtaacaaaagccttgctttatttaaagatccagtatgacatacttaaaaaggccatttaaccttgtatcttagcttgggatgtgccagtggttcctcaactttgttgtctattggaatcattttggggannnnnnnnnnnnnnaatagtggtgtctgtcaggctcccactcctagacatgttaattaatgtggagtgcaagttgggcatcaggattttaaaaaaatcccctggtgattggtatgaatgtgcagccaaatttggaaaccactgagctacatgcttatttagtgaagaaggcagggttgggggaagcttgggtacatgttataacccaacttttttgtacaaag

SEQ ID NO: 180736 - DNA, 1705 bp, Homo Sapiens
ttgggggaaaagtaagtgggactttctgtatacccttggggcatgacagcccacatatattgccattctttccaagtaaaagcaaacaaatatggctgtctggatctacaggaatactgaaaaaggcaccgcagagattcacaactgagaaatactggctggtagtgagtatagctgataaaacggcatgtgggttggggactactgggtgcctgggtattacaatattgtttattgccctcaagtcctgcacaaatctccattttctcctgctttgtttctttacagggaacatagggctgttgcaggggctggtgcagggaataatgagcccctttttagatagtcttgtataataggggcaattccatttgcggcttcctgtcatagagtgtattgtttaaggctaggcaggggtttctttggatttatctctacctttattggagtggctgagaatattttccctatatctgtattgactgagaccgtaagtgggaggagacatccttgagcaagcgttcctcttctggtgttaacaggaagattggggaagctaaaaggagttttaccgtttcctgctctttattccagtgttttctcttctcctctattatttccttctgtgtctctatttcatattcccggccacaagacgatgtttcaacactactagtactaaattgtggtacgttgtcaggacattttgtaattcggtattcttggtctcctggccccaattctaaaaaaagttcacgttttgatgaaaaaaagatatgggcattatggatgttgaggagatcacagctcaaaagattgacaggggccccagggcatataagaaacatatggtacctacggagcatgacacacacaattagagcttgcggcgggggagctgaacccgatggaattgtaaggtataggtttggacttaaaacgtgagatcattttattagacgcagccaccatgttaattctttcattactctgaggaatgggctttctaaatcaggtgggatttatcagagatatagttgtgtctgtgacaattaaggcagttgtaagctcatgatttattattatattaatgtctcccaatttgtttgtcatggtgaagttttaacagctcactaggagttaacttgtgggcaaaatatgggggaggcatgtggcttttcatcttgtagccatcttattcaggaaccaaaaagggggaggcaggtttgcatgacccacttactagcttgacttttccctttggctaaatgagtttcgggggtcccacaatttaatttcctttcacagactcctcagttttctttagtggaggtgaggggaggtggctatgacaagagatgctctgatagcggatcttctgtatatagatggtccttgtttcttttgagtagcatcatacattaagggccttaccttgtttatctgcctcaacatgccgaattatagctgtacctagaggaagaccaggtgctagcactacatcctggtctttgatgtgtttggtatatgtcatggtagtgactgggggcatggaacttggttcacccttccttgctgatctcatgacagttcatcagctggtgggttgcctcgggaggctgtggaagccccgctgctggtggcttccacagctttcaggtttttaaaccagaaggctgtacccatcagcgttgcacccatctcc

SEQ ID NO: 180737 - DNA, 1373 bp, Homo Sapiens
ttggcacaatggtaagaatggtgcctgtcctgctgtctctgctgctgcttctgggtcctgctgtcccccaggagaaccaagatggtcgttactctctgacctatatctacactgggctgtccaagcatgttgaagacgtccccgcgtttcaggcccttggctcactcaatgacctccagttctttagatacaacagtaaagacaggaagtctcagcccatgggactctggagacaggtggaaggaatggaggattggaagcaggacagccaacttcagaaggccagggaggacatctttatggagaccctgaaagacattgtggagtattacaacgacagtaacgggtctcacgtattgcagggaaggtttggttgtgagatcgagaataacagaagcagcggagcattctggaaatattactatgatggaaaggactacattgaattcaacaaagaaatcccagcctgggtccccttcgacccagcagcccagataaccaagcagaagtgggaggcagaaccagtctacgtgcagcgggccaaggcttacctggaggaggagtgccctgcgactctgcggaaatacctgaaatacagcaaaaatatcctggaccggcaaggtactcactgcttcctgctccccagtactgagcccagaataaaagacgatctcaggctaggagctcaggcaacatcttagtccggtctcatctgttcctggatgtccctcagacccccagctttcatcttttaggatttattccttccctgggataatataatttgtggtccaaaaagaacatcatcaaaatttcaggcagaatgggccaggaaggccattctttcttgatgagtgtccccaaatcatctccaattaacagacaaggagcttgaggttagggaggtgagggtaacactgtctgtaagaggcagagctgggactcaaattccagatttcagattccaaatcccatcgttttttatctctacaatgatgcctcccatctgggtggtggagagaagggaggcgtgtaaaatgtcagccccagaaggacaagagcaagccagtgtgagcggaattgatggctgcaagctgagacttggattggagacgtagtgagactcaggattgtgcagtgctgcagggaagtggttgctggatagaggcatgggctgaaccaagcagctggactgagactgggggacagaactccaaagcccactgagatgtgggaaaacatggagaagcacacggagcattcacaacttattgccgtcagagtcaatacatgggtgaggtggggattgggcaagagggaaagcgtcagccttccctgatattctgggaaagtctcccggggctgggggtggg

SEQ ID NO: 180738 - DNA, 880 bp, Homo Sapiens
  misc_feature (67)..(100): n is a, c, g, or t
  misc_feature (107)..(174): n is a, c, g, or t
  misc_feature (239)..(356): n is a, c, g, or t
ctgtaccatggaacaaatggacttagcatatatttagtgaacatttcacccggcttccccaacatcnnnnnnnnnnnnnnnnnnnnnnnnnnnnnnnnnngagacannnnnnnnnnnnnnnnnnnnnnnnnnnnnnnnnnnnnnnnnnnnnnnnnnnnnnnnnnnnnnnnnnnnggttcaagcgattcttgtgtcttagcctgctgagtagctgggactacaggtgtgcactaccatgnnnnnnnnnnnnnnnnnnnnnnnnnnnnnnnnnnnnnnnnnnnnnnnnnnnnnnnnnnnnnnnnnnnnnnnnnnnnnnnnnnnnnnnnnnnnnnnnnnnnnnnnnnnnnnnnnnnnnntaagtgagccactgtgcctggtctattccccaacatctaaaacaatgcctgacatagtagatcctcagtcacctttattaatggataaaaaatattccagcagaaagggagacgtctgtcatttagcatcataaaggattataatatcaaggaaggtaaaatggaaacgtgtttggattgcttgaggatcttttctccaaatgaaattggaaatgcattctgttgttagcctgcagtattggagttttgaaaggaaaaccgctaattgtctatgaaggatattctttctcatatcactatcataaatgcaccttctctagaaaacatgcattcaagacctcaattgttagggcttggttttgggttggggattattgaaagaaaagtaagttatctatcttcaaggctatatattccagtcaagaggctcagtagagagaaatgcctaaaataggaattacaaggccagacttaggtggccttgtgtcataggagccatggtgtttaatatcagactttgtttt

SEQ ID NO: 180739 - DNA, 1167 bp, Homo Sapiens
ttgggatggattgtgttttatgacatttattttatatgggctaacaattctgcatgtaatttcattgttgtagggttatgagagaatttacaatgaaattccggacattaatctggatgtcccacattcatactctgtgctggagcggtttgtagaagaatgttttcaggctggaataatttccaaacaactcagagatctttgtccttcaaggtactttatttaaatactactttctcaatgtaaaatagtggatgagatctttgggaaggttaactgctaagttagtttatcgttccctgaagtcactgaagaacgtgactcttgtgagttcatggagaaagaagggcgaagcttgttttagcccccttgtaaatctgtacaggactgcctcatgaagtcctagtttatttgaaagaaactaatcttgtggagcaggtcctttgttgtaagtagtttcagtgtttagagtaggtattatcagtgataagatgagaaaattgaggcttagggaggtataatgtactttttctaaggtcacatggctagtacatggtagaagccaagtatgaattcaggacttttctggcttcaaagatctaggctcttacctgtactggatgtggcttccttgacttctttacaggttggagaattagggctaattggatgttctcactagaaagtgtgtgtgttggggggtgtgtggaggatgttctcactggaaagtgtatgtgtgtgggtgattttccttggagctattaatatttttgctactagttggtaagtttttttgttgttgttaaagctaataatgaagcttataatgtaataatataaatgtttagtaatagctaaactttttgcttgtgtgggtcagttttatataatcttaagttcttataattttttatctggaaaatttcttaagctttgatatttttaagtgcattgtaagaattaaaagtcagaaaaatatttcctggtcgggcctttgctttagaattttagaagccattaaaagagagggaaaagaaagtgatgaaagatagtttaatagctttactagaaatgtttggaaatacagacgttagcttggtgatggcagatttatgtatggatgtgccaagtgatatacatcagtaaaactctgaactttggccttct

SEQ ID NO: 180740 - DNA, 937 bp, Homo Sapiens
  misc_feature (237)..(517): n is a, c, g, or t
  misc_feature (519)..(536): n is a, c, g, or t
ttggggagaggagaccaagaacaggggagaaaaagtgaagagtagctggagagatctcagaaaaagaaaacgttcagagttctttctcaaaagaaagcaaaggatgagaggagacaggatagaagggagtagttattctaaactgagccaggatttgaggagggaggagagaagctggtgaaaatacaccaggagcttcacattgaggaaggatggtttaaagaattactatgtcannnnnnnnnnnnnnnnnnnnnnnnnnnnnnnnnnnnnnnnnnnnnnnnnnnnnnnnnnnnnnnnnnnnnnnnnnnnnnnnnnnnnnnnnnnnnnnnnnnnnnnnnnnnnnnnnnnnnnnnnnnnnnnnnnnnnnnnnnnnnnnnnnnnnnnnnnnnnnnnnnnnnnnnnnnnnnnnnnnnnnnnnnnnnnnnnnnnnnnnnnnnnnnnnnnnnnnnnnnnnnnnnnnnnnnnnnnnnnnnnnnnnnnnnnnnnnnnnnnnnnnnnnnnnnnnnnnnnnnnngnnnnnnnnnnnnnnnnnnttactatatgttctggccccttcccctctagttaaacaggtgttcaaggagctggagtttctgggttggtataccacaggggggccacctgacccctcggacatccacgtccataagcaggtgtgtgagatcatcgagagccccctctttctgaagttgaaccctatgaccaagcacacagatcttcctgtcagcgtttttgagtctgtcattgatataatcaatggagaggccacaatgctgtttgctgagctgacctacactctggccacagaggaagcggaacgcattggtgtagaccacgtagcccgaatgacagcaacaggcagtggagagaactccactggtaatggagggattccttggaagtggggttggaaggtgtggccacatcccgtctc

SEQ ID NO: 180741 - DNA, 2073 bp, Homo Sapiens
  misc_feature (1145)..(1161): n is a, c, g, or t
  misc_feature (1727)..(1774): n is a, c, g, or t
ttggcagatttaaaatgaaatttttttcttaaatggtaggaagcaaaaagcttctaattaaatagcattgacattctgatatgagtttatcatagcaccattctaacatgagcttgaggtcctcaccaaagtcttgatgaaacatactttttaaagaaataattttttaaaaccccacttggctcaaagacattgtccagagctccagctttggacttttacctgtagtcagtcatacaattatctggggttatacttgttaagtcagtattaaaaaaaatgaaacaccctgattttgttcacttttgtttttatataaaagaatctttacagtcaacatgtacttctagatgctgtattgaaattgctggcagagtttattctatacaaaatgaacaatctggccccttgttttatttgtaaaggttcaatgtatctatgcctgcctacctcaatctgcaagggagtgtcagaaaggccccgcattcgccaagccgtgagttatcgctaacttttcagatgtgttaatgaatgtggaacaaaagcagttgtgtttaaaaggaaaaaggaccatcaaaataacttttattatagtagcaggcgtaaacactaaactgaatattccaaattgtgtcaaaaataacctactagagacgagcttctagaaaacctattgttgaactgctctgaagctatcattttaactataaattactgttgttaaaattttatataccctggttgcaaattagaatgttttaaaaatatctttaaccacgttaaaacaatttgaacaaaatcttaccccatctaaaaatgatagtgtttagttgaatttaagttaagctctttagtatatgaccatatgaaggggtaaagttttaatcttttttgttatttacatgtgaaaatacagaaactaagtgattgaatcacatcctacacgaaagtttttggagtgctccaggcatatcatgtgaaatacagaggtatttatatctcttttggcaccaatagttcttgcttcagtaattcaccagtaggttttcattcatcgataatatatcagtttaaggctaaaataaaacacctacatttcttagggcttatcattctatatagaaagaggaaacatcctaatgagnnnnnnnnnnnnnnnnnccaaagagattctaagcaaaaaattttaactaacatctatattttgttattggagctagttacctttctttttcttagattctttaacgttttgagtagatagccatatttgataagcaggttggatgcttctgttgcttaggaggtaggtgtattgtgttatatgaagacagaatgaatttaaatatacccagtttggcagtatgaaaaagctcagactacataaaacttggaggtatggaacctttggacgcattaaagttaacgtttcattaggcaatgtgcctttgtttgactggtgtgtaagtccttcttccaggtttgtacgctcttaaacgcgttattctaccctctctaactcctcccagcagcaaaagggagacacttcagctggaacaaaatagtggaagaaatggcgtctggggttcagtggggattcgcagtgtgtatgcaatgtttgcaagattattttttatgtttttcaattactgtaaataaaaatatatcaatgcttagtgtcaagaagggaacattgtataccagtataaactctcttagtgggtctnnnnnnnnnnnnnnnnnnnnnnnnnnnnnnnnnnnnnnnnnnnnnnnnaaggagttggactcgataatctttaaagtccattcctgctctaaaatcctatgcttttctgaagtactctatttaacagaatgcattgctttctcactttgactatttgaattatgtatgcagtacacttactgcaactgcatgttgtctaaaatagtttttctataggatgtatataaaaactaatccctcttgagctgatttataatgtgtgtatatagccacacataaaaagctagtaatagtagggctctcagaaaatactttccagttgtctaaccttgaatgttattaactct

SEQ ID NO: 180742 - DNA, 1545 bp, Homo Sapiens
ttggctaaaactgaacagtcatattttttattttcctgaaagtattacttattcaggttcttggtagtgcctcagatcctaattttgaatatgggttgagtgagataattatgtaaaagtgctgtgtcacctgtaaagaaccaaataaatgtaatttgttgaattttagatgttggaagtatggaagattccatgtttattctgattccataatatgtttggttttccgattgatttattatttacctttcttataatgaagttgggtatgggaatggagaaggtagtaaacagttatggctaatcaagatttattagtgtgagcatctttgtctttttttatttccccttgttggttgaataagctaactcagtatgagtagatttttagaagtggttatttaaattcatattaataattgagtagttctcttatctaagtcaggtgttggcaaactgttgccgataggccaaatctggccggtagcctgtacaaccagcaagctatggatggtttttacattctaaaaagaaaagaactgccacaaagattgcatggacctgcagtaccccagatagtcaccatctggcccctattctaagccatttaaaatttagataatacatttctttcactttttaaagctgttatctatgtattattttttatattaaaataccttttatgaattggagaaactctgtgttgtctctgagatgagagtagcctgtaagaaattattttagccttctgaccctctgctatttgtttttcacccatcttcttgttttaatgcccttatcaactatggtagtgctctgtaatttgtcagaaaactgactcctctgtcatgggtatattcgtctatatatcttcagctatcaagagcttaatatttatcctattctttaatttgggtttttgggtttcccaacatattttgctcctcaaattaatatttttcagatcctcaaaagaaagattcagagaccaagacttagcatcatgtgacagagacaggagttcaagagacagatcacctcgtgacagagatcggaaagataagaagcggtcctatgagagtgctaatggcagatcagaagacaggaggagctctgaagagcgcgaagcaggggagatctaactagctgtgtacatttcttcagtccttaagcttcctacggagttacgtactattgtttagttcacagctgttcagggtgacagtgagcagatccagacaccagatccagctaggctagatgtacagtatctaacttgatctgaactgaacctgttttccttgatgatgcctaaaactacatccatagtttctggtgaacctgtaatacagttctgaaagtacagttttatataataagatgctgatctctttattctttcaagtaagagtgctagtgaacaaattgtgttacttgccttgggattttttgaacgtttgtaaaatgctgtcttcctagtccaaacagctgcagctttgggcattttctttttaattattctttcctctgacttgtatcctt

SEQ ID NO: 180743 - DNA, 1343 bp, Homo Sapiens
  misc_feature (1170)..(1178): n is a, c, g, or t
actttgtacaaaaaagttggttctctttaaagaaaaggctttaataaatgagaaatatagtaattacaaaggtagaaacaaaatcaaatcttgtctggtagatccaggtccagagagcatcgcagacatcgatctcgctccatgtcacgtgaacgcaagaggagaactcgatccaaatctcgggagaaacgccatcgccacaggtcccgctccagcagccgtagccgcagccgtagccaccagagaagtcggcacagttctagagataggagcagagaacgatccaagaggaggtattgatgtgtcaatcagaggatatggagctaccttaatgttttagagttgtttatgtttacttatgttacttatgtttagagttcagattattggtttgaaacttttgcatctggtaatatgtacacatttatgtgtgggtgtacaacatttttctgtgattatatgggtagttttgaaagaatatacttatgagccagagcaagaaattggaaccaatatgtgtagaggttattgcttttctctgcttagtgtgtcttggaaaaaagttctttacaggtaaataattttaaataccaatacccttagtatggatcagcaaattaggggctctgagaagtcctttcattacaagagttgtttagctttgatttattgttttctaaacttatttgagctgggatgctttttcagagcagacacattctagtatattcttgttttatctgcactatagatatgtattgttacataccttcagcttggcaaggcagactaataaggaggttccaagacttcccttggtttaatgagaacattcaaaaggtgcaggcatagggtaaggtatgtttgaggacttgaatatctattaaggatagacaaaggattataatgtggtagaagagtttagcattcatagtctgtatagatcaaactgtcaaaacttctcaggtcacatgatggcccttaaaccaggtaatttctgtgtaacgtaagccatgtttaaaattgcttttttcttgacaactattcagaagtatatgtatgataaacattttttgagtgcctagtacctactagtcttacatattctgtggattactccacataaaatctataataaaatccacagaaagctgttaaaatctttcctannnnnnnnngactcaactttccattccctgaaatcactcacaagctgagtttgttaataggctctcaatattttatttcttatattctggccttgtttttagtatttcttaagtgattttaataataattaattgtatatgttttactgtactagacttagtaaacataagaaa

SEQ ID NO: 180744 - DNA, 911 bp, Homo Sapiens
ttgggttaacttaatattttaaaaattattcctcatatacattattaaaggcagatctgagagatgttttaaggtagaatttactggcttaatgcatctctagctacggaggaaagacagtatccaacacttcaaggcaagggccgttcacatagaggtaatatggaagtcataaaagtaaattaagggagagagggaggtaggaaatggaggattaaggactgattttgatgggatgcacaggagagaaagtggggagagtaaaaaggaataaaaaagaagtcaagaaggaggcagaatcagtctctaaagtatgataggaaccagaatagcatagtagtatatagactaacagaaggatgggtggtgaggtactgctgagaataacagttattgtgttgatgatattagtgaattcaaccagcagatattaattggatgcctcctatgggcccattactggggatacagggaagaattagatacatactctgtactcaaagagcagaaaatctactaggagtgaaagacttggaaataatatatgcaccaactttaaaaataatcaagagtaagatagaattttttagatttaattggtacctttaaaaacttaaaattgacttacggttcataaatgtgggcaatttaattgaatttattttcttttctagacaatggccaagaacaaattaagagggccgaagtccaggaatgtatttcacatagccagccaaaaaaactttaaggctaaaaacaaagcaaaaccagttaccactaatcttaagaagataaacattatgaatgaggaaaaagttaacagagtaaataaagcttttgtaaatgtacaaaggaacttgcacatttcgcaaaaagcatttcacttgagcctctgcagaaagaactgattc

SEQ ID NO: 180745 - DNA, 1553 bp, Homo Sapiens
  misc_feature (62)..(87): n is a, c, g, or t
  misc_feature (1254)..(1263): n is a, c, g, or t
ttggcagagatctcaaactaggtaagtcattgacgccaaaagctgagttttgtgttagagtnnnnnnnnnnnnnnnnnnnnnnnnnnacatattaatgttcttaattgggatctggtgtctgcaatcttgcttttgaatgggcgactttcatataacaattggctgcctggctccaaagtggatgtgtgtgtacttggttagaacgcattttcaaagggattcacattttgttttgtttatcatctagggaacttttttattaatgaagccatggaactaaaagttggggacttcggtctggcagccaggctagaacccttggaacacagaaggaggtaagagtcagaaagatgcatcctagtagacttttgtggagaccaaatatgccttcattattttgcatttaatgtttcagaggtccggtaataaaatctataaatcatagcaatgttaatttaaagaaatacttattaaatgcccactatggactagacagagcaccctgtgcctctaaattgattatgaaagcagtcaatgaagtcttttcttggcttaaaatgtataaaatgccacgacgtccctggctttagttggttaacaacactttgcatgtgggctaaaacaacgtgtgtgcatttttaaaaattaccaaaactcatttggtcagatctcaattgaattttcagatgccaaaagtcaaatgtttccaaatagaaattcagtatagattttaagattttgtttaagattttgtctcccatcaagtcatgtcaagagaaccaagtttaagtagtggaatagttcctaacacgatctcaatattttgtctttccagaacgatatgtggtaccccaaattatctctctcctgaagtcctcaacaaacaaggacatggctgtgaatcagacatttgggccctgggctgtgtaatgtaagtaaatgcagcagaataattaaaaagcaaattcggatttagattttaacacttgaaaagagttgctttatgaccattgctaaagatgtgtttctttgcacacaggtatacaatgttactagggaggcccccatttgaaactacaaatctcaaagaaacttataggtgcataagggaagcaaggtatacaatgccgtcctcattgctggctcctgccaagcacttaattgctagtatgttgtccaaaaacccagaggatcgtcccagtttggatgacatcattcgacatgacttttttttgcaggttggtgcactatcnnnnnnnnnnaattacctggtattgatcccagttacctgacaggttactgaaggctttttctaatattccacagggcttcactccggacagactgtcttctagctgttgtcatacagttccagatttccacttatcaagcccagctaagaatttctttaagaaagcagctgctgctctttttggtggcaaaaaagacaaagcaagatatattgacacacatagtaagttaacaagacttcttttcctttttcgtacccaatattatatttaaatttggtaaattagttaaaagagaattt

SEQ ID NO: 180746 - DNA, 1150 bp, Homo Sapiens
  misc_feature (160)..(174): n is a, c, g, or t
  misc_feature (216)..(303): n is a, c, g, or t
  misc_feature (347)..(408): n is a, c, g, or t
  misc_feature (521)..(720): n is a, c, g, or t
  misc_feature (722)..(738): n is a, c, g, or t
ttgggtcatggcagtgcttcagccccattggccatctcaggtgctaggcaagggagctgaagtaggaattcagtcatcttgatgaggctgccagagctgatggaaagaaagggagtctgagactcagcaggcacatggaagatgaataaagttgaggttnnnnnnnnnnnnnnngcagagactctagtcttagactgcttgggctcaaatccctgnnnnnnnnnnnnnnnnnnnnnnnnnnnnnnnnnnnnnnnnnnnnnnnnnnnnnnnnnnnnnnnnnnnnnnnnnnnnnnnnnnnnnnnnggtacccactttaaggtgtttggagaattaagtgtgttaatttnnnnnnnnnnnnnnnnnnnnnnnnnnnnnnnnnnnnnnnnnnnnnnnnnnnnnnnnnnnnnnatccttggcctttgacaatcaagattaccaccagcccccttggctggtgaagtgaaaccagttgacagtcaccccccaccccacctttgtcatacaagcctcaaaaggccttnnnnnnnnnnnnnnnnnnnnnnnnnnnnnnnnnnnnnnnnnnnnnnnnnnnnnnnnnnnnnnnnnnnnnnnnnnnnnnnnnnnnnnnnnnnnnnnnnnnnnnnnnnnnnnnnnnnnnnnnnnnnnnnnnnnnnnnnnnnnnnnnnnnnnnnnnnnnnnnnnnnnnnnnnnnnnnnnnnnnnnnnnnnnnnnnnnnnnnnntnnnnnnnnnnnnnnnnngtcctccttaaagacatgggctttctagacagggttcttctgctgaagcggctttccttctgccagaatctcaggaactcctggatctgcctttccagaaccagcttctctctccctgctctgccttcagactgccctctttctacctctccctctagaactacatctcttctggctgggtttatagcgtggggctgggggaggcccagtgggactggctgagtggagccagccgtgtgacggaggcggccctcttccagttgggcactgccaccctctcgtggtccaagcagcacatgagcagaaccaggtgctcaacaccaacagccggtacctgcatgacacatcgtggactatgcgcagaggctgtcagagaccctgccggagcagctctgtgtgttctatttcctga

SEQ ID NO: 180747 - DNA, 353 bp, Homo Sapiens
tgaccttgtgcaggttcattgcaggaacacaacttcccagttccaccatgagaggtagaccagaatgcttcagagagtcctcccagatataaaaatgagcactgtttttcctagaaaaatatctcccacctcagcatgctcatgcttttcaaggatgattcatcccaatgagggagaacagctatgaaaattaccccaaatatcactattttagataccaccgatctcagatcaaataccagtaaggtggaattcgttcatgtccacttagtttcttagatcatagactctccgttgtggaaacttctttaggtcaaggtgcataagacaccaaaatagaatcttaattccaa

SEQ ID NO: 180748 - DNA, 948 bp, Homo Sapiens
ttgggattcttctactcaaaacaaaagagccaacagaacagaagaaaatgtttcagacggttccccaaatgccggttctgtggagcagacgcccaagaagcctggcctcagaagacgtcaaacgtaaacagctcggtgggttgatcactaaaggagcacgcactggaacccggggccttcagacctcacgatacctgatcttactggttgctggcaaattaaaagcttatggggttttgttttgtttatacttcgtgaggtcaaaaaagtagcaatggggaaggctggggatacggtaattcctcagagtttctatgcccagagatactttctcttcaaactgttgaccagagcagctacttgtaacccaggccccatcgggtaggaaggtcgtttccctgtgagtcccactaaaacgtgttgggagcaataggttctttgcccatccgaacaagaactagggtactccctcagtccgaattaatgagaattaatttcctagaggttcagcttgagtcggtaacagattttgagccatacatggaaaaatggcaaatacatgattaagtttcaattttgagggggaatgtttggtagaaattgctcatctttggttatgcaagggattagagatgtgaataggatggtatgttgtgttctttgacattttaataaactgtcactttccctgttgtctcctaagtttggagagagaaggaaccagtatttgcaaaaaccaaatggaaagataaaaaagttactaaagtttctacagaatttctggtaacactgaagttgcaaagcagaagttaaattaactcttgtcagtaagcaatccaggaacacgtcagccagtgtatgctaattgtgccgtatagggtgatttggatatttgtacgggaatgggtagtaaatatcaagactggtgaccgtaggtcagctcagcac

SEQ ID NO: 180749 - DNA, 104 bp, Homo Sapiens
ctttagcctggggctgtgtgtcaaggttaggacagctattgatgtgtgcatgcgtgcctgtatagggcaccagggaaggtagcaagtagaaatttagatcccaa

SEQ ID NO: 180750 - DNA, 1489 bp, Homo Sapiens
  misc_feature (252)..(599): n is a, c, g, or t
ttggcttattttgaagccctacttggaaaacttgttcagtaagatctgtatctttagaagtgaattgtatgggacatgaggagggacaaagaggagcaggtgctattcaagagctagagacagagtctgaattatattctctctttgctatgatctaaatttttacttgctaccttccctggtgccctatacaggcacgcatgcacacatcaatagctgtcctaaccttgacacacagccacaggctaaagnnnnnnnnnnnnnnnnnnnnnnnnnnnnnnnnnnnnnnnnnnnnnnnnnnnnnnnnnnnnnnnnnnnnnnnnnnnnnnnnnnnnnnnnnnnnnnnnnnnnnnnnnnnnnnnnnnnnnnnnnnnnnnnnnnnnnnnnnnnnnnnnnnnnnnnnnnnnnnnnnnnnnnnnnnnnnnnnnnnnnnnnnnnnnnnnnnnnnnnnnnnnnnnnnnnnnnnnnnnnnnnnnnnnnnnnnnnnnnnnnnnnnnnnnnnnnnnnnnnnnnnnnnnnnnnnnnnnnnnnnnnnnnnnnnnnnnnnnnnnnnnnnnnnnnnnnnnnnnnnnnnnnnnnnnnnnnnnnnnnnnnnnnnngtctaaagcaatgtttttgtttctaaataagttaaatatgcaagaattgttgaagccaagctgagagtgcaatctttgaatattgcacttaaggaattgacctacaactataaaattgatattgttttatatttgttaagtaagctaacaggttttacaaatgtttttagtcattccccacctccccacccaccaccaggttaatatacacgggttctgatacataacaatactttaacatagtaacgtataaaatagcaaagaaatataaaataaggtatattaaatattttagtacttatttgaattttagttgtgtattgattaagctactatatgctaggcactgccctaggtggtgagtagataagtagatagcaggaataaaatagataagacctttgctttcaagacaacactcagttgctaaacccatttccttttctttaggatattttcattgtctccgaattttagagctgaaaagtgccttagagatcatctagttcaacctctccgttcaaatggagaacctgagccactaagattcacaggagagtaagataattgagcaaacaactccaagtaatgacagaaaattataggagaatcagtacaaattgtgagaatttactatgttgttagcatcctaagtatgagtttagaaaaggtagaagttataagaaaagttaaattgttttaatatgaatggattccactgttaccttcaagataaaatgaagacatacttttttctttagtattatagttaaacgaatattgtatcctgtagtgactaaattcataaatattttttctgcttatagacttgagtttcaaaagcagctgtacagatgatgctgttaatgagtgtttacgtagtgttgatt

SEQ ID NO: 180751 - DNA, 924 bp, Homo Sapiens
ttggctaaaaattgtcatcacagcaatcaaggacccgtgtcatctgcgtactttaccttgggaaccactgtagtagaaactgttaggtgctatgtattagaactgtgcctgcaatttgtgtatgtgccactaggtgacaaatgtctcttcctgcttaggccgattaccatttctccaggcacaggtaactatagaaagcaagatttgtcacatggttcattttggacgttcatcactacattagccatgtatcttggctaaagaccaaatatgactaatttttatatatcaagagtaactactaataaatcaattaattaaacagattgtagttgcacccaaataaagtcattcataagtagaaataacacccttgtacttctccctaaattctttggggaaattatgctctgacatgaaactgtattgctagatatagggaattcccacacacttgtgatattcaaaacattatttgaaaccgggaagcggaaatacccagagtgaatagagacctcagcttaagatcacaaatacaacatgaggagaagtaaatgaatattgtttacctatttcctggctgcatttggcatttttcacacacatattttaaatttaactctcataacagagactgttgcttgaaaccaagatgaaataacagggatcagatttactcctctacctgaaacaacttaaaaatggggtacaataaaggtaacatgtgttttccaatattggacatcagggagtacaagtcagtgatcactgaaagaaagaaacaaaatcagataagccccacaaattgcctctacttattactggaagagttttcaagttacagtatagggagggaggggggattcaggcaaagtccagtaatttctctgaattgagatagaattggaagttcagagagaccaa

SEQ ID NO: 180752 - DNA, 772 bp, Homo Sapiens
aaaattagtgagctacagctacaatcatcagcatggatggatctcaaaaataaaatgttaaattaaaagaaacaagtcgcagaagaatatgtacagtatgcttttatttatgtcaagttcagaaacaatccaaactaaacaatgcaatttttaggggcataaataggtagtaatgagcataaagaaaagttaggaagggattagcaaagttcagaatcgtggatagtttcagggaaggagagggacaaattgcttctggaatatggtacctgtaaagtgttatttctcaacctggatactagatctaaagtaatcccttttctttttcttaaactgaatgcatatatctttatacattcttctgtatgcctgctatgttttatagtaaaaaaaagttgtataacatttgcctataaaatatgttttataacatttgtctgaattttccggacaaaatttttttctgaattacaagaataattatttcagtttcctcttctggggcttgaaaaagagagtcacagaacttgaggtgttccctattacaaaattcaaataagtacttgtatgcacaatccttgtttatttagcaataggttttaattaggcaatgtaggttctcagagtcactcaaagtatactcgaaaattatatcatagcccttttattcttaattgcattcatgctatccaagaaataacactgtagagcagtgctgtccaatagaaatatatcataagccaactatgtaatttattctttctagtagcca

SEQ ID NO: 180753 - DNA, 1140 bp, Homo Sapiens
ttggcatttgtccaatatatcttagactcatacaaaagtgtaccattttcttttgtacagtactctgttctagttattatttctccaaatgctacataccttaccaggcatgtctataaatacttacatttgttgcaacatttttctggaaatctgtcatttggaatgtttaactagatagtgtgaatgtaaaatgctcctagtttattcctgatgctagtcaatcatcaagcacttactgaacttattgagcatggggagaaaaatagtgagctgcggttgtgctccctgggggtgtcttactggctgccacggtgcatactggagggaaaccaagtgccgaacaatgtagtgtggatattaaatagtaatgggaggatgaaggcttggggagtcttgtgcatcctggaagatggacacttggggcttcaagctctttgaaggatgggtgttttcaatgttaaaacttgtttgaaaggccttgccgaaggaagtccttgaagtagctttcttgtctgttgaggtatttctcactacctgaatcttctacagcattcctgcagactggggacatcgaacccattaaatgaagccattgtggttttgaacagttccatttttcgggccgccttccttttattaagctgaaatctgtatcacttcaccttccatacattgttctgatctcgtcccttggagacttagaggattcttgccataacgtcttcctcatggaggctcttcatgtgggcctgtgtagttggcacaccccctgcctgggcttctggctataggctgctcaggcctctgcttcctgcaacagccgttctgggtgaggtcttgtggacctttatcattcggccctttgtaaaaattgatgtctacaaagaggagaaagtggcaacaatggccccagccgtgtcccccagccagggcggcccccctcccctgcccagccctccttacccagcaggcaggcaggtatgcatgcatgtgtgttaacttagtgcctcctgggtgtgcatcagtgcacagttcctagactaacataaagtcacatataggttgtgtttgttctgttgagttgagcatgtctttatcccacctctcatttcccacaatgagaaagcattaatgttc

SEQ ID NO: 180754 - DNA, 832 bp, Homo Sapiens
ctatatgcttattctttggattgctaaccatctaactacccaaatacttaacagccttggcttttaatttcaaaatttaatagacacatatgcaattgatttgtcccatataaactttattttacagaaaatatttaaagttttatgtaatagctattaactctcttaaatggggtttatatggctcgatttggtgctttctttttatgttaaacttctctagctgtcagctaaaatgttaaaaaagtcgaaaatattttagggtattgtgtgaagttttacagtaggtatttttgagttttgtttgaaatctgtgttgtctgtgaattatttttaaatagggattcttagtctactaacgatatttgaattataatgtgcctttgcagtctttttaaaggagatttcatttgtcacctctatgcctctatcatcttaattttttacaaatatttaaaaattattaatgtgaagttattgatggtagacaaagtagtaacttctttcaaactactttggcataacaagccaacactgtacagctctttgagctataagcaattttacatgttcagatgagaacctttagttttaaccaaaagtataacatctactaaagttcttccacaaaatactttttaaaataaaacttgtcaactgatttacgattttcttatattatgtatatagtgaggttatatgattgaatgctttttgaacaatggttttagtaaaacaaatactttattattgttcacataaacatttcttactaagcaataatgtactatgttgtgtgaatttctattgttaaaaaatgaaatgttgatta

SEQ ID NO: 180755 - DNA, 1038 bp, Homo Sapiens
ttggattggaccgatttgggatctcgattacatctgttaacttgtttttgccataaattgtaacacaatcacaggagtgacatctcctcagtagctttgtctacactcaggaggaagtgattatataagagcaaagatcactgggggtcatcttaggattctgtctaccataatattataaagacacagtaattaaaagagtataacagatttctgcttctgtctgttagaataaatcatatcagactaaccctgcctccataaacaaacgtaaaattgttttcagcagtgtacaacaggcagtccaagagaaaacttaagggggaagccccatgatttcctagttgtttggggagaatttctcagcagctgcatagtgagctagagtccactcagggcagggcagctcactgagctgagaaggcagagatcagagttcaagacggctgaagcaactgcaatctgcagggcagggcaccagtgaggagacagctgatcaaaggtgcagctctcaaagtctatgtggggttccatgtgcatacttatcaaggagtggactctacctgcacaaggagaagactaacagatttaacagaggggtggctgctatgaaattgagtttggaccagaggtacttgaggtggaggagggttggggaatgtatgatggagtttctgccatccatggtgggaagaactcatgcacacctcattagcacccaggtatccaactgagacactagaatggatgtgctttaggaataagtgtcacacttttcaataaggcctattgtagaccaacctgctaaagcctaaaagcaaaccctgacaaattcacaaaggggtggattggtgattgagtcctgccaaattagagggtcttgggaaatgctgtgggctttccatgaatccgttgtaataaaacataaaccagtccacataagtccaaagtgatcagacagtaattttactgcccactagaacaagattaattcacacaatcaatgacacatgttagccaggtcgatattaagcaaaa

SEQ ID NO: 180756 - DNA, 930 bp, Homo Sapiens
ttggcaaaaaagcattttattttgaccactgaagacaaatttagctaattttttaatacaaaaaagaagaaaatgtgcagagtcagtgtctggttatgtgataagtcagacaagagagcaccatctaagtcataatgaaaggatgtttctttccataaactgttcctggagaacacaaaggatagagaattttattaacgctatttaccaggattatctatgtgcttcatctttccccacgtcttttctttgtcctatacattttttccacttgagttttctgggttgtattttgtataataaatgggtaaacataactacagtattttgctgagttctgtgagcagctctataaaattattgaacttgagagatttatgggagtcctgaatttttaaacagtagctcaaaagcatagatggacctatagggtttgtgactggtgtctgcagtgaagacagtgttgtgagattgagccctggatcagggtctgtgctgactcttaagtggggtcataattcaaattttagacaatgtgttggttttgaagaattgcttggtgttcagcaaacattacagttttggtgccagaagaaagacatctcagaggcctggcctggaatggaactctgggcgtctgggaatgagagactctgctctcctgtacacaggctgtcacactgcccattgtcctgggatttgaggtctcctcccactcccactgtgagagaggactgaaaacttagaggaaaggagctcttatagcagacctccttttcccaccactgccacctcaagatttccacccactcacaaacatacccactagacattgatgtgttcacacctcccaggactaggcaccaccttagaatttcaccacagcatttttcatcctggtgtttcttgccaaaaacccacaaaagtgtc

SEQ ID NO: 180757 - DNA, 788 bp, Homo Sapiens
actttgtacaaaaaagttggcaaataggtcatatgcatctagctcacccctcagtgctgttttgttttgaatttgtacatgtttactcctgatgccttgtagttatgatgatgtgttcttattttattctgtgcatacaagttctcagctcgctttttagggaaaatgaccatgtcttcctttcctataaattcctttctatctatcaagtcctcaacagagaataggtacccataaatatgtgattgttagtttctttgcctcagttgtagtctgatccttacagcttttaaacaacagtagagttcaccgtcaagaactaaggatggttggcaggcagatagaaaggtagcaagttgacccaactatctctggggaagtgggaacaaagaaaggttacatcagcactgtcatcacatagctctatagttctaggcctgcaggctcaatcaagtagccttgtataagattctctggaggaggtgctgaaagttgcttatacttgctatggaatttgattttacttcggatatctttttaccataggtacttctccctccaagccacacatcctcttggatttgatgatgttgtacgattagaaattgaatccaatatctgcagggaaggtgggccactccccaactgtttcacaactccattacgtcaggcctggacaaccatggagaagtaacccagaacttcaaacgtatcaaactacaagaagttttattggtagaactcataaaatataagtgggaaaacctagcagaatagcacagtgggaa

SEQ ID NO: 180758 - DNA, 747 bp, Homo Sapiens
  misc_feature (310)..(351): n is a, c, g, or t
ttggctaaactttaataaaatgtatctttaaatgtatgtattattcaatcctttggaatgttatatttttggaaatcatagctttttatttccaaggcccctaaaaactgcacaaaatagatgctgctttctataatctattttaataataataaaacaatgattctgttaccttgactgggggtggaacactacattctttttagagtctgattttatggattggaatattgggatatctttctttcctttatttatttgaaataattagtgtagtgattacaaaacagtcataaatttttaaaggccnnnnnnnnnnnnnnnnnnnnnnnnnnnnnnnnnnnnnnnnnnaagtcctttatgtaacatccagataatgtgatactgtctctttgaagcaccctgtaaaccttttagagatttgaagttgggtcttgactcttaatgcatgtggacagtcgcgagcgtttatgctgtcggtgtgtctgtgttggacaaaacaatctgtaatctacagcaaagtacattctacattccgttcatggggcacacccaggggaataagaataaaatgctattatgactaagttgtaaacctatgcacatcccttgcattttgggcaactttatataaaaaaagaaactgatttttattaataataatcatgtactgaaatgtgtttgtaattttgtctcaatttaatttgttgtaatgtggggtggggggaattgctggtttccccattt

SEQ ID NO: 180759 - DNA, 1482 bp, Homo Sapiens
  misc_feature (200)..(249): n is a, c, g, or t
ttggctcaaatgttatatcaaaatcacttgaagcacttatttctagccctacccaagacctgaactcctcagaagatatcaaaagcatctcatttttaactggctaccattacgtttctgatacatacccatattttgaaaataaagctctaaagagccagaatttgaaagtaaaaaactatcttatgcaggtttcttannnnnnnnnnnnnnnnnnnnnnnnnnnnnnnnnnnnnnnnnnnnnnnnnnaatctgaaactttttgagtgccgatatgatgccgtaagtggaaaattccacacctgcttcatgtgatgggttgcataaagttattaaaaatgttatataaaattaccttcaggctatgtgtagaagatgtatatgaaacataaatgaattttgtgtttagacttgggtcccatccctaagatatctcattacgtatatgcaaatattacgaatttcaaaaaacaaatccgaaatctgaaacatttctgatcccaagcatttcagataaggaatattcaacgtgtacttgaaaataacagatagaagtttaaaaaattattgttcagtctttgttatacttacagacttctatgcatttggcctaaaataatcagattagtgcagctttgaaaatgtaagatatggcctttccccccttactttcacacactatctcatactccttcaaataaagggaatacaaataaattgttttatatgctggctgaatagctaacaaaatatttgtgttttgatcaaaattaaagcattcaaagaaacctctcccatctccaagaaagccattctggtttcttcaccatctttgagactaaaggccttgaaatattttctgggtatcctgcaagatttttcaagatatacaacctagttttcccaggtattaaggcaacagtctagttctgatgcagagagaaattttaatccagagcactcatgagtgacacatggtcccagaaatgggacagatatggttctgtaatgagacctataccaacaaacaggatgaaaagtttgtctcccacctgctgacatttcttcacttttcagacagcaccagttgcccttgaagcagaaaacagaggtgaaatgaaactagctctccagtatgtcccagagccagtccctggtaaaaagcttcctacaactggagaagtgcacatctgggtgaaggaatgccttgatctaccactgctaaggggaagtcatctaaattcttttgttaaatgtaccatccttccagatacaagtaggaaaagtcgccagaagacaagagctgtagggaaaaccaccaaccctatcttcaaccacactatggtgtatgatgggttcaggcctgaagatctgatggaagcctgtgtagagcttactgtctgggaccattacaaattaaccaaccaatttttgggaggtcttcgtattggctttggaacaggtaaaagttatgggactgaa

SEQ ID NO: 180760 - DNA, 1227 bp, Homo Sapiens
  misc_feature (260)..(269): n is a, c, g, or t
ttggcatatatctaagtagcatagatgatattatttatgattttccctacacattatctttatagatgtcagctggtaagatttttttggctcaagtcagcctcattctaagaccaagtcagtcagtcacattctgagaccattcacagaccttcttgccttgtgttgccacttgtattgtcttatattgccacttacaagaggcatggtaggttaaagttcatttaattgttatcataaatgaaatgtaagtgattgtnnnnnnnnnnttacataatttatttccaaagtcaaatctagcaattgggagaggtttctcttctttttctattctgtataacacaaatgtcttaggctatcacagctaatcaggatagcctgtgcttgcaaattttaaaggaatcctcaaatgattactagcatattaagcacttactaaatgcaggcatggagctaagtgttttgcatatgttatttaattctaattttagccttatgaaatcagcatcaccattcccattttatagatgaagaagcaagtgtccgtaaggttgagtaactttccctaaaatgcatacccaggaggtagcagagtcaggattcaaaccaagtatagctgactctaggtccagagtcttttcagcatgatgtgttcctaccccctaccccactgtctgccaaaccaccaccaccactatctctccacatcttttcctccattgtcaatctttaatagctgtgttgttatgtattgaaagcatgaatgttcactatcttactaaaatgctcccacaatcatgcctctttttgtagtaccatccttccagatacaagtaggaaaagtcgccagaagacaagagctgtagggaaaaccaccaaccctatcttcaaccacactatggtgtatgatgggttcaggcctgaagatctgatggaagcctgtgtagagcttactgtctgggaccattacaaattaaccaaccaatttttgggaggtcttcgtattggctttggaacaggtaaaagttatgggactgaagtggactggatggactctacttcagaggaagttgctctctgggagaagatggtaaactcccccaatacttggattgaagcaacactgcctctcataatgcttttgattgccaagatttccaaatgagcccaaattccactggctcctccactgagaactactaaaccggtggaatctgatcttgaaaa

SEQ ID NO: 180761 - DNA, 345 bp, Homo Sapiens
  misc_feature (56)..(64): n is a, c, g, or t
ttggagcgacttcttgcttatgggaagtcctcaagtgagtgatgttcaccatgtannnnnnnnnctcttaggacagactaattctgaaaataccgaaggaaaagtagctctatgttctcaccccggttttcctgcgtgtgtgcccttgggtgcgatgcctcccccagcgctctgtggtcgccggtgccagggccccctctggtttggcagggcctggctgcctttgctccctgcagtgagtcttttggtgttttcatgcacggcttgtgcttctggatctgaggcctctcgtgttcacgcggacacttccttccttaagaagacgcctaaaagaggaagttggaa

SEQ ID NO: 180762 - DNA, 1340 bp, Homo Sapiens
ttggctttgttcattgctgtatccacagacatgactcattgtagatactgacattgttaaatgaatgaatttctcaaaagcggtgtgaataatcataatatgaaagtaaataaggaaatcagctctctaaggcaatgctattctttttatactctcaggatagaagatcttggcgttgtggtagattgccttcctgtgctcaccaattggtaaaaacaatatttttcagaaaaaaaataagattaaaggaggtcaaattatggcccatccatatttttataacttggtatttattttagtttacaggaagaaaaacaatatatctcacttggctgctgtgttgacttgttgcctctagtaaagtcactacttaaaagcaaatttgaagagtaagtgctaatctgaatcttgattcatttttctttttcagcatccttgattttgtgctttgtgagtacatagtagattgggctccatgagacatgcaaggtttctgttttcaagaagctaatagtacaattaggaaaagaatatgaaatgactaaaggacaattataaaagcatctctaaacaaattacatgaaatatacttttgtgtaatagatcatgaaggtaacaattttttaaaagggaagggaccaatgtgtgtgtgtgttttttgggagggaaagtatcatcttttataagaagggttcttagatgaaaacacttgaattttgtaacaaaatgtcatttcagatatgttatagttggtttaaactggcttcaagcagtcattaaaaggtggtggtcagaactatcatccaaaacagaaattataaatgatgggtgagtatacctttaaagataaactcatgctgaaattttcttcaggaaagcagcttgattaaactaggtaataattttatcccattatcatcagtgtatggtatttattctttttatattcagagagatactaacttaagagactgttcatttgtgaaaaccacacctggaaattgaattccagagcctactaacctcctgtatctcttcttctggcacaaccctacccttcattttagaagaaaaacacaatagtggtttaattctcatattcattatgagtaagggaggaaaaagagatgcccacagtgtaataaggaatggaggcaccctgcggggtcctttacctagacattaacctgagagtccggtgttgatgtttacagttctaaaaactgtattattactgccttgatgtgaaaattcgtgggtattctaccagagtatagccagattatcatgaaaccacagaaaaatatctcccaacagtttccttaaagtccataattttg

SEQ ID NO: 180763 - DNA, 2213 bp, Homo Sapiens
actttgtacaaaaaagttgggtactttccaccctttttcacatcatggtacacagagaaaattatgaaatttgtcacaacacactagggcaagcagatgaagctgctcttgtccaaatgagactgccaaggagctctagctattccagaccctgtccagccatccttcaggatgaggggattagaacaaatgtggatgagaacaggatgagaacaaatgtgcctagatatttgttggaatatctaggttggaatatctgaggttggaatcctcagccaaactacagaagtctacagtgtggtctgagctttaagagtttagactggcatacatgagttaattataagcatattatagttaattataagcatacctgggtgagttagaaaaagttgttgacattgaacatctctagaaacactaaagctcttacaggaagtagttttgagtttaaggtgtataattttacaaatgtaacaatattgatgacaaggtaaagtccattgaacaagggaaaattaagaagtggaagatcaaaaggagtatagtcagaagaaggggcacttatttaatggaatcagacttggggacaacttagagttttggaatatattttgctaaataagtgttctgaggtttataatatctttagacttggagtcagagttagttttaatgtgacttcttcctaggaatacagtctaatcctagacttatttaaggttttcacttctaaactcgtgtattcagtaggtttggccattgctagaatgtaaattaagcgtcccttatgaaaattagtaactgatagaacactatatttggtttctaattagtagttattcttcactgcagcaaactcaaatttagaatttagaaatggcacagagactcacccttataagagttgctattttctaaaatgtaaaagtagtagagaagtacttgaatatataacagtaactcctgtgaaataaccttggatttttattaccaaataaactctcagtggaatctagtcactattagaatttatacttaactgtgaagttcaaactggaaatcaacctcatgggtttaaagggagtataaattcatttatgctgataaaacattataaacgatgtctatcattgttactttattgtcatgtacatgtattttcctttgagaacacagcaaatgagcatagcttacaaacccaaaactctaccttaaaaatgggatataattagaggataataatgtcagacctcctgtccagaatgctcttaaaggaattccccttagagtcaagcccagctagtttaatgtagtcagaaatgcttatttccaaattctcaatttaaaataaagcagaatttaaaagtgggattgttacatcatgatagtgctttagggtaattgagtatttcatattaattggtattggtaagaatagcatttctgctgggtattaacatatccatatattattctctcatctgtgatcatatacatgttattaatttaagcccccatatttttgtctcctttctcatctctttcattagtgagttactgttttctggtatttttaaaagcagttatcaaattataaaaattttcagcaacttttctattttgagctaagtgcatctccttctagaatgagtctgtgaacttcttttagaattcccttaagaggaaattattatctatttaaaattctatagtatagttaacagtctcaacttcttaaatcaattattaccctttattataatgaaacttccttagtgtaaagttaggttctcaattaacaataaatatctcttcttaagtttaaggtagtgatgatgagcacaagtgctcttcaggtagtcattactgttaccttattctttaagctatcatctttcatccattcagtctttaaaactactagatgagttaaaatccaactgactctgaaaaaaaatcttctcttttttcaaaatccaccaacttgtgatgattctcctgcttttcatgtttaagttcttatctaatttcaatttgttggtaccctggtgctataggcaagtattcatgttgaagttagtattaagaccaaaattataatgcttttcttaatgggggaaccctaaggctactcactcagtccattgaggggataagagagatggctcattcccatccagttttgtttacaaacgatgttgctcaaattt

SEQ ID NO: 180764 - DNA, 1124 bp, Homo Sapiens
gttacacctaggtgtgaattttggcacaaaggagtgacaaacttatagttaaaagctgaataacttcagtgtggtataaaacgtggtttttaggctatgtttgtgattgctgaaaagaattctagtttacctcaaaatccttctctttccccaaattaagtgcctggccagctgtcataaattacatattccttttggtttttttaaaggttacatgttcaagagtgaaaataagatgttctgtctgaaggctaccatgccggatctgtaaatgaacctgttaaatgctgtatttgctccaacggcttactatagaatgttacttaatacaatatcatacttattacaatttttactataggagtgtaataggtaaaattaatctctattttagtgggcccatgtttagtctttcaccatcctttaaactgctgtgaatttttttgtcatgacttgaaagcaaggatagagaaacactttagagatatgtggggtttttttaccattccagagcttgtgagcataatcatatttgctttatatttatagtcatgaactcctaagttggcagctacaaccaagaaccaaaaaatggtgcgttctgcttcttgtaattcatctctgctaataaattataagaagcaaggaaaattagggaaaatattttatttggatggtttctataaacaagggactataattcttgtacattatttttcatctttgctgtttctttgagcagtctaatgtgccacacaattatctaaggtatttgttttctataagaattgttttaaaagtattcttgttaccagagtagttgtattatatttcaaaacgtaagatgatttttaaaagcctgagtactgacctaagatggaattgtatgaactctgctctggagggaggggaggatgtccgtggaagttgtaagacttttatttttttgtgccatcaaatataggtaaaaataattgtgcaattctgctgtttaaacaggaactattggcctccttggccctaaatggaagggccgatattttaagttgattattttattgtaaattaatccaacctagttctttttaatttggttgaatgttttttcttgttaaatgatgttt

SEQ ID NO: 180765 - DNA, 1588 bp, Homo Sapiens
ttggattcattttccccttcttactaggggtggtgggggaggagaagctggtacaggagaaatgtcttttatttcccctctataacaatggtataattccaaatcttatagaccatcacacagttctgttagttgattgttttccgtggattctaccctgccaggagacacaataaataactttttgaaacttcattcttcagtcctgggagtttttacaaataaaaggacacacatgttgagacaaattacatgcttgaaaatctgtcactaacatcaatttcatgttaaaaagtactaagcaactattacagtggcatttcttttgttgttggggaaaataatgtgaatagctatgctaattcagagataattttcaaatttcgtgactaaataaaaaagctaagagtagttcactaggtaatgtttgggagggagttgttggttttgttgatttattatatcttgactggtatgattgaaatgaattaaatgttagacgtgcttaacattttatatgctatatatcatcataatagcaaagtgcacagatcacattattgagtgcctttggattttaaaaataaagattgctattcagatgaataccatttcattattgcctgcactactctgtcaaattaaaaaatataatagctatctttattctcgttttaaagcatgataatcatcaaaatgttgaagtttatcacagttctacattaaaaataagtcatttttgtaggtgagttatccaatacagcaaaggccatcaaagagaaagccaatactttcatggagagctcagagccttaatagatcccagcagcaatgcttcaaccattcccaactccatgttccttgctagatgctcctcaccccaaactcctgcaaatttcaagaatttctgtgtatgtgtgtgttaagggaggagttttaaagtatctctgtattcaacaagatacgtcagcttgtaagcagcagaaacctacttaaactagcttacatgagaaaataacattataaagacataggagtgtttctacaccaagaactggaggtattgtttggtttcatgaaggattaaaatctgtaattcaaaagtagactcaggcagctgcacatcaatctgtgtcttttctctggtactgtggactctatcctctctgacttgctttgttcctgggcatcattcttgctctggaaaacacactttccctgctcatttttttattttaatgcttaggttcaatctgctcatttttccctacagcagaagacagcttactgtgttccagcaaacaacagagcctgaccagcctctctgaatatggggcccccttctcactcacaagtattcttaacctggggtccatgtggggtttgtgaatttggataggattttaaaattacattttcatttccactaatctctaaccgaaattcagtcttttcttcaactgtgaatgtaggcagcaagccacagtggaacttgcagaacctataaatttgtcactgtgattgatgttataatgttacacctagatcttctttcagaaatgaggacttaccccagctactatgaaag

SEQ ID NO: 180766 - DNA, 930 bp, Homo Sapiens
ccaattacagacgtgtatttctgttagaaaaatacatattataactaaagaacatgtaaatagaggcacttcaataagctaagtgtttgcagttatgagcatcacccaccaatttctagtgtcaggtttcagtgagcccattcctctctattcataacaaaagttatgatatgattacagaatttagggaacatcagagcaaatgaggggcaggtcataaaaaataatgaagcctcattgcatcccctatcactatgctgaaatgagaaaaaataattcgagggttgaattccaaaatacttactgaaatagggtaactaggttaagtgaaatcctttagggccaaaacatttctcatgttaaattagtctgaaaatcatatgacatagtagtatgatgataaaaactaggaagtacaacttgaatgatattttgaccacatccatgcagggtgctaacactgtgacatcattaactgatatcatttcagctctctgcctggctcattatgcatcactatatctcatcaatatgaatcatattgataatgaaggtgttgaaacaaatgaagcaggcgtttatatattaactgtgtgtttagtgcgtatagaacatgggttcacattcactaatattatgtgtattcatacacatgcacaaaaccttttgggggtgaaagcacaggaaaaacaaggcatcctgatctagttcataaaagagaatgcagaaatattttaaaaaggaaagacctggagtttaaagccataaaagcaagttattattcaaatagtctggaaaatcaaggttgatttaatttgtattgcaccttaattattggagaaagacaatactgacttctgaacacagaatgaaatgagcaatgtaaatgactggtccttcatagagaagtcttatgtggaatttgtccaa

SEQ ID NO: 180767 - DNA, 1272 bp, Homo Sapiens
ccacctttgtacaaaaaagttggcttttagctactttaaacataacttctcttatttaaaaacaagaaagggagactaaacatctgcttaacttgtacacattttcagaattccttttaaaagtccagttaaagatgtttccctagaagttggagactgttaacaacttccataaaatagatccaggtttttcagttccctgaagcagcattcagtagcatctatataaataaaggcaccttctgagaataaaactattttatggagtgtgtgaacacacttgttctgtcacctgggttcatcttgttgtgaagcacattaggtccaggtccttccctctgggagtctgactgtgaaactctttaacccaacaactccaccaccccctgtacataagacatgcttcccagagtgagatttttgaaatccccttttcatccagaactatatttacccacctattgtaactattcaaatagagcaaaattaggaggcttgataaatactaagaatttagtaccccagaaattatttattattttccctgtagtccacaattagtgataacgaatcctatttttgttaactgtgacataactttgatgtcatatgttgtcctatgtggttcttcctaagtaaactctgtactgattatatactgacttagcaatgtggccttggaatgctgagcaaaatgtggatgtactggttgtaaatgtttatatattgtacagtacctttatatatacacttgaggttctgattagagaaagatctgtaaattgctcattattttttatatagatatttaaaaaaaacagtttatggcctgcatttcttttactgtcacattggtttaatgttgctttctaatggtggagctaggtcccatcatagtctgagtcctcaaatagattttgtccctccaagtaacaaactttcaaagtcctaaaatcaggaagagtcttataataatgattttacctctataggtatacttttatttatttataaatagagtttgaaattctttagagttgaatatcattataaccatttttcatctttcattgtaaagaaaatagctttggataaataatttgctactgaaaatcctttcttaacactgttggggagagaagaggagtttctcattggaaattcagctactagacatttataatggatatagtaatatcagtccagttactacaaggtcacaaaatcccatttcatcagagtaatgattcacccaacttttttgtacaaagt

SEQ ID NO: 180768 - DNA, 1853 bp, Homo Sapiens
  misc_feature (285)..(298): n is a, c, g, or t
  misc_feature (804)..(813): n is a, c, g, or t
ttgggcaagaacccgaagagaaggtagtttcaaacaaaacagaagatcacaaagggaaagaactagaggcagctgacaaaaacaaagagactggaaggttcaaaccggaaagcagttctccagttaagaaaacactgataactccagggccctggaaggttccaagtggaaataaagtcacaggcactattggtatggctgagaaacggcagtaacctttagtataaaacaaagaaaaacaagttgtaatcttttcttacagcagcatttttccagaaaaagccnnnnnnnnnnnnnncaaatattctgaaacagataagtacatgttaatgtgagcctcaagttacctaggctgcatgaagggcctttaggattgctaagaaccaactgtccccctggccggctgccctccctcgctctcaggaaggagctgcatccacatgctcatctgacccgccctgctcaggctgcccagctcgtcttcatgagtgtctgaacaaatgacatatgttgatattaacaatgtggtcacaactcactttgtatttgtgccaagttatctactgtatcatgtctgtttttatcctttttgttcagctgtttccacagtaatgaaaaagttaggtttggcttggaagttgatgatctcaatagcatgttgcatgtttacagagagaaatatgtgagtccttgcagaaaaagagactgttaactcatcgttaaagatggccgttgtctcttctaacagctactgatgatgtcccactttaaaaataaaacccccaaacatcactactttaaagnnnnnnnnnntgtattccaatattgatgctttcttatggctttttattttaatttggctggataagttgtttcaaataactgttaaagatattacttacaattgaatgtttgaaataagaaagtactttaagcaatagagttcatctcctgctgtgttatccaacctcgatgtatacttacagcatctcaggtcaccctttttatttcagttatttaattatgaaaccataaagaagcatgtggaaatagtgtttattgctctttgaagaaaaaccaccaactatttctggatattttggctgtacctactactaaagtcattagtctttaatacataatacatatttgaaaagtaaacatattatatagattatgtgagggacttaatcatgaaaccagtttcacagtccaagtaccaactcttctggtagcaggtgcacaagcttgggtgtttaaaaacaacctgtgtagggtatgcccagcaaatgaggacaaatgtgtagacagtacttactggatcttatttaacttttagctacattaactaactttcttatttaaaaacaagaaagggagactaaacatctgcttaacttgtacacattttcagaattctttttaaaagtctagttaaagatgtttcttagaagttggagactgttaacaacttccataaaatagatccaggtttttcagttccctgaagcagcattcagtagcatctatataaataaaggcaccttctgagaataaaactattttatggagtgtgtgaacacacttgttctgtcacctgggttcatcttgttgtgaagcacattaagtccaggtccttccctctgggagtctgactgtgaaactctttaacccaacaactcaattagcccctgtagataagacatgcttcccagagtgagatttttgaaatccccttttcatccaaactatatttacccaccctattgtaactattcaaatagagcaaaatagggaggcttgattattactaaggaattagtaccacagaaatatttattattttccctgta

SEQ ID NO: 180769 - DNA, 2479 bp, Homo Sapiens
  misc_feature (2134)..(2146): n is a, c, g, or t
ttggggaaacgcagaaaacagagagaggcattctgagtcatctgactggatgaagactgttccaagttacaaccaaacaaatagctccatggactttagaaattatatgatgagagatgagactctggaaccactgcccaaaaactgggaaatggcctacactgacacagggatgatctacttcattgaccacaataccaagacaaccacctggttggatcctcgtctttgtaagaaagccaaagcccctgaagactgtgaagatggagagcttccttatggctgggagaaaatagaggaccctcagtatgggacatactatgttgatcaccttaaccagaaaacccagtttgaaaatccagtggaggaagccaaaaggaaaaagcagttaggacaggttgaaattgggtcttcaaaaccagatatggaaaaatcacacttcacaagagatccatcccagcttaaaggtgtccttgttcgagcatcactgaaaaaaagcacaatgggatttggttttactattattggtggagatagacctgatgagttcctacaagtgaaaagatgtctccacttcttacagacattcttggtcagaccacaagcaccttgcacagcctgacaccgcagtaatttcagttgtaggcagtcggcacaatcagaaccttggttgttatccagtagagctggagagaggcccccggggctttggattcagcctccgaggggggaaggagtacaacatggggctgttcatccttcgtcttgctgaagatggtcctgccatcaaagatggcagaattcatgttggtgaccagattgttgaaatcaatggggaacctacacaaggaatcacacatactcgagcaattgagctcattcaggctggtggaaataaagttcttcttcttttgaggccaggaactggcttgatacctgaccatggtgattgggatattaataatccttcgtcttcaaatgtgatttatgatgaacagtcaccattacccccatcttcacattttgcttccatatttgaagagtctcacgtgccagtaattgaagaatctttgagagttcagatatgtgaaaaggcagaagaattaaaggacattgtgcctgaaaagaaaagcactttaaatgaaaatcagcctgagataaagcatcagtctcttctccagaaaaatgtgagtaagagggatccacccagcagtcatgggcacagtaacaagaaaaatctattaaaagtagaaaatggtgttacacgaagaggtagatcggttagtcccaaaaagccagccagtcaacattcagaggaacatttggataagattcctagtcctctaaaaaataaccccaaaagaagacccagagatcaatccctcagccccagcaaaggggaaaataaaagttgtcaggtcagcaccagggcaggctctggacaagatcagtgcagaaaaagcagaggtcggtcggccagcccaaaaaagcagcaaaaaattgaaggaagcaaagctccatcaaatgctgaggccaaattattagagggtaagagtcgaagaatagcaggctatacgggcagtaatgctgagcagatcccagatgggaaggaaaaatcagacgtcatcaggaaagatgcaaagcagaatcagttggaaaaaagcagaacaaggtctccagagaaaaaaaatcaaaagaatggttgagaaatctcttccatccaaaatgactaataagactacaagtaaagaagtatctgaaaatgaaaaaggaaagaaagtaaccacaggagaaacaagttctagtaacgataaaataggagaaaatgtccagctatcagaaaagaggctgaagcaagaacctgaagagaaggtagtttcaaacaaaacagaagatcacaaagggaaagaactagaggcagctgacaaaaacaaagagactggaaggttcaaaccggaaagcagttctccagttaagaaaacactgataactccagggccctggaaggttccaagtggaaataaagtcacaggcactattggtatggctgagaaacggcagtaacctttagtataaaacaaagaaaaacaagttgtaatcttttcttacagcagcatttttccagaaaaagccnnnnnnnnnnnnncagatattctgaaacagataagtacatgttaatgtgagcctcaagttacctaggctgcatgaagggcctttaggattgctaagaaccaactgtccccctggccggctgccctccctcgctctcaggaaggagctgcatccacatgctcatctgacccgccctgctcaggctgcccagctcgtcttcatgagtgtctgaacaaatgacatatgttgatattaaacaatgtggtcacaactcactttgtatttgtgccaagttatctactgtatcatgtctgtttttatcctttttgttcagctgttttccacagtaatgaaaagttaagtttgg

SEQ ID NO: 180770 - DNA, 1549 bp, Homo Sapiens
ttggctagaatcagtgatacacacttggcagaaataatggttggcaaagcagtggaacatatttttgagacagaggaaggttccaaaaatgaatggagggggatggtcttagctcaggcacctgtcatgaacacatggttttacattacctatgagaaagatcctgtattatatatgtaccagctcttagatgattataaagatggtgacctccgcatccttcaagattccaatgattctcctctggcagagagggagccaggagaagtcatagacagcctggtaggcaaacaggtggaatacgccaaagacgatggctccaagagaactggcatggtcattcatcaggtagaagcaaaaccctctgtgtacttcatcaaatttgatgatgatttccatatctatgtctacgatttggtaaaaacatcttagaggtcatcttgaaatttgccaaatatatgagactctaaatctgtagacacagaaagtcttgattgctttccagtttgtaagaaccatcttctccctttttgcacgttttgcttggcaaaaaaaattggaacttctgccctctcatacgtttttggaagaaaccttttgcccatctgtccaaccttttcactggttcctctccgcaatttaactgattagtgagaagggtaaagtctgacatccattggctcatacttttttttatcttgggtggtgttaatagattaaaggtagctgaacacctctcacctcactctttttggcacttggactctacactcattgaggtgtgaagcttgctgagatatcccatgtgactggctgggtaagtgtctttgcaatctcaaatctcccccaagtggcttcaaaaatctaacttgggaaagagtgggaagcccattttggtctcttgttcaagttgcattctcaattctaactgtactaaaagtaaggctaataattttgctctctttccggttctttcacctattgctcaactgttttagaattaagaaggtaattactttgcattttagtacctaaccataggctgagaaaccttgcaaaactgataagaagacaagcatttggggaccaaactccaagtggagagatcaagatttctggtggagcttaagtgaaaggttttagtcctcagtggcattagggtctctcttgtctccaatagctctggctggtatctgcagacatggagtaggttttaactgatagaagctgtgcaggcagactttagcacaaatggtctttgccagcccagaggagcattaagccaggctctagctagagccctcagtcacaggcaaaggctgggtttggctgggtttggacagatctgtccagaacctcaaaatgaaagaggagaaacctagaatcaaactgagatacagatttctttgctgtgctaagagagactcaagttttagatttgattcttacgagactgaattcagagtcccagcatgtgaatgggcaaggcacttgtgagaaccaagaatggctgaagcagctatacttccttgcagggactggtgggctc

SEQ ID NO: 180771 - DNA, 1520 bp, Homo Sapiens
ttggcaagaaataaatgtccaatgattaaattttttccactgctgttcacatcatgatttgttgtgattaatgtatgtggatgaggacataatagaaaaagaaaatgatgaggcttgtatatattgtgtttctgcacaatgagttcctttgaatgtttttcgttttaggaataaaattgaagggtgtttttcttagagaacatcatttgtcatatttatttgatcaagaagttgaagatttatataataaggatctagtttgaagcactaagaagaataagacatcagtttgaaaagaggctctatcagaacaacacgaattctgctaaaattgaagcaagaacaaacatcaaatatatgttgacacttgggtggaagaatggtgaactaattgatgctttatgaaaagttgatagggacagtgctccaaagaaatcagtttacaaatggataactcgttttaagaaggcataaggtaatgttgaagaagaagcccacagtggcagatcatccacatcagtttgtgagaaaaaagttagttcatggcgtaattgaagaaaaccaacaattaacagcagaaacaacagccaacaccatagacatctcagttggttcaccttacacaattttgactggaaaagttcagcaaactttatacctgataggtaccaaaaccattgcacccagatcagctacagacaagaatagagctttcaatggaaattttaaataaatgggatcaggatcttgaagcctttcattgaaaaattgtaacaggagatgaaacatggctttaccagcgcaatcctgaagacaaaacaaagcagtggttaccaagataagtagttcagttaaagcacaagaggactggttgagagcaaaggtcatggcaacagcttttgaatgctcaaggcattttgcttgttgactttctgtagggccaaagaatggtaacgtgcttatcatgggagtgttttgagaaacttagccaaagcttcagcagaaaaatccccgagaaagaccagagagttcttcaccacaacaatgttcctgctcatccctctcatcaaacaaggccattttgcaagagttttgatgggaaatcactaggcatccaccctacagtcctggtttggcaccttctgactttttgtttcctaatcttaaaaaaatttttcagggcagtacatttttctcaagttaatgtataaagaaactgcattgatgtagataaattcccagaactctcagttctttagggatggactaaatagctggtatcatcacttacaaaagtgtcttgaatgctatagagctaatgttcaaaaatatagtttatattttttatcttttaaccatttttccacaaactttttgaagtctccttgaatatgtaccatttataaaggggaaaaattctgtgactactcatgttgacttaatgctgacttaattttctgttttgtaaatatatacaaacaagttgataccaattttgtttatagcccttaaacaatttg

SEQ ID NO: 180772 - DNA, 2286 bp, Homo Sapiens
  misc_feature (163)..(197): n is a, c, g, or t
  misc_feature (202)..(235): n is a, c, g, or t
  misc_feature (1003)..(1068): n is a, c, g, or t
  misc_feature (1148)..(1244): n is a, c, g, or t
acaaaaaagttggggattgtccaacctaaaaaacatttattaaggctttaatgaaatctacctattttatggtatataatctcattaattgtccacttggaaagaataataacagatatttatttattggccagttactatgggccacaaattatgctgagcnnnnnnnnnnnnnnnnnnnnnnnnnnnnnnnnnnngagannnnnnnnnnnnnnnnnnnnnnnnnnnnnnnnnnaagagttggttctgttaaacaatatttatttctcataataaccctatgaaagcagatacagacttctggctttttaggattggtatttcacttgttgaacacctacccttgtgtcagatgtatagcaggttaacaaagtcaatacagtgatacacttgacataatctttgttctgagtttttttcccaattatagtaaaattggaggtcttaactgttctacattagataaatatatgcatttgttttaaagagctaagcaatgagaatcttacaactagagctgaagttcaagaaataaatgtccaatgattaaattttttccactgctgttcacatcatgatttgttgtgattaatgtatgtggatgaggacataatagaaaaagaaaatgatgaggcttgtatatattgtgtttctgcacaatgagttcctttgaatgtttttcgttttaggaataaaattgaagggtgtttttcttagagaacatcatttgtcatatttatttgatcaagaagttgaagatttatataataaggtatgggacttacacatttattttgataaaagaacacagaaaaggtcaggtatgagcagaaaattgacatttatttcagcctaatgtggatactgtactctgaattaaaaatttcttttccttactcttccagcttttaaagataagtattatttcaaaatagtatttttttaattaatagattcaattcaggaaaggcattggagggggtggagcttttaactttgacannnnnnnnnnnnnnnnnnnnnnnnnnnnnnnnnnnnnnnnnnnnnnnnnnnnnnnnnnnnnnnnnntgggttcaaatagttattgtggcccagcttcccaagtggctgggattagaggcgcatgccaccacacccagctaattttnnnnnnnnnnnnnnnnnnnnnnnnnnnnnnnnnnnnnnnnnnnnnnnnnnnnnnnnnnnnnnnnnnnnnnnnnnnnnnnnnnnnnnnnnnnnnnnnnataagccaccacacctggctgttggttatcttttcttagaaataatgatataatcttttcagcacctgatattcttaaagatccagggtttacaaatgactgttagatatgccaaggatgactagcctataacttaaggaactgttcaggaacagtagaaaagaaggtgataggaaactgggaatcttaaatctaatactagttctgtcatgaattaggcttgttattgtagttgtttctcaaatttaagaaaatatgaggggtcttgaaaaagtgcatggaaaatgcatatcatgaaaaaactatgcatggatttcaaaatttttggaccaaaataaactcctactaacttgttataacatgtctgaacaggatctagtttgaagcactaagaagaataagacatcagtttgaaaagaggctctatcagaacaacacgaattctgctaaaattgaagcaagaacaaacatcaaatatatgttgacacttgggtggaagaatggtgaactaattgatgctttatgaaaagttgatagggacagtgctccaaagaaatcagtttacaaatggataactcgttttaagaaggcataaggtaatgttgaagaagaagcccacagtggcagatcatccacatcagtttgtgagaaaaaagttagttcatggcgtaattgaagaaaaccaacaattaacagcagaaacaacagccaacaccatagacatctcagttggttcaccttacacaattttgactggaaaagttcagcaaactttatacctgataggtaccaaaaccattgcacccagatcagctacagacaagaatagagctttcaatggaaattttaaataaatgggatcaggatcttgaagcctttcattgaaaaattgtaacaggagatgaaacatggctttaccagcgcaatcctgaagacaaaacaaagcagtggttaccaagataagtagttcagttaaagcacaagagactggttgagagcaagggtcatggccacagcttttgaatgctcaaggcattttgct

SEQ ID NO: 180773 - DNA, 940 bp, Homo Sapiens
tcagccctgaatccctgactttgttaatgacctgtccttaccaaccatgacctagagaagatttggctttttaagagttttggagaaagatggcataaaaatagattatttccttaaatcaattttttagcattacgctacctaagctcgtttggtctctcatagacaagaaaatacattatattgtaggttacattcttttaattttgaagagtcacaaaactcacattatttagagcaacaatatttgtatttggaaattaaaaattcatgatttcaagaaaatacataaaatttacatttttgagtagtttgaataagtttctatcttaattataatatttgtaggaaataacaaaacaaactcaaagcctttattatttccagtctctttgtaactgatgtggtatggtatcatcatgaaatctaaacagtggtacactgagtggttgtcctgttcttcaatctctgtggctgagaactgaaataacttagaagagacagatttttatgagagcagttttagaatcctgacactgatgtatagaactccaatttaaaaaagttatttatctattatatctctgatctttagtcacactaaggctctcaaaatgttggccaagattggtaatgattcatacgtacttgatttttcagggctcctataaacttgtatagggatatttttccatttttgataaatatctaactttgaggcattcacttttgtaaaccgcgaaagtgccttacattcacctcatgagtattttaagttgatgcccagtgctgtggtatatcctgtatatatgtgttttgtggtatctatcgaaattattcttataatttagaaagttagaaaatagaaattgtaaatgaaaatgtgggcgacctgactgcagaactttgagtactgaacacatttaggtgaggcattttc

SEQ ID NO: 180774 - DNA, 612 bp, Homo Sapiens
ttggcagcagggaggcatctgcacaagcatgtgtcagggagaagccacccttagtgaaaagactcataggtgtgagtttggcagaggtaaaaagggactagtttggctgcagacagcctgagaaagagataagcagagggatggagaatcctagggcctgggagatgaggttagatatctgctcctttctgacaacattgccctaaaagtcagcacttttcaacaacatataatatctcataatttgtgtggaccagaatctggacacagttcagctggctacctctgccttcaggtcttttatgagactgagggctgtggtcttaactgaagctggactgggaaagcatgagcctttaagctgactcatgtgaaaattgacagggtttagtgtggacagagagcctgactttccttctctctactcgtctgagcaccgcctcaccctttgttatgtgggtctctacatggagcatctcatagcattggagcttgcttcctgtgtttgaggaatacaatagacagaattagacaaaaaggtttacacaaaaagagacagaaagatcgagggcgcaaacgagaaaaacccagtaggagaaaaattagagcttt

SEQ ID NO: 180775 - DNA, 905 bp, Homo Sapiens
ttggcgccgggtgagtgagagagttggttggtgttgggccggaggaaagcgggaagactcatcggagcgtgtggatttgagccgccgcattttttaaccctagatctcgaaatgcatcgtgattcctgtccattggactgtaaggtttatgtaggcaatcttggaaacaatggcaacaagacggaattggaacgggcttttggctactatggaccactccgaagtgtgtgggttgctagaaacccacccggctttgcttttgttgaatttgaagatccccgagatgcagctgatgcagtccgagagctagatggaagaacactatgtggctgccgtgtaagagtggaactgtcgaatggtgaaaaaagaagtagaaatcgtggcccacctccctcttggggtcgtcgccctcgagatgattatcgtaggaggagtcctccacctcgtcgcagagtcaccatcatgtctcttctcaccaccctctgaatctgcattagccagtcaactagccctttcagcgtcatgtgaccagcgcgccccattcagcttggctggtgtcgtttcacatgacccaggctggccagtcgtcaggttgcaccgccctttggttcccgagcatgctgttttctctcagccttctctccaaccttaaccaaatcggcagcagccacctcgaccgcccacacattcctggccaatcagctcagctgtttatttaccaaatgtcttcacaacaactacagcagcagccttcggctaacaaaaaagcaggaaaaatccacaacacccccttcgccaaccaactaaatccaacgcaacatctggcaaaaccttttcagcaaattcttcctggccgtcagtccggcagcctcacctcaccatttctagcttgttgaaacccaaaa

SEQ ID NO: 180776 - DNA, 865 bp, Homo Sapiens
  misc_feature (170)..(645): n is a, c, g, or t
  misc_feature (653)..(750): n is a, c, g, or t
ttggccacattctaccagaatgatgacacaaatctcttcttggcaatgtacagccttcatcaaaggcatcctgtttcatttgtcaccaatgtcagtctggcactttcagttcacctggagagtgaccacttccacatggccattggcacaggccaaatgtaaagcagtcnnnnnnnnnnnnnnnnnnnnnnnnnnnnnnnnnnnnnnnnnnnnnnnnnnnnnnnnnnnnnnnnnnnnnnnnnnnnnnnnnnnnnnnnnnnnnnnnnnnnnnnnnnnnnnnnnnnnnnnnnnnnnnnnnnnnnnnnnnnnnnnnnnnnnnnnnnnnnnnnnnnnnnnnnnnnnnnnnnnnnnnnnnnnnnnnnnnnnnnnnnnnnnnnnnnnnnnnnnnnnnnnnnnnnnnnnnnnnnnnnnnnnnnnnnnnnnnnnnnnnnnnnnnnnnnnnnnnnnnnnnnnnnnnnnnnnnnnnnnnnnnnnnnnnnnnnnnnnnnnnnnnnnnnnnnnnnnnnnnnnnnnnnnnnnnnnnnnnnnnnnnnnnnnnnnnnnnnnnnnnnnnnnnnnnnnnnnnnnnnnnnnnnnnnnnnnnnnnnnnnnnnnnnnnnnnnnnnnnnnnnnnnnnnnnnnnnnnnnnnnnnnnnnnnnnnnnnncctgtccnnnnnnnnnnnnnnnnnnnnnnnnnnnnnnnnnnnnnnnnnnnnnnnnnnnnnnnnnnnnnnnnnnnnnnnnnnnnnnnnnnnnnnnnnnnnnnnnnnccatgtggagaaacccaagaaacccagaggatattaggtccaaggaaatgagcctggtagaggaagtcccacaccttttaatctcaggcatggagattccaaaaactttatctcc

SEQ ID NO: 180777 - DNA, 983 bp, Homo Sapiens
  misc_feature (41)..(56): n is a, c, g, or t
  misc_feature (430)..(467): n is a, c, g, or t
  misc_feature (514)..(564): n is a, c, g, or t
  misc_feature (723)..(733): n is a, c, g, or t
ttgtatacagacaaccttttatttccaacaaacgtgtgccnnnnnnnnnnnnnnnnaaatagttttaaaaaaattgtatacagacaaccttttgtttccaaccaacgtgtatctagaaaagagttagtcgacttattttatacatagcatcagtgaatagtaatgagtggtaggtcatttcaaaatcctgttgcctatattatgtgaataccaggaggtcatctgatacggacttaataaaggttgattttgctttatattgggagctgagccacacctccccttataactctattggtcagtaatggtcagtttgtggctgttaggaaaatgttgccttttagcattccagaactctaaatcctgtagaggtacatgggatattttattctttgcctgtactcataaaaatgaacagaagaaaatacgnnnnnnnnnnnnnnnnnnnnnnnnnnnnnnnnnnnnnnaaaaggtgaaatatcagccctcaagagactcacttgctaactttccnnnnnnnnnnnnnnnnnnnnnnnnnnnnnnnnnnnnnnnnnnnnnnnnnnncttacatggttctggtggattcacatttgctgatgctggtgctgtttttcgtgtgatcttcaacgtttttgggtgaccattgaccctgtgacctcaaaatggtgtccaactaaccacttaaaattaacatcttttttttaattaacgaatttatggtannnnnnnnnnncccttggcggggatggggttggggttgttttttctctattctagattatccagccaagaagatgaaaactacagagaagggatttggcttggtggcttatgctgcagattcatctgatgaagaggaggaacatggaggtcataaaaatgcaagtagttttccacagggctggagtttgggataacaatatccttcatcacaaccacgagctaaacaacagatgccattctgggatggctcccttaggaaa

SEQ ID NO: 180778 - DNA, 1130 bp, Homo Sapiens
  misc_feature (41)..(56): n is a, c, g, or t
  misc_feature (430)..(467): n is a, c, g, or t
  misc_feature (514)..(564): n is a, c, g, or t
  misc_feature (723)..(734): n is a, c, g, or t
ttgtatacagacaaccttttatttccaacaaacgtgtgccnnnnnnnnnnnnnnnnaaatagttttaaaaaaattgtatacagacaaccttttgtttccaaccaacgtgtatctagaaaagagttagtcgacttattttatacatagcatcagtgaatagtaatgagtggtaggtcatttcaaaatcctgttgcctatattatgtgaataccaggaggtcatctgatacggacttaataaaggttgattttgctttatattgggagctgagccacacctccccttataactctattggtcagtaatggtcagtttgtggctgttaggaaaatgttgccttttagcattccagaactctaaatcctgtagaggtacatgggatattttattctttgcctgtactcataaaaatgaacagaagaaaatacgnnnnnnnnnnnnnnnnnnnnnnnnnnnnnnnnnnnnnnaaaaggtgaaatatcagccctcaagagactcacttgctaactttccnnnnnnnnnnnnnnnnnnnnnnnnnnnnnnnnnnnnnnnnnnnnnnnnnnncttacatggttctggtggattcacatttgctgatgctggtgctgtttttcgtgtgatcttcaacgtttttgggtgaccattgaccctgtgacctcaaaatggtgtccaactaaccacttaaaattaacatcttttttttaattaacgaatttatggtannnnnnnnnnnncccttggcggggatggggttggggttgttttttctctattctagattatccagccaagaagatgaaaactacagagaagggatttggcttggtggcttatgctgcaaattcatctgatgaagaggaggaacatggaggtcataaaaatgcaagtagttttccacagggctggagtttgggataccaatatccttcatcacaaccacgagctaaacaacaaatgccattctggatggctccctaggaaacagtggaacagaattttgaccctcagtgactcttcttagcaataatgcatgcatttgattaacaagactctggggcctgtgctgggaaacatctggacctcttgcaaaattagagattcaatgcacccctttcttaaagggttcctta

SEQ ID NO: 180779 - DNA, 1640 bp, Homo Sapiens
ttggaaacaaataaataaataaacaagaaaagaccagatgagagtggctttaaagccaataaaacagggaaatggtgaatggagcaactggggagaaaagtcaccaaagtcggggaatcagggaagccttccccaaagaggtggcttttgaactggggcctgagtggtgaagcagccagccatgggaagggcttggggaacaggatatgcaaaggccctgtggtggaaacaagccagctgtggttgaggaacaacagcaaggcagccagtgtggctggagtggagtgagcagtgtgggccaggggtgagggagaacaggccagagagagggattaggaccaggtcttgtaaggccttttacagcatggaaggagctctgaagcaatgaagtgccttgccctgtgtcacataccagctgagacagtctgcctaactcgggagccaaagtttgctgctgggcttgaggcccctgtgagaggacaatgtaacccaggctggtatgggcacattctgcatttccacttaaactcagatggcaagcccatcaaaccttggtgccatggctgccctgttaattcctggctgaccagtgcaaccagggagctggcccatgacccaggtggccgctaagtagccaggactaatgtggccaagagtcagtcttctagccttcttcctgtgactcatccaggtgcaccctgtgacatctgaaggtcaggctttcagctgctgtggcttccacttccaactggctccacgtccccagggagagatcacacagcgctttgccaacacattctattgcgtgttttaatgttcctgtgaatgcgcccttgagatttctctctctcccgtccacacggagcttagaagcaaaattaagagactcatcagattctgagctgctgcgggatattttgcagaaggtaagaattccagagtccctgggactcatgaccctgcctcctgaatctctccggaagacctgagagaagaaccacaggttctttaaaaacacccctgttcaaagaacaaaaccactgagtcagcactgcaggtaggtgtcagcacctccgacagctcctgcgcttttgttttctatctaagacttagacaaagacatcagaatatacaaaaatctgcatgaggggggaaatctagggaatgttttttaaaccatcctcagcaaaaacagagatgacaggtgcaaaacagcttctagcatttggtggatgctcagagactcttttttgcattcctgaggcctgtcctgcccactcctgtctcctctagacctaaatgggcccttgctttgcccagggtggggtttggactcaagtgcatctgcatgcaggtgacagccaggatcaccacccggcccagccacagcgtgaccttggccttgagggccaagtgcagatcaccctgcatcctgggtcttcaccttcgaagggccatgagcccttcagaaaagacaaagcaatagactccctcccagaaagaagtgcaccagaagaatacattttccatacaaactcacgggaggcagacatcctccacccccacccacccagcccatcctaggagccccagtgaagaattcctgtgctagagtgaaccaagatgatccacttggaaaa

SEQ ID NO: 180780 - DNA, 1074 bp, Homo Sapiens
ggatgtgaactagttatgagtcctgaaaatcacaatgttgctgaaagaagtcaggccacaaaagaaatgtgtatgattctgtctacatagtttcaaaaataagtaaaaccaaactatattatttaggaatacatacatggcaatacattataaagcaggacagtaatttctagggagagagagggcattgtcaggaaggaagggaccatggggggtttctggacagctggtaatattctactcagtggtatttataagtatccactttataataatttgccaagctgtccttttatactattggacttttctacataagtgttaactattttataataaaaaagttaaagtaattagaaaaatattgaatgctgacggtgtcaaattgttcccagtccctaagggagagctgtggttgaagaggttctcggggactcagaagcagcagtctttgaggaaaagtccaaggatctgctctaccccggttacaacccccacccccaccccattccctgctcccgcaggactggagcaaagaacctcacctgagaaacaagtcgggaactaggccagtgccctcagagccgggttctagaccagtgggactcccggcgcgggtggaagcacatagcagtgacacagcagagaaggccacagaagagaagcaggaaggagcccaagaccagcagcctggagccacacagagccagctcctccgaggtgagcagcttggtcagcacaaggccttcatggctccagacactaacacattcctcacccattctagggctcagggtggcatttccagccccctcctctgagcaggatatgggtggctggctggagggtaggattcctggaacagcactaaaatataggcaggttcctgcagtcctttctgtggtcaccctggctgtgataaggaccagttgtcctgcagaagatcctttcaatcccatctgacttcccaggactgtggcctggaatgtccgggtcttgttcctgtctggaccgtctccgaagttcaaggtggtcagctttgcaacacgacgtgagccaacttttttgtacaaa

SEQ ID NO: 180781 - DNA, 1802 bp, Homo Sapiens
ttggcttatagcagaagcaaaactcctcaggcagcacaaaggtcggctggaggctaggatgcagattttagaagatcacaataaacagctggagtctcagctccaccgcctccgacagctgctggagcagcctgaatctgattcccgaatcaatggtgtttccccatgggcttctcctcagcattctgcactgagctactcgcttgatccagatgcctccggcccacagttccaccaggcagcgggagaggacctgctggccccaccgcacgacaccagcacggatctcacggaggtcatggagcagattcacagcacgtttccatcttgctgcccaaatgttcccagcaggccacaggcaatgtgaagtattcatccggccaaccaatgtttcctgacgtacagtgttgcccttttcagcaaatgccaattccaagttccattaaatcagaagctccatggctccttggcccacgatgttgagtgctgactgtgtgttctactgaaagagtaaaacactgactatccaaagagaaatggatattttgtttttataataaccatatattattgttttcttcttccctttctatgcaagtgtaaattaatgaacagagaggtatttggaaatggtaatacatttgtcacggatttgtataatgtatacagcattgggaaagtgggtgggggctttctaatatgataccgtctttttaataactatgacaaagcttacataagaattagaagaccactttacatttttacattccttctgctgttcatattaaccttgcacaattacttcattttttctttgactcttttaccacaatgttttggttatttataatttatcagccatatgtttatcagccatataaccaactagatcccaaatagatccatgtatttgtttccgtgatttggccacattaataaattcataaatttcaatcaaatatcttatatatacacacatatggtttaagctacagccctgtgtatgccgtttaactttatttgacgttgcccacttacttctttgctgaccacttggataaccgtaataaaaatcctataagcctaaatggcatttcttttgggatatttttcctgcattttattccctttttatataagtaggaattaattatttattttatgtcttaatctatttgataaagaagactacattataataatctcaaagatcatattaccaaaggttgcccacttgagcatattttcattttgacacagaaacaaaatttagtacaacctttcctagttcccatgtcttgattttcatcattacatgcacagcagacctttacctattgtgataccagaacacatcattgtctttggttcccttcaaagagaattttattgttgttttgtattttcaagtccttaatagttcttgaaactcctagttgttttcttgttgaaagcagacacacatttagtgcacggcttattttacctttcgggtgaaagatcagatgtttttatacccttcacttgatcaatatatttggaaagaatgtttatcaaaagtctatgtcactgcttctacagaagaatgaaattaatgcttagtgatggtacctccacctacatctttttgagtgcattcattatgtattttggtttagcttctgatttaacatttaattgattcagtttaaacatgttacttaattagcaaatgtagaggaaccaaaaaaaggtgaaaataatatgttttgattcaaacctaaaggacataaaatataaagacattttaactttgggtt

SEQ ID NO: 180782 - DNA, 1060 bp, Homo Sapiens
gagcaatgctttttctataatagccaactttgtacaaaaaagttggtaattatttattttatgtcttaatctatttgataaagaagactacattataataatctcaaagatcatattaccaaaggttgcccacttgagcatattttcattttgacacagaaacaaaatttagtacaacctttcctagttcccatgtcttgattttcatcattacatgcacagcagacctttacctattgtgataccagaacacatcattgtctttggttcccttcaaagagaattttattgttgttttgtattttcaagtccttaatagttcttgaaactcctagttgttttcttgttgaaagcagacacacatttagtgcacggcttattttacctttcgggtgaaagatcagatgtttttatacccttcacttgatcaatatatttggaaagaatgtttatcaaaagtctatgtcactgcttctacagaagaatgaaattaatgcttaggtgatggtacctccacctacatctttttgagtgcattcaattatgtattttggtttagcttctgatttaacatttaattgattcagtttaaacatgttacttaattagcaaatgtagaggaaccaaaaaaaggtgaaaataatatgttttgattcaaacctaaagacataaaaacataaagacattttaactttgggttctctttagctgggatctggccagaaggaggcttaaagttagaaattgctattattttagaataggttgggtgggttggggggcaagggtgtctatttgcagcagagatattttgaaaagaagaaaattgttttatataaaaaggaaagccatgaccacctttctacctcagatccatcttcatccattgcattggaaactgctttatgctgctgcagtctgcaaagtctagagcttttatcaggccatgtcatacccaacaaagcaccctatttaaagaaaaaacaattccctgagctctcaactccaacttgtaaatttggtgtcttcctggttcttactttaaaaagccatgtgttaa

SEQ ID NO: 180783 - DNA, 1228 bp, Homo Sapiens
  misc_feature (162)..(170): n is a, c, g, or t
ttggctttctctcccaccattgttgactgttgccatgcaaattcctaggtgaccctctgaagactggtaaccatagccaagctgttgttcatcaggggatttccagcaatgcttagaactccctagtatctgaaaaacaaaatcataagcaggtagaaaccnnnnnnnnntttaactgatggaattagagaaacaaattaaatgagctttcctcattttgaatggatctaatagttttaggtgagagaagagagaagcagctaggaatgactagctaggaagaaagaaaattagcattggacactactgtgcattagacactgtgtagtctaatacactactatatattagacacaaaaattagacacatatataggtatctatgaagtaggtactagccttttccttttacagagagacaatggggttccagagaggctaaatgatttccacagggttatttcactggtaatggcctggagcaaaattagtatttggctctgcctagtgcctaagtacatgcacttaacctctgcaaatacagtgttctagaaccctcatcattgaatccggaggtacttgtagtcatttgtgacactggagtcctagcctccaaaggactttcagaagagtcttagattagttcctaagaaagatttctacaatatgaacttagatgaatttgaagggtgcccggaaatacagatgttggagaatatgcaggaagagtttagaggatgagaatgctaaaggaaaatggagtggagtggtgaatgagcagaatgaagatgaaagggctggtcagctaaggagccaggacagggcagagagtgtggccactacatttcactgtggggtatcttcatgcaggaatcaccccaatgctacagctgatccgggccatcctgaaagtccctgaagatccaacccagtgctttctgctttttgccaaccagacagaaaaggatatcatcttgcgggaggacttagaggaactgcaggcccgctatcccaatcgctttaagctctggttcactctggatcatcccccaaaagattgggcctacagcaagggctttgtgactgccgacatgatccgggaacacctgcccgctccaggggatgatgtgctggtactgctttgtgggccacccccaatggtgcagctggcctgccatcccaacttggacaaactgggctactcacaaaagatgcgattcacctactg

SEQ ID NO: 180784 - DNA, 1896 bp, Homo Sapiens
  misc_feature (428)..(440): n is a, c, g, or t
  misc_feature (907)..(954): n is a, c, g, or t
  misc_feature (1504)..(1512): n is a, c, g, or t
ctttgtacaaaaaagttggggtatatggaccgatgaggcaccgagataagttcatcattaggtgtgagcactgctcacccttgctggcaagttctccttaagggcctgaagcacaggtgtccaaagaaaagcgttaagtccatcttaatagaatctatgtggtatatgatgtggtcagcccctggtctgtgatcagcaagaacctacagcacagattatgccctgcccacttcaatgaatacctactctcctccattctccatcacttttttttgctatcaagaactccggaccttgcccatggagaagtttagagaggaactcttgtggatatctggtttattttctgccctgtgcgacgagtttcagctggccaagaaaggagtcaagttattaaaaagcatcacaatgtagatctccaggctggnnnnnnnnnnnnngttgttaagactggggaaagggggactatttattctgccttaaatcaatggcaaataagtcaagatgacattttgtgaatgtagactatggatacactcctaatagattgatgtagtcataaaagggggtcaagtagatgtttttctgttatgtaagcaataatttttccgtgtcttattgagtatggctagcgattatttattacatgctagatgggttctttgcatgtgggttccatataggtgcagaaatttcctcagccactggagggatttcgaccatatttgtcatttggatgagctgttattagattgaaatctacacatcatttcattaaaaattgtgccttagaaaacgcaaagctgttgcacatggcgataaattatggatgcagtacattgaagagagatgaagtcacttccaagtttccaagacttctcatggaggtgtttgctgttttacaggnnnnnnnnnnnnnnnnnnnnnnnnnnnnnnnnnnnnnnnnnnnnnnnnttgttttgaaaatgtacagatcaagtccaatattttgattatccacctgcatgttttattaaatattttgataatgtggatgtttacactttgcatgatattagcagagtaccactagtaatgcacaaacatgtacaatatggtcattcataaccgatttttatagaatactttttacatgtgcaactccatccgttatgtaaggattacgtgaatattgcacattcccttctggtttcacaaacccatttatacatatttcttagtgaggctcattgtacatgtattgaagctagaatcgagtcaagaaaaataaagccccattctccaactgcaaaatgtgctttcccataatgaacactagtcaccagcacagaataatctccaacattttctaaattctaattgccaactgtttctatttatatttgatttatatttcatttggagtctgttacatggcagcttaggcagactagatcttgttttttccaatgcagcataatgagtatgatctatttcttttcaaataatctttgagatcccaggnnnnnnnnntgctctgctccattgagctataatgtaaatgtgtttgtttaaaaaacaggtgaggcaagtgagtgatttattgttcctgaggaagtatatctgattttttttctcatactccaaaagctagtccctactctttaataaaaataatgggtaactttttgtttttcactagcgaacttccatgacatttcctttctatgtagtgtgattaatgcaatacatattatagttatctatacacagtgtaagatttaacaaactgaaatgatccacctcatatgtgagtccgtccaaaagatgttactgctctgggtgggccagtgttctatatcggttatactaactttcatttaaagtatttattctaaaatgcctctgagaaacagt

SEQ ID NO: 180785 - DNA, 1048 bp, Homo Sapiens
ttggctcaccttcagagcttcaagagcactgaggcgatcagtcccctacccctgttcccatccagctttccacttagctttgacctccatggcagcagtagcagtaacaatctcagtaattgttctttaaagctgactcgttcttcacctacttgcaaagtgctttcttgtctcataaaagttagattccaagaaggacttcccacggagtggagtggaaacactgtccttgaaggcctgggagaaaggcatccccatgggcacagaggctggggaaaggcacagggactttgggtgaccctaaccctgaccctctgctccagttcacctccatctatatgtgttcaggtaggggtcatctactgtaccctggcctgggaacacattgccctccccacacaaaactggagggcttggcttctgcgtgtgagaaatcaacatttttaaagcacttgccttctaccaaccccagcttgcaatcactgggccttcccctcctatccaaggggttggaggggccccttggctctccttttggcaggaggagcctgcttcattacaccaatgactctgccatccccctccctggccctagaccccaaacacatctccctctacccaatttactcttctcgccccacctagggacagattccccctgctctttttgtcctagaaaccccgctagtttgggatggtagcgtctggggtggggagggcttccccttccccactcgagggtgcgggtggggaagggggggtgggtggagacagccctggggcagggaggatggtctctccactgtagaaagtagagtaggattgtggtcagacttaatttgaggcatctagtgaagacacgtacaaatccaccaaggaaaaagatttcaaaagcaaaataaaagcgggaaataaaacagacccaagaataatcaagtcaaagtgatgttgcacaaaatgcagagaaaccaagaagggggaggggtaaatgtattaaatgtgctattagaacttaattttaattaaaagtactattacttaaaggctc

SEQ ID NO: 180786 - DNA, 2049 bp, Homo Sapiens
  misc_feature (1967)..(1979): n is a, c, g, or t
ttggatctttgcatctcctgtactgctttgcaatccataaacacttctcaggtaatcaaggtctctctttctcattagttatattaagtggttttggtaaagtgttgaatatcatttctcttgtttcttgatcttttaggaaggtgcttcaatattggatattcacacagagcccagtttttcaagtttgctttcacagtcatcgtatgctgacatgggtgttccacttcctgcaaaaaacttaatatttaaagatggtgtcttatcagaatggagtggacggtcaccttcctcacttcttattgctaatctccatttgcaataatttggttacaccatttgttgctcacactttctgccttggttttctttcttaacgttagctttatagtgtcagccactaaaaagcatcctgctgctgcagtgcaattcttgcttaactaatattaaaagttggggaacatattcatgttttctgaagttttgctcattattgcacatcttattgcgacaaagtgctttttagcagccagcactgtattttttaccttgagacaatctgcatttcttttataaaactaagtatatactttataggctttatgatgactgttatgtttataagcagtcactatgaaaattgcaatggtaattttatatgttagtttatcaaacataaatcttgtttaattttatattttgttacctatactttgggggatcaagggaagagatggaactcttcctctgaaaaggcttcttggtacttaaagtagtaaaactataaaacaataaacatccagtattgagagatgatatgatagggcattatgaattcctatgggtgtctgtaaattatgtatgtcagttggacattgtagaaggtatgtaaatcagcatagttgtgtataacttaaccttgatttataaggtcttaagattatgactattcattgacatctcatgagaagctttagaagactttctatttttaaacaccatttatatgtggacttctgttgtcactgactttgggctttatattttcatagagtctttatggaaaaaatagaatttattttccactcttgtagctatagctgctgcacactttcaccctgatttatttttttgtttcttagctttgatgttttcaaaccaaggattgtgattttaggttagaattacatattagaagcattaagactatgtctttggatcagaatgctttagtgataaacctactttgaagacatactcttaagcaatctggatcttaaatttatgtgaatacttttttagaaaatgataaagaaaaatggaattacttcaaagtgtttcttgagtcattgattcttttagcatctcaaatgttaattagaataattggaatcactttttagacttttcaagttaccttccttgggaagtttgtgcagtgttatagtttagtttagctcctcttacagggtaatggtttgctagtttaaaactgtaaccaaacgaactggtcagacaacatatatctaaaacacttaaaatgttaggaagtttgggaatgttataacctaaacgtttttgctggtaactttttgttatttatagatatttgtgtatttaacatacatacttcaggaaatatatgcctttcctaaaacttaaccatgcattcaataccatggcctatctatagaattgaatattttggaccatgttatctgtggcacagtcagtgctgtgtttgaggtaaatgcagtaacggttagttttctactttgtcttatagaaggtagaaaccatgtgtatgttatgtttgtctataaaagaaaaaatactaatattaaataatttcttacgactctgagtcactcacttatttttccaataattgatattgtacattcctagtgccattaggtatgtatgtatgtaacttttacagtttttcagctgaaagttgtaagtannnnnnnnnnnnngatcggggctctttaatctcattttaatttcctttgtttgaactgtagttattttatttattcctatatt

SEQ ID NO: 180787 - DNA, 1399 bp, Homo Sapiens
  misc_feature (491)..(533): n is a, c, g, or t
  misc_feature (1283)..(1300): n is a, c, g, or t
ttggctataatgatgtaaagtgacttttcatcactttgtatcagggaaaaaaaagaatgcagctattacatgggcatactttagctcttgagcttgtgcattttgacagtaaaactatgacttttacaagtaaaccgattgaaagcatataagctattataatcgagcagtggctcagttgtaaaaagtcttcttggggttgaattcacatcttgtggaaaagccaggggccacatagcagatcagtcttggtttctcttcagtcctatcttattttttatctgaaacaatataaaccagcttgccttttatcttatttactgttattttcactgaattgtttttaatggttaaacccatccccaataattaattagcttaagatattggagcgaatgctgtaggatctgaaattgtttttcagaaacagttaatgttttgagaattgatgtcattttagacttaaatgcttttatgtttcctgtctactnnnnnnnnnnnnnnnnnnnnnnnnnnnnnnnnnnnnnnnnnnnagctgctttcccattctgttttggctccagtgattaacaaaatcatttaaaaatttattcgttcatggtaacttttgtaatcttagtcaacagatatttaaaagtatccctcatgtttgaaaaccattattctggagaatttattttgtattgttctggtataaaagttgaaatcctggggctaattgtatttatcatgaagaatttctagggaaggcacttaagtcttgtgagatcagtgaaaagaaatgactataactttgatgtgaatggtgtttttattgcatttttatagtgcctcacaatttacagactacttttatttatattgccactggatatatacccgtgatacattttctgttttgaagtgctaaattgtttgttacaagcataaaatgaattgatagactattttaattgaaaattgataattaccactacacaaaactgtcataactttttctttttaagtatctagtcctcagactattgtggagttattcttccaagaagttgcaagaaaacacattatatctcacctcttctctcagccaaaggcacctctgagccaaactggattgaattggcctgaaatgattacaggcgtgagctactgcgcctggccttcagtggcattctagaatgttctattgaagttactatgtcagtgcttggatttcttactgtcttccccattagaacgtagtatgtagtgaagaattaaagccaaacataaacatttctagnnnnnnnnnnnnnnnnnnccaactttaattatataggctagctggaagagtgagttaatttaacttgttaatttctgaagtgagattgcaacaacccatgaatgctctgggtttttc

SEQ ID NO: 180788 - DNA, 1793 bp, Homo Sapiens
  misc_feature (354)..(368): n is a, c, g, or t
  misc_feature (810)..(840): n is a, c, g, or t
  misc_feature (1011)..(1053): n is a, c, g, or t
tgtacaaagaagaggaagatgatgagaatggggactcctctgaagatggcggcgactcctctgagtccagcagcgaggacgagagcgaggatggggatgagaatgaagaggatgacgaggacgaagacgacgacgaggatgacgatgaggatgaagataatgagtccgagggcagcagctccagctcctcctcctcaggggactcctcagactctgactccaactgaggctcagccccaccccagggcagccagggagagcccaggagctcccctccccaactgaccacctttgtttctcccccatgttctgtcccttgcccccctggcctcccccactttctttctttctttnnnnnnnnnnnnnnntacggtgggggtagggggctggaggagcccaggccaggactctgcagcctcagagacatcagcccttgggggtcctcctccagggacagcaactatcagactaagccagcaccggaccagcctggcccaccccacccacttctgcacttgcggttccggcatggacaatggaccggagagtgggggtggggggtcccaaagagtttgatgaggccctccacacctgcggcccaatccaaggtggggtggaagcttggggaagacccattccttcccagaggggcctgccacctggacccctgcattggaactggaggcagggaacatggggaggaggagggtcggtgccttcaagaaaacaggcactgccctggtggccctctcccctgccccctgcaggaaggagctgcctggacccgttcatgggggagggggcagaagnnnnnnnnnnnnnnnnnnnnnnnnnnnnnnnaagctctgagctgtcaacgagacgtttcctaccgatctcggctgccgtctctgttgtcatttctgggagagggagggtttaggggtagatttggaaccttttaaaaatggcttgatgtatgtggaagagagtatgtgtatgtgtgttcctgtacatagcatgggtgcagcnnnnnnnnnnnnnnnnnnnnnnnnnnnnnnnnnnnnnnnnnnnaaaggggtctgtcctagagcccacatcagtttgttgtgaatctggaaaaagggtcggtgagggccgggagatgttgaccctggtgggagcaggctgaggctgccccgttctccacatcctctgttttgcccagtctctgattccattagggggagtgtgctgaagccattctcggatgcttcccagaccaggctccctctgccagagtcacatgcatccgagctgctggtctccattgtccagcaggaaggcggaaaggcaggcaagatggtgtgaagcttaaagcttgtatttgatggaaaaggtctcccctgttcatctgagaggccaagcctggccaccccaggctcagaacctgggcttcaagaaatgtgctgggagctcctaacttacacatccctccagccttccttgaatcctcccaccaccccctatttcctttaatttctcaggtctgctccctcctcccccaaccccacagctgggcaagaagtctgcaaaagctgcatctgcagctgtctctaactcttcccagccatctcccgtattttttggtaccttgattccttgactcttaataagccaagccaccttatctctgtagttcttatttttttgttgactaaatttggggggttcttttttatggtcatgtcactgacctattaaattggggcttggtgcttttccaccttccccctctgaatgaaagccaaggaatgggggaagagcgggaactc

SEQ ID NO: 180789 - DNA, 2034 bp, Homo Sapiens
  misc_feature (1826)..(1835): n is a, c, g, or t
tttgtacaaaaaagttgggttacataatacctcttggttcaagctgcccttctgaacaaagatataaacctagcatacattgtaatagataactggtaaaactgaccaacttttacttctcagaggccatttaaatataataggaacctactgaccaaacctagtgatacataaaattaaagcctgtggcatttttaaagttgttaatcactatacatatgtatgtgtatatgtgtatacacatatataattttatgatcaatatcttagatattttagaaattccctttgaatagtcttggcgtgccgtgaaaaatagaaaatcagggagatataataattcatttgtcatatgctacagttgaataaaaattaaatttgtccccctattttgtggccagtagactgggaagtattaaactaaccagtactcatgtatggagattataaactatgctaattgaaaagtaccaggtgatacatagcctggtacttttttgtcaaagaattgctttatgaagaagcactttctaatgggtaaccagaaaagggcttcacccatttgtttttgacttctatgatagtcactgcatatgatccctttaagtgtctttaaaaaaatgacttatgaatttgatagcatttggggaaaaaaagccttatatgattaacaatttgtaagttttcaagatcggatggaatttaattttgctcctagaatttttgtcttcagaatatctagttaagataaattaggcctttgactattataggtattcataaatgctactttagccatgtaagttaaaaagttaaaatacttaaactttagtgtatttatttatctcgttactttttttctaattttatatgaaatgtgaaaggtctttattttggtttggtttactttgggctgctaaccaccagtgttaggaattaatgtggggcaccctcttattgggaatgtcactgtaattgcctacattttctttgctgtaatattacctgcttataggttgtcaacccattttatctgaatttgaaaatctatctaggtttccagattaaatttctacctttcatatagagagtttaattttaataaaatgtttaattagagcatccttcccttttattctactttgaacaaatagtaattttaccccaactacttttcatgaagagtgctttgaaaattaaaggaatttttattattatggtaaccttatgagtaaaaataagttactttaattgctttatttcgttagttgtcattttattttgtactatgctggtaaactaattgtggtttagaatagttttatgttcactcctgataactgagaaacagaactaaagttttccttacattgctaaatggataaacctcatattcaataaactagtaaatgtagccacttgactgattgcgtaaatcgtgttaaaacattctaaaatgttgtaactaatttaatgtgaatactgttaaacagaaaataattgcttataaaagtctaacttcacccagttaccaagtcttggccaaattttatcttctgcctatagtttttactagcctttttaaactataatagtgagtgatcattactttatattctcgtaagttagaaatacttgaatgccaaattaattttgttttaagaaagcttatttttaacataattttttagtgtggagggtttgtaaataatgtaaagtttgtaaacctgtatttaaaataccaaagtttttcttcttttataacattgtaagatactagaaaaatgggcttcaagttttttaatagctttcacagtttgtgtagnnnnnnnnnnctatttggttaagatgtgagttgggaaatgtattatttgaaacatttaaactaatttttgtatttaacagcagtctcagacatttgtcttttcaactcagttgagttgtagatatcaaatagaaatgtccagttttgcctcttttaagtactgtccagttgaaacttctgactcatgtactactacacaaactagaaaa

SEQ ID NO: 180790 - DNA, 901 bp, Homo Sapiens
  misc_feature (721)..(731): n is a, c, g, or t
gccaactttgtacaaaaaagttggcttttattctactttgaacaaatagtaattttaccccaactacttttcatgaagagtgctttgaaaattaaaggaatttttattattatggtaaccttatgagtaaaaataagttactttaattgctttatttcgttagttgtcattttattttgtactatgctggtaaactaattgtggtttagaatagttttatgttcactcctgataactgagaaacagaactaaagttttccttacattgctaaatggataaacctcatattcaataaactagtaaatgtagccacttgactgattgcgtaaatcgtgttaaaacattctaaaatgttgtaaataatttaatgtgaatactgttaaacagaaaataattgcttataaaagtctaacttcacccagttaccaagtcttggccaaattttatcttctgcctatagtttttactagcctttttaaactataatagtgagtgatcattactttatattctcgtaagttagaaatacttgaatgccaaattaattttgttttaagaaagcttatttttaacataattttttagtgtggagggtttgtaaataatgtaaagtttgtaaacctgtatttaaaataccaaagtttttcttcttttataacattgtaagatactagaaaaatgggcttcaagttttttaatagctttcacagtttgtgtagnnnnnnnnnnnctatttggttaagatgtgagttggaaatgtattatttgaaacatttaaactaatttttgtatttaacagcagtctcagacatttgtcttttcaactcagttgagttgtagatatcaaatagaaatgtccagttttggcctcttcttaagtactgtccagttgaaacctcc

SEQ ID NO: 180791 - DNA, 2640 bp, Homo Sapiens
  misc_feature (311)..(626): n is a, c, g, or t
cattctgtcttcaagcttctgaaaaaactctgcttttagggcatagatagaagtggatgataattcacctgttcctctgctactaattgagctgctctctgtttccatggctggctcatgggatgagagaatatatctagttttttatgtttcaatttgtctctctatggcatttttgtgaaaataaggaagtgtggagacttatatatgtttctaaattataatagttcattaatgtaaagtacagacacagtcttcacttttccttcttagaccgtttaaatatggccacgaaacaagtagtctctggnnnnnnnnnnnnnnnnnnnnnnnnnnnnnnnnnnnnnnnnnnnnnnnnnnnnnnnnnnnnnnnnnnnnnnnnnnnnnnnnnnnnnnnnnnnnnnnnnnnnnnnnnnnnnnnnnnnnnnnnnnnnnnnnnnnnnnnnnnnnnnnnnnnnnnnnnnnnnnnnnnnnnnnnnnnnnnnnnnnnnnnnnnnnnnnnnnnnnnnnnnnnnnnnnnnnnnnnnnnnnnnnnnnnnnnnnnnnnnnnnnnnnnnnnnnnnnnnnnnnnnnnnnnnnnnnnnnnnnnnnnnnnnnnnnnnnnnnnnnnnnnnnnnnnnnnnnnntagtctctggttaaataacctctgaaagactccaccaaaaatttcatcttagcatttctccccaaacttcatgtaaaataaaatagagttgagagaaaaatagaaaggcaagggagtacctgttcactatttttattaaaccagtgttctactttattttaggtgtatcttttcttatttaaatgtcagctaaactttctttttaagatattgaatgaaagatgcccgtccttcaggtttcgtttaagcaagaatccccattctcaaataatataatataaactttccaaattcttaagtagatcatctgagattgaaagctaagtttaactttctcaaagatattttagccgccatgacacctagacaaagtggtatattaaattctgattaatttggtcctaaagcacctaagaatcattcttactttcttatccacaggggttattaagttttcacattaaaaaaaatccaacagtgaataatactgcattggggttactgtaattgttaagtaaaataagaaatacaaatctttagttagatcacatggcacctgactactgcttagaaaatggtaagacttactacataaatcatgagtcactattgacatctactatatcatatcataggttaggtatctaattataaatagtcaaatcagctgactcaaggtggcatagctcaagcagaggaagataatacaagttgagtatggatttaacactctaaacctgtcagcactgtaggaaaagtaacttaaaactgcacaccccacttatgcataatcatcagatataaagagggtacattcctgtaatttattgttgctctagtgatcttaaagaattaagtccacattcataaagtccaaacttgtctccaaggatttgctttgactttgggagtatctggatcattaagtaatttccggaggtcagagtaaaagctttttatctctaaatattacttccctggaatattagatgtagcagaagtcagtaacggagtgacctttctcttaaacaattcatagattcactgaaattttcttcaactttaggaaaattaaatatattccacagtgctgtaagtcttaaatattgattttcctctgaaatcttgactcatcctacccaccaacattctccctttgtacactatgttctttgtaatgttcatgttacacaagtgaaaattagtaacattagtaaattttcattgcaggtttatttgttcatatttctggatatataatccattactgttaaacttcatatcaatgttccgatatttcttcatcttatgttttatgttacaaaacaggttatttcactatatgtatgtttaattgattaattcttccctttttttggaaatgaaacagcactctcaattattgggacagaaaagttatttcatagggaatacttcaaacactgatatctacaacaggcagtaagattcgtcacaacaattggtatactgtcaatataccatacaaagttccatctggtcttgattaaaaattattttagttttctcaggaaaatgatacagagggagaattgcctagattatatgagagaaaaaaaagtagagagaaacataatgttttcttagattattacagcagtgaactatttccacctggtaagaagggtgcacttgagaatggggttcaagtactctaggaacatagatgtaagttctggatgcacagtagttgttgcttagctgtaagctggaaatttcaaggcagaaacagcagataccacaactataactgggtctccttgttttttgttttatgtgtatacgtgagattatggggaaagacaaaagtaatgcatagagatttattttttaacattcaattcataagcagtgtttatacctctttgtacttacttgaaaagtgtatattatgtaaatttagtataaaaacacttggactaattcataccatgtggtaaaatttcacattcaaaagaaatacccttctgttatt

SEQ ID NO: 180792 - DNA, 1429 bp, Homo Sapiens
  misc_feature (917)..(950): n is a, c, g, or t
ttggagactacagccttgatatattggtcactgcaaagaataaatatctactctcctccctggatcagtgaaggattctgattgctttgtacaatttttccctattcctgtggaacatagccctcttttattggaagtcttttatataaattatgtagactttgaggggaatctcagaatcttataaattgttaagacaatataaaatccattccttatttgatcagacctgtaagatccaaattctaggaatcaggatgtcatgtgatggtttatacctttgtataaattagtttgagaataaatgtaataatctgtgggattttattaatgtcaggtgataacttggatttctaaaagatttgttgatacgagggtaaaagtattagggtaaattaatcagaaaattagaaatgtgcatatatcttgctgtttgaattatgttaatcttagatttggaatttattattagttttcttttgttacctacagtggcacttaggagacctatttaactttgcaaataaaatttgtaacttgataactaattgttttaagttagtggataatagttatcaaagtgtttagtgtctttaagctatgataatttaatattgtctttttaaattatcctaggtagaagaatacatgttcacttccagtgaacaagagcatgttcccaaactcaattttgggtcgcccacccttcactccaaatcatcaacaacataataacttctttaccctgtcacctactgtttattcacaccagcagcttatagatgcacaattcaactttcagaatgcagagtgagtatggtgatattttggcccatgttgttggtaaatttcattttctatttgacataaaccctttttgtatgaaacttttgaacatggagaatatgtcgtcacannnnnnnnnnnnnnnnnnnnnnnnnnnnnnnnnncagagactggttttgtttttaaagaaaaaatatgtataaattactgttcttttctttgattttgttagcttgtctagagctgtgtcattacagcagctgacatatggaaatgtcagtccaatacagacctcagcttccccattatttcgaggaaggaagtaagtacttcttaattattttaaaagaatatttttgcatttctgagaactctgtaatgatgtatcttgaattaatattgtatggaccctaagccctatgttttgttttctgggacctgtacgatcagatgagtcatggaattttaacatttttatgcgtttaaaaattttggtgttcttttgttgatttgttcctgctttattgtatgtttgtttctgccctacatcagatctccccttttctatatccaggttttcttttctagaataaagctgtttcctcagaaaccactttttaattgagaatttttaactaaatga

SEQ ID NO: 180793 - DNA, 2889 bp, Homo Sapiens
  misc_feature (2592)..(2602): n is a, c, g, or t
gggcacttgaccaggatgagcttgagcagctggatgactggaaccgcattgcagagctgcagcagcgcaatcgagtgtgccccccacatctgaagacgtgctatcccctggagtccagggtgaggcctgaggtcactgtgcagggcctcccatccctgccctcccttggaatcccacctgctgatctagcctgagcactagggccctggatcactgactggccgaggagggggagggtgaccttctcatgtttccaggtggaacagacagctgggagggcactcaggggtgaagtccctgggggtaggcaggagctcagagaggaatctggtcaggactgcactgcttgtggccatttgcccagggcttaggtagaaagcagaacaggaaaggaggccttgtgtctttctacctcgtgaggcaggaagggtcccgaccataagtgtcgggcgagtgtagagttctgggacagccccaggtcctcctccatctccatacagctatggtccactgaccacctcttccacccatgcagccttccctgagcctgggcaccatcacagatgaggagatgaaaactggagacccccaagagaccctgcgccgagccagcatgcagccaatccagatagccgagggcactggcatcaccacccggcagcagcgcaaacgggtctccctagagccccaccagggccctggaactcctgaggtaggcgcggtggctcctgggtgttactccagcactgtgctcaggtcaggcccagctcaccaaggactaaagggagccttctctctccttccctcacttccccctctctttccctctctccaagggcctgacccatggatgggaactgttgggaagggaaggatctggcccagagttgggaaggggagcaggttgcacgttgacttacaaggtccactcagctctgagaggacaagacacctggcttcagatgtgactcctcttgctactgtctgcctaactgtcctcttctccatagtctaagaaggccaccagctgtttcccacgccccatgactccccgagaccgacatgaagggcgcaaacagagcactactgaggcccagaagaaagcagctccagcttctactaaacaggtgaggctggggctgaagggggatgaagcgacgccctggcgggaccttgctggtacagcgtggcacagcacgctggcctgggaaggcagcattgggtctcccggtctgacagcccttccttgcaggctgaccggcgccagtcgatggccttcagcatcctcaacacacccaagaagctagggaacagccttctgcggcggggagcctcaaagaaggccctgtccaaggcttcccccaacactcgcagtggaacccgccgttctccgcgcattgccaccaccacagccagcgccgccactgctgccgccattggtgccacccctcgagccaagggcaaggcaaagcactaaagggccagtaccagtgagtggccccacctgtgtccccgatgctgccgtcacctggtcctccgcctactgtccctctcagtgccttctctcagctcccaggccaacagtagccaaacccctagagacagtgatgcctgcccgcaccctggcctggtccctggtccttcactggcgccttctcggagctggcccagggggcctggagcatggacagtgtgggcgctctccctaccttgcctccttttttcttaaagcaaagtcacttctccatcacaaccagatttgaggctggttttgatggctgggtccttgggcctggccagtcttcctcttagcctctggatctagaagggaccataagaggagtaggccctggttcctgctgtcctggtggctgggcccagcaggggccctcactcttgaagtccaggactgggtctgacctggtgggagcacctgccagaggatgctctttcccaggacggatgggccctgtgtctcaggagtggggttgggggacagccttcagcagcagctcacaccctaccttccccagacttgcactggggtgggatttggagtgatgggaaggtttttaagggccggggatggatcttttctaaatgttattacttgtaaataaagtctatttttctcccgtgagtactgagttgacttgatcggtgtgagaaaaagaggaatataggctctttgaagcctaccttgttcctgctgagtcttccataccacctcctttctctcatcccttttcctgaggccacatctttccaggctcttcccactctccattagtggcctctgctcccggggagcattatgggctgttctctcttttctttttcaagcgcctgtgttcccctgaagcaggtgttgtcttcagcttctgtgtggcagtccctctctcccatactccctcgtgggacaggcaaagttcctgggagtggaactgaagcctaaatgaacagatgtcaggatgcctccattgaataatcctttatgaggacccatgtggggatgacacagatacagtgtggatccgaagcagctgctgcccccatcccttccctggaacagtccattagagtgaagggggnnnnnnnnnnncatacagcacgaagataggaagtctgcagaatgcggccagagctgaaagaggatgacttcactgaagaggcagcatttcaaccaggcttgagcgttcccctgctggggcggtgaggaagacgggactaaatgagcagagacatgggagtgggagctgtctgggaaaagcaagaatagttgggaggcttccagaaagtcatgtgggaaatgcaggtagggccctggagtgcaaggctaaggcatcaacagtcttggtggtttctgagcagtagagcagtgtgagccaa

SEQ ID NO: 180794 - DNA, 1343 bp, Homo Sapiens
  misc_feature (260)..(278): n is a, c, g, or t
  misc_feature (394)..(408): n is a, c, g, or t
ttgggaaagatgggtaaattttcctcatgtgaaggtgtactgcctggggtgctgcaggctggagatgagtattaaaataggaggagagtgagtgaaagcacaggaggaggaagggtcaggcaagtttggtgaacacagcaactggctatagaacaggagcagtgggagaaagtccagaaaggtctgctgagcttcagttgtacaaagctgtggagtttggcctttggtcatggctagattaggtctgaaagccttaattnnnnnnnnnnnnnnnnnnnggcaggtcttgtaaactgcatttctgcttgagaaattgatctttaaacttctagtctcttttggttttctgagatacacatctaacctattattgtaatataacattgtaaagaannnnnnnnnnnnnnnaagcagggaaaatgattgcatagtgatcaaactatttgaaattatgcccagtgttgtttcaaggtcctacattttgtaaaaacaaataaaaacgtacctagatctttgatctagtagttgaataagttgactgtagaagttatgagtgcttatttttcacatttgtttaatcacctttgattgttgcttttgagtgttaaatgagttagggtatataataacaaataataccatttctacagttttgtatgcattacaaaattgtaagggaggaggttgcgttttaactagtgttaaatcctaaatgactgaaatttgtgcaggtaaaaataatcttttacattaatagcttaaagtaataataaaagttgatatattgtctggtatactggtataatatttcataacaaaaactcattaagtgtatttcctagtctatgatatttacatttacttaccttttatatttttaagtaatcaaaatattggaatactttgattcaggtggtaaaaccaatcccagttaaaggagatggatctgaaatgaatcacttagcagctgagtctccaggagaggtccaggcaagtgcggcttcaccagcttccaaaggccgacgcagtccttctcctggcaactccccatcaggtcgcacagtgaaatcagaatctccaggagtaaggagaaaaagagtttccccagtgcctgtaagttaatgttacaacaaatatgttagtttttataatttttagcttcatttataacaaagaaaagactggccagccatctgttagaacatcagttttcaaaatatgatctgcagacccctgaggatggggggggtggttcctgagaccctttctggggtctattaggtcaactaattttgtgataaactggggatgttgtttgcttctttccctgcattgatatttgc

SEQ ID NO: 180795 - DNA, 889 bp, Homo Sapiens
ttggcctcgtttctcagattaagaaattaagacacagattaaagtatttgtccacagcaaggggtagagccaggaattaaagtcagacctgtttatctccaaaggcccgtatggatttttttgccataccacacgctcacttctgacctggagctcaggggcctctgcctccagctgctctcaggccaagataagtgcagtccttacagagcaggagcagagcagcaaacatcttcctgaatcctgagttgtttgtggcctcggcaccttccttaaaaagcgttttgctagatctgttgagatttcttcctgctccgtctaatcctgcctcccagcaccacagcaccaacatgtcacttaattgttcaggcttacaaggaagggctccagagaaagttagccataatcaacagaatctcatttataattaagctctatactgaaaatacagcaaaactgtaaaataggcaatactaattcaagttggcagactttttttctgtcaagaaccagatcctaaacgttttaggctttgcaggccacataaggtctctgttgctgcttcttggtttgttttctgttgaacctttaaaatgtaaaattcacctcttgagctttgaggtgggtggggcttggcccccagtctgtagttctattatatacgaatattttatatacattatctttactccttaacaagaacctctggggaagatggttttgttcctccttttacaaatgagaccaagttccagagttaaatgactcacacagaccacggacatggagtgaaaagctaggattgaacccatatttatctgaaattcccacaaattgttgattttcacagttaaaataggcttcagtcttttaaaggttcttacatcta

SEQ ID NO: 180796 - DNA, 907 bp, Homo Sapiens
  misc_feature (736)..(745): n is a, c, g, or t
  misc_feature (811)..(842): n is a, c, g, or t
gatatgagctattaagctatgaaaagatgaaaaaagttgcaaaagtttaaagatagtcattgcattgtttaaagttattttaaaaaaacaaataatacacacttgtttgcataaagaaaaagttgtctatgaattccaccacccagagatgactattaacagtgtctgtctacctgtatacacattttttacaatgttgtttagagtgaaaaattgtagacaacctgaaagtctgtcaataggaaattagttaagtaaattacacttcaccattgaaaagtgttcaccttatatgattcagtttaaagagtaggccaagcaactataaagtagttttcccctacttccttcaaaaaaatatgaaaacttgaacattaagactctataaaaactgccaattttttgcagacaatagagggaaaaagagcatgttaagtgtccatgtaggtgctagtagaaaaatgaagactttggaaaagaaactctgtaggacaactgacccagtttctttaaaaataaaattgcagataggaaacaagatggtagggggagcttgaaaatagatttgagacacaccgggtatttgtaacgtacagaccttacttggatttctattcaaaccaaattttaagaagtatattgccaatgtattaatatttgttgaagctaggtgatagctaaatggaattcattacacctctctacttttgtatatgtttgaaactgtctataaaannnnnnnnnnaaagcagtttacaaaacaaggtaatgttttgtcagtgtatagctggagttagaaagttacaggtgnnnnnnnnnnnnnnnnnnnnnnnnnnnnnnnnctatgacttccaatgggtttttatttttaaatcataattggaataattattatacactttaaata

SEQ ID NO: 180797 - DNA, 1402 bp, Homo Sapiens
  misc_feature (568)..(656): n is a, c, g, or t
  misc_feature (675)..(1002): n is a, c, g, or t
ttgggtaatctttggcactagattctttccttgtataatacacgtttaatccatgcacacttaaccttataaaacttgtttttttctctctctcatctagaggtcatcaaactccaaatggtcaggcaactggagcatcagacaatggctcccttttgctggggacccttagacctctgggagaaatctgactgcctttttccccaaacaacaccccctgtcagcaggaagtagctaagattggtcatggtccatattctaatggcagttagatgtgcctcttcagagtggggatgatatggacaggagacaggaagagggcagttccctggcaaaggcctcaccctcaagcctggagacctgtggccctaagtgggaacaggcatttctgtttttgtgcccaaaaagttgccttttggcccgccatggctccctattctgtacccatataaaccctgaaccccaggctccagaagcagatgagtagacaaggagacgagacaagcagatgaatggcagaatgatgcagcagaaaaagagagaagaggaacgtttgaatgccaggagnnnnnnnnnnnnnnnnnnnnnnnnnnnnnnnnnnnnnnnnnnnnnnnnnnnnnnnnnnnnnnnnnnnnnnnnnnnnnnnnnnnnnnnnngctccccagccatcctggnnnnnnnnnnnnnnnnnnnnnnnnnnnnnnnnnnnnnnnnnnnnnnnnnnnnnnnnnnnnnnnnnnnnnnnnnnnnnnnnnnnnnnnnnnnnnnnnnnnnnnnnnnnnnnnnnnnnnnnnnnnnnnnnnnnnnnnnnnnnnnnnnnnnnnnnnnnnnnnnnnnnnnnnnnnnnnnnnnnnnnnnnnnnnnnnnnnnnnnnnnnnnnnnnnnnnnnnnnnnnnnnnnnnnnnnnnnnnnnnnnnnnnnnnnnnnnnnnnnnnnnnnnnnnnnnnnnnnnnnnnnnnnnnnnnnnnnnnnnnnnnnnnnnnnnnnnnnnnnnnnnnnnnntcaggaaactctatttctatttcatacagaataaaagctatagttctttctacagctttcaaagctccttagggatctcacctcccattatgtgttttctcttatctcctactcctctctcttgctcacattactccagctagtctttccttcctgctgctccttgtgcataccagtcatgtttacaccttaaacccttgcactaactctttctcttgcctagaatcctcttccctcaaatatcttcatgactacctacttccccttcttcaagtctacatttaactcaaatgtcaccctctcaatgaagtctactctattttgtattctctgccctacccctcactcacggtccccagtgtttagtttcctgtctctccaccctcatagttatcctttt

SEQ ID NO: 180798 - DNA, 912 bp, Homo Sapiens
ctttgtacaaaaaagttgggggagggatacagtccaccccagagcccggaggctgggcctggccctggccctgcactgatttctcatgtgtccttcgggaaaagggggagtgagagtgggaaaaagggagagttcaggacacctggtccccagctccccattgcctggggcagcagccctcaatttctccttgtgcctcccctcttccaggtgccaaatagccataacctcgtcttggaactgttatgtggcctctctggggtccaggtttcctggtcaagcctgggaatgccagggaggaaagggggtctggctacagcgaccctggtcttaggcaaggggaacatttctccctggagagtcaggtcctatcctgtgctgccctgtctgcccagcccagggcgatgcctggaagcctactgacattgcagggagtcagcctcgcccccaccccctactggttttccaatgttttgactggagggcaaaattttactactactcatctttttggagaccagggctgccctgctggcagcctgccttctaagtgaaatcgactctgtttccccactttaaccccaaattggggcttggaccaagggaggtgagaccacctcccccaggtcccctcccctttcaaaatccatctcattttgccacttcatgcccctgccctaactgggtttttgttcattttttaaaaacagaccacccatcccatccgttttggcttcttgtcccctgtaaatagaccatgacttcgatcagtatttcttgtccccaccccttcctatccccagatgtgcccccatccccctgaagggagctgggctgtctcagtcctgggctcgcgcactttcaccccgggcagatggaagggggcggaaaccgggtgggcggggcccgctt

SEQ ID NO: 180799 - DNA, 852 bp, Homo Sapiens
taggggtggggcgagctgctccctgcaatgtcagtagcttccaggcatcgccctggctggcagacagggcacacaggataggactgactctccaggaggaatgttcccttgcttaagaccagggtcgctgtagccagaccccctttcctccctggcatccccaggcttgaccaggaaacctggaccccagagaggccacataacagttccaagacgaggttatggctatttggcacctggaagaggggaggcacaaggagaaattgagggctgctgccccaggcaatggggagctggggaccaggtgtcctgaactctccctttttcccactctcactcccccttttcccgaaggacacatgagaaatcagtgcagggccagggccaggcccagcctccgggctctggggtggactctatccctcccaggacagggaacagggatgggggaggtgttgaggcaacgcccccaccccccaggcgggagggtcagaatgcaacagagacggcacaatgatggggggagagggaagggccgagaaggtagaatctcaagtcaagaggcccaggggccacccaggtgccccatgggcagggagcagcccccagttggcagatgctgggagagccccagccccgttccagtccagagacaaaagctggagtgtgtaaagtctggcagtttgatctgcaggtgcttgtgtccgtcgaccaccaggccagccctcggcagccctcggcctctgtgcctcagccccatggggcaagaaagaggctgcccttctagccacctctgtctgcccaggccatcttaagggggcctgtgatatgagccctctggtccctgaagct

SEQ ID NO: 180800 - DNA, 601 bp, Homo Sapiens
ttggctccaaaaaaataatgggattacgggcgtgagccactgtgcccgcttgtgactgacactaggcagcgtgactttgttagcttccttgacccttctggtaatccaatttcctggccagtgtgatggtgtgataaatagacttgttgagaggatgaaatctgtcaaaaacacctgacacgtggtaggtgtctacaagaagctattgtcacattttatcggtagaaccccaggatgtcagagccaggagggatgttctagtgatgcccactccttttataaacaatgccccaggaggacacagcttgtcagagtataggtcccagatttaggtttcttgacctcagggttcctttcctgccagggcaccaaaatgaggcactatataggcttaacaagaggcagtctagggcacgtttaagcatttctgcttgtatatgcataaaatatctttggcacgctcactgccaagtaacccccacacgttggtctgggaaacttggtggtgagagagcagaatagtgggggacattacactgtgtatgtgtttgtgcctttggctgttgagccatgtgaatatattgcctattcttttttttcc

SEQ ID NO: 180801 - DNA, 2769 bp, Homo Sapiens
  misc_feature (139)..(193): n is a, c, g, or t
ttggctggaaggagagaaatcaaaaacccattcataggattatcgccaccatcacctctttcaattgccactttctcttcttttgaatttgaactctggagttactgttctacagtttggcggggacggggcttggggnnnnnnnnnnnnnnnnnnnnnnnnnnnnnnnnnnnnnnnnnnnnnnnnnnnnnnngttggctttgcgttaggatgctctgatctgacatttgacatgaacacaaagttgctagatgctcttgttgacttccagcagatgggatgggggaaacacagcagttcttggtaaagtcctttgtaataatagtttgatttttttatttcgagagaatctttcattttcctatgtatgcttttttccttttttgcccagtttccttatcacttgctgtagatggcttattttgcattcatgcagactatgttgcaagtctgtttcatctagtaaactgaaaattattgcttaatcaaactgccgtttgtcttttatatttaaggccttccccccccttccttatgagttctaacttagtaatttcaaatgtgaccttttatatctaagaccagtatagtaaacttagcccacagtggcaaataatgagtaatattgtaatatgttccagttgcacctcagtatgttaaacaggtaatgtaagaagttctctgaaatgtcagcaagtaagttctgaaacacatcatgcatgagtaggaataaaacccaagttccccataacgtagataacttaatgctgcataaaaatatgaaagtgtaacccatgaaggacactttttctttccactgcaaagttagccactttgctgtttttcctcttttttaaactttgaaaatagactctttccagaaattggagcaataatggtgttaccacacacagattaaataatttgtagatattttaagtgacttttgggcaaaactggaatgtatacttttaccttgtttcaaacacctaagaccagtaatttaaaaattactaaaaggtttactttgttcattaataaaacatttaacaattcaaattatatgcaccttttacctagttgaaaaaaatacacattcctgttttcacattatagcaactgattaagctgaagctgtaagtcattttttatagatgagtgatccgcatctccatcaattagaacactggaaaagatgttttataaaagaggtatttaattttgtttgtaggattaactcatgcaaataataaaaaagatatcctgttggttcaatagtacactgtctcctttaaggaaggaagcgtgatgaatgaatgatgtgtagacttgagggatgactattaaaggggacgtaggatgaagagaaagaacctacagatgacaatgaatgtaaacttatttttcttcatgtgtaagcagtgtgctcgctggtgatatccagatcctaacaagattacttggttagctggttaggaccagtaactggattgcgaccactatgataatattttgaaccaaatgttaatgcttgatgcagaattgtaaagcagcatctggttcctatatagccttaaggattaattttagtgatcctcaaggaattaaatagggaatttcagaaatgtagactgcaaaggcagtatacaggaaaaggtggagtgggttttgtttatgagggtgtctgaaaactaaaattgagcgggatatcatggtatagttggacagtattggtccttcacactttggccatattgtataatggagcttttaccaaagatgtatgagaagtgtaagactataaaaaaatgaactattcaaagtaaaactcttaacaaacattttacttaaagcagatgcaaaagggtattctcatgtaggctcctgttggtgcagagggatttttttgatttcaggatacaactaaagtacgaagttctcagtttcactttagtagaaagagctctagaaatgaggctgataaacacatctaagaacactggttgctttctaaaatttccaaagctccaccataaatgtaatttttagtgtttcaaatgattgcattttaaagtatataaatatgggttatccaatatcaatgctatagtaacatcctgaaacaaaacaagcacaaaggtataaatgcctaaactggaggaaacttgaaaccctcatgttaaatcttaaatgtagtatttctaacttgtgaagacagattggtaggcagccatttttttgtgtcttaaaataactgggggcatagttaaaattttatacatcaagtgattgctattattgaatgttgcaggtgagatgtggttatttttagtttatttgaaatgtttgactggaaaggggggagggggaagcaaatatttgaaatttggaaaaccctaaaccttttggtaagaaattgtaattttcacttaaaattttctttaaggatataagaggtttataattgatgtagttaaattgaacaataaccattggtgactggagcaggtaattatagcctgcagaaaaaattatctaagaattttaaaaataagatcctgaagttgtttaattgcatccatttctgtatttatgtgaatttataaactgcagtaagttttgaatgaggttaatcttgtttaatataagtaaatgagtctgtagactgtgatctccccaaactaaaaagtacagtacttggaattgtgttctttatggttgtagtgttggtaaagcactaatatgcagaaaataaaggactacacagtg

SEQ ID NO: 180802 - DNA, 1028 bp, Homo Sapiens
  misc_feature (521)..(548): n is a, c, g, or t
  misc_feature (721)..(729): n is a, c, g, or t
ttggcatctcctgtgtaatcaaggccagtgctaaaattcagatgctgttagtacctacatcagtcaacaacttacacttattttactagttttcaatcataatacctgctgtggatgcttcatgtgctgcctgcaagcttcttttttctcattaaatataaaatattttgtaatgctgcacagaaattttcaatttgagattctacagtaagcgttttttttctttgaagatttatgatgcacttattcaatagctgtcagccgttccacccttttgaccttacacattctattacaatgaattttgcagttttgcacattttttaaatgtcattaactgttagggaattttacttgaatactgaatacatataatgtttatattaaaaaggacatttgtgttaaaaaggaaattagagttgcagtaaactttcaatgctgcacacaaaaaaagacatttgatttttcagtagaaattgtcctacatgtgctttattgatttgctattgaaagaatagggnnnnnnnnnnnnnnnnnnnnnnnnnnnnaaaggggcagggttgaatcatttcttcatagggcccccccaagttgggactagggcttcaatttcacttcttaaaaaaaatcatcatatatttgatatgcccaaactgcatacaattttaagcggagtacaactactattgtaaagctaatgtgaaaatattattaaaaaggnnnnnnnnnccaaaaattgggtgtcttcaaattatacccttcaccttgacatttgaatatccagccattttgtttcttaatggtataaaattccattttcaataacttatgggtgctgaaattgttcactagctgtggtctgacctagttaatttacaaatacagattgaataggacctactagagcagcatttatagagtttgatggcaaatagattaggcaaatcttcatctaaaatattcttagtaaataatgttgacacgttttccataccttggtcgtttcattcaacaatttttaaattttt

SEQ ID NO: 180803 - DNA, 1114 bp, Homo Sapiens
  misc_feature (524)..(742): n is a, c, g, or t
gtcaagagtttagtaaataaattatagtggtatgtctatgaaatgaaataatacgtaacaataaaaaaaggtgctacttcaacatgcaagaaattgttgaatctcaaaaatattatgcttaaggaaaaaagacaaaaagaattcatactctataattctactgatatataattgtagaaaataaaagctaatatatggtaataaaaccagattagtactggattgacaatgtgttgaaagtcaaaagaagaggcttgagatctctttctagtgtgatggttttacaagtatatacgtatgttaatgtttaaaaatttcacacctcaaaaatgtgcagtataccagatgttaattatatctcataaagctattaaaattttatctcaaaattatagctttattgcatttagggcattatccaattttgaatctagtccagttatcatagcttaatgcagtattatgaaaataatgcctataaaggtccagttcctcaaacacccttggaaccaattttgtcatcnnnnnnnnnnnnnnnnnnnnnnnnnnnnnnnnnnnnnnnnnnnnnnnnnnnnnnnnnnnnnnnnnnnnnnnnnnnnnnnnnnnnnnnnnnnnnnnnnnnnnnnnnnnnnnnnnnnnnnnnnnnnnnnnnnnnnnnnnnnnnnnnnnnnnnnnnnnnnnnnnnnnnnnnnnnnnnnnnnnnnnnnnnnnnnnnnnnnnnnnnnnnnnnnnnnnnnnnnnncattttcttgtagggggattcccctgggtctgtgccactcctgggtgaatggctgatctgtctcactcttctccgtgatccgaaggtcacactatgtcactgatgaatccttatgtgtccacctggatgttccggttgaagagctagtgtctcaccactctttctgctatttgtgagagtggcacacactagctgcttctagtcaaccatcttggccccacctcactcacttttctcaagtaatcaaagaccagaaaggatgtcctttacaagagcagatcccccaaaatgtaagagttcactgaaaaggtgggagctcaaaccaagagaggacttatctcgcagcataaagacaacttgtacaagtgccaa

SEQ ID NO: 180804 - DNA, 1837 bp, Homo Sapiens
  misc_feature (1566)..(1574): n is a, c, g, or t
ttggttaaagagattattcagagaacttgtgccatatctcgtctgttttattgcatatgccatatgttaacttttattcaatattacattatgtagatatgtaatacaaagaaaatatttaggagaatggcaaaacacaaatggcaacataaatgtccatttgacttacctaacttcacaactttcaagttgaggatgtcatttattcttgaatttgtttttttactagatgctttcaattaatagccctatatttttgtgcaggcgaactgtataacaggataaaaaatgatttgtatgtattgaaaaggaggagaaattctcacagaacaccatatgagctttagaccaaaaggggaaacaaggtttaagtaactaaaatggccacttagtttgtgtttatttttttccctggaaatgtaagtagttggagtttaggctatggaaatattagtgcctttaatagatctctttccttgcaaagtttctttttagctcagcattgatctatcttatcaataggaaaataagttgacttggaactataaacaaaaacaacaccatatatttatgaacctcagtgaaccagcctagaaaaattgacttctgcaggtgctaaagcacctactaatacgcagcatgcacagcatttcaggttgtgaataccattttacaacgagtttgctgttaactctctttatccaatgcaaacttgaaattctgatgcggttttccagggtggtattttttcagagtattgaatttactatttagtaatttatagtatagctttttatattaaaatgtgatatttttaaaagagatatctggttcaattggtataatgacgtgattatgcaatatgctgatctacaccttgcgctcacattgtgccaaacttaaatgtgcaagtgtacgtgagaaaagcacatgtgaatgtgaattctttaattctttgcttattatgttaaaattagtcttcatagtccactgatgtgtatgcttgaataatgtctatttactttggaatttcaagatttccagcttcaatggtaatttataatttctcagatcaccttaagaaatattgagatactctcccacctgaaaataatctgttctttaacccacctgactatgggagtagccaggcaggtgcctcactggcttcttcagacgaggcttcctcaggtggatatatgactattaggggaaaagaggcttttgagacagcttattacctccttcccctttttgaactaagtacattgtctcagtcccagtatgaatttgtcccatttggggtatttttaaaataaaagatggctaacatggaatctggggcatagccttggcctttaattatggttgtaagcccaaataatggcagagaaacacagggctgtttttacaacagaaaactcaatataagttttatataagaatcctataaaatttgaaccagagctcctatttagttgttataatgtctcctaaagatcttaaatgcttctaaaagctaattattattccagagcaactttttccttttcccccttataaagnnnnnnnnnaaatccaaaatcttagatttctgtgccacagcaaaataaaatgatcaacaattaaagatctgtacttaaaatagtacaccatttttagtggagggagggtgcatgcctatatgatggtaagattcttttgaactctaagacaattcctcatggaaaaaataaatttcagtgcatattataaaaatgatttgcactgtgttagcaaaataagtgttttagttgtattttaaagacaattctaaatcatttcttctggaaagcaa

SEQ ID NO: 180805 - DNA, 1483 bp, Homo Sapiens
  misc_feature (145)..(153): n is a, c, g, or t
ttggatataagttttatataagaatcctataaaatttgaaccagagctcctatttagttgttataatgtctcctaaagatcttaaatgcttctaaaagctaattattattccagagcaactttttccttttcccccttataaagnnnnnnnnnaaatccaaaatcttagatttctgtgccacagcaaaataaaatgatcaacaattaaagatctgtacttaaaatagtacaccatttttagtggagggagggtgcatgcctatatgatggtaagattcttttgaactctaaggacaattcctcatggaaaaaataaatttcagtgcatattataaaaatgatttgcactgtgttagcaaaataaggtgttttaggttgtattttaaagacaattctaaatcatttctctggaaagcaagaccttaaattcttctctttaatagaactgcttttatgcaaagagatggtcttaacatggactaaacagtacataacaataatgtttgttatgtaaatagtatatcacatttgcttagtagcacaattcaacagcaggctgaaagtcgtggctcctctgctcagattgagttttaagttacctaatttatgtaatcagaatctattctaggtggccgtcaacgtaaactgtgtttccctattatatccctctggagactgagaatcaaattaaatagtctttcttcaaagcagtactgtaacatgaatgtatttatctcagtcaacagaacttatatgcccactgtatgtggagcttatttcaatgctaatttggcttagttagcagacctagaatctgcccaggtgagacctagaacaaaaatagctggggtgaaatggataagagaggtagaggtatatgtcaaggcagagccctatgaggaaggaagagttttcaaagaatatgaggaacatagtgctgagagtgtggctgccttcagcaccgtacacctaatctagagaaaatatttcccatgtgggaggtcctgtctgcattcagtccacccttttctgcctgcttcttcctccaagtgcctcaacctctacatgctcactctcctccccttccctcagcccatcttggtctaagcagctttcacaatccaaaccaaacatcaccagccacccgctgataagtcaccagcatttactttcctgagttactttttctccattcattgagactatggattcatcccaactccttctaaatccctcaaccatccagctatattttggctaacctttgccctagacactctaccagatgttaatgcagtatcaagtgtaaattgtgtcaccctattctgttctacccttttccctgctgccgaaatatcttgctctcctctacctcatccccaaagagcctataaattcagagtatccaaccttttcatggattcactcactgttgttcagtaatacaacttccatattttaaataaatcataaaagatttttg

SEQ ID NO: 180806 - DNA, 1032 bp, Homo Sapiens
  misc_feature (543)..(558): n is a, c, g, or t
  misc_feature (571)..(611): n is a, c, g, or t
ttggctgaaaacccccccgatggagaaagattttcaaagatggtagaggtatgtgttttttatgcttacatcctcttcttagcacgaaatagaacttcagaggattccactaaccaaaatgtaatcgctttgtttttcccagcatatattaaacactgaagaaaactggaactcgtggaaaaatgaaggttgcccaagttttgtgaaagaaaggtaaatacatactgaaagaaaggtaaatacatactcatcacaagaacgacgagaaaggcttttgaaaatgtgctccgatatgattatagcatgtaaaaatacatgtatatatttcacataaaaaatgtaagttgaactttgtaagagtacaaccactttgatttacctctgtattttttaaacctcataaatttcttgtcattaaattcctggaacaaacatcttattattgagaagaatactgtatatctactccgtgtaatttgccatataatgtggcatttttatcttatatctgataattgttctatcataatatgaagttttcannnnnnnnnnnnnnnngagagggagtctnnnnnnnnnnnnnnnnnnnnnnnnnnnnnnnnnnnnnnnnnttaaagttcgtgatacttcaggtaaactgttatgcacctatacacatagacatgaattttttcctgtttgccaatgcattatattgtcttttatcaaagataaaagataagaatcagaaactttttatttctctgttgctactggcttccttgaggccgtctttactaaataaaccctgggtatttgcaaatcctggaactgtgctttttactgacttcctgcttcccagattgggggtggggagtctttccaactctgaggtcttcccaagttcactccttctgcaggtgaagatagtcccacttaggatccttacctgacactgtcatttaacgctctcaagggtgaggttctggcaccctgtacttggaatctcaaaccgtccttatccaaacaaaatacctgttaccttacttcaaa

SEQ ID NO: 180807 - DNA, 1714 bp, Homo Sapiens
  misc_feature (335)..(560): n is a, c, g, or t
  misc_feature (982)..(992): n is a, c, g, or t
ttggaaatgttgaatcatagttaatatcaaaccttgttattttttgaagataatcttttcaaatcacaaagacaatttagcaacattacaaaacatttagaaataagaagggaaaacagtactcttaattcctctacttttaaaagctaccattcatctggtataatggttttagtttctatagtcttttaagaattttttttattgtcataaccatatgtacatacaattttgaatcctgccttttttcacttagcattatatcataagcatttttccaagttattatagtcgttataaccatcatttttaattggctgcattatattcttttnnnnnnnnnnnnnnnnnnnnnnnnnnnnnnnnnnnnnnnnnnnnnnnnnnnnnnnnnnnnnnnnnnnnnnnnnnnnnnnnnnnnnnnnnnnnnnnnnnnnnnnnnnnnnnnnnnnnnnnnnnnnnnnnnnnnnnnnnnnnnnnnnnnnnnnnnnnnnnnnnnnnnnnnnnnnnnnnnnnnnnnnnnnnnnnnnnnnnnnnnnnnnnnnnnnnnnnnnnnnnnnnnnaaatgctctagatcttgtcaagaattattgtcatcgttactgagtgcacatatcaaaaattacttaagtatgtcctatttggggacttttaggttgcttccacttcttgtccttttaaaaccttgttatgagtaacaaagtgtaccttttaagatattcttcagaattatttttcatagggctattctactctacagttttttaaacttttaaattggcttgtgctccacttgagggtatttgtaccgcatctacaccttttgtattgttgggagatgttttggattgtcttcctttggatcagtgtgacacaatattcacttttgtggaaaaaaatgttgctacttggaaatcagtaagtgccttagtttcttttcctgctaactttatctttctatagatccagaattctgagggtagannnnnnnnnnnaaatttatttgtagtattgctgaatgccaacaagtttctgcctatgaaaaaattatatactgctctctcgggagagccaaataaaaaccatgtgtggagaaaaacttgaaatacaaaatttgatttaatttgtgtaataaaaattaacttgaaaattcacactttcacatgtttaaaacagttacttagtatcatgttttcttatatctgaaaatatttttatttcattgaaaatgttatttgcttaaaaaaagtgaaagtggcatagtagattctcagtgcatgttagtgttctttaatatttcactctggcaacttattattgaagaatgtgtaacaagttctgaagaagagtgataatttccgtcttaatttcagaatacattctattctgctgggaaaaattacttactacgtatgtgcaatggtaagtaattgagtgataaaatgattgctttttaagtgtaaatatgcccagaaaaacacatggttgaattaaataccagtgataacattttaaagatagattaggtatctgcatttttaactaacaatctgatttgttagaactcattattcactttaaactgtttttgttctgggcataagcttaaagtcagaaacgtagtaaagtttgtctttttcatgtcatgttgaacttgttttgttcctaatttatagtacttttttgtggcagtggtttcggccccaatttaagaact

SEQ ID NO: 180808 - DNA, 1196 bp, Homo Sapiens
  misc_feature (508)..(612): n is a, c, g, or t
  misc_feature (636)..(671): n is a, c, g, or t
  misc_feature (725)..(818): n is a, c, g, or t
atgactgaccaatggagcacgtacagcgtggttatgttgatccatatccaggacagggtggtgcaaaatttcatcacgtttactcagaacagtggacaattttaaaacttaaactactatggaagggactatgactgcttcttagggtagcagatattctagatactcttcagcaaaatggactccacactgtatctgataggtttcaaaagacttcaaaaaaggcatgttagtgtacacacatgactgggattaacattctagaattttaggactcaatggtacaccactgaggtattgaaatgaattcaactgtaaatttagattatggttctgaggtggagatgcataaaaatgaaaacttaaaacaaataccaacacaattgggtatttctgggtactaacgttccaggtaattatctttctcgactttcatttctaatgttaatagttagcaatatcaataatattgtttataaaagaaatactgtccaaactttattaaggnnnnnnnnnnnnnnnnnnnnnnnnnnnnnnnnnnnnnnnnnnnnnnnnnnnnnnnnnnnnnnnnnnnnnnnnnnnnnnnnnnnnnnnnnnnnnnnnnnnnnnnnntttctgttcccaaacattttcgtnnnnnnnnnnnnnnnnnnnnnnnnnnnnnnnnnnnncaactggccgggtgcagtggatcatgcttgtaatctcagcactttgggagattnnnnnnnnnnnnnnnnnnnnnnnnnnnnnnnnnnnnnnnnnnnnnnnnnnnnnnnnnnnnnnnnnnnnnnnnnnnnnnnnnnnnnnnnnnnnnntgtctaacgaggctgaagaagtaccatccatgagtaagtgcgtcaagggcaaacaaacatcatcgcatatggacagtggtgtgaaattcgagaaatccgaggagggttaacaacaacaaaaagcacaccaccacgccgatcttcctcgggtcccaggttggcaactcaacgcccgggaggaatccccccggaggcgcgccggtcctactggcctcactccctacctcctggaggtccggagtcccgctcctttccctcagtggtacaatacccgtgtcggtccattccctcaccgtgagtcgaggactagttctcctgactaggcgaccggcacacaccgcctgcgaccagctccacagcagcgccaacttttttgta

SEQ ID NO: 180809 - DNA, 1037 bp, Homo Sapiens
atggtgacagagtgagaccctgcctgaaaaaaatgggccgaggttggggggattattttctttatactttttcatggtccttttgttgattttggaatatggggatgttcaatttttcagaattgttttgactttttactaattttgaagtacttttagaaaccaactacagaattttagtataaaatatagctaagatatggttaagttaatattctataattcaatatttaatatatccatagatatttaagtattattagattataaggttcgtatgtgtctataaggttcattttttttccctcagtagtactgagtcatacaaaggggattttgaaggttttaaatttgattgtttataatatgccacttttaatccttttatgcatttgtaatattatgaagtattcgacttttggtcatttttaccctgcagaccttgtatcctacttatggactcactccgaggcccttctcggtcaaatgttgtcaaaattttaagagagtaagttcacactttatttcgtattctgatggggatgaagaactatgtatatttatatatgtgtgtattcttaatatatatgaattattgcaggtatttagaagtggaatgggaagttaaaaaaggaagcaaaagaagtttttccaaagatgttatgaagggctctaatccaaaagtaccacagcaaaacaacttcagtgactgtggtgtatatgtattgcagtatgtagagagcttttttgaggtgggtttcaatttgttggatctgctataataaataataaaatagtgcatttgactttaccttagtaaaaaacacaataagcaaatattttaaagagtttcaaaattattgtttcaaaaattattccatggagcaaaaacttctaaatggaagaaccttcaaggcataaaaatagtatatttacagttcatcaaatccaaagcttgttgagctcattctatcactgaacaatcaacctgccctctctactagctcttgcaccttaagaaatctctcccatgattc

SEQ ID NO: 180810 - DNA, 2186 bp, Homo Sapiens
gattttaattataaacacatctattctatacattgtattttaacaatattttactcatgtatcatctccactatcaaattagtgtataatcatttggtaaattagatcaaaaacatatactggtcattgtttttgaaaaatctaaatttcatcttgatgaagactaaatgtgaaatatcttgggcagtagtagtaggagccatacaccagtgaacaaattatgaaaatctgtgaaaggaagaggaaaaatgttcaaaatttagaagtatatttattttgggattgcttaacctactgtattattcgtaacaaccagagctactaatctgacctgacaactaatatgtttacattagcgccttcttttacaaatttgtgagaagtttcattatgaacactctgctgacaaattgtgaatttaaagccacatgtttctatgttaaaaaggatcaaaatgtttggttataaatcctcaggattaaaagtattagaaataattttacatattcaggcaagaagagaaaagctatttaagatttcccagaaatattttggaaaagagcagcactgggaaatagaaattaatgtaatcagttgcaagatacttgccttctataattataacaacttaatctgttaggcacctttggctattcaataatcattggatgttgtaatagaatgtaagtggcttttaatgtagctccaaggatatttataaattgtgttattgctgttattgttttaaatgtgagtgaatattaaattataggaagtggtatcaagtgataggaaaatggcattaggttttgaaattttattttgataatttaacacatatggagggtttgctatatgtatgagatattctgttagatgctgtgggagctagagagatatactctttttcactcaaagagagtaaaatatagtgggagagaccctaataactattttggtgaaggatgaatctaattccttatctctgacatcgtaagaagtgattagagacctagtttatgcataagcaattccttagtgtccaattaggttttattggcatgaaaaagaaatattaaaaaacctaatatttatagaactccaaatctcctagaattggataatgtattttctagtaagaaaactatagaaattttaaatatatatatttcctgtagtatcaagactctggctgacattgagagaaatatatgtacatgttgtgtttattttcagttttggtgttggattcctggtattgtcacctaagtgctcattttcaggaaaatcagattctacaataaacacttactgcttaaagttcagtaaacttgtgataacctcataacctctgtagtctaaaagttaaggaattataagatgtcacatgtcaagttaacatccagttctacttcttaaccttttttccctttgtaacagcactttaattagacatgatttaattagataacaattattccatggctggatatgtactggattttcacttacagtacattgatttggtgttgatacacatttgaaaagagtgaggaatacaatacatttttaatacaataggtttacaaattttcctactggtgtgaatatggagtcaaataaaaatccagtttacatctctgcagagagaaaaattgttatccatatgtcttttatattatacatctttactagagataacttattgttaattttgtcaagttatgtgtaagtcccatttatttttaaatactaagcaaaaagttccaagtttgccttaaaatacaagtgaagttaaagaactggatgataatgcctatatttttgccttatgaattgtgctgtgtattataaaccagcaacggttttgattttaacaggattctgaaattttgtagctgtagagtactaatatttgtactctcttgcaaagaatgtgatctagttgtggattatgttagtttaaatgtttttgtatatgtattttacctctgaacatgtacctttttagcatcagggttttattttatttatgtttacacactaaagtgtcatttaactagttaagaattgtattcttttttattttaaaggttatttgtgtgtatcattgtggtaatgttctgtaattattatggttaaatttcatttaatgtaaaatgtttaaaataaaatgaaaaatctac

SEQ ID NO: 180811 - DNA, 1334 bp, Homo Sapiens
ttggctttgtaactaaagctgccagcctggctcatctttcctgacaacgtgcatctcctgccctgtgatcacctttgtgcttggctcctgccctcagcctgaatgtgttctaggaggctgaattcctgcttcgagtcctgcccaagagccagtcttggctcagccctacctcactctctcccaattcttcattcataaagtgccaaaaagattagacctgtaatttgttagccagctttacagggccaggactgagtgagtgcctccttaaactttgtatcctgtgtgcctcccttgccttaccctagtcccagccctgcagctttaagtaattcagacatggattagccatttcccagttctgtctcatacagtccagcctctgccaccttccccaccccttcctttattccatcctaactagttcagccctagtcaagactggatagactgatactgctttgtttcccccaggaaccaaccacccaaccccagtattctggtaattttgacaatgatctatatgaaatttatttgattgacatttagactcatgagttaagcttctgctgaccatttatgttagggtacaatcagaggagcagaaccactaagataaagattatgtatatatgtattttaagggatttattatagggatctgaccgcatgccattgtgggagctggttaaacagtctctgtaaggctgttgtctttgcatctaatgctggagcttgaagtctgcagggcaggcactcgggaagggaagatggatgtaaagtgtgggagaccgaggacacagtggagcccacgagcacgagctggaacccacgaggatggcctggaacccatgtcagtctctcaccacctccagcttcgatgatgtgggtgtcctgcagaagaagctggtgcccttcctcacagagttaaatatgcatctggcccaggaattagagaagctgaaaggatgatcctggggaaggtggagcagctgcaggcctggctgcaggcctgactactgcccacaccaacgaggtgatctagcagatacatggcaacgtgtgaactgcaacaacgcctggtgccccagcaccaaccttccaagtgtaaaaacaatgtgctgctgcttcacttccgccctccggttatcaagcaaaatgtctcttgtggcccatcttactgggaagagagttccggggaaacatagccctcaccaaaggtgacacattacaaagccaccctaccatgaatcccgctcccaaggttctcactgctcacctgaggataactcaatataactatgttgctgaaatgcaaaggctgaggaccatgg

SEQ ID NO: 180812 - DNA, 1766 bp, Homo Sapiens
ttggcttttgcatatcattttcagaggaatttaataaaagaataaaaataaggaagcttttaaacctcattttctgcaattcttatttaattaccaatgtttatgttagatccatgtgtcagtggtaataatgatgattatttttgtttgataaaacatagtttataaaaataagtgtttatatatttttcatatggccaagatataggccagtgatagtttattacattgcccagtttcaagttgttttagtccgtttgtgttgctataaagaaatatctgagaccaagtaatgtaaaaagaaaggaaatactgtacaagtagtatgggaccagcgtctgcttttgatgagggcctcatactacttctactcatggcagaaagcagacagaagcagatgtgtgcagagagggagagagagaaaaggaggtgccaggctcttttcaacagccagttcttaaagaaactatgaatgagaactcactccgagccattcatgagggatctgcccccatcatccaaacatctcccaacaggccccaccttcaacagtggagaataaattgcaacatgagacttggcagggccaaacaaacaatatgaaaaccatagcactagtcaattataaattcaattattttttcctattacagtattattttatgtagttaagcagaagtgtttacacacacataaatcatcaaactgcattacttataagacatttatagtttttaaactaaataaataatttgcattcaagcaagtacctcattttgttcttttaaacaattattttattcattctattgcttaaattctgccatgttgtatttcagaattaattactaatgtatacctatacaatttattcttaacgaaagctttatgactgtgagttttcaatcacagtattatctaaattgctcccattgcttcatatgaaataaattcaatgatccaaaaatttacctgctttaatttttctcttcttatttaaaaatgataatattttgcaacatgttccataagtcattgaacactgtggcactgtgaattttcaaccaacttagagatgtcagatattcttattattattcatcactggtttactataaaatctatttttcttttttctcagaactgaagagagatctggccaaagacataacctcagacacatctggagattttcggaacgctttgctttctcttgctaaggtacaactcagatactttaggaaatgcctcttgttttataaagactaatttcttagtccattttgtgttgctataagggaatatctgaggctaggtaatttttaaagataaaaaggtttatttggctcaggattctgatggctaacaaattcaagtttgggtatctatgtctggtgagagcctcaggctgcttccactcctgacagaagaggaaagggagctggtgtgtgcagagaccacatggcaagaaaggaagcaagagagagaatggggaggtgccagcctcgttaacaaccagctctcgtggttctcatgagcaagaactcattcccagtgacggcattaatctcttcatgagagatcagccccaggacccaaatacctccctctaggccccacctttaacactggggatcaaatttcaacatgaggtttggaggggaagaacatctaaaaccattgcaagtaaaatcttgtatctgagctccttctagaaatgagtaatagaatacctttttctcaaaaaatattatttatctgagttt

SEQ ID NO: 180813 - DNA, 929 bp, Homo Sapiens
tgatttaccaaaaattaaattttaagaactaaatattttacactaattattttgaattagaaaaatttacatcacttaagagcattagatctttgaaacctaaaactgcatagcagaagggatattatttgagggcccaattcctcattttgtaagcattctcataaaacaattctacaatatatagaaaccattctctaatacatagcttacacatatgcttcaaattaagtacttaatttttaaaactttaaagttttcttaataattgtaaaattatcacttattttgaatttcaaattaactatttccagaatcaagaaaactagcactagttctcacttccaattctatctaccactctgtcacgccttttcagaatgtgttgggagaatattattttgcctgtgtgtgccatgataactgtgtaataaaaggcttcaagttatgctattacccccagcttttctaaatgatgcatgggtatgtaattccttaagggataatgctatgagttacaaccattccaatctggcatcaaaagaagaaataagcaattacgtttgttcaacaccttataaaagtaaaaaatatgagaacggaaggggtgaagaatcaaaccctggagaactcacatttaggaaactggcaaaggaaagtgagtcagaaaagcatggtgagaaagagaaacagcagacataagaatggaaatgggagaggatggtgtttttaaagccaaaaaaagaatttcatgtttgctgttaaatactaaagcaataaacatatagctaaatcatctccacttcccagttatgccctgcccctcccagctcttaagacagaacagggtttgtggggagatgttcaaattctttataactatcccatctcagaaaaatagggtaacttctacgttaaaaaaaagccaa

SEQ ID NO: 180814 - DNA, 1457 bp, Homo Sapiens
  misc_feature (806)..(814): n is a, c, g, or t
  misc_feature (1151)..(1164): n is a, c, g, or t
  misc_feature (1189)..(1238): n is a, c, g, or t
acaaaaaagttgggttaatatgatagttcggcaagcctgataggcttttgaggcatacagaaataaacgtatgccatcacctgagatttttaagcatccaagatgctttagtttacttttcttagaggaaacagtgaaaagaatatgtggtttaaaaatggtcataaaaaggacactaaataacctgattaagctagagtatagaccaaattgccactttgaattgtttttaccaaaggtatcactttgaataaagataactttcatttagacatctatctttatgtgttcctgccatcatttcagtgagatcagaggaaagttaaattagaacaatgaaaaagcttaagaaatgaacaatcatcatgcttttgtgtatgcttaaagtgagtacatgtaaaaaaacatcaaacagaatgtagactgtggtacttgagtatacctgggagagctaattgcattaataacatattatgtagtttcatggctaagaacagtggcatctagttttctgcctataggggaaggaagatctatgaacctccacggtatatgagtgtaaaccaagcagcccagcagcttctggagattgttcaaaatcaaagaatacgaggagaagaaccaggtactcaagacactagaagggctctcatattattcctctgttactacatttagatgtgtatatgacttaatatctcataccactatggaagcaagagtcagtatttttgtattgtactatttcttgtcatttttgtccaactttaacttaaatcccataggcttcaagttgtagtgaaagnnnnnnnnnttggcattcttttatagtataattaacaccattccagaaagtgaggatttttcacaaattaaacataagtcacatttgatataaatatattactgtataaatatttttgtaaaatatatctattatgttatccctaatcaatggtgagatctatcctgcaaaaatatacttatcgttcttttattctccctcctttcattcttaatattgagactaggaatagttttcttcagggtaaatataagagaaaatttgttcttatattcctaatatgtagacacagtgtgtggtatataatagaaatgtttattgtcaataaatctttatgggaggttcnnnnnnnnnnnnnngagagagggtctcactttgtcacgnnnnnnnnnnnnnnnnnnnnnnnnnnnnnnnnnnnnnnnnnnnnnnnnnntgggctcaagtgatcctcccaccttagctgaactacaagtgcatgccaccatgcccagctaatttctttgtgtgtttttggtagagacagggtttcaccatgttgcccaggcttttctcgaattccttggctcaagcaatcctcccacctcagcctcccaaagcctccaaagtgttgggattacaggtgtgaacaacaccgcctggccactggtgagac

SEQ ID NO: 180815 - DNA, 1204 bp, Homo Sapiens
  misc_feature (83)..(99): n is a, c, g, or t
  misc_feature (235)..(248): n is a, c, g, or t
aataacatatctaaactgcctcccagttcttatcctaggaaactaacctttccaaaatcaggaaaaaatgaattaacttaaannnnnnnnnnnnnnnnnaaaaaagcttaacctgaaaatccctgtccccacccaaactccattatgctggaaaaaatgaagctgctgcttctgtaacttcttttcccccaaaaaaacctctataaaaataaaccatgaaagcagtgaaaagtcnnnnnnnnnnnnnnaaatgtatcgctgtgttctactgtatatcttcttacagttgtgaggtatttgaattgtgtgataagcaaactgatttcctatatttttttgggatgtaattctgcagtaaatgtcatgctaaattgacaatgggctaatttctccactattcttattaccatcagctttctcttcttgtttgttccctctagcatttccaccagtagactctgctcacttgggatggagatgacagtcaccctgcttacacactgttttctggcttacacatttatgtctgctcattcttctaagcctcttaagtcctttgacactgagttaactatatttctttgcaacctctgtttactatatagcaatgaagttaaagtaacaaatcctttctaaaactactccagtttgaccatggaattactgtattttcagaattcaggcagatgaagccttgattatttaattccttccataaaaatacagctggccttgccagatgctatcttatctgtaattgccaatatgctaacattgcatttctttctcccttagttggtcagaaaatacaatatggcctcaaggggtgctggtgcggcacagcagatgtttatatagagccatggggccttacaacgtggcagtgccttcagatgtatctcatgcccgcttttatttcttatttcatcgaccattaaggctgttaaatctgctcatccttattgagggcagtgtcgtcttctatcagctctattccttgctgcggtcggagaagtggaaccacacactttccatggctctcatcctcttctgcaactactatgttttatttaaacttctccgggacagaatagtattaggcagggcatactcctacccactcaacagttatgaactcaaggcaaactaagctgcctctcaacaatgagggagaactcagataaaaatattttcatacgttcta

SEQ ID NO: 180816 - DNA, 1878 bp, Homo Sapiens
ttggctggaagctggcctttgagtgcagcctgctagagtccgggtgtggttctgagccactgctgggagccatcgggatggcaggtgttagccagtcccattctgtggggcagaggctggatactgtgagtgagcagagctccccgccccctcgcccagcccctgtcagcctgttatgcttcccgcaggctagccaagcagtcttcccccagaaggggtacttttccctgcatgaatcctgttcgaagcgcctagtgttaaggggggaagtcattttgaaggtgattcttccttagctgggagcaggatctcttgggccttagttctctgcatccagtgtatgggttacttggcaaaggattatactcagggtttggagaaaccatgtggaaggtaacctaattggtagactctcaggagtgatctatttctggtgattgagtcatccatatttaagccagggccacttctcttgagctgatctggacccgcttttttgtgacggtccctttggcacgctcttgagtgagagtggaacagcccaggtcgggagcagagtctgttcccattgggttttcttgggcatgagctttggctcagtcttttgaccaagggagtatttgagccagaagagtgttcagagttgcatgaatcaggcctaagcaaagggaaaggagactctccttttttagtccacatatggcagaggaacgagcgggtccccgctaggtataagaatggggccctcaggcaggccagtgaggactttgtctagctctgctgggctgaaggccagtacctatgaccctgggactgggccctggggacaggagactgacccttggtctgagggggtaggatagttggaagggtgtcaaggtgtttgtggtccatcggtctggctctcaggaccatgtggacctcaagcgtgtctcctcccccgccctctgggctccccttccctgggcgcagtctgtctcttccaagttcaccacttgtgtctctgctccagcagctgtggctgggtgcgggtgccaattaagcaagtgggactgtaagtgacaggctaaaattaggtgtatcgacacccccagttctcctttcattggggttgttctgagccttctagactgtaagttgacagtcacctgccaagcttgaggagcgggtgtggggcagggcctcctgggaatgtgagtttgggaagttcttggttactggctgctctgagtggggtctgtgtgtgtgcgtgcctgctgcttcttcccctgcaggttctgacaggaacagcatggattccgtggatagctgttgcagtctcaagaagactgagagcttccaaaatgcccaggcaggctccaaccctaagaaggtcgacctcatcatctgggagatcgaggtgccaaagcacttagtcggtcggctaattggcaagcaggggcgctatgtgagttttctgaagcaaacatctggtgccaagatctacatttcaaccctgccttacacccagagcgtccagatctgccacatagaaggctctcaacatcatgtagacaaagcgctgaacttgattgggaagaagttcaaagagctgaacctcaccaatatctacgctcccccattgccttcactggcactgccttctctgccgatgacatcctggctcatgctgcctgatggcatcaccgtggaggtcattgtggtcaaccaggtcaatgccgggcacctgttcgtgcagcagcacacacaccctaccttccacgcgctgcgcagcctcgaccagcagatgtacctctgttactctcagcctggaatctctaccttgctcacctcagtggaaataacggtcatctgtgtcgcctctggtgcggacggggc

SEQ ID NO: 180817 - DNA, 1632 bp, Homo Sapiens
  misc_feature (263)..(304): n is a, c, g, or t
  misc_feature (1335)..(1404): n is a, c, g, or t
ttggaacttaatgtgagagccatattcatctgaggcttgcaagggttggacagtgccctacctagatattctttactgggtcagtgagcaatctccagctgccaagtgatgtcagctcactccaaagaattggccttgtctgacagaagtatgcccaatcaaatgtatgcatatgaatcactgtcttaaattctacttctagaaaatccaaactatgagactcttattaagaaaaataagcagtatttttctgaaattcttannnnnnnnnnnnnnnnnnnnnnnnnnnnnnnnnnnnnnnnnngctagtattgcagattttgtttcacatagcattctttctctctctctttcgctccttctctctttgtctgagagcggtcagggattattatcagtctgtcatcggtcagggattatttgatttaaccttcacagtggttttagcagatagggagcattatcataactggttttgttttgacaacagttagagtagctgtaaattggataatgtaaatattggccaaggtcacacatttagtaagtggtgcagttgagattgcaatctggtctgtctgactctagagtaacggaactcttaactgctatgccgcactgcatccccttataatttagggagcccagtgttggtgaacggtaggacctatcaccagctccctcatagtccaattagatgatcaaatatccttttcaaatattcaggcacagagaattgggcaaattataattatatatgtagggagaatgtatatgaatatgctttacacgtctatataatttaatgaaattcatccaggtatgttcatttggggcaatatccttgtgaggcattgtggaaataaactaatgatttcaaacagaaaggaaaagaaaaacgggatggtaggagttctgttagacaggtattctgtcctttcccctacctactaacttaatgcaactttgcaaatctatagtaggttttctttaggactacactgctctgatcctttgtttatgtttttctctcatccattgtggattctaatgccctcagtactgaataataaacacaagtctgatggtaggggctacctaatgaactctacaccctatatctgcatttgtatattttttcttaatttatgttagcttctttggtctaaaggtaggaacttaaacttcctaatatttattttcacttgcattaatgatcttttgtttagaattatttatgtactcataatattgctccttaatgtattctcaaatgtgttacttggaatctttcttacagaactttggcatgtttctatgtttatacttctgggnnnnnnnnnnnnnnnnnnnnnnnnnnnnnnnnnnnnnnnnnnnnnnnnnnnnnnnnnnnnnnnnnnnnnnttctcatcaatgtttacctggaatagtacagggacaaattccaatattcttacttatcacagcatattacttggcaagtcctcagatttatcagtattatatttgaagataaagaactatctaataaaacagaataaagacattcaaaagttaaattttaaaaatttcatcagtggattttaattgggaaatatgcatgtttcaataaacactataaattgtttctgg

SEQ ID NO: 180818 - DNA, 1299 bp, Homo Sapiens
ttggcaggaacacaaaaagccagcagcctggagcagtttagctaaggggttgctgtcctgcacagtcagtaggctctgaaggccatgtctgaaccacagccctgcctgcgaatgaatctcaaggatagtcattggcttactttatttttaaaacctcctctttaaagatttcctcttgaagagacagctcactttctacatagtcccgtatggaagtggactgctgaagaaattagtgtttccattcccctccaccgtctcccccattttttccgaacatttctttctgtctttgtccattttcatcgctgagctgaagagcatgctttatcagaaacccttttgtccctttccttttccatgcttagagggaagtttctgacttgggagaacgccttagagttcttggggtctgaactcctctgatgccttccaaagtcacgtagctgtaagacccagcgggtgccagccgggagggtgactccagctcagcagcatgtatggaagtgcattgtgaccatgaaggagtctgccagtggccaagccacctagtgagctccctaccaaggaacctgggtgtcacctgcaggtggccaagagccagtttttatgccaggcaggggactggttggactctattgaggcttcttcctgtctgtggggagcactcctgtccccctcgtggtagggatacctgtcaccccacaaagaggcagggtgacaggtgttggccccattttaggcagacttgggtgtcatgacttctagttcacttgttttaaacctacctgtgatggcagctgcaccatgctgccctcttgacacactgctggagcccagagcacaggccagagtctcagcctgagccccttccccaggcagtacctgacaaggatacctgggattggggccagctttccagtcagatgccacgtttcctttgcccactgccacggggcactagggcctgccgcaggctctcccatgagggagaacgacctctgcaggcccctctgccttcctgcttcctaattgaccctttctctggcaggtgaggtgataaagcacggggacctgagatgcgtgcgcgatgaaggaatgcccatctacaaagcacccctggaaaaagggattctgatcatacagtttttagtaatctttcctgaaaaacactggctttctctgggaaagcttcctcagctggaagctttactccctcctcgacagaaagtgaggattacagatgacatggatcagtggagctgaaggagttttgtcccaatgagcagaactggcgtc

SEQ ID NO: 180819 - DNA, 1256 bp, Homo Sapiens
aattgatgagcaatgcttttcaataaaagccaactttgtacaaaaaagttggctcttcagagttatcaagagcaaagagccctcgaggtgaaggtgtataaatatgaaggactgaaagtggacagaagtaggattaaaataggaagcatttgggatggggaggaaaactagacttcggctaaataattgggagggagtgtttataggaagaaggaagttatgaaatataaggaatgggaattaataaaacacaaataccactttcaataaaaatacctgttggtttttaccagccataaatacactatcctttccacattcacctaagcatttagtttttacagtccattactacatttaaaccaaaacattttcctttgagtgttccacattccttggtactgtctttacttatttgcaatatgatgagggatttgggctgtatattgttcttttcttttaagccacccttgcgcacataattggcaaatagtgtcaaaagggtaactgaggtatagaaaagataatgatatatgctatctgattctaagatatcctgatatcttctcttttgctattttttctttctataatatttcctttacagtactgccagctttcttcttaaatgaagaaaaaatccatagctttgtcaagctatccttcttctgaccttatagctatgctgctgcacaaactgccatagggtaagtgcagaaaagtgtagcaaggaggaagtcaactttctagggaagataaatagttctaattctctaatcatcactactgccagttgttttcaactatgcaacatagtggaaaaactatttactagtcttgagataatttatttttaatgtatcacattttctagatcccaagcaggtctgttccagcctctgattgtgtatcggggcaagatttgcacagtacagtgtatgaagttattcagcacatccctgcccagcagcaagaccatccagagtgaactttcatgggctaaacagtacattcgagtgaaattctgaagaaacattttaaggaaaaacagtggaaaagtatattaatctggaatcagtgaagaaaccaagaccaacacctcttactcattattcctttacatgcagaatagaggcatttatgcaaattgaactgcaggtttttcagcatatacacaatgtcttgtgcaacagaaaaacatgttggggaaatattcctcactggagagtcttctcatgctgacggggagaacaaaa

SEQ ID NO: 180820 - DNA, 1608 bp, Homo Sapiens
ttgggtcttctcaatcttttttgtgtttgtcagttcatctatgtagatctttgtcttccagtggctctctcttcttttaccttcatcctttgaatccctcattttctgagtctacccttctcttttcctctccttctccataactgtctcccttatccgtaatatccttcttaaaattttcctcctctgtctgtcttccagcattatctaaacggggagccaatattttctaaagtgttattttatttgaattcagatttatgttactaattctaaatttttttaataaataagtgaaatgcttcctttttctttatcagaaactattttgcacttattttacttataatcacttcacaaacatttccaggacatttactatgcgctagagcaagacgttaaataagactcgatcttttaaagatttcctagtatagtgggctgctgtttacttattttaactaaagattagtgattcttagtaaaataaatatttctcagtagaataaatgccacctatagatgcagagagcatttttctttcctgattatctgtggttttattctcctctaggtccaattaaattcaaagatcaacttcatgagtaatgcattattataggtggttggtgactctctcccatctattcccaacttgaatgtgccagctctggggaaagaatcctaacttctctgctttcttttatttggcagtcacttctgagtaggaaagacagccaaacaattttattctttggctcttagactgttgtaaaataacagtgttattttctttacttcatgtgtctattacctaattggactgctgtttaacaaactggtaaattggtttgtgttcatattctagtactcagcccaattatttatttagtgaacttatggctggatgtatttcaatgttgtctattgacctcattaaatgctcttggtagggtttatattgaacccaaaactgacgttagtatattgaaaacaggactttcaagttaagtaaacctttagtttcgaaagtaaattatctacaaaatttaataattgctgactcttatatttatttgttgataaatgtaattttcttgagctagctccaaacattcttctaatctgtagccctggaaagcaataaaagaatttaaagttcttttacctgcagacctgaaaaatctatagaactgtttacatattttgtatatctcttcactaggtgaactttcatgggctaaacagtacattcgagtgaaattctgaagaaacattttaaggaaaaacagtggaaaagtatattaatctggaatcagtgaagaaaccaagaccaacacctcttactcattattcctttacatgcagaatagaggcatttatgcaaattgaactgcaggtttttcagcatatacacaatgtcttgtgcaacagaaaaacatgttggggaaatattcctcagtggagagtcgttctcatgctgacggggagaacgaaagtgacaggggttccctcataagttttgtatgaaatatctctacaacctcaattagttctactctacactttcactatcatcacactgagactatcctgtctcacctacaa

SEQ ID NO: 180821 - DNA, 1140 bp, Homo Sapiens
ttgggagaagaacatcctggtgtcagacatggaaatgaatgagcagcaagaatagagccaggcgcgtgggcagggccagggcgggaggagctggggagctggggccctgggtcagtctggccccccaccagctgcctgtccagttggcctatggaagggtgcccttgggagtcgctgttgggagccggagctgggcagagcctgggctggtggggtgccaccctcccacaagggctgggctgagacccagctgagtgcagcgtggcgtttccctttctgggggggcctgaggtcttgtcacctggtcctgtgcccccacaggaaccagaggtaggatgggagggggaacgagagcctctttctccccagagcccccggcccaggcctgttgatccgcgccccaggacccccttctttgcagagcccgaggagcctcccctgtcccctcgggcagatctgttgtgtctctcttcccacctggcagcctcagctctgtgcccctcaccctgctccctctcgccccttctctcccaccccttccttctgagccgggccctggggattggggagccctcttgttcctgatgagggtcagctgagggggctgagcatccatcactcctgtgcctgctggggtggctgtggggcgtggcaggaggggcctaggtgggttgggcctgagaaccagggcacgggtgtggtgtctgctgggctggagataagactggggagagacaccccaacctcccagggtgggagctgggccgggctgggatgtcatctcctgccgggcgggggagggctctgcccctggaagagtcccctgtggggaccaaaataagttccctaacatctccagctcctggctctggtttggagcaaggggaagggttgccagagtcctgggggccccagaggagcaggagtctgggagggcccagagttcaccctctagtggatccaggaggagcagcacccgagccctggagtggcccagtacccttccaagaggccacagtcccagccaggacaaagtatgcggcccatcctggtgcgacagcgtgggacaatgtgaacatggactccaagacatggccctttctctgtagttgattttttaaatgtgccattattgttttt

SEQ ID NO: 180822 - DNA, 3121 bp, Homo Sapiens
  misc_feature (302)..(310): n is a, c, g, or t
  misc_feature (1418)..(1465): n is a, c, g, or t
  misc_feature (1853)..(1885): n is a, c, g, or t
  misc_feature (2252)..(2268): n is a, c, g, or t
  misc_feature (2725)..(2775): n is a, c, g, or t
ttgggtgaactgtaacagtcgtctactggtttatttttcatattttttaattaaattgagcttgcagaaatagccacattctacacatagttctaattttaaatccaaatctagaatctgtatttaatttgttttttaacctcatgctttttacatttatttattgatgcatgtcagatggtagaaatattaaaaactacacatcagaatgatacagtcacttatacctgctgactttataggaaagctgatgatataaatgtgtgtatatatgttatatatacatatattcaatactgccnnnnnnnnngtctacagtatcaaaattgactggttgaagcatgagaagaatgtttcccccacacccagttaagagtttttgtgtctgttttctttgtgtatcagtgaacgatgttaagaatcagtctctctttttgaagaaaaagcaatattccttggaaagcaaggagaattgaaggactatgtttgccgtgaggaaatagattttcatgactagtttgttttatacttttaaggttggcatctatgtgggccttatatactctaaaatgaactttagtcaccttggtgcttatgggccattacttgacctatgaatctttaaggcacaatcagttgtactttacatttaaagatcacttgagtgatggccgcctttccctcctacccgctccttccccacatgccttccaaggttagctggtaactgtagggctgcagagctgagcccatggttgtgtgtaacttgccctcaccctcctcattgccaccttaggtcactttatgggtctcgtcctccagagggttcggaagtggagtctgttggcagccctcctgcaggccctagcaccctgtcctgctccttaactgtgtgtgtgactctccaagagagttgtcctgcctgctgaagtgaaccagtacccagaaagacaactgtgagccatcttggttttcactcgctgtttagctgaggtcttgggccacaaaaggggtttcacaaacctctggatatatcagagtttatgagaaaggaaacatgctcagtcaaaccaaatcaaacaaattgaattttatgttttataaagtgcttctgaaagctaagatttgaaagaagtctgaaatcaaagtatttggcagcataactccttaaaggtagtggcgttgatagaccattttcagacagaatttataaagaatctgaaaaggcaggtctgtgatagagaaatggacctgcattcagatccaactgcccagcaagcgtttggatgcagacactgctctggacgtggtatactccccagagtccataaaaatcagtgcttattttaggaaacaggttgccccccacaactggggtaaaagaagagagaaaagtcacgcttttctctcatttcatnnnnnnnnnnnnnnnnnnnnnnnnnnnnnnnnnnnnnnnnnnnnnnnnatttttctttctcaaggatcatggtgggatcacagaactcttttatacaagtgagatccaggtctctgaatatctttttgtatataataataataaaaagctcctcaccaaattcaagcttgtacattatattttctttctgtgtttttaaatttaagttttattgttttgtatgtaaatatgtggacccaggaactgttattaatgagcaaaaagttactgttcagggcagtgattctgtttaataatcagacaaaatgtagacgagctttttaaagccatatagttttaactctgtacagtaggtaccggcctgtattattgtaacaataactctagcaatgtatagtgtatctatatagtttggagtgccttcgcttccatgtgnnnnnnnnnnnnnnnnnnnnnnnnnnnnnnnnnaattggtttcctttatccatgtctccctatccaccccctttccctttgaaataataactcactcataacagtatctttgccccttccacagttaagtttcagtgataccatactcaggagtgggaagaggaaatcatattcgtaatttcatttcgttgaagccctgcctttgttttggttctgaatgtctttcctcctcggtagcagtgagaccggtttcatttcatacttagtccattcagggacttagtgtagcaccagggagccctagagctggaggatatcgaatagattaaattttgctcgtctcttccacaagccctaaccatgggtcttaaaaacagcagattctgggagccttccatgnnnnnnnnnnnnnnnnntttatctacttccctcccaaatgagagagtgacagagaattgtttttttataaatcgaagtttcttaatagtatcaggttttgatacgtcagtggtctaaaatgctatagtgcaattactagcagttactgcacggagtgccaccgtgccaatagaggactgttgttttaataagggaactcttagcccatttcctccctcccgccatctctacccttgctcaatgaaatatcatttaaatttcttttaaaaaaaatcagtttaattcttactgtgtgcccaacacgaaggccttttttgaaagaaaaatagaatgttttgcctcaaagtagtccatataaaatgtcttgaatagaagaaaaaactaccaaaccaaaggttactatttttgaaacatcgtgtgttcattccagcaaggcagaagactgcaccttctttccagtgacatgctgtgtcnnnnnnnnnnnnnnnnnnnnnnnnnnnnnnnnnnnnnnnnnnnnnnnnnnnacaatgtatgcctaaccagtcatcttgtctgcaccaatgcaaaggtttctgagaggagtattctctatccctgtggatatgaagacactggcatttcatctatttttccctttcctttttaaaggatttaactttggaatcttccaaaggaagtttggccaatgccagatccccaggaatttggggggttttctttcttttcaactgaaattgtatctgattcctactgttcatgttagtgatcatctaatcacagagccaaaacacttttctcccctgtgtggaaaagtacgtatgctttacaataaaatctgtcttttctggtagaaacctgagccactgaaaa

SEQ ID NO: 180823 - DNA, 1350 bp, Homo Sapiens
  misc_feature (87)..(103): n is a, c, g, or t
  misc_feature (1166)..(1182): n is a, c, g, or t
ttggcgaatagattaaattttgctcgtctcttccacaagccctaaccatgggtcttaaaaacagcagattctgggagccttccatgnnnnnnnnnnnnnnnnntttatctacttccctcccaaatgagagagtgacagagaattgtttttttataaatcgaagtttcttaatagtatcaggttttgatacgtcagtggtctaaaatgctatagtgcaattactagcagttactgcacggagtgccaccgtgccaatagaggactgttgttttaacaagggaactcttagcccatttcctccctcccgccatctctacccttgctcaatgaaatatcattttaatttcttttaaaaaaaatcagtttaattcttactgtgtgcccaacacgaaggccttttttgaaagaaaaatagaatgttttgcctcaaagtagtccatataaaatgtcttgaatagaagaaaaaactaccaaaccaaaggttactatttttgaaacatcgtgtgttcattccagcaaggcagaagactgcaccttctttccagtgacatgctgtgtcattttttttaagtcctcttaatttttagacacatttttggtttatgttttaacaatgtatgcctaaccagtcatcttgtctgcaccaatgcaaaggtttctgagaggagtattctctatccctgtggatatgaagacactggcatttcatctatttttccctttcctttttaaaggatttaactttggaatcttccaaaggaagtttggccaatgccagatccccaggaatttggggggttttctttcttttcaactgaaattgtatctgattcctactgttcatgttagtgatcatctaatcacagagccaaacacttttctcccctgtgtggaaaagtaggtatgctttacaataaaatctgtcttttctggtagaaacctgagccactgaaaataaaagagacaactagaagcacagtagagtcccagactgagatctacctttgagaggctttgaaagtaatccctggggtttggattattttcacaagggttatgccgttttattcaagtttgttgctccgttttgcacctctgcaataaaagcaaaatgacaaccagtacataaggggttagcttgacaaagtagacttccttgtgttaannnnnnnnnnnnnnnnnccttaactatatctgtctacaggcagatacagatagttgtatgaaaatctgcttgcctgtaaaatttgcatttataaatgtgttgccgatggatcacttgggcctgtacacataccaatttagcgtgaccacttccatcttagaaacaaacctaaaaaacaaaattat

SEQ ID NO: 180824 - DNA, 1457 bp, Homo Sapiens
  misc_feature (1000)..(1036): n is a, c, g, or t
  misc_feature (1048)..(1056): n is a, c, g, or t
aattgatgagcaatgctttactatataaaagcaactttgtacaaaaaagttgggttgtatactttccaaaacaggactcctgcctcatgccccttccacaaaagaagaaaacctttttctgtgctgatgggtttttttgaactttgttttcttttaaagtctagtgtgagactttggtatagtgcacagcttgaaattggttgggagcttagcaggtataactcaacggggacttaaatgtcacttgtaaaattaatccatatcttcgggtatttatagacttgcctttggcatgttggtggcaggtgtggcagacaaagaaatgtgtatcattcgtaacccagggaggtcaataaagtttggaactctacagggaagattcttagtagatttgttaaggttttgttttgctctcagttagtgctagtgatgtagaggcttgtacaggaggctgccagaggggaagcagcaagcaagactcaggcacacatgctctacaggtggctctttgtttgcctgaccaaagttctttgcaaatcttagcacagtttcaaactagtgacctgggaggagatggaaggggtgttgagcaggctgagctagctgctgaggtcaaaggctgatgagcccagaggaaggggacaggtcagggatacatctcaccactgtgaataagtttgtccagatttttttctaaagttacttcccttggaaagatacacttgagaggacattgtagttaaataatgtgaactgtaacagtcgtctactggtttatttttcatattttttaattgaaaattgagcttgcagaaatagccacattctacacatagttctaattttaaatccaaatctagaatctgtatttaatttgttttttaacctcatgctttttacatttatttattgatgcatgtcagatggtagaaatattaaaaactacacatcagaatgatacagtcacttatacctgctgactttataggaaagctgatgnnnnnnnnnnnnnnnnnnnnnnnnnnnnnnnnnnnnntcaatactgccnnnnnnnnngtctacagtatcaaaattgactggttgaagcatgagaagaatgtttcccccacacccagttaagagtttttgtgtctgttttctttgtgtatcagtgaacgatgttaagaatcagtctctctttttgaagaaaaagcaatattccttggaaagcaaggagaattgaaggactatgtttgccgtgaggaaattgattttcatgactagtttgttttatacttttaagttggcatctatgtgggccttatatactctaaaatgaactttagtcaccttggtgcttatggggccattacttgacctatgaatctttaaggcacaatcagttgtactttacatttaaagatcacttgagtgatgggccgcctttccctcctacccgctccttccccacatgcctt

SEQ ID NO: 180825 - DNA, 1517 bp, Homo Sapiens
tctggggctggaactctcgctaggcgctacaacttcctctcctgccctgtggcagagccaagccccttgcagggctgttgccagcatgggatgagtctatgaaaacacgtggcacgcagtaggtccacagttaccactggcagcctggcaagcctggcagggcccggacggcagatgcgcttcggtgctgctgtgagtcttgtgttctgccttaggcagaaagtcctgggtttgtgttttgtgaatgaatgacgcatgagtgtgccaaatatcctttacgtgacagaagaggagagggctggcttgattgagtgtgggggggaagaacctggatcttgtaatgtaatttttgtttaaaaaaattagggaaaaaccccaaatatgaccatttcctgccattagcctgcagatgagcagctgactccccagtcccatccctccgcactgcttttccctgtcctgggtctgttctgttacatggagttcctgggggaagccctggggacggggcatctgcccagggctcactgctgttgaaagtgaataaagaacgtccggatttcctttgggtggacggtgatgatggggcctcctggtggcctcgagggagaggtggtgtcacctctgtggcggccaggccccgtcctccagctccagcggtgcagcatgctcaaatcccaggtccctgtgagcgagcgctcctccactgccaccacggaccccagcgcctgcagcacagcctgcagggagaggagcagagggagagtgagctgcaccaagttccagagctgagcagagaaccaagacagcagcagggcagacacaccacgaactcggtgtcctcaggagcccaggtcctcccctggtgcctgacacagctccctcatctgcttctcacagcacatctgcgaggacaggactggccgtgtactttacagatgaggacactgaagcgggaggtgcatgctttaccaggtggccgagctggaggagcagcccgggaggtgtggcattttgagctgcccaccccaccgcggagttctcctctccccacattgctcaggtggccccgtgcccagtccagggaggaagccagccacagttaccccatccccctttcccaataggccttgtcccagcctcccttacacctaggggaggcaggaggcccttaggggtctggaaaagtctgtggagcaggaggggtgggggtggctcttggagaagcttctgtgtgctgacggagggagagagccacgctagggcaaggcctttctggccactactgccgagccccaccctgccttgaaatttgctcatgagggaggcctgtgccatcttgtgaccgcaaacaagcagacggcaaaagacaaaagccagtctgccggcgatggcgggaagacgacagtgatcgggcccacggtgacagcgcttggggtccatcggacatgcctgttcggtgagaaaacactctgtcctctgttctaagcacatctgttaggtgttttgtgacccaa

SEQ ID NO: 180826 - DNA, 1582 bp, Homo Sapiens
ctttgtacaaaaaagttggagtaccttttaaataatatagtttaatggaagaatatagtacagtggtatattttatagtctatgtatggctctgaagtgtatccagagtttactttttaaccttaaataaatagatgattagaaatagcattaagtgtatttgacaaacctataaatttcccgtaaagaaataagcaagtgtatgtattgtaaaagacagtctttcctctgacttaatgttgtatcaggggcatttagagtctacaagaacctaaagtaaattttatgaaatatctagtgcaaaatctttgggaaatttcaaaatttatgctgaaatcaccatatttgtttcctttggtttctctaacaaaccaaaagatcaacattgtctcatgcgatttatcttctcattccttcctaaaaatatttctggaaaattaatggagctggaccaccaattcttcaaatattgaaaactcaaaatctaagagttattttaatcttgaaattaatgaaaacaagttaaagagccttgtctaagtcaaaaagtcctcagcaaagctggtgataattattatactccaaaaaaggtgaaaagataatggcttcaaatcctgccttacattatccagtcaaaaactaatataaaaatagtcaatatttaagcctatgttttcatcgtaagtaatcaaatacttacatattattaatgtctaagggagtggaagttaaaacaatgaaattcaatcgggtcttctttaatatttacaatttttgctttacattagcaattcaggtttcactgattttaaaattgtgaacaatctgaatttgtgtggatttatttgtggtagttaaaagtaaatattaagtgcaagctatttgccaagagtgttctaggtgctatgtttgatttaggaggtataattcaaacatgagaagtaggaaaagatccctcagatccctgtcctcagaagaattgacggtactttcagagatatcgacaacataaaagtactatgagaggaaagcagcggtgcctgaggtgggagtgatagctagataaattattagtgaaccaaggttttcagatgtaatgtttgtctactcaaaaagggaatcaattctctaagaatttaaacccatataatactatgaatgttaaaccagttgggtttatggtattaatgatttaatacagcaacactgacaaaatctctttttctccctttagttccagttagtaaatatcatattttttactatttcagatgccccgtctctgactgccaaggtggtaaattatcacattttactgtatattcaaatgttaattactaaatggcataattttaacaattaaatttactattttgtgagccaactaacaacaatgatgttaagcataggatgcccaatataataataagcaccttgtatgtacagaagattttacatgcacaaattcatttaatccacacaaatccgaagtttcaggtctgttttacaaattttgtatgcccaatgcttagagagatcaagtaatttgataatactcttatagggaggatccaaacccatg

SEQ ID NO: 180827 - DNA, 1303 bp, Homo Sapiens
tggagagaacagtgactacctctaaagaaaattatgttcatatacaagctacaacaaatatcaaatgttatataaaacaaacaatgcaggggaatccacaaggatgtggaatgtttgagcaaaaaaaaggaagaggcttattcaatggcttgtactaaaagataagccccagattctaaaagaaggtaggcaaactgctcccaactcaccctggtctcaaaaggtgaagaaggtagaacatcacagaaggaataatggagtacagtgaaaggaggccaaggcaggttgataaaaattaaaaaaggattagcacatgctttcttgttttaattggggtaagaacagtggacaaagagttggagataggttgttctgaggagacaaagggctattgtttcatcttggctgggatcagccatgtttaccttccatcgaaggtggacaaataaaaacccttacagaggtattttttatcatatgttttgcaggcatgttgcttttaaacccaatgacatatgctactatttcacgtaataaagtttctttttgtttgtgaggttgtatatgagagcttcattaatcaagttgccactataattaaaaattatttctgattatagtttgctgacatctaataatatagttgtttcacaacggcagaatatatacctacaggaaaagggtggcccagatgcctgcagggaccaatgggtaaccatctcaagtatgtttttcttccactagcctattccctgctaggctctctcttctctaaagagattgcaacatggtatcactctgatatgaaaatccctaattcttacgaagcaaagtattgacaaagtctagagcgcagtttagagtttgattgcttctacagccctttctagattattccatgaagactctcaggataaggtcttggacacatagttaagactgaaccctcatttccacccttccatacaattcttctccctaagctgacctcagtatctctgcactctctcaggctgacctgacaaatcagcacctgagtttttcagaccaaaagcttttggttccctactaaaaaataaaacaaaacataaatcaagttatgttttgagaagggatagttgcctataatgtaataaacatggccttccttccctcatcatagtttattcaaattataaaaagtgactataatttgtatccaggacaatcaagaattgattatatttctctgcatccattatttgtaaatgtaaatgacagagtgtctcctagatgctttgggtatggtggaagaattagccaa

SEQ ID NO: 180828 - DNA, 1400 bp, Homo Sapiens
  misc_feature (71)..(83): n is a, c, g, or t
ttggacatgattgagcttaaatgatcatttcttcctgcagtgattcttggattgttttctcatgtatttgnnnnnnnnnnnnntgaagaaaaataatggaaaatggaagtaattactccagctaaaaaaagcttggacttaagatttctttttatgataccaaatgagaaataaaccaggcaaatcagaaggaagttaaagaagtaaatataaattcaacaagtgtcctaattatcctggatattggaatatttgattttccttacaatcccgttctagaatgcctgccacctttcaacactttcaagagaatttcaacacttacagagtatttatattgttaacagtaattttgctaccaaaaccttcagaataactttaataataaaatgacactgaaataatagactatacaaactctatattttttcagttggtgttacaaataagtcacattttgataccagtacaagatgtcttttaaataaggatgtcatcagtctgatttatatagcattaatgttttatgaagaaaaagttcaaaatgaaagcattaattgctgtgattattagaattctatcatgactgtattgtagtttttgctctatttcagataagcaagatctaagaagttatcaaaactattctttaaaatgctaaagcaggtaactttttcttccattattttttcctcctaccactgagttttgtaatgaattccttgtgtatacaagcaatacaggtgaatactaaactgttatttttagcttcttcaaaagctattttagaaagcttcctggaaataaatgtcttctgtcatttaatttaaataaaaggagtgttattgttcccaaatttgattacctagctgaaacagatattggattcagcatagtaatagtaaaataaaattggcagagaaaataactgtagactaggataaagcatgactcctccatagcattgttgcttgtatgtacatctgtcactccactgaaagggacctagtcactttaaagaggccttttatctcagcacgagatatccaagcgtgaatgctaaggcttgatgtttccattaggatttagcattcgagatttcagattttatttatagtcattgatgtgttttgctgtattataacacatttaagggaaattttattatggtttttacatgtagtcatttcataaaaatatccagataggtaaatggaagaaaatagtagattttagtcatggtaccaaatgcaagagctgttgaacagttgcttgtttgtttacagtaagttccttgagattttcagtactgtagttgccctggacattgagtacagttcagccttactctgtttttaagtagttgtgttgtcaatttcatgcttttaagttcctgatga

SEQ ID NO: 180829 - DNA, 936 bp, Homo Sapiens
  misc_feature (582)..(590): n is a, c, g, or t
  misc_feature (690)..(740): n is a, c, g, or t
  misc_feature (880)..(890): n is a, c, g, or t
ggctctgaaactttcccccctataatatatatattgactgctttttcattccctaccttggtctcatacagtctgaagcctttatgttcaagatgatgtagctgttttccacttagacttaatatgaaaaggggccagtaccctggcattggctttttgaaagtttttcagcctctgtttgaaagtctgattgtttctgtgtggctttattctcaagggtcacatgaggcaataaactttctgtgtatacataccatacagctttgacttgggtccttcatcttttagcctatttgggtaaggtgcacatttgtgtgtggttttgcatgcttgtgcctattggcctggggtcagagagtaagggctaatgttgcctaagttctatttcccacttactgctttaggccactggccagctgttccttctgggctgttgccactacatgtaggtaagagtgtggttacattatagagcagggcttcttgagtttgacaaagcacgaatcccaaaatggggcataggctgtaattctgatttttttccacattcaagttatggcttttctacagttgataaaacannnnnnnnnaaattgccaaacatggatattttgataggttgcacagctccagtttgcataattctgaattatgttagtgtttcctatttggcttactgttaagcttacnnnnnnnnnnnnnnnnnnnnnnnnnnnnnnnnnnnnnnnnnnnnnnnnnnngttttagtttgagtcaactttttttaatgtgactctgtttggatagtgaacttattaaaacaaaaactcagatttgatattgatgttttatgctaagatatatagtagggagtcttttccaaaggaattagaggcatgcnnnnnnnnnnnaatggaaaaccctttaaaagctaacacgtaacgaaaaaataccaag

SEQ ID NO: 180830 - DNA, 1245 bp, Homo Sapiens
  misc_feature (295)..(340): n is a, c, g, or t
  misc_feature (891)..(908): n is a, c, g, or t
  misc_feature (1123)..(1131): n is a, c, g, or t
aacgtttgtaagtacacacatacatacacaaacacacacccatatttggctaccattttttcaagatgacaaactagagtccattcaaaatgactttgaaaactttaatatttttcttacaatagtgtcctcagcatctgcatcaatttttatttattttctaattactgtcacatttccctatgagaacgggatgctgtataaagagcacacggcctggatattggtgaatttgagttttagtcaaagttcttcagattaccttctgagccttagttcaaattactttgtgtannnnnnnnnnnnnnnnnnnnnnnnnnnnnnnnnnnnnnnnnnnnnnaaaaagtaagctaaagtccttgtggtaggcagcctctaacaaatagaatatagcagaaataatgagataccacttccaagattaggttataaaaattcttaggtgtcaccttctctcactcatttgctcagagggaggcagatgccaaactgtggtgccctttggagaggcccatatggcaaagaactgagaaaagcctctggccaacagccagcaacaattgatttcttcagtccaagagccccaggaaactgaaccctgcaagagccacatgaatgagttcagaaacagatcttccaccagtagagcttccagatgtgactgcaaccccaactgacagcttgactaccacctcttttatgagccacaggcacccagctaagctgcacccagatttctaacccacagaaactgtaagataatgtttgttgtcttaagtccttaaattctggtgcaatgtgctatgcaacaataaataagactatcctgtccaactctataattcaatattcccatggtgctttaggtattaattaatatttggataggcnnnnnnnnnnnnnnnnnnccctgttcaacatgagcaaatgagtaacattagaacttcaaagtggcaaattataaaacttaaacatttatattttcaattcaaaaaatgagattattcacaagtgtagcattagtcacatggtgttaaaatacacccgctttcaataggaatggagtatctcattaaaaaaatacactagctataacttaaaatacaaacacaaccaatcatcnnnnnnnnnaactgaaaacagttcatttaaaaagtaaagtgtgaataaccactaaagcatctcagtgacttagtgtcccttgctttctagaatttatcattactggtcgggtgtagtggctca

SEQ ID NO: 180831 - DNA, 840 bp, Homo Sapiens
ggcctatcctggctctcactccttcaacataagcctcgagcgtccacttggtgccaattgagagacacatggcaagttgcggtcccagcccgtggggctcacagcatgggaggtgggaagcccagaccagaaccaagaggtccaagaacaaacaaagccttttgtacctgagcagacacagttcccacagccctggctggagtggggtgtgtgggctgaggcattccagggccagccaggagtgacagggatgtgatgtgcctcccacccaaagactcttagagctcgctgaggggagcagtcagcagagttgctcctgtcctgatgcctctccagcagccggcccaggcttgccagccatgcaaacctccagaaagccactgggctacaggcttcctttgggacctgggaccctcttgagaatgggatgtggtgcagcagagcagcctgcccaggcccagcctctctacaaggtgtgtgtcagggaggggacactcacagggccctgcctggtggcgctgggaggccggccctgcctggtggtgctgggaggccagccctgcacacgtggggccctgggaagtctgagctgccatcctactgcttcagctgcctgtgcaccccaagctaaggagctgtcagacgctggggctgttcactcagcacctgtggactaggcctaaggcctgctgagtcaaaggacctacatgtggagaaccgacagtgaggacaaagccctctttcatggaatccacatccacatgaacaccacccgttacctgcattcaatcctcaagttctcagtttggttaaaaattaaaattacaggcggtggctcat

SEQ ID NO: 180832 - DNA, 1220 bp, Homo Sapiens
ttggcccggttcccttggagacagagctggccagggcggccgcggctgggcaactacgacagcggagcccctggggaagccaagatgccgtcgaagggaaaggacaaaaagaaaggcaagagcaaaggcaaagacacgaaattgaaaaactgaaacagcaattaaatgaaacaaaggaaaaagcccaagaggagaaggataaattggaacaaaagtataccaggcaaattaatgaactagagggacagttccatcaaaaagccaaagaaattggcatgattcacacagagctgaaagcagtaagacaattccagaagagaaaaatccaagtggagagagagttagatgatctgaaagagaatttaagaaacacagagcggatacatcaggagactcttagaagactggaaagcagattttttgaagaaaagcaccgactagaacaagaggctgaaaagaagataataatgctagcagagagagcccaccatgaggctattgtgcaattgaacgatgctggaagaaatgtttttaaagagaatgtttatcttcagaaagctctggcatatcacctgaaggaaactgacgctctacaaaaaaactcccagaagttgcaagagagtcatactttacttttacatcaaaaggagatcaatgatctgttggttaaggaaaagattatgcaacttgtccagcagagatcacaaatccaaacccttcagaagaaggtagtaaacttggagactgctctgagttacatgaccaaagagtttgagagtgaagttttaaaactgcagcaacacgcaatgatagagaaccaagcaggtcaggtagaaattgacaagctgcagcaccttcttcagatgaaggacagggaaatgaatcgtgtgaagaagctggccaagaacatactggatgagagaacagaagtggaaagattctttttagatgctctgcaccaagtgaagcaacagatcctaattagcaggaagcattataagcagatagcacaagctgctttcaatttaaaaatgagagcagcatgtacaggaagaacagaatatctcaaaatcagaacatttgatggcagagagcacagcaccaatagtgtgaatcagatcttctggaggccgaaaaatggacacatattgacgaaatgtggatattggagatttgacctgcgagcagaagaaaaagtattgcgattgctctttgcaaaa

SEQ ID NO: 180833 - DNA, 1043 bp, Homo Sapiens
ttggcactttgttgtgtattcttactcctttatcttgttgcaatgcctgatccagctaagtccgctcccgccccgaagaagggctccaagaaggcggtgaccaaggcgcagaagaaggatggcaagaagcgtaaacgcagccgcaaggagagctactccgtatacgtttacaaggtgctgaagcaagtccaccccgacaccggcatctcctccaaagccatggggatcatgaattcctttgtcaacgatatcttcgagcgcatcgccggcgaggcttcccgcctggctcattacaacaagcgttcgaccatcacctccagggagatccagacagccgtgcgcctgctgctgcctggggaactggccaagcacgccgtgtccgagggcactaaggccgtcaccaagtacaccagctccaaataaatggacgcatgttcaaacccaaaggctcttttcagagccacttaatgatttcaattaagagttttaatgctgggtgctgctgtattctatgggagaagtgtcgccaatacaggtaaaattttcctacatcacctgtttattctgtgcgtttgacaaacactaagcttttagagtttatttgtctttataaaggtggggtacaactacattgttcaggctggtcttaaactcaagcgctggtcttaaactcaagcaagttttcccacctcggccttgccttgtattactgagcagataatttgacacagcaggaaaagtgggcattcttgtttaggaaccaaaaactaagtttgcaacttaaaatgcaatcaatttggagcaacacgtccaccagtctagagctggtaagtttgagtattcaaaatgagttgaaagtacatttagtgcctataataacccactctagatagcataatgtggtctttgtaggagtctcgtggaagttaatgttaactgggatattgtagtttaccaagtacctgagaaaaatttaaatttcttaatagataaggattagagacaaactttatggaaatgaaaacaaatgccatgcaataaac

SEQ ID NO: 180834 - DNA, 895 bp, Homo Sapiens
ttggcagtcttggtcagtcctgagctcgggtactccaaagtgaagtgagcgacgtcacctgtctgaaaagcataaggagactcccacgtggcggtgctgaggggccacatcctgggcaccaggccagccagtgccccgacatgagtgttgctggccgggaagcagctggcatttggattgaagtcctgcaaaaactgccatggccagagcctgccaggcagagcctgcacagagtggcccaagagctgggcacgtgctgggcctgggtggatgtggaggctgtgccatggggtgcgggggaccctgctcacagctcaccttgtggtcacccagcactgaccccgttcacagctcgccttgtggtcacccagcactgacccacccgccccaccctcctatccaccgtgctgtgaactcacctgccacgggtctacacccactgtccgaagccctcggcccacacgggctccaggccttgggatgctttgcgttgcaccagggctgcagagcccagatcgctcactgtccgactctcccagggaggtgtgggcgccgccctgtgtcccaccagtagcatttctgcagcagatgtggggatattcacagtaagacggacacgtccaagaccataaatagttggttttgccaccacgtggatgtcaaaaacaccttgctgtgtggggccacttggaggtgggaacagtgggcgtgtggacctgtcctgctgtgactttggttaacaccctgaggtggagtctgaaaaaccccggtgtacacgggctcaagaaccgctcccctttctgataccggagcgcatttcccagtggaacccccagagcagccaactccagttcttgctcgcctgtgccgcctttgtgtgcgggtttgccgaggg

SEQ ID NO: 180835 - DNA, 929 bp, Homo Sapiens
ttggagatagcattttaagccctccttgtgtgcctagcatcttactgaacactttctggtgattctctcctttaatcctcacaaagatctcacagttgtcctccattttacggagaagaaaccgaggctccgagaggttaaacgatgtgcagaggctacctgtagtgatggtgctgagtcaagcctgtcaaccactgtgctcgttagtgaccaaggctgctttgacaggctgccagcttgtcagtggtttgcagccccccagacatttgctttcctacttcccatgcagttggggtgccctgccaagtgccaggttctctttggagtccatctgtgccttgtcaccccaaggagggcctcgagcatcacaccgttgacatttcgaaacgtggtatctctacaacctttcattctcattgggatttaccttgccatttgaacaccatcattttttgaggactgtctagaaaaggttgcctaaccctcacagggaacacacagttccctcagagtccagcatcttctggtcttttctttttcaagatttttttaaatggttgtgctatcatttgtcatcatcagaaaatgcttgctgtaacaagcgtttatctgcacattatgctgcagtgaatgctctactgatcaagttaaacagataagatcccttcccttgtagaaactacaacttaatacagtctaagacttgacaaattacttagtatttattttccaactgctttatctctgtaaaatgatatgctgaattattataagctaattgttgtagaaagaactttccccttaacttatgtaaacagtctggttttaaaaaaatttgataattgtggcccagtaagctcaacactttgccttccccaagactggggaacctctgtcctgttcaccactgtatattcacccaccaggca

SEQ ID NO: 180836 - DNA, 1518 bp, Homo Sapiens
  misc_feature (237)..(248): n is a, c, g, or t
  misc_feature (261)..(272): n is a, c, g, or t
  misc_feature (1036)..(1048): n is a, c, g, or t
aggttgaagattttcttttaatattcagttttttgaaaaaaatggatctacactgttaactgattgagactccactgtgattcacttgtttacttaaaaacttttcagggatgtctgtaaatttcagtgttaatatgtcatgaaaagtggtgtggattgatctaaggagggaccagaaataatttttgctattccaaatactgaaggaaaaagataattgatttatactatgttttnnnnnnnnnnnnggtattgatgagnnnnnnnnnnnnaggacatttaaccttaaaatttattttaaatgtattcttttattattataagggaaatacagatggctgataaataccaaaaagattcaaaagcagcttaatttaaaaagcacaaagagattctggcttacagtgccccaatctcaatgtttttatagttgctgagctaactaatgtgattattgagtttacagatttaaaaattgtcactgttagagtatctactgtttttatgaagtcaaacttatgctgcctcagaaatccctgggtactgaaatggtaacatggaagtgaagaggtcactttgaaatattggtgagtcacaaagattaaagaaaaggatcagtttgcagatactcagaaaaggttattgaaataattactgaacagcacattttctctctaaaaagtagtttcatatgggttgtatttttaagatcagattatcattttgatatttggtcaaaattttgtaccttaggttacttagagccagatttaacatcatgaacattatgtggctttgtctttactacagatatgtggaactgtaaccaaatatgttgtctctaaaacttgttgattgcaaaatacagttctataaacaaaacccatatgtatatataaatgttaattttgcggaagtctggaaattataactatagcatttaagtttgagtctgtattggacaaataagcaccatgcttttcaaatgatttaaaaattacttttatttgcctctttattttgatggtggttggannnnnnnnnnnnnaatagtaaaatcactaaacttgtgcaatggtagcatggaaattatctgaggtatattgtatgattgtactttagccagggtggacatagcttaaattataaaaactaaagatgaaagtacaaggaagtataagttatacttatgtaagtataaattcatgctgcctacttctaagagaaatttcattcttcataaccacataacattataatgccactgattcatacgggatttacattaattctatgggggaggacactagaattattagtgttcattttcatctaagatctttattctctaacgttcttggtcctattgaaacattgcagtatgcaaaactactgcaatgttaaacccaagagaaaagccattatcatgtgtatgctggtcatcatgatcagtgtggtacaatttttaaaaataaactatcatgcccttcatgccattatttgtctttatttctatga

SEQ ID NO: 180837 - DNA, 2353 bp, Homo Sapiens
  misc_feature (755)..(867): n is a, c, g, or t
  misc_feature (885)..(893): n is a, c, g, or t
  misc_feature (1858)..(1871): n is a, c, g, or t
ttggggaaagaccagcctagctccttctccagggaagccatcttctctccagttaaggggaagtgtccccatccattctcataggcacaggcattctgggatccagcagcccccagctagccaggagaggagggagcaggaagattctagcctcacaatgggactgagtgctgtgagcagattccagcagatgtggctggggttcaggcgacctcaagccacatgggtgtggtgtggttggtgtggttcaaggtcattgatccagtcatggtttccctctgcctaccccctaacaaactaggttggaagttgactgggtttagggcatagttccacccaatgtgaaaccggagtgcaaggcggggagactgagcagagacccaggcccagggtccctgagtagacctgaagaaagccttcagatttgtgggcacagagcttctctgcctcctgaattcaccccaagatgccaaaacaaaggcaaaaaggcctgcctccagacgctgcagcctgggtggggcagggtgggtgggaagcaggaggctgggattacccagtcagggtgtgctccaggctcgtcctgcagaggttgcattgggactgcagctggatgaagctagcagatgaatggtctgctttttccactttgctatacctagtcatcagattaataaagcattttaagagctccggatcaagagattacatgggtgtggtagtagaccattttgcaacacagcttaacacatttgcgnnnnnnnnnnnnnnnnnnnnnnnnnnnnnnnnnnnnnnnnnnnnnnnnnnnnnnnnnnnnnnnnnnnnnnnnnnnnnnnnnnnnnnnnnnnnnnnnnnnnnnnnnnnnnnnnnttatctttatattactgnnnnnnnnntatttaagcaaaacaacaatacatttgcaatgttatctctctatctgccatgaaaatcagttaaggtacccccatgtgacctgaagggtgggccccaccagctgtggtgagtctcaaaatcacatgtcttcttacagtttaaagtggtaagcagccttttctgtctcctttgtctagattcttgctcacttgtggcatctgggctactcaccagaagatatcattggcaacatctttcgagtgtgtaaaacctcccaaagtgctgggattacaggcatgagctactgcgcccagccgtgtgtatgtttctgaaatgatgatggggtggggttaaaatctaaagggaaaaacttgaaactacctattttcattggttattcagcagtgcctaaaatgagcttttgaagtaatgtaaatgcactttcaattcatgtgtatagtgccatctgatatcttgggtaagtcttgctttttcttttctttttcctctcccctgcccccttaattaaatggcacggaaatgtttcttaatatacacgtgagtctccagagtacaggaaatgtgctttcctctaaatggtcaatgtaaagaatcttaaggatatttcttgtgttgaaatttacattcgattttgtgattacacttggaaatatgtgttaaattgggtttttaattgtagcccaaaggtgcattaagcaagtgtaacattttttccacataaaacttagaaaactttagttacctgaaaagcaaggattctttactaattattatgctcattcttgatttgacttccatgttcacacttcaaagtgtaagaggaagcactagaaactggcattattgttgcactaaaaaagtctataaatcataatagcaccatgaggtgttttgcaatgagacaaacatgaagaatgaatttctttaagagagaaacacaaccggaggtgatttatataaaccnnnnnnnnnnnnnnggctttaaggtattaggtactgtttgcctagcagccaggtggttataaaagattcatatgctttggtacactgataaatgttagccattattcctgaaagcttcttaaattgcatcagttgttttgaaattttttcaagaataaactagttgaaaagtctttgtattaaaaatacacatagatttttgtgaacatttccagtgtgtagtgtcgtttgctttctatttctgacctcaaaagtgcctcacttgtatattatttccattaaaagcttgactgcattctttctaatgaacaatgaaaaactgtttaactcatgtcataatgtgtctcctcagatatagttaactagcttgatagttttgagtatataatgtaaataatacataataagtttgtaaccatttctgttacttcatacccgtgtaattgggacatagcagatgattatcataagaatttgttttaatggtttttttccc

SEQ ID NO: 180838 - DNA, 1006 bp, Homo Sapiens
ttggatcatgtacttagaaattcagtgtttatagtaagatgtattaaacattgctaatgatgtatggttacaatgtataacaggttttccattgtcataactgtatggaattttcttggaggatgtcattagcttctgtttgcactgacttgtgagctgtgtgtacgctgtggtcagatttctgaatgctgtagagcacttaccagctctgaccgtgtcttgctggggccagcaggctgcgtgtgcagcggggccagctgtctcagggctgatatgtagacgtgtattctgtttacaattagttccccaactctgtggggaagaacttaagcggttttagtgttttataatatggtgaggcaatgagggtcagggcgcgtggtccctgagggagggtcttcagggcaagacccatggccctggcctggaactgtgctccccagggcgtggtgcctccctaaggggatggtcagtgttcctgggactgactgccaggccagcccgtctgcagactcctgtggtgggagttccctgggacgggaagcccctcggccccttccctccaggggcaggaactgagccagcatgggcggggccggccgagcttccaggcgtgttttctctgttaaatgtacctctgtctttaagctgtctcattttctaatcgctggcatgtcttgcctagaaaagcatttggaattgcttatgttcaattacagaaataaaatgtcttacttgccattgtagaattcctgcacttttgcagaaaggctgttttgtaaaaatccaaccccaaaataactttttcccatgttcatgccagtgattcttaactttagggtcatagagagccttgataacatgatgaaggtttaaacggattgtcccaccctggaaaacggcaaacagaaaaattctgcacagtatggccccagcccttaccttttcccccaaccagtgccagccccccttccttcccactgtaggagcacccacaggctcaccc

SEQ ID NO: 180839 - DNA, 709 bp, Homo Sapiens
  misc_feature (142)..(156): n is a, c, g, or t
  misc_feature (254)..(273): n is a, c, g, or t
  misc_feature (275)..(369): n is a, c, g, or t
  misc_feature (516)..(564): n is a, c, g, or t
  misc_feature (575)..(629): n is a, c, g, or t
ttggggaaaaaataatactctcctctgtcactgtatctagaattctagataggaaataatttttttaagaagcttttaagggcctcacttcattttcttctaactcctagtgtggtgttaagaaatttcatgccatttaacnnnnnnnnnnnnnnnccgagacagggtcccaccctgttgcccagtttggagcgtggctaaatcatggctcactggtgtctccaacccggtgtgcaccactatgcccagctaannnnnnnnnnnnnnnnnnnnannnnnnnnnnnnnnnnnnnnnnnnnnnnnnnnnnnnnnnnnnnnnnnnnnnnnnnnnnnnnnnnnnnnnnnnnnnnnnnnnnnnnnnnnnnnnnnatgagccatggccccatttaactcttgagtctttgtgtaacacctgtttttctcaacctctgacagcatgcaggatttttcctttggcttcaatattttgaaaatgcatgataatatgccttaatatttgtctatttttatccatgnnnnnnnnnnnnnnnnnnnnnnnnnnnnnnnnnnnnnnnnnnnnnnnnnagacagagtcnnnnnnnnnnnnnnnnnnnnnnnnnnnnnnnnnnnnnnnnnnnnnnnnnnnnnnnaatactgaataactataaaatctttaaatagagattagtttaatttgaaatgtacaagtattcagcatatgctattcgta

SEQ ID NO: 180840 - DNA, 951 bp, Homo Sapiens
  misc_feature (694)..(720): n is a, c, g, or t
  misc_feature (760)..(823): n is a, c, g, or t
ttggctaatatgatcccattaggagttaggattttaacagaagaattttgggggaatacaaacatgcagaccatataagtgttttgttgcctatattcataattgcaggaaatgctaaatctcattgagaggttaatgaagattaaggtgtaattttccccatccaagtttataggccccttttcttatgatacaaaagggaaaatagcacataaaatttttttgcaacaatttatttagaacactattacatattaactataaatatatttgcacaaaaagtttattcttacttttttaatagactttagaagggcctgccaaatataatattaagctattgaagagaaatgaaagtccagaagtctcagaaacccaaaaggttgtgactggttatccaaatgctattgataaggtaaaaaactatttattccaattctcttcccaaactttaacacctgggaagatgattgagtgaaaatcgaatgaccatttttgtacataaaactcagctttttgtgtgttcttgtattatacgttcatcttcatgcccaaaatatttattcttttagcctaactctggaattgagaactttttagcatctttgaatatctccaaagaaaatgaagtacagtcatctcatcatggggagcctccaagtgaagagcatttgtcaccactttgcctggctannnnnnnnnnnnnnnnnnnnnnnnnnnggttagagatgatagtctcgctatgttgcctaggttgatnnnnnnnnnnnnnnnnnnnnnnnnnnnnnnnnnnnnnnnnnnnnnnnnnnnnnnnnnnnnnnnnatgagccactgcacctggcctttgcccttttattaaaaaattaaaaatgtttctttgtaaataattcttataaatttggctatcaaccctttgcacatgttgcaattttttcccccagattgggtttt

SEQ ID NO: 180841 - DNA, 1697 bp, Homo Sapiens
  misc_feature (228)..(508): n is a, c, g, or t
  misc_feature (510)..(524): n is a, c, g, or t
  misc_feature (1475)..(1489): n is a, c, g, or t
ttggctgatttttaaaattcagttatttattcccacttcaaatgacaagttcatatatagaatttacgggagaaacttgagaccatttacggggagaaacttgattctgggaagatagcagagtacaaaccagctgcctcacttctgtttcacagggaggctgatggaaaaaggaagcaagctggacccatcctcctctgccagttcctttattgaaagaggtgtgcnnnnnnnnnnnnnnnnnnnnnnnnnnnnnnnnnnnnnnnnnnnnnnnnnnnnnnnnnnnnnnnnnnnnnnnnnnnnnnnnnnnnnnnnnnnnnnnnnnnnnnnnnnnnnnnnnnnnnnnnnnnnnnnnnnnnnnnnnnnnnnnnnnnnnnnnnnnnnnnnnnnnnnnnnnnnnnnnnnnnnnnnnnnnnnnnnnnnnnnnnnnnnnnnnnnnnnnnnnnnnnnnnnnnnnnnnnnnnnnnnnnnnnnnnnnnnnnnnnnnnnnnnnnnnnnnnnnnnnnnntnnnnnnnnnnnnnnngaggtgtgctgcttgtcagcatgtattgtcacggacactcaataagtgccattttggactgtcaaatttagatgctttgtttcagaaagataagccagcatttagttttaaatcactttcctggtttgtaacttgatgctgtttagttaaattgctagttttcctaacactacaatattaattcttctcgtggaagtgtactgatttattatttttattccaagtcagcagatttggaagcattgtggtaaagtctaaggttttcatatccatagtgctgtttggtgagtaccggcagtacagttgaggggagcagggaacagcattgccccgtattgaaggtggagatggttacattcttcactgctttttgcattttgagttgtgtgcctataaaatttggccaaaccattttattattttgttcaaacttgactaagctgagtgatctaaaattatacagaacctaaatcaaagaagagaatgtaaagtcctttagttacttctaagaatttgaagtcaagcacgaatctaagacatagattatttttatatagctaatgaagagtatgttacgaaattgttgggtttttggggtattgagggtggcaaattttgtgaatcatgcatgcttcacagaaacaaccaggtttttccagaattagtctggatcagtgcctaacaaagctgttattaattctccacacatgagtctggctaactgggccagctctcatgttttactcctgtctggctacaaatagcactgtgcatagtagccctgtttccccatggtgttggactgtggtaaagtatgttgtgacatactggaattctaataatcctgttgtaagtatgtacagaatctatgtaacttattgttgacatacagaggtttgggaagtagtctaatggacattccttacaatagaatggctgggaagggaaagnnnnnnnnnnnnnnnctacctaactccaatcttaatgttgtagttttatagcaaacaaaaattgtcagctttttgtattgaaaggtcagtggtggtaagacaaggtgtcttgtaaattaagattttaagaagtgcattaaaatgttttagaattactctgggaattctgtatatcacactaaaatttttatatcattatgttaataaaagttattgactttgt

SEQ ID NO: 180842 - DNA, 2171 bp, Homo Sapiens
ttttcaactcaaatcccagttttaaaagacctcaaacattgtctacataaagcatatcataaacaaaccccatatccatatctagttattttacatactccatactggcattccctactttatactctttctgaaactctgcacgtttctgattattacagccatagcagctagttttattcagcatgcttagtttgtgtcttttgttttcaaacatgcttggggactaatggaaccaggcaagtggttagagggtgggcactgctacgccctagtcctgacagtttgaatgtcttgtagttgcccctgtttatcttctacttcccattttcaatggaagtaagaaaaatcctttattaaaacatgaaaataatctgaatatattcaagctattggtcttagtctgtattgcttcattattaacaaatgcatatataaaataactagtaaccacaacactggacattttgagtcatgcattagaatgttcgtactctaaaaccagagttaaggtcctgtcactattgcttgcactttcaatcagacccagtttgagtttaataagcatgcaaaataaattccttgattcagaggaattacgggacataacaaggatccatgcaagtttcaactcaaaagttgggttaataattgcttagaaatgcaggtagaagctccacatctatcacaatgctgcttcagaaaagggataggagtcatacacaaaaatgttaaaattaggaccactagtcagttttaaaaggcttatatgcaaatcctggtccatctgagtagagaatgatgtacaaactctgggaaaagaaagagaattgagggatgtagagtcttaaggagctgttaattttcttcgtgatttactgacaactataacaggagagcataggtggtttagggagatggttaagatgctcttaggcagaatggtttcttttctgattcatgctaatgagcattacctgcatagctccctggggaaaaaaatgataacgagcagggctaatacaatgtaaactcaagctatcaataccctgaaatttagcacagccctctgctttttaaaactgttcaccaagggatccttccaaataggatataattaatagccaagcaatgttcattaataaactaaagcaatctgcttgaaccaacagcaccatgagaatgtaaactcctggaggccaagagtcttcatctttttgcatatcacagatacaagaagagtaaacatgagaccacagtaactttgaaaagtaattaactgtatactttcaagactatgaaaaactcgtagtatattttagcatttagatgtattaacatggctgttaagggtaatctttaattgttccaagtaactgaactgctgacatcattgtactatgtagcgctgtccccagatagtgcagatgtctgaatattgcttggttattcccatgtctctaagaccaactgacagcataggacattttaagaggagctataatcaacttaacatagccttttccctgtgtgttagttgtcatgtaagaattaaatattaaagaggcactatttcttagatctacatcacttcgttttttccctgggaaaacaaagacccagtcttttcagggatagtcaaggtgctaaaaggccaagatagacatcaggtgaaagggagtgaagtcaccctagttccactattatattctgatgtgagctgtgtggttcctcagatcaagaaagaaactagtttgctgagttctcattgataaagaataagcagtcacaggccataggacacatctatattagacaaggtttcacacctcacccactgaaacatattcactggctattcctttcagtccttctgctttgcatctttaaatcctaactccctaatcataagcatgagagaaatccggcttatccatgttcttgggagtttttttaaaacattaaactcacaaacttctctccctttaaaaaaaatgtacccaggaaaccagtggagaaagatgaggagacaaagcagaaagtataccattctacaaaataaatgcctgttgctaaaacatcgtaagcaaaaaacccatagagcggcttcagtggggctgtagtacatttgtttccaggttaagcactataaaggtttaatttcaacccaa

SEQ ID NO: 180843 - DNA, 720 bp, Homo Sapiens
ttggaaacatataaaccaattccactccagaatggtcaaaccaattttcaatctcttctgcagtgtataagtttccttttccaacagttgcattatcagacctttaaatcttttctcaatatgatagctatgaaatattttatttaactagcaattatctgataaatagtgacgttgaacatctatttatatgctaattacattcccagttacctgactttaacaaggcaggttttccagtttgcaagtatggggaaaatatgtctttaaaaatctagctatagcaggcaaagtatcataacaggtaaaactggtttttaagaagaaaagcctaggaacagctagctttgacttgatgaaggacaggaaaaaccagttgtagcaattgagtacatggacagatactttagagtacatgtcttttccggtattttggttttgggacaatccctccatcaccattatgacgtttcagtggagcaattttcactaagaattttgtacctgttttccagttttgatcatcgatgattttctggttctaatgagatcaaggacatgaagaggctgagtgcctccatgagcttcattattttccatgatctgacctctcattctcttaagctttggagttggatgaaggaagaactctgaaaaaaaggtgggagggtgtaggtccaggcacccccttgtaattcacactgcctcagcctgagagtt

SEQ ID NO: 180844 - DNA, 943 bp, Homo Sapiens
  misc_feature (126)..(217): n is a, c, g, or t
ctttgtacaaaaaagttgggtaagttaaaggttaaagaccctgcttgtttcctaaatcagagggttagagctgttgaaattaaacctttatagtgcttaacctggaaacaaatgtactacagcacnnnnnnnnnnnnnnnnnnnnnnnnnnnnnnnnnnnnnnnnnnnnnnnnnnnnnnnnnnnnnnnnnnnnnnnnnnnnnnnnnnnnnnnnnnnntggcctgctcttttcatgtcttaacatggcatgtcttttagtttcattattttcctactccttgtatgtcaagaaattacattttgcatgtcttatggagatgctgttaattgcttcagtgagtgcttttctaatctgcagaccatttacatttcctgtttgcagcatgctgtgtgcaaacactcagtaatttggagtattcaattatttgttagggctcttcctatttccaaatgtgctgaattgtctattgatgggattttcagatcttttcatgagaactggaaatgtagctgggtggcacctacctaggttgctacgtagtgagtagactttctcttgggtatagtaagcctcagacagctttcacttttatctactttacttgtggaaataaaacagtcattttgttctgaaagaataagatagctttctgtagagaaggaattcctacctctaaaagctgccttgagaactcagaactggcagttttctgaggtgatttttaaatttcagtattagggagagtccagcatttgctgacacagattctacataactaatgtatgatagcaaatgcaaaactattataatgtggtgtatcttgcgcatacacaggttagaacaagtagactctggcagcagatctccagagacccaagtttaggttctcatagtgtatttgaagtagatatactcctggcttaagtagtttagtgtctggga

SEQ ID NO: 180845 - DNA, 475 bp, Homo Sapiens
ttggctgaaattttacttttctgtacaaatcagaatctgcagtccctcccttaccccaaatgcccagctaatccaagagcacaaccagatttttctgattgactttctatctgcgacaggatgctcaagatcaggctctgtagctgacagcagtggcacaggcctctcccagctctgagcagcctctgcaggtgcctggacagctgctggcccctcccctaccttggccagttccaagtgaggaccagtggtgatgtgtggctgcaactgttgtggtcacttaggcaagctcttgtgtctttgatgcaggagtttgagcagcagcaactgaaggcttctattttgtggggcagacatcttagctactgagcaagtgcacagtgagtctcatgtggatatgcctgaatgtccagcgtcagttcatggagctactccctttccctcccaacttttcgttgttgttgagacagggtct

SEQ ID NO: 180846 - DNA, 1258 bp, Homo Sapiens
  misc_feature (135)..(192): n is a, c, g, or t
  misc_feature (611)..(732): n is a, c, g, or t
ttggggattgcttgaggccaggagttcaagaactaaaagctgtacaggcaccaagaatatgactgaatgtcacagtatgctctaaagggcactgtcctaggagtctggagacatgattttgagacttagctgttnnnnnnnnnnnnnnnnnnnnnnnnnnnnnnnnnnnnnnnnnnnnnnnnnnnnnnnnnngttgttaaatttacagtttggtttaactaaagtctctcccagtacgagcagggcgtgagtcagagatacctaagtgtttagtgcagcgcatgtgctttctaaagtggggatggctatttacagactggcctacactgttctggtgggagccctcagtgaccaaggagcagaggtacctgaaacccacccttgaagccatctggatgctccgcttcattcaaatctggggtgttctaacccaaagtaactggccacagactgcaatgtaagatacaaatcttcaggacctagtgtgtgcacatgttggctcttatataagatggcatccttagtacttgttctatgtagaaaagaatttgtgggctcacaagtccctacagagtctcacactctcatggccaataagtatacagggatannnnnnnnnnnnnnnnnnnnnnnnnnnnnnnnnnnnnnnnnnnnnnnnnnnnnnnnnnnnnnnnnnnnnnnnnnnnnnnnnnnnnnnnnnnnnnnnnnnnnnnnnnnnnnnnnnnnnnnnnnatgagccactgtgcctggccaggaccatatcttaattgtctttgtagtttcagtgtttggtacagtgcctctcactgtttctttttgcctttgagatcttccctctttgttactgtgatcttccctactggtctttgttcttctgagtctgtccctatcaccacctcaacccgagctggatgtggcctgtcctcctttttgtgtttctctcacagactgtgtacagtgccctgggcctgagggatgcctgccgctccctgccgcagtccatccagctctttcgggacattgcccaagagttctctgatgacctgcaccatatcgccagcctcattgggaaagtagtggactttgagggcagccttgctgaaaatcgcttcacagtcctccccaacatagatcctgaaattgatgaaaaaaagcgaagactgatgggacttcccagtttccttactgaggttgcccgcaaggagctggagaatctggactcccgtattcctttcatgcagtgtcatctacatccctc

SEQ ID NO: 180847 - DNA, 2333 bp, Homo Sapiens
  misc_feature (162)..(171): n is a, c, g, or t
  misc_feature (913)..(921): n is a, c, g, or t
ttgtccccgacgacaatcttcagtaaagttatttgaacctgtggttgacaattctgtattgactaaaggcaatattgtcacctgtctcattaaaaattagtttccagttaggcagatgaataacactattaaaaatgcacccagttttgtagtcacttgacnnnnnnnnnnatttaaatgaaatttaatttgaaaatagaaaataaaattaggtaaatatgactggcaacctgaatttgagttgggattctttgtgtatttttcccccttgaggttattgtttcttcctaatttatatttcagatacatagtgtagaacaggaatttgcagaagccatttaagttatcttttgaggtaagctctgatttagcatttattctgataaaatctaatacatcatgggatatatataaagcaacttaattcttgtggtgtagtcttaatagttttgaatgttgactgaatgtctataaaattgtgagtttgtctttgttacattccagtgtttctgcctcttggcatgcttaaagcacggcttacttcatctgctccttacacactaaaatgctgttagtgtgctcaactacagaaatagccgctgctaagtgatgtagattttctacttgaatatttttatgttgtaggaacctcaggaggtcagtgtttactgttttatatatgccttctttttcctgtttgagcttctctctttgaaggattctaacagaacaaagctgctgatcaacctaagttggaaacagaaagtgtaattaatataacttaaatgcatgtttggcagttccatgttacagtccattagcgagtgaacttagtgccacaggtattcatttattcaggaaagaattttgctttttgtattgtctaatctcttcaatgacttcatactgtgtnnnnnnnnntcactttttaatattttttggttggttatttcccaaataatcaacatgtaaataatcttttaagagccagttctgatgctttacattattgctacttgattttgttatgcaagttagatttcagaagaatagattttaaaacacttaaccaagccattacatcttaaaaacaaaacaagtagcatacattttgtaattaacattgataaacactgtgatttttttggttaagactttttcattgatctgaattgcttaaattgcatatattgtaaaataggatcagatgtatattttaaactaatttcaatggattttcctcttgaaatgctttgtctactcagttataaaatattcagatacaagttttatctcaggtgaatactcttgtattgtttttgctttggtgacatgcttataaagggtcatcctagttacattctttgttttttaagtgtatttcattgagaatctttccatttagtctgatttttttcctaatattctagcaggctggggtggtataaagccctcctgacaagccttttgcctacaggtttacctgaaaatgagctacatatggtcgtcattttcttcaaactctcaaaataggaaagtggaaatttttctcccctatataaaattattctgcctagcagaaatgccagaaataaattaattgcatcttagtctaaatttaagtcctttgccatgaggaaaaagtggttttttgcttcatatggtaaatctatattattcatattgaatgtattaacagataatggtgcaaaagcattcttcccaggggaagagtgtatcatgcataactgcaatttaagtccttcctttgataatacttcaaaacatacacagctttgcttactgaattatttttgcaaataatacaaggaggggaaactaacttgctactagtgttgttaatgaagtataggccttggaacatttaagaaaactggtcttcagatagttaagggcttgggataatttaagtgaaaagtgagatcagtaatgagctgtgttgttaacaatattatctggtaataataccatgcaatatagcgttgtataccaacttagtgcattttatactgtattaaatatggagatacttctaatgcctctctaaaattaaattttacataaaagttagttttattcacctttaggctttccaagtgaattgtgactaattttttcaatcttacatagatctttcacccattagcattacttacgtagataattctttatgcctagttattatacatattaatttttaaggtatacattttaaattacacaattgttcattgtggtttgtatcccagaatgtgttgtgtttttaaagatgcataatagctgaatgtatgcatgactttgaagagttaaaa

SEQ ID NO: 180848 - DNA, 1999 bp, Homo Sapiens
ctttgtacaaaaaagttgggtaaactgatatgcggtgttccaaggtccctcggcagggaagatttgctggtgattttcttcactccattttcctttgggtgagcctgcctgggaagggccatgaagtcagaatctccactctgcaaaaggaagaattccaggcagaagaggttctgacagggtgacatttccgtatattctctaggttcggacaagagccaggaagctggaagacagtttatcttaatatccaaaactaagtgggaatttttaaccttttcatgcacctattcatggccctacctggaaggaacttggcagttgggttgagccatcttccttcccagctattcagctctgttgagtagcccagagacaggcgtcacggtcagagattcagaacggtctgtgtcagtgaggcctgactcccaaagatggtagcaatttcccaggcttgcgctgtgctcagtcagcaagatgtggggcactgtcctatgactgaataaatagtaattcccatctttctatcgccagttaaaaataaacaacctaccaagtattattctttaaaactaagcatggatgttgatggctaacttctgcggcatataagctacagatctcaagttacttctctaactgtaagcatgtaaatgactttaactcctttctataagttatgattttaaattttcagataagaattgcattttaatatggatatgtgtgcccttaaaagctacagataccaaattttcctcgtccaggtctactcggacgaattttcccccttaatctggccttaaactgagactcggcccttgagagccagggcctggcccagcagtagttgctcatagacctgggaagcaggggcctgctggaaggaatcactagattgctgcaaaaactcacataatccacagtttcctctttttctttttaaaataagttatcaaaatgttttaaaaacactttatgagaccatagtactcagtgccttttgtgagacagtgggtcatttagccttcagcttccctgtttttgatgtagagaaagcttctatttcactggcctcatcccacaagattgtgcgacctttccccgtcatagcctgtcgtgacaatcacgctattgaaagtggctttctagttaaaatgcaattggaaacttgacagtctctaaatgaattaaaagtttcctttggggctatttagcttaacagcagtctacaaataattaaagtgtgagcttaagaaaagtatctttgcggggagaaaaatgtcagatatttttaatgcccagctataaataattttggtgtcttgatatttatacatgcaaaatagaaaaaaaatgttcaacatttattgattgatagactgttaaaatttaatgtttggaataacatttggaagtagtagactttgcattaaaaaatggcttttctttaggaaagtataatcaattattttaatgaccatagcattcatggactcaaatgctgctgccacacacaactcaagtgctggaatatttttctacagtctctctgttctacggattatcttgtaaaccagtgttcaactagttttataactgaaaagctgcacatttttcacagtacaagccgtagtttttacctgtagtttggacttctctgttataatgtaactgcattaccagcccttttaaaggcatctatctatcaaaggaaaatttgggtgttagattttcttgggaccgtttctgtaacctttgcccttcacaatataaaaaatattggttttgccattacattttaatgccaggtttaaaacctgttgaaagctgcagctttatacagctttcttctccctgtgaaatcactttgtttatgtgatggcatttaaaaaatagcatgttctttttaaactgaattttatatctaatcaatgtcttcagtcttgaagaagaatttgcattgttgtgtttgtatatctagtattgcactgcatga

SEQ ID NO: 180849 - DNA, 1248 bp, Homo Sapiens
  misc_feature (968)..(1031): n is a, c, g, or t
ttggctcctaatttgacatttctgtgtcctgaggagttacatttattgtctaacccttgccataaggctgtggtttgaggttcttttgctgttctgggctttatatttaatttcaggtgtagtcacttctaagatgtgtaattgccctcaagagggactgatttttagcttgtcattgtcagtattgaatgtggactcttctgaggcagttaggacaccagccatggtgttaacagtggatgcgttaggctccttaatctcaaggcaatatccacgctacacacatacttattagctgtcttacttgtttgggggatagttacggcaaggagcaaaaaattctaaggactctagctgtttctagtgcttttactttcatagtcctttgaggacatttcctgcagagcactcttgctcacagcccgccctctgcagggcttccagcccctggccgcaatcagcagttcatgccacatgtgtacatccatgttctgggacctgatctcattggagtccagaagcttgttgcccactttccagtgtaaatgactttatgtgcaatggggtcataggtaacattttaactcttttcttagtccaggtcataggaagtctcatcatctgacagccacttttctcccagggaaggcggtgcccactgggccctgggaatgcctgagccagcagagcagatgccccacgtgcttcctttatccagcttccattctctcagttatgaggctctttgaaaatgtcttaactttgatgtaaatttttaaagccaacccctcatcaagacagggttggtttgggtcttttgtacacagggtctggaccttctcattgtgtgcctcccaccagcgtgcacttcgtatgtccagccctgggtcccttcagcagcattgtgcgtgtacaggtttctaggctgtaagactgaatgaatgtacatgtgtttatatcctctccannnnnnnnnnnnnnnnnnnnnnnnnnnnnnnnnnnnnnnnnnnnnnnnnnnnnnnnnnnnnnnnccaaactttcctttaaagagagtttttcataaagttgctaatgtaaactgatatgggtgttccaaggtccctcggcagggaagatttgctggtgattttcttcactccattttcctttgggtgagcctgcctgggaagggccatgaagtcagaatctccactctctcatgttccaggtgaaaattctgaggtccaaagtctgatgcatgacagccaa

SEQ ID NO: 180850 - DNA, 1035 bp, Homo Sapiens
tttttaaaatttcaagtgaaacttaaagggaagaaggaaatgataaaaaggccattggtattactttaccaattcaatagacgcagctcagaaaccaagcagggttttcagatcacacatgtagtaaaggcacctcgcccactctctccccacaatccccatccccttccctttttaggtcttgttttccaaactgattttaggtgatagtttcccctctagtcttggctcatttaaaaagcacaaacattcaaattaaaaatacaataaattattcattctaaggcacgatttacatactaaattcccttgaaattcaatgcaatttcacttcgctcatgattttcaatcacaagacacctgtgacaaatgaggaacaaatccagaagagcccatctaatctcgtcttaagtggtcccttaaatacgttaaaagcccacaatataggcatttacaaggcttttctaagacttccagctcctgaaaaaatcacaccttcacagtttcaaatcaaccacctaagttgctaaggggcagcgaaggatgctgatctgctgcgtatgcaagtctgacgcccatctttcaagtgactaattcacttgataacacccacaccccaaacaaaacaaccctctgaaacaggctgtcttggccaccaggaggaagctggtaaagacatttcccctgcctgtgagatggcatcacacacccctccctttggttctcggaaaactggtgactctgtgtcacctgttttcagttaacacttcttcagtcttccccaccttgtagcaaagcaaaacaatttttgtttgttagtttgtctgtttgcacttaaagttctaagcactttggaaagtttctaagcaacttctcacttccaagcaacaacttaaccaacactaacaacttactattattaattagtattttcttggctcacccacgcactaaattccccaaagccccagagaattcccttcaacctgcatttcctaccacccccaccacccacactgctaccaacttttttgt

SEQ ID NO: 180851 - DNA, 915 bp, Homo Sapiens
aatagccaactttgtacaaaaaagttgggaaactgtgaaggtgtgattttttcaggagctggaagtcttagaaaagccttgtaaatgcctatattgtgggcttttaacgtatttaagggaccacttaagacgagattagatgggctcttctggatttgttcctcatttgtcacaggtgtcttgtgattgaaaatcatgagcgaagtgaaattgcattgaatttcaagggaatttagtatgtaaatcgtgccttagaaacacatctgttgtcttttctgtgtttggtcgatattaataatggcaaaatttttgcctatctagtatcttcaaattgtagtctttgtaacaaccaaataaccttttgtggtcactgtaaaattaatatttggtagacagaatccatgtacctttgctaaggttagaatgaataatttattgtatttttaatttgaatgtttgtgctttttaaatgagccaagactagaggggaaactatcacctaaaatcagtttggaaaacaagacctaaaaagggaaggggatggggattgtggggagagagtgggcgaggtgcctttactacatgtgtgatctgaaaaccctgcttggttctgagctgcgtctattgaattggtaaagtaataccaatggctttttatcatttccttcttccctttaagtttcacttgaaattttaaaaatcatggttatttttatcgttgggatctttctgtcttctgggttccattttttaaatgtttaaaaatatgttgacatggtagttcagttcttaaccaatgacttggggatgatgcaaacaattactgtcgttgggatttaaagtgtattagtcacgcatgtatggggaagtagtctcgggtatgctgttgtgaattgaaactgtaaaagtagatgg

SEQ ID NO: 180852 - DNA, 2144 bp, Homo Sapiens
ttgggttgtgctaaacgctgggagggtacaagttggtcattcctaaatctgtgtgtgagaaatggcaggtctagtttgggcattgtgattgcattgcagattactaggagaagggaatggtgggtacaccggtagtgctcttttgttcttgcttcgtttttttaaacttgaactttacttcgttagatttcataatactttcttggcattctagtaagaggaccctgaggtgggagttgtgggggacggggagaaggggacagcttggcaccggtcccgtgggcgttgcagtgtgggggatgggggtatgcagcttggcactggtactgggagggatgagggtgaagaaggggagagggttggttagagatacagtgtgggtggtgggggtggtaggaaatgcaggttgaagggaattctctggggctttggggaatttagtgcgtgggtgagccaagaaaatactaattaataatagtaagttgttagtgttggttaagttgttgcttggaagtgagaagttgcttagaaactttccaaagtgcttagaactttaagtgcaaacagacaaactaacaaacaaaaattgttttgctttgctacaaggtggggaagactgaagaagtgttaactgaaaacaggtgacacagagtcaccagttttccgagaaccaaagggaggggtgtgtgatgccatctcacaggcaggggaaatgtctttaccagcttcctcctggtggccaagacagcctgtttcagagggttgttttgtttggggtgtgggtgttatcaagtgaattagtcacttgaaagatgggcgtcagacttgcatacgcagcagatcagcatccttcgctgccccttagcaacttaggtggttgatttgaaactgtgaaggtgtgattttttcaggagctggaagtcttagaaaagccttgtaaatgcctatattgtgggcttttaacgtatttaagggaccacttaagacgagattagatgggctcttctggatttgttcctcatttgtcacaggtgtcttgtgattgaaaatcatgagcgaagtgaaattgcattgaatttcaagggaatttagtatgtaaatcgtgccttagaaacacatctgttgtcttttctgtgtttggtcgatattaataatggcaaaatttttgcctatctagtatcttcaaattgtagtctttgtaacaaccaaataaccttttgtggtcactgtaaaattaatatttggtagacagaatccatgtacctttgctaaggttagaatgaataatttattgtatttttaatttgaatgtttgtgctttttaaatgagccaagactagaggggaaactatcacctaaaatcagtttggaaaacaagacctaaaaagggaaggggatggggattgtggggagagagtgggcgaggtgcctttactacatgtgtgatctgaaaaccctgcttggttctgagctgcgtctattgaattggtaaagtaataccaatggctttttatcatttccttcttccctttaagtttcacttgaaattttaaaaatcatggttatttttatcgttgggatctttctgtcttctgggttccattttttaaatgtttaaaaatatgttgacatggtagttcagttcttaaccaatgacttggggatgatgcaaacaattactgtcgttgggatttagagtgtattagtcacgcatgtatggggaagtagtctcgggtatgctgttgtgaaattgaaactgtaaaagtagatggttgaaagtactggtatgttgctctgtatggtaagaactaattctgttacgtcatgtacataattactaatcacttttcttcccctttacagcacaaataaagtttgagttctaaactcattagaattgttgtattgctatgttacatttctcgacccctatcacattgccttcataacgactttggatgtatcttcatattgtagatttaggtctagatttgctagctccaagtaattaaggccatgtaggagagcatggtaaccacagatagaactggtattatcccaagtggtctgcagactgctgagtggggatgggatctgctctctgttgagagttggtaatcattggtttgaaatgtgatgaaacc

SEQ ID NO: 180853 - DNA, 1883 bp, Homo Sapiens
  misc_feature (1420)..(1438): n is a, c, g, or t
ccccccaattactggccttatattagattaaaatgtactttaaagtcttcatttctaagtaccctatcatctctgtagaataggtgttctcaaacttactaaagaatcagagatctcttggtaatgtatcacaagctacttttatattaaaattaaagtaactacataatcttctgctaaacagatatcttgtgatatgctgtaagagtggcagaaagtgccaaaggcataataaaatttcatggaagaaaaattaatagtcagaaaattctatccaccaactctctttgtttccctgtgaatgtgctattatctgacttaagcaaacaaaactccttaagtcactattcagaagaccacgactctgttggagcaaagtccaggccttagttataaaagaccacttcaatgcagaatagcttactgtggtgcacacaaagtatgttatgctcaagtttatttcttggacaattttaatcacatcagttagtgcatatattttaggacacatgttcaaaataaatacttttgcatataaggaatctaatgaaacattattcattttcccccttggacaatgaatttaatacaccaaatttaaaaatcccttttcttttttccccctaatttgtgatctcatgcttttcctctcaacttttccaattacagcttgtgtttgataatcaatatacagtttacttaagcttaactgttcatgtaacctaaggctcaataaatctttccaaatttgacaattctctcattaaaaagtactcccagaaatattaagaatccatctcatctaccccagaaagagaacactgagattaggctgaactgccttcaaataattttaaacaaattggcacacaaattagtattttgaagaagaggccattgccatcagtgcaagcacgtggactgagatccaacaaggcaatattttttttagttaattagagtgcaagtttccacatgggaagcccaccagatcaagatgcacatttaaatatgtaaacatatagaattttcaaattttaactgacacccaggtattgctaacctttccattttcatttaagcatcaagtgccctgtgtatcacagaatccaagttcaatgtccattttgtttgacactgtgggcacttagttccagcaatgggaagagttcatgcttgtctgttttaggactttgatagatttaccatttgcttatatgcaaaatcaagtgcacctgatttttacagtttccaacaatcagcattattttgaaaccacaattttattttcaaaaactttacttaggtatttttaacttgcatgaacagttacttcacccttgcccaaattttgaatcctttcttccactgttttctcttgggccctgaaacccagagaggccttggcaagacagaattnnnnnnnnnnnnnnnnnnnttcaataattaactgaccaacacctcttaagctaaaaatacattagtttaaaaccattcaattttagcagagaagtgctacacatgtgtaaaaagcaggaaacgaacttctggcaaggtggcagagcaagtgctagaatcattccacaggtcagccctgatagctcaagatgtagcagccccagtaccatacatgacagcaggtcaggcagatcacaaaagaggcttccattattcccttccacccaaattctgacagctgagaagttaacagtttgccttctcatttaatcctcattgttaaatttgttaaactatcttaatccataatgggtaagagaggacccacataaaaatattgggtgattacaagaataatttgtggataatttgaaaacagcctaacattcacagtgggtaacagaaagatattaaattcatgccaa

SEQ ID NO: 180854 - DNA, 1177 bp, Homo Sapiens
tatatggaattgtgggcaattgctccttttcctttcttgggctttcagtatattctgtatttctgtattttgcaaattttctatgatgacttgtattactttcatagtggaaggcagtaaacttaattaaaaacaaaaatgaagtcattagttggaaaggataacaacccttttgttccttcctccttctccttgatattattagatactggataactaaaaccacttaaaaatgagctaattaagatcttaccttctttttttagaatgccttttgccttaagtgtaattaagaagcttacaccacaccttggccccactcccacctctaacccttcatcgggaagagacaatactaagtagttggtgtttccttgacatcaaaggacacggtataaacctcaagtattgatagaaacaaaagccagaggaccatgtgacgatgactggccctctttctctcctagacgggggtagccgtgtgtacacacgtgtgtgtgagtgtgccgggacgctacccactccatgtaatgttccattgatttccctgtggtctgtgtgctctcaggaagaagagctgggagcaggccaccttggaggaggcttaatcagctgctgtcgagtacacggatggtgcacaggagcaggcctggagtgggatgatggcgaggagggtagagctggtcagagacctgtttgggggcactgcttgccatggccagggcatggctgcaggagtcacgaaggctgttctcacggacgaactgtcagtcacacctgctcttcttggtgtgagctaaaccaacaagagcaggtctgagtgtgagctcttctgtgactcacgtagcccagggccttctcaccctcctggaagggaacgggagggaacggacccttcccagttgctgaggcctttctctctgtgttcaagtttactttagactgacttctcatcttacagcagtgctgggaacaaagaggccagtgctgagtcacagccaccctgtgactctgccagcacagattttctttgtagtgatatttgtctatgtatctatgtaggtgccagacctgagccacgtagctatcaaacactggaaaaggagtccttggtgcctttctaattgtaagcatcagctttcatcacctgcctctcttcagctctttctttttttaa

SEQ ID NO: 180855 - DNA, 931 bp, Homo Sapiens
ttggcagagctcctggtactgcccttcctttgagggccgtggagggctgtggacagcccagcaacctgtcgctcttggaggctggtgtggccttgaggagggaagcctcgcatggccgctggaagagaggcgcctcctggcctggctctgcagaacccaggggcacgctctgggcctgggctgaggaagtcccgctctccccgcggctctgagttggactgaggacaggtgtgggcgccagtgtgggtgcaggcgcaggtgcaggcacagggccactgtcctccaggcaggctttttggtgctaggccctgggactggaagtcgcccagcccgtatttatgtaaaggtatttatgggccactgcacatgcccgctgcagccctgggatcagctggaagctgcctgtcatctcctgcccaatccccagaaaccctgattcaggtctgcaggctcctgcgggctcaccaggctgctggctccggtaccatgtaaacctaggaaggtaaaggagcaggcaacctcctcgtggcctgtgtgtttgctgtgttacgtggactctgtgtgggctcctccctggggcccggccagcataacggtgcacccagggacctcccagtgcacccggggccctttgcaggggtgggggtgccacacaagtgaagaagttgggactcatctcagttcccagtgctattgaggagaacgctggggctgcattcattaccgctgagacccagagactggctgttcccagagaatggcccagggggaggagggctggtgtggaggggcaacctggactgaggccgaactcccttgggctcaccccacccacccctacctgagcatcagcagtggggggagggcagcatcgcagggcagggactccctgggtgaagacagaccagccctccccgagcacctggcactc

SEQ ID NO: 180856 - DNA, 872 bp, Homo Sapiens
aaaagtaaccatgcatcttgtattaatgaacccagataacctattacatatgttttagcagtaagatttgataatatatgtatttcatattatttcataagagatatttaaattatacatggatttttcccagtagctacttcatctcccacttcttttcatagtactgactagattttaaattactgatcataatgtgtcttagttcactgagatgataaatagcaaaacatttcgaatttaaataaaggaaagaaattttaagtttgatttttccactaagctgagctaccttccaattagattatttgagatctcacaaacaaaatagtatcacagcaggacataacctcaggattccttttcacatcaaagttttttactttcaaaactccaacctttacacaatattgatataaacggcggcaagacccgtagacgggaggtaatgttataaatgtacaaatttcttatctatatttagatttatactttacataaagatgttcccaaaacagaaataatattattagaaatactaaaattgaatttcattaatacctaatttagataataattatgagaaaaagcatgtattacacttcattgtaccttaaatttttcccataccttcattcactagattcaccatcaattcaaaattagataacccatgaaggagctcatgtatatgtatatatactgatgaagcactactatgttacttttggaataaaaattaatgcttatctatataacttgcccattaaaatccccaagcatggcaatgtgtatagtcaaaatagctactagagttcatttttaaattcttgtatatataattctaagatataacagtaaattagagccaa

SEQ ID NO: 180857 - DNA, 945 bp, Homo Sapiens
ttggctcatttgaaaaagaagtaattctaatatatgctatctgtttcacaggttgtaggtcataaagaaggtctggatgttatggagagagctgatcctttattccttttaattggacttcctactattcctgtcatgctgatattaggcaagatgattcgctgggaggactatgtgcttagactgtggcgcaaatactcgaataaactacaaattttaaatagtatatttccagggataggttgtcctgttcctcgaattccagctgaggccaatcctttagcagatcatgtctctgctactcgaatcttgtgtggagcccttgtctttcctactattgctacaatagttggtaaattgatgttcagtagtgttaactctaatttacaaaggacaatcttggtaagacggctttaacattacttatattaccttgcaaaagagaatgaagtgtatttgtttttaaaaggtggggaactgtataaatattcggtctgtggctcctatgcattaagcctctatttgagcctcactatcattcaatagcttgagtggaaataaaaagaggagaaaccactgcagcagttctggccttttggaactatgttgtaggtgctttctctcctggcatatgcatgaatcatcacacctgtccctcttgccagtgggattacagtgctttacgatcagaccacctggttcaaatcccatcacagaaattgtcttgctgtgaaatctaaatcaaatgtctggactttttgttcctgtagtatggtgatggtaataatcaggattattgtgaggattgtataagtactagcacatagtaagcactcatgttgtttgctattattgttactcccacttctcccctctggtggcatgtaacctgcacggaccttggaggactgaacaaaggggcaagcgtgggaataaagacaaaga

SEQ ID NO: 180858 - DNA, 1339 bp, Homo Sapiens
aaatattcccaaagaaagaagcacaatgcacgttgtgatcgcctattcagcaacagcgagcactgcatccaaaactctcatcccaggaattaaataaggtcagccacattcatgggcatctcctccactgtagtattgtagaaagtctcaatgtcacgaagaatcctcttgtcttcttcagtaacaaagtttatagccacacctttcctcccaaatcgaccccctctgccaattctgtgtaagaaaaagaatcagaacgttacttctcacataatgtataaactactgaacatgacgatccacttgttaaccaccagctgctgtttacttatcaaggttatagttcgtgcttctaactggagcactagctgctaatgcatatctagagaaaaaaatcttcctttgcagttagtgccaaaaggattcaaggcttgtctggctgcaaaatgagatttttatcaggcatcttgagcattattataaagcagatgacagtatcgtgtttggggtagtgaaattaaagcccataccaaagtgggccagccaagagcaggtgtcagcctgggacagatgtgaacaccaggaataaaagagcagttatgtaatccatttcgacgcacttctggaactgtaaactgtaaacaaatgctgcaaaggttaactattttctaaaacttacttttttccagtgggaaaacaaatatttggtatggtaacccaaacttatcactgcttttttgctcagtttcacacgttgtaactcaaattactctaaacgtgtttaactgccaaacagctacctgcatgttagaaaccagacaatacaaaccacctaataagaaaggttccctaatagaaatactaatacaaaaaaatgccttagctggagcaacttaaaaatcaaataatcatgacaaaagaaaaacaaatataaataccgactcgctctttattcaaacagtgtgctgtttcgcttatgattccacgtcctaaattacgtcaacgccgtttctgagtgccatctcgtcaccaactgctgctatcgactcctgtattttttaaaaagtctttttttacatcatataacaaagtacaattcaatttatttagggataaagccactataactaaaccagggttcactcaaattgctaccaggcgacaccaagaaaatcccaactatagaaaaaatcaccaagaaaaacacatggacacaagaacatcactaaaagctcaagcataaggtaagaccaacaattgtggaaaaaaaccctatgtccacaatctgggcaatgtttacaagttttcccactttgttcccaacttttttgtacaaagt

SEQ ID NO: 180859 - DNA, 924 bp, Homo Sapiens
ttggctatattcacaggtgagaagccagcatcttggctgtattgaaaaaattcatacgtttttctactgtgatttgtatgaaaggtaacatcaaatcagggaatagattcagtaaagtcagtagtgttcagtaagatgatgtaattaaatttgtactagggaaggttgatgagaacaaagtgggaaaacttgtaaacattgcccagattgtggacatagggtttttttccacaattgttggtcttaccttatgcttgagcttttagtgatgttcttgtgtccatgtgtttttcttggtgattttttctatagttgggattttcttggtgtcgcctggtagcaatttgagtgaaccctggtttagttatagtggctttatccctaaataaattgaattgtactttgttatatgatgtaaaaaaagactttttaaaaaatacaggagtcgatagcagcagttggtgacgagatggcactcagaaacggcgttgacgtaatttaggacgtggaatcataagcgaaacagcacactgtttgaataaagagcgagtcggtatttatatttgtttttcttttgtcatgattatttgatttttaagttgctccagctaaggcatttttttgtattagtatttctattagggaacctttcttattaggtggtttgtattgtctggtttctaacatgcaggtagctgtttggcagttaaacacgtttagagtaatttgagttacaacgtgtgaaactgagcaaaaaagcagtgataagtttgggttaccataccaaatatttgttttcccactggaaaaaagtaagttttagaaaatagttaacctttgcagcatttgtttacagtttacagttccagaagtgcgtcgaaatggattacataactgctcttttattcctggtgttcacatctg

SEQ ID NO: 180860 - DNA, 1132 bp, Homo Sapiens
  misc_feature (161)..(187): n is a, c, g, or t
acaaaaaagttgggagtataaaaccctgggacaaattgttaatgccactgtgttatagttagtagtagaacaataccagtgattgtttagaagattttatatttgtattactaattgtatcttataaaagcgtttctgttgtatgtttttttacctgttgnnnnnnnnnnnnnnnnnnnnnnnnnnngcttagaacaatccttaaatatttacaaaatgtgtttcaacattcatatttcaccacatcttaaagaaacatgaaattcaatttatagcttaaacaggaactcctccaaacagcctcctttctctaattccaatggttcaatcctcaaattaccacgtgttttacatatacattggcagaataacttctgatctcgctctcctaatgtaggatcaagacactgttcataagacactcaagaaagtgcttttgcaatatcacaaacttattttcttaagtttgtactagcagcaaaagtattgagcttccagctgtatggagccctgtagcactctctacagagagggtcctgattcccagcaacttagctgtgagtgcaggcgcggaagggtcttaaagtggcgtgagttacattaacctgagtatcatagtaagtaaaaatttatcctaacgtctttggggcgggaggggtttttagcaacattggggccggttgcagaaacaacccctctcctgccttccagacactgaggaaagtattcttgttctcttcatataccaagggaatggtgggaaaagtctttgctagagagcatgtggctgtgtgttgtcacttgatattcagcacaggcagctaggatttaaaccctccctgatcttgagacagagaactttacccaaaagatgggactgagttcagatttcagatacattaatcactcatcattgcttaaattgatgaaagtatcttttccctctgttaataattaaaagggaaaaaaattctttgttaatgctgtatttttctgtccaaacaggttgaaacagttcctcggctacagtgaagactggattacagaaagggtcggcggaccggggagtgcagggctctgtcatattcagtgacagctccgtctccgcagcgattgaggaaactgtggactg

SEQ ID NO: 180861 - DNA, 1624 bp, Homo Sapiens
  misc_feature (901)..(919): n is a, c, g, or t
  misc_feature (1186)..(1242): n is a, c, g, or t
aaaaagttggatagctgtcatccataaataagatgaagctattttagaaatcctacattttatcgtcttgcatggtccgctcctttttgactaccaacttgcccatgtgttttctcctaaaacacgttgctcaagttgcttgtccctggagccctggcattttctcctcctcaccattgttctcatacctctaccatgggaaccttggcagcctgctttctggccccatcttgccaaatgcccatgtagctaccacaccgcggctttttcttgatctctgtcctctaccccattgtcattctggacaaggcagtctcccgattttctttgtcctatttgatgatacgttttatatttgcttctctgactttgagtcctcttgttagcccctaaatgtttgtactccccaaggttctgctggtgatctcctttcctctccccctccaccctttctattgatctcacctccttctcaggcttcagagagccgtctgtgcaggtgactatgaaatgtgtatttctcatccacctgctttgagcttaagatttacatctggagaggtcaacctaggggagccatggcatctgagactcagcgtgtcttaaaccagattcatctcttactgtcctcaccagcttctccagctctccttttagctgtagtgacagttgcactctctcagccaccagattgtggtgcccttcttcgccacatcttgccttcattctccacatttgcattcgttgcagttttcaggcttatccttataaagtatcttttcttccaaaaattgcttgtgtatacatatgcatagagagatatctggaaagaaattcaccagaaagtttaattcaccatccagtctatctctgggtaatgggattctatattgttcaagcnnnnnnnnnnnnnnnnnnnaaataacaggccttgattactcatggacttgtgcccagtgtatacccgtctatctcctcagcactcccttgccctgaaccccatcactggggctcagttgctggttcattcattctttgtacctccggtcatcattttccgggtgcctttcaagtaaactttccttagtgaaacccttcttccagctgaatgtttcttcctttcgtgagccctctggtctctatgctatttcctgtattctgccctctgctctccatacatgtgtannnnnnnnnnnnnnnnnnnnnnnnnnnnnnnnnnnnnnnnnnnnnnnnnnnnnnnnnattacccatcctttcccccttttggttacagtctcccagtttttctttgggagacaacaccttttccccctggctacagttttggtgggatgggcagttcaggtgtcctgccaacgagatactcttctcctggaatttgaattttgagtcatgggatacaaggactgacagtgattggcactgattcagcctggccgaggtgctctgaagaagccactcattagttcctgcctcccagatccctggagctgccctggtccctgaactctccgaagcctggttcttcagatattcctcgtatctgtgagctatctcatatccttacaataaattctctctctctttattttaagttaaacaaaaaccagcttctgttgctttt

SEQ ID NO: 180862 - DNA, 2055 bp, Homo Sapiens
  misc_feature (1103)..(1171): n is a, c, g, or t
  misc_feature (1196)..(1273): n is a, c, g, or t
ttgggtggctggaagacatggccactccagtcggtgttgagcacggcgagcagtctcaggcctttagtgatgatgaggcctttctttgtttggcatctgcagagacggtgaaaagcagagctccaggttgaaggatcagagtaatagatggagcccttaacatgagtaagagtgggtgcaggcagggcctgagtggtcactagaaatgagaaagcacagttggtgccatcacatacattcacctcctgctttattctgaagttcaagtatgagaatacgtgttgacatacaagccagctatgattaaaggtggtggctgtggccttgaaaacagtcatgtgaaaactcatcaccttaaggtgttaagtgtaaggatcttcacgatgaaatttctgtaaatggtgcagtcagcctcagtttccaaagccggaaaaggatcctctagtagccacggtgtggcagctgctctgaaccaggacctggacccggacccaaagtgccatgtctttaatgttagctcccagcgatgccagatgggatcagcacagccctgcctctgctgctaattgttcctctaaagtaatcgccatgcgttctttgggcttcatctttaaaggaatgaagcaactgagattattctggaaaaccttttggcagttagtgaaattagagtacaactaagaacattttcagacctccactgtggatgacctgggtataatctcacaaatcgatgggactgcaaggattgtaaactgaaatgaacatgattatactctgttggaagagcctaagaggaaactgatgccatgagtttcagagagtaatgcttaaccccagttacacaggatgccgtcttgtgtttcctcttgtttagttacccactacagtgattttgtgatctgctaatgggttgccacccacaaccattgctttagcacttttacttcaaatcaatgaaggattgataaaagttctcctggtgtctccgcagagtgccttccaggaacagatctttgcatagaatatcagtggtttccttttttgtttcaaatagtggtcagaaaatacccagtgttgactcaccaaggcaatcagcttcnnnnnnnnnnnnnnnnnnnnnnnnnnnnnnnnnnnnnnnnnnnnnnnnnnnnnnnnnnnnnnnnnnnnngagacggagttccactctgtcgccnnnnnnnnnnnnnnnnnnnnnnnnnnnnnnnnnnnnnnnnnnnnnnnnnnnnnnnnnnnnnnnnnnnnnnnnnnnnnnggaaatcctggctttctttaagccacagacttcctaggctgtggtcccagctccttgtctgcctggtccctgtcaccttgcagtgccaccacccccaggggctctgcttgcttccagtggcttctgtagctttggcaactggcagatctttatggcagtagaggtgccagcatggaggatggagtttgggtttataacccaaccctcgaacgaaccagcctgtgggggcctggagtggagctggttttggggagtcacaggtgcggggggttcatcttctcctttctccttctcctttcctgacccctccgacagcttccatgttggccatgggtcaggtgaatggatggagctccaagcggggctcagcccattgacccgagcgaggcgcacacacctgcagcgtggatcaagcgcactctctccagcatcgccctgaccattccatgtgctttgtcctagcatgttcattcttgactttctccacttcattttattaaaaagttaaatgctttaggaatctgtggcgtgtggccactgaccgccccccacctcctgccgctcctccaagtttgagctgagatggttctgtgagtccttggcaggggtcaaagggcacatctccttgaacctagaaaagccccctacactctcagaggacacctctcctgtggattcagcgctggggcagtgaagtgtcgggagccagcagagcatgttccaagggtcaccccgagaggacacagcatctggaagtgctctctcgccactctgggtgcttt

SEQ ID NO: 180863 - DNA, 743 bp, Homo Sapiens
  misc_feature (511)..(519): n is a, c, g, or t
ttggcaaaaacaagaaaactgcgtggacagctttagtatcaagagggcagaagtagaaccaatggaacagggctctattttagcttcatgagagatagaagtttctaatcctcatcattggcctgctgtggaaggggctgccttgtaatgacaacagatgtccctggagacatgcaaacaagctagtctcgctagaagaaagagcattcttgcatggagaagtggattagatgacccttacctccttcctggaactaagacttgattatagttgttttgtttttagaataattgtgattcagttttgtgactacaaaaacaggtgtgtgttcattttataacgtttagacaatttttaaatacccagaagaaaataacgtcatctgactgttccattcagagatacctactgctagcattttgctacagaggccccatcaatcttttgaatacacatttcattcaattttgatgaagtgggatactaacaaacatactgtattgtacctgnnnnnnnnnccttttaaaaattattgtattttgtacctgcttttttattaatcaaaaaactctgatactatgaatgtcttccttgtcattaagtattttttgtaaaacaagagggtgaaagcttattcagtggagggggtggtagtggtgatgggaggaattagagatcagtgttataaattcagaaataaagagaagtatctaaaagtgagctcttcccactcccatccctc

SEQ ID NO: 180864 - DNA, 692 bp, Homo Sapiens
  misc_feature (165)..(192): n is a, c, g, or t
  misc_feature (316)..(356): n is a, c, g, or t
caaattgatgagcaatgcttttctataaaagaacaactttgtacaaaaaagttggggtagttgtaataaatgccctgaatttttattttggaaagtccttatttttatcttgtttttgaagtaaaataattttgaattaaatattggttagaaatttttttgttnnnnnnnnnnnnnnnnnnnnnnnnnnnntttttgtcttcaagttacctctgtattactttttccctatattcttctaagattcatttgatgaatatattgatctacttgatggcatccaatacgttttacattccatattttaattttgtgnnnnnnnnnnnnnnnnnnnnnnnnnnnnnnnnnnnnnnnnntgtgttatgtattttaaggtatgacacctaacaccagttgcttgtgttttggtgttttattttatattgccattgtgtatgacagtgtttaactctgtacaatttaagactgtgtctagccaaatcaaatataaatcagccatatgtctactgccaatataattacctctgtgtttgtttgcctctacaaatatcatctctgtttattttatgacttgtatatttgttgtgtaggtttgttgtaaatggtcgttcaatcttggctaggtgaccagttataaaaattctcctaatttcaatatctgttgtgaatctacattacttctatgtgggaga

SEQ ID NO: 180865 - DNA, 1018 bp, Homo Sapiens
ccatttattttagcaagtgaaggaactaccccattctggtaactgaattgtttttacttgggacacgatgcacacagactctgctgggaaggccggggctgggcacacagtgcccacagctgtctcccacttcctttaggacacttcctcaatctagcaacacttccggttgagggatttcctggtgctttgccccaaacttccttccttaataggattccatttcttctagagttatactgggctaaaatcctctgtgtttttgtaatgagacttcgctttttcttctaattctttttggttagtcccaggtgagtttcgtctccagatgagacaggtacagggagtccttggcccccatccctgaccaggctgagagggtgtggtgcaccccattatagatcaagctgcagaatgctgttgcgggtagggctgaaaataaaggctcagaagcactgagatattccatctctggctttctgggagattaaagccctagaaggcaatgtcacttgcagagtaatatcatgggcaccccacactcctcctctgtgcaaggcatttggcagttgctacagcagttctgtttggtgtctattaactcacccctcccatcgttatggtgtcatggccaaagagactgaggctggagaagccagacaacgtggccaaagcaggtagaatgtggctccttggtgcccttcccttcaaaggtgtgagtctcactgcctttccctgagtttgagctggcctcagtgtctggcttctcatgaacacagtgcggtggaagggacaccaagtgatgttccacgcctggtcaggaaaggtgcccagcttccagctggcccgtgggatccacacacatgctgtgagggggtccggccagagctgtggcctggacgtaggagccttctgtgactcccaccggccttgggggcacccgctaatgcccagtggagctatccggatgaagccctgtcacaagagacaagagttctgccaacttttttgtacaaag

SEQ ID NO: 180866 - DNA, 744 bp, Homo Sapiens
aaaaaaaattcaactcttggtcttgtttctcagcacttagtttattgttattagaatttagccatacagccaactttgacaaaatgggtcacagaacaagcatgtacatcaagaggaagttccatatcccccttgtaccatttctccttgggaactcatgctatgggctaccttaaaggtaaaactcatcttatggagtctttctgataggtcactaggtaaaactccttggatagggtgaaaatggatgcacactctattacatactctggtttatcataaggaattttccagaaagctaagctttatactaataagatattggttggtagtaggaacttcaaaaatgaatgagtttgccataactttaattttctggattagaaacacaaaacttgaaatgcaattatcaatattttgtaatatatattcctacagtttgggtagaaataaggaacatgtctgctagatctggtttatgaaaaagtgaaaaatattaaatacaccagagactcaaaccctttcaaggcacacaataactgttctggatttacctgacaaacctagttgagtagcattttgacagaaaatatcagactgaaagttcattcaaatgtacttaaatgtacaatacagtgttcaatagtttttattgcagtgatgtttttccaataatttaagtaattctcttcctagtataatacagttttcataataatgtttacttgctttctttatattttc

SEQ ID NO: 180867 - DNA, 2019 bp, Homo Sapiens
ttggctaaatgttgtcctaaaaaggtatgtattctggttcatgcagtaagatttgttgtttatttgtaaatagaatggtattctatttcaaacttttaagacaaacctgttgccgcaaggctgatgcacattggatgatgactgttttctggttccagatcttgtctttgtgatataggagttatggaatgagccctggacaggatcctaagatccgggtttgttcctacttctactcattaatagcagtttgacatttaatataggaataatgttaacttgtcacttaaaacaagattctcttcatcttgttttcaagatttcaagattcttttaaaaattagcatgaagtatgggataatgattggggaggaagtatttttaaaaagccttcttgagtttttatgcatattacatttttattcaataaaaaattccccattgttttattgaaatggattagttgtcgatcctctgaattagacatattctttaaaaataagatccgttgtcagccatctaaaatgtttttataaattcatacttacattcttttttgccggttgcagtcagcctttagtgccaagagagaacattacagcatggatgaatgcaattggtttgatcatcactgccctaccagtgagttaataattgtgatttgtacttagtgatgaaatacagccagctgttccatgtcagcaaaaagaaaaagatgcatataggatgcccttgtacgggacgtcatgcaaattaatgaagtattttatgtttttaaagttttttcatattattactgctttaaaaatctacagtgactagtttttgcttttctgtattagatctaaatatatctatgtgacttacgggtctctgcattttctggtaccaccttacctatccaactttagtttttacataatagcttgatctactcttggccacttaacgtgttgtatatctacagcctttgttccttcagatagtgcttaagacatgttttaggtacttctgaatgtgagggaataagacatttttcttattccagaagcttcttctttccatcaccttctctaaagcctattcattctttgctagcttagagcctcctttctcagtgaatgaagccttccctgacttttccagctcacatgaagactcctttctctgacctccacacatatttttttaaagtttattatttttaaataagtaataaagctatagatttattgtttgataaattaattgatttactgcatagtgtatatcaggtacctaaatgagctggacagatacatgtatggagccccttaactcacagttacttctcccaggttgttactgacttaatttgaccagttacaaagccacccagctgtattgtgcagaagctggaaaaatagaaaactttaaagaatgagaaaacactattactttagactttggggtggaatgctggataagtgatatttttcactagctttcctccgattttaaaggagccatattggattgttcttcatgatcgaattgtgagtgtcatcagcagccccagcttgacgtctgaaacagagtgggttggctatccattccgcctctttgatttcactgcctgtcatcagtcctactctgagatgagttgtagctatacgttagctcttgcacatgctgtgtggcaccattctagcatcggacaactttctctcattccaaagtttcttactgaagtacttcttcctatagtgaagaccgaattccagttgctttatgtataccatcttgttggaccatttttacaaagatttcagcaagagagaactcgttgtatgatagagattggtgtggcgttttatgacatgctgctgaatgttgaccagtgtagcacccatttaaattacatggatcccatctgtgacttcctctatcacatgaagtatatgtttactggtgacagcgtgaaagagcaagtagagaagattatctgtaacttaaaaccagctttaaaacttcgtcttc

SEQ ID NO: 180868 - DNA, 1505 bp, Homo Sapiens
tacaaaaaagttggcaccaaggaaaggagcctggcggcaggggtctctgcaatggcaagaaagtgagtgaatccagcgctgccacctggttatccccttctcgttgaaaatagcagcgcgggtgcaaattcctaaacacaggctgcctgcactcggtgttacctcgggctgaggcatgataatattttattttttaaagctgtgaggaaatgaaagtgaggctttggttggggcgaggcagttgtgaaagaaattaaaataaaagaccctttgtaaatgcagacttagaagaaatactgaatttgtgtcagaagttctccagtgtttgtgttaatcgtgtggtgataatcctgtcctccttttaaagcgaattctctactgaaaggtctgctctgcttaaggagctacaaactgctctcaaaagaatgaaatactgagttccaattcagtgaggcacagtgttggactatggcacatttagttggagtcggggggaggtcaggaatatgatcagataatggattttataccttagagcaaaatctattagtctctctcagtttatcaatttaaatggctttaggcttatagggggtgtaaactttaagaatataattctcccattcaagtttacagcaaacatctagccaccttcaaaacaaagaatatacagaccatcatttagcaatactaatacatgattttccttggggatggcaggtttgagaatcctttagcaacaggacatacttcccctaaattacagtgaattatttataacgagataaagctttcaggtacaagctgaaggtggggtgtctaacaactaaaaactatcactaaatctcaaagagaaagttcttgcaaaatatgtaaagttcacaaggtgcagacattttccttctttaggcttttatctaaggaagggctatgaaactgggcccatctgtatacaggctcaaatttacgtttttaaaggaagaatctatgcagctgaggcttattgcaggaaatacttcatttgtatgtaaatattattgtaaataaataggaggctgtatatttttgaagttgttgatccgcactgaaatagaagtctctaggatctgcatataaacaataaatgtttcctagaaattagtggttttgtttgggaattagaaaaatttacattctctcccaggtaacatagttctctcaatgtaaacttggaacctgaaaccctacttaatttagagaaagaaatgtctgagaaatagttcccttgatttcttatgctggcattaagatcaattatttaacagatagtcctctgagatacaagtaaggaatatttagacacaaatccttgtcctatagaaacagatatacccaaatgacaaattgtttcttcataatgatcttccatttttaacactgataccactacacagtacatatgaaaacagaagctggggagaaaatgtttttttcacaattgaattgctgcatttctcaaactttgg

SEQ ID NO: 180869 - DNA, 753 bp, Homo Sapiens
  misc_feature (536)..(564): n is a, c, g, or t
ttggcgaataatgtaataggtttgctaaagaatctaaccatcaaatataatattgtttccagggagggtgtttgttcagagttgcctgttagtagaatctggactgtccatcccagccacatcccacctactggacagtaggggtagagatgccaccagactacaggtgaccagattggcctgaaacatggtgtccagtaaaaacggggaggaataagtccatgactgccggagagcttggtggtaggaggagggtgaaggagggtgagggggcctctcatgggtcagaaacctccagggacatccctcagctggtaactctgctgttgtccggagggttcaggcttggtgtgccttcttctgtttgtctgacttttggctcctatggttcatctcctgccctgcccaccacagaaaaggatgctgctgcacagcttctccaatgtaccagtcattgaggccagcgcgcagcacttttaatgtttttagtgctagtaactgtgttttaactctccaggaataagctgggaggttannnnnnnnnnnnnnnnnnnnnnnnnnnnncctctccacccactttccttttttacagttacagaccctgttgagaaaaagaagcacccagatgggtgatggtgatagggcttgtggtggacacagggttgtggtaagattcctcagtgcttcggcgagcacctaagactattaccctggaactgactgctttctagagcttgattcatgcctctaagc

SEQ ID NO: 180870 - DNA, 1374 bp, Homo Sapiens
  misc_feature (45)..(73): n is a, c, g, or t
  misc_feature (263)..(423): n is a, c, g, or t
ttggaactgtgttttaactctccaggaataagctgggaggttagnnnnnnnnnnnnnnnnnnnnnnnnnnnnncctctccacccactttccttttttacagttacagaccctgttgagaaaaagaagcacccagatgggtgatggtgatagggcttgtggtggacacagggttgtggtaagattcctcagtgcttcggcgagcacctaagactattaccctggaactgactgctttctagagcttgattcatgcctctaagcnnnnnnnnnnnnnnnnnnnnnnnnnnnnnnnnnnnnnnnnnnnnnnnnnnnnnnnnnnnnnnnnnnnnnnnnnnnnnnnnnnnnnnnnnnnnnnnnnnnnnnnnnnnnnnnnnnnnnnnnnnnnnnnnnnnnnnnnnnnnnnnnnnnnnnnnnnnnnnnnncctaagccaatgagtctcccttttacttcccattagtcctccctcaccagatgattcctaggactcatggtgcaacatacaggagccaggctttagggaggggaggaaaggagcctggcggcaggggtctctgcaatggcaagaaagtgagtgaatccagcgctgccacctggttatccccttctcgttgaaaatagcagcgcgggtgcaaattcctaaacacaggctgcctgcactcggtgttacctcgggctgaggcatgataatattttattttttaaagctgtgaggaaatgaaagtgaggctttggttggggcgaggcagttgtgaaagaaattaaaataaaagaccctttgtaaatgcagacttagaagaaatactgaatttgtgtcagaagttctccagtgtttgtgttaatcgtgtggtgataatcctgtcctccttttaaagcgaattctctactgaaaggtctgctctgcttaaggagctacaaactgctctcaaaagaatgaaatactgagttccaattcagtgaggcacagtgttggactatggcacatttagttggagtcggggggaggtcaggaatatgatcagataatggattttataccttagagcaaaatctattagtctctctcagtttatcaatttaaatggctttaggcttatagggggtgtaaactttaagaaataattctcccattcaagtttacagcaaacatctagccaccttcaaaacaaagaatatacagaccatcatttagcaatactaatacatgattttccttgggggatggcaggtttgagaatcctttagcaacaggacatacttcccctaaattacagtgaattatttataacgaggataaagctttcaggtacaagctgaagtggggtgtctaacaactaaaaactatcactaaatctcaagaggaagttcttgcaaa

SEQ ID NO: 180871 - DNA, 1274 bp, Homo Sapiens
  misc_feature (167)..(177): n is a, c, g, or t
ttggataaaattaatatgttaaaatgtttactgaaagtttacatttttctctgtattgctaagagcaatttattgccttatatgttgtgtaatatctagaaaacacacctatgtaatttccaaattataaccaccttggctcctggacaagtaggactgtgtctgannnnnnnnnnngcatccttgtcactacctgccactctgagatcacttgttgtctttccatatataatcacctctaggtacacttctttcattatttctacgcatcctctccactttgctgcattcttgtgtgcattcttttctcccacgttggaaagaaatatgcatattgagcgattccaacccccaaaggcaaaaattactagccagtgttgaaaatgaaagcaaggaattttttggttattgttgctgtaactttttgatgtgcgtacatatgtgcgtcttttttttccccctaggggtggaatggggtggtgttagtcagggattactgacaggacggtgttccctactgtgttggagagactaagactggggaaagattctccaaggctgggaaatgcagacgtccagtcttggaaaacagtttgtcgttggtcgttatgtcagaagaggagtgtattcctggaagaaggcccacaaaatatacccagagcccaggcgcctttctaagacgaatcaacattcactcacaagttcagctaatatatgacagaaatacaagaatgaacaagactcctgacttaagcttacagctgatgggaaacttggggactggacagagaattaaaatacaacgtggttaggtacaacttacctgcgccagaggagtgacggaaggccttggacggggagtgatgcctggaggatgacagggcgacagaagaatgtgttaaacatatggagtatggaagaagaaggagaggggagataggatttttatgttatagattggaagaagacattcttgatgaaggagatgtttttactttggagaaggactgcctcagccgcgaaagaccaaggggtggcaccacagggagaagtctgcactgcgcttgtcaggacggccagtggggggctgctgagcgcagggagtcagtcctcgcaatgaagatatagtctcggggagataatgctggaaatcgatggaagaagtggaacaggacacaaatttagtggaatttctttacaatgtgtgcttcttgtcaccagttcgttaccatgataaaaacggttatgttgttacattcatcagatccaaattt

SEQ ID NO: 180872 - DNA, 1522 bp, Homo Sapiens
  misc_feature (158)..(170): n is a, c, g, or t
  misc_feature (1360)..(1399): n is a, c, g, or t
ttgggtcctttattcattgattctgttaattatttgataagattgatgtgaaagctttttttgatggcttcaaaacaggaccagtgaaaaaaagactctagttttagtttgagttttctgggtttttaactagtggggctgagtttattaaatgcttnnnnnnnnnnnnnaatagtacttttatttataaagcagaattgtcttctggcaagtgttggaagcataattcatatgcatataagtttgatagccttagaaaggtagttttgttgttaaactaagtaggatatgcaagttagaatttttttccactccctacttaggttgatgagtctgtatggggccaaataaacatctttttattttcccacttaagatgaagagtgggcctatttgtgagaatcagagcagctttctagcctatctttgagacatttttttgtgttgtcagtaatttccttataaagatagtaattttctctaaatcaaatcttatcatgacttctaacattctgtaaaataatttgagagtactagttaactaattcacaaactttaaattagtagtttattttcagttaagcacacaagaaagaaatatacagtctatctataatgaaatcttagttgactagatgggttgtggtgtcttaaaaattcccataactgatcacatggcttttaaaataggaagtctgagatttttttgttttcctcaactatatcctttttaacaagttctattttatggatctttatgtagtgattttttggttagtatacatattctctacttacataatcacatatataaaaggtaatgtgggactgtgttttcaaatcttatttcagctaagttttgagagaagaccaaaatcagtaaggtaagctgagaactaagagtagaaagtttaaactagagcaggggccaagtttaggagcagccacaacttttcttgcacatcaacttagttgtaacaatttagtttgaaagaaaatctggaacataatactcagtttgtaaaattgaagttggtagaattggaggaaaaatgtagagctagcctgtgccagaaaaacattgatgacatttagcataattggcagtatatatggataatagttgaaggtcatcactagttaatatctttggcctaaatcttactgaagggatcagatggaaaagtcattaaagttaagtggaaaactgcataaagagatttgaataatctgttgtagatgtctaatgaggcatcatcctttttctaaaccatgtcagcatattaccttctgtgaattaatttattattgcatttctttggattgttctctccgccgattataatacagagacttttcnnnnnnnnnnnnnnnnnnnnnnnnnnnnnnnnnnnnnnnncaaatcagggatccacttaacactatttgcctttttgacatacctaaacacatttctttccttttctagcatgattatgatatgagggtggatgatttcctttcgtcgcacacaagctgttgt

SEQ ID NO: 180873 - DNA, 1364 bp, Homo Sapiens
  misc_feature (289)..(311): n is a, c, g, or t
  misc_feature (951)..(959): n is a, c, g, or t
tccatctcagcgtctgctcctctcagcgcccccaaccactcctggtcgggggagacgtccaccctcacccgccaccccctaggctccccggcccttcctctcccacatgatggaacagccccctcccgccagggcggccaaaatcgctgcaaagaaactgaaggttaactccacgctggactctgctgtgggggagggggctcctccacaaccccaagcatgcaccctgagacaccaagccggggcaggaggcccagctgggacgctccgcaccccagaccacaccggnnnnnnnnnnnnnnnnnnnnnnnggaggggggtgagtgtggggggaacagacatcagaacagaaaatgaaccagaagggggtgggagaaatcttcaggaaatggcagggagcagagaggcgggttatacactcccagggggcctggcggggcccctgcagcaggggagaggggcagtggaggaagcatggggagccgtgcggtgctactgaaaatccctgccttacctgagacgactgactctgcctccccccagccctgccccatctcgccctccacacccccggctcaacacgtgctgggagcgcaccccagcctgagcctgccaggaaaggggagtcgtagaggggagacgggggagaggctcactgctgctctcgggcagcgcgtagcagaaggcaagcctgaggccctggcctgtgatcaacgtggggctgtcatgaaggccaaaaagtccccgttcccccacccagccctggcctagggggctgtcctcaaccaaccgtaataccctgccccgccccagcccgctcccccccaaataacaaccagaggaagagaaaaaggtgccatttaccgatgccggccttgcgggtgtccaaaccgagcgggatggggggggctcggcaactcctgggggcctggcgaggaggcgggcttcccnnnnnnnnnacacgggaccgcttacctggagcccccaagcttacctgagcacgcgcacagaccccacacccaccaccacggggtcagctaaagctacagggaggggaagtggggggttctagggagccaggagagggagaggaaccacatctcctgtaccacctggagacaggcagaggacgtggtagaccccaaagaaatctcaaggaggccttagagtgggggagacgaggattatcatccaagctgggcgctggaaagccctggactatctcgtgtgaatttacaaagaaggctagggaggcctcagaaacctgtccgccctcaccaatccccgagtcacactgaactaggcacacagcccaccccctccgaggaccaggagtgacttctccacatccaaatccatgccaa

SEQ ID NO: 180874 - DNA, 1594 bp, Homo Sapiens
  misc_feature (185)..(215): n is a, c, g, or t
cccgtgctttgaggaagggccgcttggccccctgaacccacgggaggggagtggggaaaggcatttaaggaccaggatcaaagtcaagcgaaggaaccccgctcgggttcagagtcccaaaccccaaaacaggcccatcccgggaggaacagcaaagaaaacatgtgattgtgttcgtctaggcnnnnnnnnnnnnnnnnnnnnnnnnnnnnnnnagacagtggaaggttcttttagtaaaaacctacgacaccttcagctgctagcagcctaccccttggtccctcccacaccccaagccccaattccatgcactttagggagctcctgaccacctctggagagctgctggacaccacagccagccccctcgggaggcctcaaccacagtaaggaagacagaaagggggcagagcaccccaaaactagcagccaaaaagactctccagggccagcacagtagcagccccatagaaagcacgggggcagggagggaaggctgaagggctccagtggagccctggcctggagccctgccctcggtgttcctgccacctcgccgctgacatcacgaagccgggtcatcagaggctgggtggaacccaagcggagaggccgccgcctttcccaccaggttcatccttcccctcctgggatcagcaagattctcagagagcatacggatcggggcaggagggacaaagggcacccaaacaaggaaagggccatgggtgcggggaggctacgggggcgactggggcgggaggaggggcgcctcgctgctcctgagctgcctggctaagctgggctggtgtgcggtgctgagtgatcttacccatgatacaaacccttataccaaccatacactgaggtgttgtaaggggagcgtaagcatcagctgcaagccagctgcgtggtggagtgcatgtctcgctcgtgttcgtactcgatgaaggcatagccacggggctttcctgaccgcttactgtagaccatgtgtattcttttgataggtccgtacacctcaaactctctccggagcttggattctgttgtgtcataattcactctcgccacgaagagagtcttgaaggcatccccctgagcattgggatcattgtgagggtcccacattttaagctctgtctccacttcttgctgtcgccgctcaatcttttcccgtcttttcctctccatgcgctcctctcgggtttcagcacgagttggaggaggggcatctcgagggtcctcaaactctcgaatgtacggcgcaatgccacaataaggttgattgtggtgtttttcatgtggcagtttctccaggggtggcaggtatggaatagggtcacggggggcaaagagggccagaaggttgggcggcaggaactgggtcatcttgccaagtcgcgtagcgccctcctcgctctggcgtctgtccggaggctcgcggcggctgcggcagcccctcagcaacaacaactcctgcttcggcttccactccgggggcgtccacgtccgtctgattccgtcgcccgctaagcgagcgcaccaggccgctgctcagccacccgcgcggcctccgatagcgacccaa

SEQ ID NO: 180875 - DNA, 1049 bp, Homo Sapiens
  misc_feature (984)..(1006): n is a, c, g, or t
tcaggggggcgctgtcaaccgcctcggagggcttccgccatgtcgccaccgccaccacgcaggttcctccttgcgctcccgctcccgccggacccgctcctgactccgggttgcttcgccgcttccggtcccggtccttgtccttgctccgctccatggagcgcctccgctcctccttgtcgcgactccgtgagcgcctccgccggtcccgggagcgggagcgtcgccgttctcgctccttgtctcgctcccggctccgctctctgcgctcccgctcacggtcccggtcccggtccctgtgcggaagcggggaggggccgggcctctcatcgtagcgggaggtgtcatcgcggcctgaatgccggatgttcacatcagcccctcctcttctggtaccaccgaggcctcctcctagccgccggggcctccagcccttcacggttcggcccctctccacgtccacaaggaccctcctgccatcaatcttcttgccatctgcgtgtttgtaagcggctgtaacagatgtggggagggggaggggagaggagtccccagagggtcctctagtcaggacaggcccagctctacagaatccccgccccgtgtccccatcatcacgcacacgcacacgcccaacagacagccaggcaactgacagccagaccaaccctctcccaaaccggtgaagggcctgctccatctcagcgtctgcttcctctcagcgccccaaccactcctggtcgggggagacgtccaccctcacccgccaccccctaggctccccggcccttcctctcccacatgatggaacagccccctcccgccagggcggccaaaatcgctgcgaagaaactgaaggttaactccacgctggactctgctgtgggggagggggctcctccacaaccccaagcatgcaccctgagacaccaagccggggcaggaggcccagctgggacgctccgcaccccagaccacaccggnnnnnnnnnnnnnnnnnnnnnnnggaggggggtgagtgtggggggaacagacatcagaacagccaa

SEQ ID NO: 180876 - DNA, 1290 bp, Homo Sapiens
ttggctgttttgtttcttaagatgttggttgcaacccatcagattgatgatgggactcatttctgggtcatgacctgaatataggaaaggctagtctagctgccctgtgcctgtgacatggcaggtgcctggtccgctgcctgcttctataagaatgtctccctgcagcctcttttctatacagaactcagccctgcctcacggaagcttttccaggcagtgcgagatagaggagcgcttgagaaggcaggttttgcagcagacggcagtgacagcccagttctgcaccttctttgctgagtcactgtgggccagtgacttgatctgagattgtttccccatcagaaccatgaggttatcatctgtgccttggggctgttcatctatctattcacttgacacacacacatccacctttctataccagctgcagcgccacctgctggtaccgtgagcaagagctgggcatgcccacggttccggtgccctgcagtctggtgggagaggcaggtaggggtcgactcaggtagcaaacctgaaactccaggggaaggaagcgtttctgcaactgtgagtacataggactgtgaggagagacttcccgagaaaggatgttcgggctagcgttaagggtgagcgtgagttcaccagagaaggaaggggagaccagtccagggcaaggagaatgcacagacactggcaggaaggtgagcgtggggacaccgggaaaggcctgggacacgcagccaagagccgcggctcagacgctagcagggcccgctcttgctgcctctaccaccagttgacgaggagtttggaccttaggctgggggacgccagcaaaggcttctaagcagatcacatttttgggtggaaagatcattggcttcgggtttctgtgagggcgaggatgattggaagggagggttttgaggaggctgtgaagtgcgctatggttaagatgatgcgctttggggccagacatgggttccagtaacggctgttgcctagcgaacgctttgtgtgagttaattagagaagacgtggctgtcttgtgatgggagtgcgcgggatgaactgcacggggggacccggccctgtgaacactaagccaggggctgccttcctgccctttgctcttggagtcggctcatttctgctcctccgggccctgtccctgcccagattcaccctctgtccgtctgccctgccccaggaggaggcctcggtggtaccagaagaggaggggctgatgtgaacatccggcattcagccgcgatgacacctccc

SEQ ID NO: 180877 - DNA, 1937 bp, Homo Sapiens
tgtacaaacaagttggctgtggtaagccactttatggctctcgattttgtatgagaaaatcatgcttagtgccttgttagtaaaagaaagaaaacctgaaagtccctgccatggaaggaagaaatagcggggagaaaagggagttggtaagtttcagcatttcagagcttggaggtgccagttaggtttctattttatggagaaggaggtggaggcaggatgggtcctaaggtgtcattcaaaacacacagccataactctttattgagagtagagctagggccccagggattgctgtggtcaagttgcggacaaaaatgaccactcgttggaagacaggagaggagtgtttagttacaaaagcagtcaacaattcaggtgtatctatattcagacagcaaataaaagttgttcaacttggttgctaatgggacccactctactgaggctttgtatagaactcatagaggaagctggcttcaaggaatgaactaccctgtgcttttcttaggactaaaatctcaggaagctggtgatgaatgaaaaccttagtcccactggcactgcacgaggggccaggagagcagcagcatcataagccacagggtggggcagccaaggcaggggcattctgagctgttggggaggggtggcaggcagggtggggcactgtgaggtgtcggggagggcattgtgaagtggggggggggggcattgtgtgccacatgcctgggctcccacctggggccagtgggcttcagtctgtaggtgactacagaaggaggaggaactccgtctgttctctcttcaggcagttgttgtgtctctcagcgcttgttggtttcacaacctattaaataagccggctggtcttcaccctcccagacaagtcaactcaggggaggcagcagggtgcgggccttggcccgcagccctagccggggccggggccagggctggtgcccggggcctcgctgtgaggtgggcaggcgaggagcgggaagaccatctctgcaagtgcagcatagcctcggcctaggacagcgggagtgcgtggccaaagctgtgagcagaggcacaggtggtggcagacagtagaggcgccccatggggaacatactgacctgtcgtgtgcaccctagcgtcagcctcgagtttgacccagcagcaggggtcggtgtgtccctctgaatctgagacctatgaggcaggagctggggacaggatggcaggagcgcccatggctgctgctgtacagcctgctgaggtgactgttgaagttggtgaggacctccacatgcaccacgttcgtgaccaggagatgcctgaagctttggagtttaacctttctgccaatccagagtcaagcacaatattccagaggaactctcaaacagaagctttggagtttaacccttctgccaatccagaggcaagcacaatattccagaggaactctcaaacagatgttgtagaaataagaagaagcaactgtacaaaccatgtatctgctgtgcgtttcagtcaacaatacagcttgtgttcgacaatattccttgatgacagcacagccatccagcattatcttacaatgacaataatatctgtgaccttggagatacctcatcatatcacacaaagagatgcagatagaactttgagcatacctgatgaacagttacactcatttgcggtttccaccgtgcacattatgaagaaaagaaatggaggtgggagtttaaataactattcctcctccattccatcgactcccagcaccagccaggaggaccctcagttcagtgttcctcccactgccaacacacccacgcccgtttgcaagcggtccatgcgctggtccaacctgtttacatctgagaaagggagtgacccagacagagaggaaagccccggagaatcatgctgacaccatcggg

SEQ ID NO: 180878 - DNA, 737 bp, Homo Sapiens
ttggctcttttcggcgcctctagaggcagagggaggggatccctgtcgtgacaagagcgcctgtctgcgacccaatggatctgcgaggcccttgcggggatctagtccctgggctctcaggagaagggggtgtctgcttgtgtgctggcgtttcttggagagatacggtggctgtcaccctcttctccaggcacacacagacacattcccactccctctgctcctcatgcccggttcctccggtgtgtcccaagacaggactagaaccgcgaaccgaagggcaaccagccaggtggtctccaggagctccgccccctctgggttcccaggactctgattggtcggcgagccagcccttccctcaccacgccccccgagagagtagttaagccttcagagcagttccaggagtccatttacgggaggggggagatgagcgctgctgaggcttgggggctcaggtcccgcaccattccccctccgcgacaatctgagagagctccagtggttacttttatctacctgtccgttcaccctaaactgtcactcgtcagtctcactctgagaagagacagtaacttgaaacgttgttctaaactcctaggcccgtcccccaaacacccttttgactgggacccccgcccctgcatgggacctcgcgcagaggggggtgtgtatgtgtgtgagtgtagaggaaggcttggcctaaggcctctccttctccctccccttgcctc

SEQ ID NO: 180879 - DNA, 1318 bp, Homo Sapiens
ctttgtacaaaaaagttggctgatggctttatggacagccaggcttgctaggagcttggttgtgttcagggctattgctgtccctttttcctttgaaggaatttaattctctgagatgtagtcttaatggttttcttttgagaacagattcttaaaaataccctatctctgtagtgtgtccttgttcttatatatggccctgagttttgtgatcacctgaataattctaacatacgtttggctggctgactgtggagatacatttgagttacatgtttatttttaatttaaggtcatcattgttttaaaggagctgtttgcaagtgcaggcatggaattagggatttttaagaaatgtaaggaaaggagatttgactttcttgtgtttatttacatcttaaggtcaaaagtggaccgtctggaaatagattctcagaggaaaaatggagcacacgggcctttttgagaaatcaatcttgttcttaagtcacaagaactcaagtgaacttgtaatttaagttttgcccagagtgtgatgaacttcctatggtgtttgagtaagcctttgaagacagtggtagtccatgggcaggtatgaatcaagtcatataattgtcaacctgtagttcaaaagcagtacaatccaggattgaactatagaatgttcttacgaaaacttaagtttcaactggcagtgtatgacttctgtagccaaactagtgaggtaatttgtggagatgcccatttcatgggaccacacttgagcttcttggagtttctgctctggatcaaaattctgctgcttgtataacatgttctgaggcaaaggcttgcttctggtttgggatccttttgacacccacaacaggtttatctcccttcacaccagcatctcacttgcttctttttctctgcactttgagttgccaaatcctgttggattgcttttttgatctcaatcccctaacaccttttcttccagaagagcttaaagcagcgcctgggtaagagtaacatccaggcacggttaggccgacccataggggccctggccaggggagcaatcggaggacgaggcctacccataatccagagaggcttgcccagaggaggactacgtgggggacgtgccaccagaaccctacttaggggcgggatgtcactccgaggtcaaaacctgctccgaggtggacgagccgtagctccccgaatgggcttaagaagaggtggtgttcgacgtcgtggaggtcctgggagagggggcctagggcgtggagctatgggtcgtggcggaatcgtggtagaggtcggggtatga

SEQ ID NO: 180880 - DNA, 1553 bp, Homo Sapiens
  misc_feature (313)..(330): n is a, c, g, or t
  misc_feature (347)..(399): n is a, c, g, or t
  misc_feature (473)..(625): n is a, c, g, or t
gccaactttgtacaaaaaagttggcttagactgtttctgagacatttggatggaaataaatgtataaatgttaattcatgtatataaattagaaacacttttctagattctgtaggcttttgttaaaaatagagaatttcttggggtttacttaggccacagaatggccaaataataataatgacaatgatattactaataataatagctaacctttatttggcacttactgtgtgccaggcactattctatttttttaagaatttttaaaataacagctttattgaaatacactttaccataaacttcaccnnnnnnnnnnnnnnnnnnatgagacagggactcannnnnnnnnnnnnnnnnnnnnnnnnnnnnnnnnnnnnnnnnnnnnnnnnnnnntgggctcaagcaatcctcccacttcagtgtcccgagtagttgggactacaggcatgcgtcactacacctaattnnnnnnnnnnnnnnnnnnnnnnnnnnnnnnnnnnnnnnnnnnnnnnnnnnnnnnnnnnnnnnnnnnnnnnnnnnnnnnnnnnnnnnnnnnnnnnnnnnnnnnnnnnnnnnnnnnnnnnnnnnnnnnnnnnnnnnnnnnnnnnnnnnnnnnnnnaagatgtacaattcagtggtttttagtatattcacacacaaaattgcacaactatcactaacatctaattttagatcattttgtaacttcaccaagaaaccccaggtctgtcagcagtcagttccattcccccttcatcccagcctctggcaaccactaatctgctttctgtcactattgatttggccagacactattcttctgtgcttctcatgcatctcctgtaataccagtgctacaattctcattttatgtggaaaattgaggcactgagaggttaagtaaattgcccacggtcacacagtaatttgatttacaacagtaataacacattagatgagaacacagtaggacacaattttgaattccatttttatgtacctgaaatgaatacacccctcccccaaggtattttccctattgttagcctttgtaccctaggtacaaatataggtattttccctattgtgttatgtacctgaaatgaatacacccttcccccaaggtattttccctattgttagcctttgtaccctagaactgactggatgtagataacatttgttttcagagtaatggaacactgtatcagcagcatctgagaacataagaacagttggacattggaaagaggtttgttgccctcatccctccttgaacctcttttctctcccgcttccaccaccaccacacatatatacccctttttctcagtcttaagcatcaaacaatttctgcctctttctttttaattctcccagagggatggttaatgcatcacaatttaacttgtctattcagtattaatagtcaagggatgcatctgtttgcttatagtaccagttatattcctaaggaccttagagagcagtagtgtgagaatagaatgcctttctatttgggttaaactatgtgggaggaaaaagta

SEQ ID NO: 180881 - DNA, 1102 bp, Homo Sapiens
  misc_feature (606)..(623): n is a, c, g, or t
  misc_feature (714)..(765): n is a, c, g, or t
  misc_feature (774)..(789): n is a, c, g, or t
ttttggaaaccatgaatggattctgggtggagatgcccctgacccttgacaaatctatcggtgcttggtaccagcatgagctaactttatggctcaaaccaataggacaatttgctgaggtctgagaggactccctccagaaaatccctgatctcttaaaatttggtagagatcggaagtttattttgctgtacaacacctctttttttggagttttacttgctcccaacaaggaaggcaagttttcctgctttcatgatgatggaaggcaggtgatgtttttatggagtttcagctttcttccaatgcacttagagcactcagaaattgtataatttgtgtgaccattgttagttttgcttaactgttttgttgtttgtttctgtcttagtcaaatctgaaggggaaccctaaattacggggtcaaggactctgaagtggtaggaaaacagccagcttaaaaaactttttttaaattttaattactataggggctttatttacataacacagccagctttttgctagccagaccaaactcaaagagcaatggctgtacttctgaaatagcaacactttgtcctagctgagatttggtaataagannnnnnnnnnnnnnnnnnaaagaagctcagtggttgaaagtctgcttaactgaaacagtaacatccatgatgtgtgttttgtgcatgtttgtatttgaaaggccttcannnnnnnnnnnnnnnnnnnnnnnnnnnnnnnnnnnnnnnnnnnnnnnnnnnnagcaaaagnnnnnnnnnnnnnnnnccttttacttctcagttgactgaattctgttttcaccggattttttgactaaaatagctattgcaacagaggctactcttgggttaaggaagaatgtagtttcgttttatgtttaatatcgctcaaagaaaaataaaagcatctccctctaacaccaccagacttttcctctctgtaccttatcatgtaaattttgctatttgattttcacctgggttgtttcctttaatgtgcaaaaatttaaggctatttagctgacaactgcctagggttgtaaaacaggttatcaagaatctgaaagtctaggataggg

SEQ ID NO: 180882 - DNA, 1480 bp, Homo Sapiens
  misc_feature (1030)..(1054): n is a, c, g, or t
ttggattatgttggaatacagtgctgatatcttggaaaaccataactgcctcttaatttaacatagaataatacatagttctgtattttttttaaagtgagcttaatgggtaagtattttttatatgctttagctatagctaaagaaaactgatacttaacaaagttgaatagtattattcactggtgctcctaaaatattgtttttcagtgtaaaatatgcatatcttctatatttaatatgaaagtcttgaaatgtatcagacagaaggggatttcagtttgcaaataatgagcaatgtagcaattttaacacatttcataaatatatattttgtcattggtggagagcaccatttgttgttttgaatatactttaaaggaagaggtacaaggacataaatgttgagattacctacaggatggaaatagcagtacagttcattgtagatattttgaaatgtttttgattgttttatataacctagagtgacttcccttacccttatttagatctgcatatatagttctagtatgaagtttaatagttaaggagttagctatttgttatctttaagagtagggtattgacgtgaacaattgcagtattttgcatgatactgttttatagatgaccttttaggaaagtggtgcatttattaattgaactgaagaagtagttcagttgaattcagtatcataattcacaaattggaggctgttgattttgattcatttaaggtttaaaatctttattaattgcaaacagtgcaattatttatacttcacagtgccttcccagaccttccaccttaggttctgctgcaaaaagcaccaggtaagcacaacctaaggacatatataaataaatatttcaatacattaatgttgtccctgtgaggtttttgtggttgtgtattcaaaggcaatctgctactgcttccccaaaatgtattttgttattttatgctaccatcttagtggaaagtctgtaagttgttaaagcaactgtttacatttctgggtaatgnnnnnnnnnnnnnnnnnnnnnnnnnattaagacaagaaaatgatgagtagattgctgcagtaattgaactacatccaaatctttttgtattttttccccaaatatagaagtgttaatattaagaaaggacaattacacagttttcaagatttaggaaatcacttgtttagaaacttcaacagccttcacaatctgttttatatgatggacagaaaatttctttgccctccaaaattataatttctttatttttttcttattcttaaactataataattcagtaagatattatgggttagaattttattatgatttttttcttagacaaaagttatatgctgaagaacgaaaaagttataaagcagtatgttttgataaaaggcatgtgcatcagtgaaatgttaactgtatagcaaataacctttcataatctgtagcaatcagtattttt

SEQ ID NO: 180883 - DNA, 1301 bp, Homo Sapiens
  misc_feature (381)..(405): n is a, c, g, or t
ttggatttattaattgaactgaagaagtagttcagttgaattcagtatcataattcacaaattggaggctgttgattttgattcatttaaggtttaaaatctttattaattgcaaacagtgcaattatttatacttcacagtgccttcccagaccttccaccttaggttctgctgcaaaaagcaccaggtaagcacaacctaaggacatatataaataaatatttcaatacattaatgttgtccctgtgaggtttttgtggttgtgtattcaaaggcaatctgctactgcttccccaaaatgtattttgttattttatgctaccatcttagtggaaagtctgtaagttgttaaagcaactgtttacatttctgggtaatgnnnnnnnnnnnnnnnnnnnnnnnnnattaagacaagaaaatgatgagtagattgctgcagtaattgaactacatccaaatctttttgtattttttccccaaatatagaagtgttaatattaagaaaggacaattacacagttttcaagatttaggaaatcacttgtttagaaacttcaacagccttcacaatctgttttatatgatggacagaaaatttctttgccctccaaaattataatttctttatttttttcttattcttaaactataataattcagtaaggatattatgggttagaattttattatgatttttttcttagacaaaagttatatgctgaagaaggaaaaagttataaggcagtatgttttgataaaaggcatgtgcatcagtgaaatgttaactgtatagcaaataacctttcataatctgtagcaatcagtatttttctgatttaataatattttaataactgacgctgcatttaatttttttgccagtttaaaatgtttgtgtgtttttatagatgattttaactggtacatattttgagttaagttgaatgtatgaaagcagcatcttatcagttttgtttattcgatttctaaaatgtgctgatccttttaaaactcctgcttatctctgcaacaaagaaaaatattcaaaaatactgccttcattttcacacacagtgctgaagatgctgcaagcaccaaatcatagctcataaaatcaggtcctgagatagttacccataaagaggaatcctttgagtgtatgccattggtgagccgatgagcatggaccatagatggctcaatgtagaagtaaaattggcaaatcataattgagaaatatgaaatgtattcccatacataatatggtataggtgtaatgtacctgcttttgatcactttc

SEQ ID NO: 180884 - DNA, 1198 bp, Homo Sapiens
gtgagccactgcgcccagccaatacctggccttttaagaagtttgctgactcctggtatggatgacagaaaatggaataacgttttgtttctccagtctaggaaaagcaagtcaggtagtggatagactgactggcgtccggggagcccagggtatgtgagggccacgtggatggaagcaaatgcctcctgcatagcccttggctctttgtcccacttgggaggagtccatggatgtaatatttacaaaacaattttttccttaccatttgcagaaagcattgcatatatttccttttagctcaggaaactggcatgccccaccctctgctactccatcagatgtaaatacaatgactataagccgtacaactcccctctcttagaaacctcagcaggaccacagagcaagggagtcaaagctttcttaattctctccagtaaatgactcaactaatttgatttttttaattaagtcaaaatatcaagagaaaaattgctactaaaacttacattttgatccacactgatgtgcaacacaaaatgaaagttttcacctccattccattttttaaaaattcacggtccacactgaaacttgctgggttttagcaggagacaaaggtgtcacccacgctgtcctcatcctgctctctctgtcccagtgacgctccagcatatgatcactgcagccggtccctggcccgtgccgattctgccacctcccagccacacacatttgcagacccacaagaagaactgtagccttgataattcagttcaggctggaaaaatgccatgcaataatctggtttgctttcagtaagtaggcaacaagtgaaaactgtataattttcatcacctattctgctgttctatctaaaatgagtgtacctgtggtttgtgaactgggcccttgtttgtgccagatccttcaaagatgttccctgtcaggacacctgtggccctgcccctcctcagacacctttccactggcattcacgttccttatatgcagtgttagccatctttggcctacgtggactttttttgtaaattacaccatttccagacattaaactttttatattatgaaatttaccatgtaaaaagaacttcatatttttattgagattgctaaagcacttggccttcctcctttgtgattttcagtgtctattaaagcatggaattccctc

SEQ ID NO: 180885 - DNA, 1409 bp, Homo Sapiens
  misc_feature (131)..(165): n is a, c, g, or t
ttggcctacatttccccattcatgagtgtgcgaacattaacatagatagggttgataatggttatttgacattacacatttttaggaagaagaaatttctgtcttgctggccagtccaggctgtaacactnnnnnnnnnnnnnnnnnnnnnnnnnnnnnnnnnnncagaaagatgccttgtattagggccttcctaaaaagaaagctaagtaagtattaatttcttaggattgcttctgaggtaggatgaggtgtttgcatagacccaacaagtcattcacttcaaattttttttgtcttactatgataaataacatattatttcctgtttacagcaacctgcactgaaattaactagttgaataaaatcacctcttctagcacaaataaagctgagttcggggaggtgggtgaaaatacagtactgttgtttacttcctaagatccaagggagagaatcaagcttggtaatattctcttgaatatacatttacctatttaaaaggtatgattttcccatatttccttaggaagtatgtcatgtcaatatagatatttactcattaggtttacattaatttgtattataagggaatgtttaattcaaattaaggacattaaaagtatatagactttcatataaaagttccggttttataaattgcgttgatcacttaaagaatgcagagatctcaaagtaaagaaaacaaattttatgaatattttaaaacattacttaaaacaagtttccttagaaagcacatttgtggataaatttaaatattaatactaaataataaagtagtatacagaatttaaatttcataataatgaagaaagtggtaatgctatttaacttaaaagatgcaatatggcattttagatcaagaggttaaagttttcttaatgaaagaaagtaacgatttatgggataaaaatattccagtggtttgtatttgcttcatacttcaaaagtgttagtccatttattgtttaaagttatattgaaactgatattttcactgctgccaaagcagtacctgacagtagataggtatccacagtcttatgttccttagagttatagaactatgcctctgaaaggggttttaatactttaataaacctggcctaaactgttttatttctaagttgaagaaactgattgtcaagtactttgacttgtccaatctcatacaactaactatggtacatctagagttagatctcagtatcaaggtcccagttgtattctgctcaccattccacaatttcgatattgataaaactttcacactaacttttgaactgtggttattattaatttagttgattcatgtcctcttatttatctccttactcctccactgctgccttcataactgtccaccagatcaaagctatttggg

SEQ ID NO: 180886 - DNA, 1193 bp, Homo Sapiens
  misc_feature (113)..(143): n is a, c, g, or t
ttggctctgatgtaaggtttttaatgaaaagccactgtttgggggaattctgaggtttaagaaattattttcggctggggtatcaggaaatcccctggtttttaaaatgagannnnnnnnnnnnnnnnnnnnnnnnnnnnnnnaagctatacctgctggaatggataaagtgagctttaaaagttgatcagaccgaagagattgaagtgagagaaccacaggaacaaaggcaagcagacagacagtgaaaggtagataggaggaacagcaaacagtttgttcagctgggcaagtatagtgcaggcacgaagatttcaatagagacccagaccccagggagctggttctttagcctactggcattttctaaacaggacaaagacaagaccagaaatgctggtgttactggaagattaatctgacagctggtgtggattgaagaagagaagagggattaggacagtgattcctaacccctatcctacactcccaacggccccttgttttgaatttttgaactaatcaaactacatttgtggtaattagttttatttctttccattaaagacatataaaactgccaatttgagcttctgatgattctaagaacatcagtgttaccgtccttagtatcaaataaatgcaggcaaaagcacaagactacggagttttatttagcctgaacagcctagtagtgttggatttaggaggtgtttaatgctgactcaagctctcaggactcttatcacttgaaccttcttgggccctgtggacctggggttttgcctatttgtctagataagaggtaacgaagggaaaaattataaaggcgaaaggaggaatagcaggggaagaagataacagaattgaaatgacttagtccctaaatagacaagagtagtgagtgttggaaaggaggcactagcagagcagagatgactgggaagatgatgctggtaagggcatgatagtattttctactgtcctatacacatcaggcaagacttcatggagagcactgaacacgtactcactatgtgcctagcattgttgttaatcactttacatgaattagttcatttaattctctcaaccctatgaaatataattactattatcctcatttacagaaggggaaactgaagcagaaagaggttacttaatgggctcaaggtcatctacctggtaagtgg

SEQ ID NO: 180887 - DNA, 973 bp, Homo Sapiens
ttggccttaacaaatgcccaagccatggttaaagttcaataaatactttgttgaatttattaataaaatggcagaaatgtcattctcttccatatatgtttaataaatccctgataggtgctaagcactgcactaggtaaaaattctcttctgatgctgtctttttggccaaccatttttttatcatttattcattagctgacatttgctaagtgctttggaggggtcaaaaggggaagtaatgagaaatcaaagatggtccctacatcaaggataaactatctttttttagtcactcaaagtcataaccctttggaaacaaaacccaccagtaccccagattttgaccacagatgaatcagtactacaaggactggttagagggttgaatgaatctgtatactcagcacttaacacagcactctgggtaaaagaaaaaagatcctcaaagatattagttggttacatcaagaaaggacaaacttaggttaatctataacttcatctcagaggaacaggaactttggagataaacagggctctgccacttgcaagttgcaccatccctggtttctccatctgtaaattgattaaaacactgcctatctaataagattaaataagttagaagcattcagttaaatgtcaactgaaactattgttcatgtaaattgtgcttgatgctttttctttctagattcaatgattattgtcattttacctccataggccctcaatagaaatcagttgcagagggcagaagcctagatattttcaccttaaaattggagggtgaaagacattgaggtgaagtagagatagagggtacacagaaaaatcgtataagtaaaactaacatcgttaacattatttactgtaagttatctttgtaagagtggtaaaatacattgtgttgttaaataatttcatttaaaaaatgcatcactttgtgtgtttttatattgctaaaacc

SEQ ID NO: 180888 - DNA, 1066 bp, Homo Sapiens
aaatgtgattaataaaatatgtaaatggtattaaatgttcaggataattggaatttacaaattgttaaagaaatgggaatgtaatttctcatttttatcaaatttactggtttttatatcttcaagttgagcttagagatttaaaaatgctgtattttaaatgtattttataaagcaaatattaaaaccaagtatttataagtatttttcttcccataccaaaagcctgctttgacagtaaagcttgttgacacatggttcaaacacttccttcctgcctttaaaaaatttattctgcttttcaaggaaggtatgtttctattttatctacaaaccttgtagactggccttatggttttagcaatataaaaacacacaaagtgatgcattttttaaatgaaattatttaacaacacaatgtattttaccactcttacaaagataacttacagtaaataatgttaacgatgttagttttacttatacgatttttctgtgtaccctctatctctacttcacctcaatgtctttcaccctccaattttaaggtgaaaatatctaggcttctgccctctgcaactgatttctattgagggcctatggaggtaaaatgacaataatcattgaatctagaaagaaaaagcatcaagcacaatttacatgaacaatagtttcagttgacatttaactgaatgcttctaacttatttaatcttattagataggcagtgttttaatcaatttacagatggagaaaccagggatggtgcaacttgcaagtggcagagccctgtttatctccaaagttcctgttcctctgagatgaagttatagattaacctaagtttgtcctttcttgatgtaaccaactaatatctttgaggatcttttttcttttacccagagtgctgtgttaagtgctgagtatacagattcattcaaccctctaaccagtccttgtagtactgattcatctgtggtcaaaatctggggtactggtgggttttgtttccaaagggttatgactttgagtgaggtaaaaaaagatccaacttttttgtacaaag

SEQ ID NO: 180889 - DNA, 860 bp, Homo Sapiens
ttggcctgcgtgtgtagctccagcctaatccccaatcccattagggcccggcgcctccctcgaagcggacatacccctgggtggtggaggcggtgacgctgacgaccatgatggtggcattggtgaggatctgctgcaggttctcattgttcttgcacttgtccaggctgttgcccagctcctgggggcgagcagagaagataggggaggctcgggaactcaggaaggctcgagaacctctcttgctcagcacctcctcaggtctcttcttagggacactgggacagtcagggtctctgcactgggggcctctcctgcctccaccgcctgaagcatccacaccattcctgcctccaccacgtcaagcatccacaccatctgccctgctttcgctgacctggaaacggagcccgggcagagtggcgtctggaaagactgtggcctcacaagcctctggcctgcgtcaagtcggagtgcaaatccgcggcctcgcttccctgcaggggcttccccaccgccatcctaatcctttcctggacatgcgtggggacctcctcctctccccgccctcacgcacacctgcccctcttttccgaaacccttccttggctttctcctaagacccaaaggctggacgtgatccgacctcttccccgtcccctccttccccgcctcacttcctccccacttgttccctctccagctctctgcacttagacgtctctctcccccaaatctccgtgtgcctgccctgtgtcaaccttcggatgtcaactccaatgccaccggctccaccacagcgggaagcaagcgtgggtcaggcaacggggaagccctctcgggaaactggggttggaggg

SEQ ID NO: 180890 - DNA, 986 bp, Homo Sapiens
ttggcaaagactagggaaggggcctgagtgctttttgtttcttttaaagaaagtaaagtgtccagtggtttgggatctttgtgggcagtgaaggtgtcctgagcgtgctgagtagccacagccctgagtccagctgccttttctcggtacacggccttggcggcacctgggtgtggctgttgtagccaccagcccccaaggtggccgtgagcagtgtctccttccatggtgagctgtggcaggaacccgcagctggctcttaggccctcgttttccatatgaggaaatacaacgtgggctctaacagcagggaggagtctccagagagagctggtttgggggtgtgttctctccaaaagaagcctcttggcctctgctcctggacaccctggggggccttcctgagaggcatgttgagggctccccacctccagggcgggccccctcctttgtcaccatctcacaggaaggctttggccgtgtgtccttcctgccagactctgccagcaccagcacacgtggtggctgtgagcagcagctcccgttttgaatcccaagggggaatacaggaggctcaattgctctgagcgcctcacctgtttgctcgggtgagctggagacacagtcaccgtgggcagtgactcatccccggccagtcttcctcctcgggccgtcgctcttccctgttctttctgctcctctcaggagaccttgcgccctgtggagatgggaggaggcagcaggaaggtctcccagggcttgctggccgtggctgggtgtggatgggtggaagaccacgtggcagcctgcctgtaggtcacagaggcccccatagttgtagggccccgccccagcccggactccgcctgggtctgttccctcttcgccccctctcttttcgggctgttggtgttcggccagggctctttggctacagtagcctgggccctaaaggccatctagttgctgagtctgtttggggtttt

SEQ ID NO: 180891 - DNA, 1284 bp, Homo Sapiens
  misc_feature (1148)..(1181): n is a, c, g, or t
ttggatattttgtaaacagattacatttgaacacctaaataagtatttgtttcataatcattacatgcttgtttatgatttacaaagatttggtagagaaaagtacagtccttaaggcatatatatgccaatgcattaaactactcagcttttgtgccagctcaggtgttcataggaacaggaatgtggaataccagctttttactttaattatacttttatgctgaatttttcttccagttaaacctttaattacactagtatgtaaagtagttactgagaaaaataagtttttgatttcccttctgttgatctgtaacatttttaaatgaagctatttaacacatgacatgctaatgttacttaatggattcctatgtatttcattaaaaaaaagtctcccacctgtgttaagacagctaaatatttcttgatgttggcttgaggaccaagtgagccatcttgccagttaagcaagttttatatcagaggaccaaatggttaagaagagaatttgtacatttcttgagcttccccatgtgaagcttgggttcagtactatcctattactatccatcttcataatgagtgaagcaaactgaaagggaattcataatcttttttcttatctgaacagaaaaactaatgaaaatcaacaataaatctttattttaattttcattcaacagctgaaaaaccatgtctgttgaccacattggaccattgcctagttaaaatccataaaattccctataaaccaatgaaaagaaacttgtctggcaataatttccaacattttaaattctaatttttagttacaaagaaaaaggatagaatgaggcttttcaaggaattcttgctcatcccttcaattatttggcaggtaaaacagtcctagaattcagcttcctttttggttttattactattaaatagatactttcatataaatggaaacacttttcctcaaaacattaattcaaaacatactccttatattaaggattatagcaccatattttttgtatattccctatgtgtaactttttcctgttggtatgtgatatttttcatttaatatgactatctgctggtgttggggccaatagatttgtgaatattctgtggatgtgtctatgtataggtgnnnnnnnnnnnnnnnnnnnnnnnnnnnnnnnnnncccagctaattacctcaaatgtgtgattgtttaatatataccacactatgtttgcacagagcagggcttccattagcagtggatattttttatgtctgacttt

SEQ ID NO: 180892 - DNA, 1458 bp, Homo Sapiens
  misc_feature (938)..(951): n is a, c, g, or t
  misc_feature (955)..(971): n is a, c, g, or t
tacagtgagaacagacctttttattaatatattgagataaactacagagactgaaagacaaaaattcatatttcattcagaacattcattaaaaatcaaatgcatttgagttctcacagaaaattttatgtaagtctgatataacattaaatattttacaaatcagacatttcattttgaaatctaatttttaatcctgaatgcattatagacaaagtaagctctcctttaccaatttcatttaacttatacaaggcttccattataattccatcaaaccttaaaaattacctgcagcttttaaaaacacataaagtaaatggaaagaaagtcttatgtagcaatccaaaaactaaaactagaaattggcaagaagcatttcttaatacagataaactgcaaaatatcatttatgtgtgtttcttctcattggtttaatcatcctataaaaaataattttttgaaagtaataattacaatactccaatgtcactgaaaatctctatgattttaatggtgtccttaaatggcaaagtagaatatcagactgaaatgtacagagtgttgtgctgaagtgaatgagacttgccatgccaggtgtcatctgctatgcagttacaagacatcttggcaactagtcatcccagtttttactaacttactaaacaaggacatttcaagaaatacttcttacccctatgtatttccagatggctggatatagaaagatataattatgtttgaagcatgggccttataataggaatctctccattaaaatatgaaaaagagcaacaaataattcacaccaatgaaattgtgttgactgattttcaaagtcagacataaaaatatccactgctaatggaagccctgctctgtgcaaacatagtgtggtatatattaaacaatcacacatttgaggtaattagctgggnnnnnnnnnnnnnntatnnnnnnnnnnnnnnnnncacctatacatagacacatccacagaatattcacaaatctattggccccaacaccagcagatagtcatattaaatgaaaaatatcacataccaacaggaaaaagttacacatagggaatatacaaaaaatatggtgctataatccttaatataaggagtatgttttgaattaatgttttgaggaaaagtgtttccatttatatgaaagtatctatttaatagtaataaaaccaaaaaggaagctgaattctaggactgttttacctgccaaataattgaagggatgagcaagaattccttgaaaagcctcattctatcctttttctttgtaactaaaaattagaatttaaaatgttggaaattattgccagacaagtttcttttcattggtttatagggaattttatggattttaactaggcaatggtccaatgtggtcaacagacatggtttttcagctgttgaatgaaaattaaaataaagccaa

SEQ ID NO: 180893 - DNA, 1418 bp, Homo Sapiens
ttggcaaactatgtcacagaacagaccctgacatttaggttttattctcatcttggcatcggtgacatctgtctgagccatcgcatattcaagcggctactcccaagattgcatgtgtttgtttaaaagtgacctgctactacctcaccattagcccactgggacttgcttcctctttaaaattttatgtaacactgatgctcctgttttgatgtgtatgaaccttaatctatgtgatatgtgactttgtgaacattgaattttttaattgagacctggggcaaggcatagttgtagctatttttatcctctttcctggcacttcttccctgtttggcacttccagcccctgcttcttatcccaagactggtatggcattgctgtgtgttaattctgccccacaaagtttcatagcaagcactaaagactgttacctggaaataagaaactcttggcctgttgggggcctcagtgcaggactcaggacatccagttgctagactgcagctgttgtcagccacctgtacttctcaggctctatctgagatatcatcctttctttccaactgtgggcttcttatatctacttctcagacgttcattttcaagggccaaaatgttcccactccaactcacaatctgtgggaaagtagcagctctggtttctagaaaaattcagaaccttccctttccttctttctggaggcaaagggtgaaactttaaagcctgacagaacagaaggcagtttatctcagcagtgaagggatggcagtaatgggatggcagtcagggtggaccagcagaatgggtgaagagatgtattggattggctgacttgctaatcggagctattctttttttccccttttgaaatcaggtggagatgttacagccaaaaatatctggttggcagaaagtgttctggatatcctgacagagcaaagggagtgggtcctgaagagcagcatcctcattgccatggctgtttacacgtacctccgcctcatcgtggaccaccatgggactgcccagctccaggccctgcgacagaaggaagtagacttctgcatctcactgcttcgggaacggacacctagctcccctgtttgacaaccctaagttggataaggagctgcgggcaatgctgagagagaagtttcctgagttctgcagctcaccctccccacctgtggaagtcaaaattgaggagccagtttccatggagatggacaaccatatgtcggataaggatgagagttgctatgacaatgcagaggcagccttcagtgacgatgaagaggatctcaaacagcaaaggaaagaagagggagtttcgcttccaccctatcaaggagacagttgtggaggagccagttgatatcaccccttaccttgaccagtgggatgagtccctga

SEQ ID NO: 180894 - DNA, 917 bp, Homo Sapiens
  misc_feature (199)..(215): n is a, c, g, or t
ttggcacaagttaaaatgtccatctggcatgaaatcatttcatcagtcctgtaactgatactgtatgtctcttatatgtttcttgcttttatcattccaggtttgcccttgcatctcatttcctctggggactgtggtccattgtacaagccaagatttcatctattgaatttgggtacatggtatgttttagcagcgnnnnnnnnnnnnnnnnncttcctactcccaggtaaaaatgctatagtatttgtgaatgttggcagcaaatgactgttccttacagagggttctctgtctccccaagtacccgaatgtggtgacctggtggcatcaggacagtgtggctcagcccaggaagccgggggagaagccgctgtcactgatgctgtggttgcctttggaggttgccctcacttccaggccagctgaccttgcctcccctgcttcagagaagtgcctgcaatcctgatggggaatgtaggcatctgcaccctcgaagtccagctctgacctcagtcccttctgacacgggacagtaagtgaagaagagtgggtggctcctgcctgtgctgtggaaggttttatttatcggttaccacttcattctccagcctgtagtgcccgactttgggttggaagctggtaattattgaattagacctcctgtttttcataggcatgtttgtaaccaagctaggctgtcatttaattttaaccttaagaattgtcagccacctcgcccggtctgcaccttcatttataatcgtcccaaactggaagcagcctaaatgccagtcagcaggtgtgtggatacgacagtgccagatccatgtactgagaacactcggcagtgcaaaatgaaggtggcaccactgcatgacagcacaagccactcagatacatcacgctgaatgaca

SEQ ID NO: 180895 - DNA, 825 bp, Homo Sapiens
  misc_feature (188)..(196): n is a, c, g, or t
ctcaggtaaaggcctgaagtttcttgggcgtggaagaaaaagcttgggaagcctattaattcatggtgcagttcagaattgtttaaataagctctgtgccactgagcttaatctgaaagtatagtgacatgtgaaggatgcacatatgaatgaaaaactaaaataattgtaggctcttctataaatgnnnnnnnnngtgattggattgtgtctacctttttcctcaaagtaatctaacctaaacggtcatggtgttaaaactttttatggtgctaatcagaaaaattgatgttgcaagaaatgaggtctcaaaaatgggaatgtgcctcctcactctgcgtcacatgggaaataaatcctgaggccaggatcaccagtggggtagagtcatcttcatagtctcctgttatcctccccctgaacaaagaacaaagtgagactgggaagctagtgttggggaaacatttctgggataaactgtggagtggagaagacaatggagggcaaggcaaaaacccacagacttgtttacccatagaggccccactcacctccatgctgacagaattccagaaaaattccttccctatctcccaaacacctgaaattctgaaatattgccctactatttagcactttaagcttcagtgaggtgctgtaatggagagatagcttcatagtttagcctatagccaactttgcctcaagacctccagataagatgaagtggcttttacctcatgtgagtctcaaacgctggagagagagttccacaaccacccctgccctttctcccatattacgctcattagaaagtctactcag

SEQ ID NO: 180896 - DNA, 1122 bp, Homo Sapiens
  misc_feature (167)..(188): n is a, c, g, or t
  misc_feature (853)..(867): n is a, c, g, or t
  misc_feature (898)..(906): n is a, c, g, or t
ttcaccaggcaacccacataaggggaacttcttaaggtgggagggagaaccctgcagaatgaagtggttcaccctaagatctattaacagcacaaggcatgccctttaaagagacaggcggtaacagcgaattcgggagatggaccacttcttgtgctccttgtcannnnnnnnnnnnnnnnnnnnnnactccatctcagtgaaccgggcaaacatggctttccggacagcatctttgtaggaatcggcgcccgacaaaccatatgcgctgcctttggctcctaggccagctccctttagccgaacttgagcctgggaaagcacagagactgtcagctgggaggtagggtatgggctgctccacctctcaccatgcccactccttacccagcaggaccacccaccaggagacagaagagagaaaactgtatatgaagacaaggatttctccagaagagaccaggagcaagtataaggactggaggaataaaatgggctacggaacacaggcagatgaagcaaatcacccacccctcaatgcctgctcagcaagcatccacgcctaggaaagggccccaaagtattcctctgaaggtctgggaaaggtatggtaattacaggcacacattatacaggatagctcaatgtcagcagaactcacataaacaggatgaacatggtctacaagagtctgacctaagctgtgctcccaggacagagcaggggcaattacgggtggagctcctgcctagaaggccagtgggtaggggcctccgatcctgggatatgatgcctcaatgtgggctctgatcaatttaaagatttcttatcatgggtgaaaaccctactaaannnnnnnnnnnnnnngagacagagtcgctgttgcccaggctgaagnnnnnnnnncatgattttaaccagggcttggtcatagtattactagatgtggagctgagactcaaagtcagaccagtctgaattcagagtccatgtgctttccactatacgaaacatctcacttaatggtattaactacagtaacaacaacaatacttcctttatatagttactatgttgaatagtgtatatgcttcaccttacacaactccataaagagggcac

SEQ ID NO: 180897 - DNA, 1369 bp, Homo Sapiens
  misc_feature (412)..(421): n is a, c, g, or t
ggtaaaccgagtcagggagtgctgagaaagctgtcaaacactaaacgctgacttgcaccaggcccgtgtctccagcggagacagaagtcctaacattcagcattgacaggctgccgagtgtgacagtctacttcaaaaagcagaagacacaattctctcagttctgagactgtctcttacttttgcccttagcatggtgtcgttgggcttcgcttcacctttttccccagtcccccatccttatgcaaagtaaaagcctttacatttctccttccccccacaccttctgcttcaggatgagtcctttggggggaaagggaggggaactcatttttaaagggaatctggttacaattctttctcaagagggactattctgaatgccaccaactctaaaacaactaaatgagannnnnnnnnncctgtcaactgcaaccatgtcatgtcctaggtgacagatgtgtttttcactaaaatggatggtactctcttcaaggtgagtaaccaggaggccaatgaagtttcttcaggggggtaggaaaagctcataaatgcacacaccacctcatccttcaagtcaaccatgtgactacaaggacttagctttaaaaagtcaaaattctgagctgaatcaatctagccaagagtatacctagcacctacccctaaagagccttcatttaacaggagcatcttttctttttcttgggggtgggaggatcaagggtgggggtggtttgacactatcaaacagatttaagtaggtggttagatatccagattttaaaaaggagtctaacccctctaaacatacatactgttgagcaatttggttcttgcaaatcctggaagatttaagacatgctgtgaattttgtctctgcgatatctaaaggcaagactgcatgtctggccaggagagaaaaagctgcaagggccatccactcactgtgatatacagaagcaaaaataaaaaagctgggagatatgtgaatagatcatcccactaggagggatgtgtgctgggagactccaaactaccagtgagtccctaatcctactggccttttatttctggagtgaatttgaactgtaatgtgttacacagtaacatagctttgtatacattaaaattgtggagacttttaaatgtcttacaggttttagtttcttaggagttttaaactcctaggttagtcattctgacatatccactgcatcaaacaatgctatcatgtcaagaaagcagactcacatgaaccttgtatatgttctggatttactaggatggtatctatggtattaaaagtagagcttcattcatttcataccatagataccatccttgtatatgttctggatttacccaa

SEQ ID NO: 180898 - DNA, 1500 bp, Homo Sapiens
  misc_feature (1114)..(1123): n is a, c, g, or t
ccactttgagactgggtggatgaccactgagcagcagcaatagccgtactagctacagagaaagcgctgacgcggttaccatctgagaggaccaagtcttttctggcactttttgcaaaatcaaccccaatagttttgccatcaattttcaaaggaggatggagactctgtaatatctgaagcagctgagaagcatccattgcagaggacagctgcacaaatgcgaagcctctgttctgctgggtctgtttgtcttttatgaggcggatgttattgacagctaaagacgcgtaaggagacagtgctgtcatgatggaatccaccacagtgtgcggagctatgttccgaagaatgatcgtatcacagtagtaatccacagactgaaccgactctgtggttccaggaggcacttcctgttcagagtcttgttacaaagccaatcttcaaacttaggtctgggattgctataatgcattgcaatgtgctttccttgaatcaccaactttttctgtaagaaaagaagtaattagttattcccattgtgaggaacatgtgtccattttcccagggcagagcacacttcggaaaaatcagtgctctggaattaaatggacaacatacggggaggaccaaccaccgccacctatactctgcccatccaatccttcagataggcagtaagagaatgggatgcggagtaaaggtaaacggagtcagggagtgctgagaaagctgtcaaacactaaacgctgacttgcaccaggccgtgtctccagcggagacagaagtcctaacattcagcattgacaggctgcctgagtgtgacagtctacttcaaaaagcagaagacacaattctctcagttctgagactgtctcttacttttgcccttagcatggtgtccttgggcttcgcttcacctttttccccagtcccccatccttatgcaaagtaaaagcctttacatttctccttccccccacaccttctgcttcaggatgagtcctttggggggaaagggaggggaactcatttttaaagggaatctggttacaattctttctcaagagggactattctgaatgccaccaactctaaaacaactaaatgagannnnnnnnnncctgtcaactgcaaccatgtcatgtcctaggtgacagatgtgtttttcactaaaatggatggtactctcttcaaggtgagtaaccaggaggccaatgaagtttcttcaggggggtaggaaaagctcataaatgcacacaccacctcatccttcaagtcaaccatgtgactacaaggacttagctttaaaaagtcaaaattctgagctgaatcaatctagccaagagtatacctagcacctacccctaaagagccttcatttaacaggagcatcttttctttttcttgggggtgggaggatcaagggtgggggtggtttgacactatcaaacagatttaagtaggtggttagatatccagattttaaaaaggagccaa

SEQ ID NO: 180899 - DNA, 1274 bp, Homo Sapiens
  misc_feature (348)..(515): n is a, c, g, or t
ttgggtcccaggcaggcccagaagctgggcagcctctgccgggttccgggaaaaggagctcctgctgccactgctcttccggagcctgcagcatggggcccctgccgcgcaccgtggagctcttctatgacgtgctgtccccctactcctggctgggcttcgagatcctgtgccggtatcagaatatctggaacatcaacctgcagttgcggcccagcctcataacagggatcatgaaagacagtggtaggaagggagggtcggggcaggggtgatctcagtggcccaagagagccgaccccagcgggtccttatattggcactggcagccagaaagctgccctctgnnnnnnnnnnnnnnnnnnnnnnnnnnnnnnnnnnnnnnnnnnnnnnnnnnnnnnnnnnnnnnnnnnnnnnnnnnnnnnnnnnnnnnnnnnnnnnnnnnnnnnnnnnnnnnnnnnnnnnnnnnnnnnnnnnnnnnnnnnnnnnnnnnnnnnnnnnnnnnnnnnnnnnnnaacaagagaaaaaaaaggaagctgccctctgcccaaaacccacgtcgaggtccccaaacctgggacccttaggtcttttctcacttagcgtgcccaaccttctcctggcaggaaacaagcctccaggtctgcttccccgcaaaggactatacatggcaaatgacttaaagctcctgagacaccatctccagattcccatccacttccccaaggatttcttgtctgtgatgcttgaaaaaggtgaagagagtgggatgtagacagggtatccagtgaaaaacacagaagtcggagattgagggattgataggatggaggggctgcgggagactaaagcaagtgaagcctgccttgggaaacctcaggatcagccttgagcgagctgaaggttgccgggcatgaaagggaagaagagcaggcaaataggtcatgggaaccttgggtgagaggctgagggcggaggagctctgggggatgtcagaagcaaggaagagctagtcctccaccaggaaagcagcaagaggagccctgcctctgggtgcctctgccccacaggaagtttgtctgccatgcgtttcctcaccgccgtgaacttggagcatccagagatgctggagaaagcgtcccgggagctgtggatgcgcgtctggtcaagggtgagtgtggggctctgggaatcctctgggaggaccttggatgactttctgacctttccccaggcacgttttcagggtcatgatcctgcccccgcccggggga

SEQ ID NO: 180900 - DNA, 1343 bp, Homo Sapiens
catgtaaagtgactttgtaaatggaatatttttaaatgataaaaagaaaataacttttccaggaatcctttggagaggctgataaccagatattaaattatcaattttgccaaagtggactttaaaaaatgtgttacttttaaaaactaacttgaaagaatttatgaggcaatctatctgagtatgtttattgttgctccattggctttcaggattttggtcatttcactgttaactcttacatcagagaataaagaaaagaaaatgaaactttgttaggaactgggatggaaaatgtagtcccagacagatctactgacctcgactgagtttcagaaatatcccaggattttggttattcatgcctttcttttgtgactttctttcaaattagccaattaaagataccccttcaatcaccggtgacatcagtacaacagtttttcaacagttttctctctcctgaccaaacagttttcccaagaagccagtcaatagtcttatctgttatttgttcagcatttacaaactgactttgcacttgactattagagctgctttctattaatgccagtaaaacaacagaggaaggcccaagctgatccaatctgggatttgtggtgtttctagattgtcttctagtgatattaaaaaacatcataaaaattcctgggaaaggagaaataattgaaaaactaagcatttaaagttactctaagtatgcaaaataaatttaatggggaggagtgagatgaaagagatagtaagtgggaaatggagactgtggggaaaaaaaatctaattgatgatagggtgatggaattccagaggggctagaattcctcctctgggcataatgaccacctgaacagctgctgaagtctgcagagttctttaactcaagcactgcccctctattgataacttggtagcatagtaaagtaaacattctctttctttaatcattaggctgttggttcctctggaggatgaacatagtggatgcctcacattttcagcatttctgtacagtctcactggctcttcataatgtgtctgtagaacagatgctctatttcacagagcaggaaactatggatgagatgttcagcgcctgtcccaagacaaatcagccaataaatggcaagtcaacaggagcccaactcctgcggtgtcttgtctaacagatgctttacagtcctgcttattaactctcataccagcatacagagtctccaaatgccctctctccttatgtctttcatttatctgaacttaaggagagtaagtctttccaaagttttagcatgaaagaacttttggtatatctagctctagcccaa

SEQ ID NO: 180901 - DNA, 1393 bp, Homo Sapiens
  misc_feature (82)..(103): n is a, c, g, or t
  misc_feature (1051)..(1065): n is a, c, g, or t
  misc_feature (1079)..(1122): n is a, c, g, or t
ttggaaagatttttttaaaaactgatattaaaatcatttcagaggatcaaatgaaaaaaattagtgttcaatttaaaatacnnnnnnnnnnnnnnnnnnnnnngaaagagaaatgttttattcctctttgcacagaacagtttatgaaggtggctctctcctgactccatacatcttttacacaaagatgcctcttcaaatatgcccagttatctccccctcttcagtgttagagaattggcagttagtgagtggggcagaatgcttaaggctcattaaaataccttttttaaagccctcttatatcctttatgtacacttgctctgtgtgattaaattaactttcttcaaatattagagtccatcataataagtgacagctctgttggccttctcctcagggtgccattgttttccctttttttgacttaacatctttgccctgagaaagctgtggtttctttgacaagaagctattactctttgtatgagagaataaacaaacttactcagactgaagagtatgttttcaaaaattaaagaagtagcaattatatgggagctgttatttattaaagcaattatctgagcccttaaagggctgtttgtttttacaatgttgtataatggccttgcaggaaaattagatttcttattctctcttccagtgtacattgtcttgagtattgtcacatttagagaccatagggagatatgggactcctagtattcagtcgacactctgaacagattttctgtgtgatacattttttcattttaattgagtcccctcttcctcccctccaactgatagctttttataactgtgtgaaatatctagagaagaatgaagtaggctgagctacattttcaagcttaacattctttagaaaactaagaaaatgcccaatatttcaacattaaggtgtcaataggggctaaatgatcactttaagatgttttcagtttggaacttgaatgtgtgtttaattttttgtgaacagattgatgactcttccgcgtctatttctctggcccagcttacaaaggnnnnnnnnnnnnnnntcttgaaaatatannnnnnnnnnnnnnnnnnnnnnnnnnnnnnnnnnnnnnnnnnnnaagaggggttgggggaggacatattttgcaaaagcattgtacatattattactatcctgtaaagagtagttgctgttttgagaagataggggaatactttgtcagcctcagcgtattggagtattgttcatcttcaagacagaagaaacacttgaagctacacttaattattttttttccctcatacattttgtttaattatacattggaaactaacaaaggttctggaggaatttcctggttttggctataaattatgtggacctttttt

SEQ ID NO: 180902 - DNA, 752 bp, Homo Sapiens
  misc_feature (560)..(586): n is a, c, g, or t
  misc_feature (595)..(667): n is a, c, g, or t
ttggttaaaatagggtgataactgtgataatagtgtttcttgcattctagaaaattattttattaactacattcaaaacccagcatttcacaggttccatcattagaaacagtatagttctagttaacatgattggagagtttcaggggaaaggtttacattttctgaaactgtatttggtatgtgactcaatgtggtatttcagtcttgttagtcacttacatgactgacgtttgcaaggatttattgccaagtaaaatttgaccagagtgcactgagaatagctacataaggggaaatctctcaaaattccttctgttcatttaatttggagcatattgtttaaatcattttaaacatatgtaaaaagttgaagcattaaaaaatcttcaagaaacaatgaaaaaatagaaattagcaaacataagtttcttaatgcaaaattaatagtgaataaaatatagcctacattaaaagccagaggctttgctataaatataagagtttagaaaaacagtgtgcttcaattaaggactaaattatcaaaactgcatgtttgnnnnnnnnnnnnnnnnnnnnnnnnnnngagatgaannnnnnnnnnnnnnnnnnnnnnnnnnnnnnnnnnnnnnnnnnnnnnnnnnnnnnnnnnnnnnnnnnnnnnnnnaagcgattctcgtgcctcaccatcccgagtagctgggattacaggtgcaccacaccatgcccagttaatttttgtatttttagta

SEQ ID NO: 180903 - DNA, 1901 bp, Homo Sapiens
  misc_feature (640)..(877): n is a, c, g, or t
  misc_feature (1473)..(1586): n is a, c, g, or t
  misc_feature (1742)..(1762): n is a, c, g, or t
ttctttccaagacccagattagtattttatttttccttccctaacactcaaattcatggccaggtgaaaagataatagaacataatcaaactaacatataaacacaattcaaaaacgtttaaccatctattatagctctttgttgtaaaacacacaaagttaaacagaaacatctttatataaattatccttaataatctgtatacactgtaaaacaattgaaaattcacaccaagatcctagtgcaagcagtggtgtacaaaagtgcaaacaaggttagtgattaacaacttaccatcaatataccacttcaacatactttacattcagccaaatactgaaggtttcaccatggaaaaacacttttatcacttttaaagtaacttgactatgttcaccctgagtgctcttgcctcagtatggcaactgattatgagttcaggttaagagcaacaccagggaatacagaaacccacgttaagttggccattctgacatgaatctatacttgaaaatgaaaacaatcccaaagaaaacctgtatgtcaaaaacagaactgttcctgcctttcaccccaaaatatttaaaactaaatctaagccacttttaaaatgcatgctggccgggcgcagtggttcannnnnnnnnnnnnnnnnnnnnnnnnnnnnnnnnnnnnnnnnnnnnnnnnnnnnnnnnnnnnnnnnnnnnnnnnnnnnnnnnnnnnnnnnnnnnnnnnnnnnnnnnnnnnnnnnnnnnnnnnnnnnnnnnnnnnnnnnnnnnnnnnnnnnnnnnnnnnnnnnnnnnnnnnnnnnnnnnnnnnnnnnnnnnnnnnnnnnnnnnnnnnnnnnnnnnnnnnnnnnnnnnnnnnnnnnnnnnntgacaaagcaagactccatctcaaacaaacaaacaaaaaagtatgctgaagaagaatccatctactccagtgcagcttttccaaaaatagttctgtgtaaactcagttttctatttctgccctaaaatctatttggggcaggggacacacctgaaacaaagttggctttggataacttcgcttactttcctttgaatactttggattctgtttaaaagtatgatgaaagccgtgaacaacaattagtgccattaaatatattagctatttaatgctctaaattataaggacaaaaattaattggttcagaactgcctctttaatagactctgtggcttcccttgacactggaggatctttaaaatccaggtgttgggtggggatttgtgagggggaatggtaacagggttcagaagtggaaacacggttttaacaaaattccagtcactttatacagaggcagagtcacatatcccaagagctggttcttcttttatttggttaaaaagcactaacttgaatttcaaaagaaggataataatggaaatgaccggaagcttcaacatgtagttttaggctgggcacagtggctcatnnnnnnnnnnnnnnnnnnnnnnnnnnnnnnnnnnnnnnnnnnnnnnnnnnnnnnnnnnnnnnnnnnnnnnnnnnnnnnnnnnnnnnnnnnnnnnnnnnnnnnnnnnnnnnnnnngaacaaaagttttttaatcttactgatcccatctttccagctgctctgaacagaggggcagggcggggaaagtcatgtcacagactctgcccacagcagccattctgaggtgccttttcagtctcttatcctcttttgagctttcctcttcttaannnnnnnnnnnnnnnnnnnnncattgtactcattaatcccctcctcaatttttaacagaattataaaagcaaagtcaaaaggtccttcaggatgactgggaggcttcctaggctaacttttgcatttgaaaatggaaaaaataaattacttgatatttgt

SEQ ID NO: 180904 - DNA, 1481 bp, Homo Sapiens
  misc_feature (220)..(228): n is a, c, g, or t
  misc_feature (912)..(930): n is a, c, g, or t
  misc_feature (1067)..(1184): n is a, c, g, or t
ttggctaattgaaaccgtatatgtagtaaaattaaaggcagagctgttgcagttgaattggagagttagggcaaagaacacttattagcccacacttcccacctttctacaggtggtcctttcagagctcagcctgaaaacccactactgtgttatcgtgcgtcttttggggttagtggttcttttgagaatctgaaggaagctgtggactcttcctagnnnnnnnnnccacacatacacatacaatgttgcatgcagtttcaagggattttggacatattgaaacctatcacaggctgtaggttatggacctctgtgccatgagaaaattgatacattaaactaagaactttgtttttaacttaccaatcactactcagcacatcttatataagctgataatttgtgatggaaaaggtctgtagcatgtgatataaggtgaccttatgaatgcctctcttgctggtacattaagttgttttaatatatcatttggagggggctgaaatgttaggctcattacaagcttgatacagaaatatttctgaaggatttctaatcagaattgtaaaacatgtgctatcatgaaatcgcagtcttcacctcatggttcatggaacatttggttagtcccataaaatcctatgcaaaacaaagtagttcaagaatttttaggtgggtagtcacatttataaggtattcctcttactctttgggctttttcagtctgatttatttaaattttcatttagttgttttacttttggactaaggtgcaatacagtagaagataactttgttacatttatgttgtaggaaaactaaggtgctgtctcctcccccttcccttcccacaaaatctgtattccccctattgctgaaatgtaacagacactacaaattttgtattcnnnnnnnnnnnnnnnnnnngagacagggtctcgctctgtcacccaggctggagggcagtggcgcttcacagctcactgcatcctcaaccttgggggctcacgcggtcctcccgcctcagcctcccaagtagctgggcatgcgccaccaagcccagnnnnnnnnnnnnnnnnnnnnnnnnnnnnnnnnnnnnnnnnnnnnnnnnnnnnnnnnnnnnnnnnnnnnnnnnnnnnnnnnnnnnnnnnnnnnnnnnnnnnnnnnnnnnnnnnnnnnnntgacccaccgcgcctggcgcaaatatgtattcttttaaaatttcctctgatactataagctttttgcatttatctgaagcagtatacatgcctttggtatcagcaattttaacagtttggatatacttatcagctatcttattccaaaactacatctacttcttccagtatagaatctggtgcttcctgaccaaaaagatgagaaaaacaatgttaaaaatatagatgctttccattgaaatggagtgaaaacattgggttctatatgttttcttttaaaataattttcttattaaa

SEQ ID NO: 180905 - DNA, 935 bp, Homo Sapiens
ttggaaatgatttacttggagcaaagctttaagtgtgttggcgtgcttctgtgtggctgtcctgtgtcgccaggtcgaagatcacagtgaggtagaggccctgccccatccccagggccgccaggcttgctccgtttgctttgagtttttagaccccagagggagatgagcttttccaagctgtgtctgggccagagcctctccttgcccttgctccatcccgacggtcaccgttgggtccacgcctccaccgccccatcttgccccaaacggaaagcgctgtatctgcagtggcagcccttccccacttcggctctgggagggtccagccagtgtcacctgggcccaccctttcctgcagctgccaggcccgtgcggtcagtgggacccggacgtgggcaggcgagctcgggaccctcccaggcagttcccacagctcttgcctcggctcaccagggtcacttccactgtcaggggcctgagggggcagctgtggctgcagggctgctctggactgaggggtcccaggccccgaggggtgcacgcctggctccccttggcacaggtgcgagtccgtttcttttcagcagaagggggaagaggtgtccgctgtgtgggctgctgactcctctgtgtgtgaggcccttcatctaagtgattgtgtattcagtttaattctcattatatttctatactgaaagaagatttttaacgaagggaaaaacaacagcaataacattcatatctctggagcagctaactcatacacgtaatgtctgcttttcgtacagaactagccaatgtaaaaacagttcacctgtaaatactttttcctttttcaccgttgtattatacatgtatatgctgggtcctttttcagaaactcttttcttacctgagagttgtcttgttttctgggctgtttttaactgagg

SEQ ID NO: 180906 - DNA, 462 bp, Homo Sapiens
ataacatagtctataatgttttctaagtttcctgtttcttattttttttctgaattttccatttactgcaaatggggtcttgatgtctacaatgattatgttgctatgtatgtcttccttcacttttgtcaatatttgctttatgtattttggagccctgatgttatatacacatatacatatagaaagataaatattatagttatagatttctgctacatcaactcactttgtcataatataatatcagtctttgtctcatagtagtacatgacttaaagcatgttatgtctaattatgactaccccactcaattgtggttactattttcatggaatatacgtttttccattctgttacttcagcctatttgactgaatgctaaaatgagtctcttataggcagcatactgattgctttttaaaaaaaccactcaactttctatttctttttctctatata

SEQ ID NO: 180907 - DNA, 2769 bp, Homo Sapiens
ttggcaattctgtaggctcagcagatgatactgcccagcctttgggaaaatgtccagttggcccctggcttaggactctccacaaggagtttgaaatggtagggcttatcccctaccagactaaaagtatggcccaaattatgtgtttagaatttgcttggcctttaaacacgaaccattccctatgcctggtagagaccattccagtgtcagtgtcccacctgggacctgtacagtcctcagtaaattatgattgcaatgaattagaaggcttttgccttccatatccatcatccattatagcatctgtgcttccacctggttagggggagggaagctgaaatcattgatgtatcaatagaagtaatttagcttaggaacttgcatctataacttaccttgttttgttccactttaaagtcaagacaagaaagttaagatagcacacaggtgcacatgcttccagatgccacatgtgaacatttgttgatcatgtgactaccgatgacactttagctagaagataaattaaatcttagctaaatcattgtttttccttctggtggctatgaggatgaatttgctctcagtcttgatgcactgaaagcccttcaaacacagtaaaagatgaaatcactcatctttaaactgaggccttcagggaagcttttgtaaaggacagtaatgaattaggctttcagttttaggacatcaaccctccgagaaaaggcagaaacccgagggaccatttatttcccttcgaaactgtatagcccagggaatggattgagatgctttctccagaccctgtataggtcaaccttgcagaggtaaaggaggaggggcaggtggatgaataaaataggataatgctcagcttggcagtggacttgccttagtgtgatgacaggtctaacatgggcaagacaattagaatggggaccaatatgccaggcatgggcttttatctccctagtagatcccaagctagtaggcttggattctgccaaatggccagccctcctgtcttctccccgtaccttgtagttagaccgaggtgagaatcctgctgaccccagtcccatcccctctcatttcaggaaaacccttttgtgattcaggtagggggagaggaggagttaagggctccgtttactcccaagtcatggatttttaatattccatttttatcactaatatacctctcttcctagaagctactggagtattgagtgttgtgggaaaaggctaactgtgaattaagttaatgtttttcttataagaaatggaagtttatttttttattgatattactatgtgatgaactgagtatgcatatactgaaatggaaggaaattttaaaactattattctagaagaaatgggcagttttgtaatttggtggtggctgagaccccatagaagttttactatgtaaataatttggagagtgaataaggagattgtgctatgaaatcctgacagcgctctttaggaggcagacttgacagtcctaggaaggttgacataaaaataccaaccttcagtaaagctctagtacaaaaaagggtaaatgtcatcattcttatttttaggcctctttcttgagagaggtgggagtgggaggtagtgttataactggcactttaatttgtttttggaactagaatttaggggcagttggatgaaattgcaaatttagaaggggaataagaattttctagtgctatataaagaaatgatgatggagacaaaagccttgctttcctctttttagaatttattttcgatttttagcatactgtggggcttttagagctaatatgatctaaattcagaaaatttaattttcatagtaggccaggtgtgaattacttatgtttgctatagaatgcttatttagactaacaataaatttactttgctttctaaggccagtcagcgaatgtggggatgaggcaggatgttttaaatgagccagagatgatccacaaagtgaacagtcgacacagaggtctttgagttggatggttgcaaatatattgacattagagtgaaaactccttcctttgggtaaactaaagaaagataaagtatactaaaaaattttaagatggtgttatacaaaaaaaagtttgggtctaacgtgtccacaaagactgtcaagtgaagaatggtggagattcttggtgtttgagcagccaacctggatgagtgacttcagggacagagcagaggaaagcaaaatgaatttcctttatttacccaaaacttgttgactgaatttttgtataggtccgggaaaataagcctaaacaaatagttgtagccttagaaaaactgttttcccatttctttctgagttagaatcagcatagcctccctgtcgccttaaatgtaaaaatcctattttgattaataccccagcctaagagttatagcaatacgagagactgaatctatttttgtttcgggtctttacctcatagtatgaaattagtaagacactgcatagattttgccctgaatactggtgtgcccaggtatgccgtgctctctctctgtttccagtggtggtaattttaaggcctaaagaaagctggggttaatcctgaagctaaaagtaaatgtttcttgaattgattttgttctgtggtacaaataacatctatgaatatcatatctgtatatatctgaaccaagttgtgtgcagagaggttgatataactatatttacagaaaatgattttacattaaagttcacatttt

SEQ ID NO: 180908 - DNA, 1296 bp, Homo Sapiens
  misc_feature (837)..(845): n is a, c, g, or t
ttggatatatatttattaagatgataaaaattcattaagttttttaaattttaatggctattggctatgtttctcttttccattattctctctcctttaaaaaactcaaaacatctagaaactgtagtggatagtggccacacaggagttttctaaattaaagagtattttaaaatgccaatctgacaggtgtttcagaatgatcctagttcgtaagtttaagtttctattgattaagaagcacaatgttaatagatgatgtggtgatcaataaggttatgtctgaaagaatgtaaagattttcctttctggagtgtctctgaaaaaaattgtataacacgaagccataaatactgaatcttagctgattgcattatgaactgtcaaactgtgaagatgacccatatgtaaacagttataacagctacagattattgctagtagcattccatacaattccatattaatgttcttaggagctaatatttgataaaggggaaagctagttaaaaactaattaatttgtcaaatgtagcattcttattatgagtgtaatatctcatggagatttaaatatgaacaaaaggacttatccttctgctttttaaaagccccagcattactagatagtgtttttcttgaaggccaaagctgtaaaatgacaaagttggtgattttcagcagcactcacctgagctgtgagcgcctgcacctgttcggtagaacccactagaatcacttctctgtaggataagtgatgcctttgaatccagcagcataaaaatctgttctttttagtcatcaagtttttgtttccaggatatttctagcattgcnnnnnnnnntttcttcaccaaacactaattcctaaacacccatccaaaccacaaaaattctcttgttagtaggcgagagtgctaggacttcctgtgttcacctcccatgcacccagcattgtcttttatgcatgagatattccattagattttcctagagtggccaggacacccttcatagtaagttatatctcttaactggattctatagttttatctcgagcaacttggaaaagctaagacatcctccacccacactggtatctacgcgcctggaagctgcaccttctctcattgctgtgctctgctttaagaaaacctgatatgacagaatcagactattaaagataaatgaggggaaatcttcatttaagaaagttgccttgctccccagagtgcctttaatggctattcccctaggcatctgggtgcatatcattaatgaaatcattaacctttg

SEQ ID NO: 180909 - DNA, 1477 bp, Homo Sapiens
  misc_feature (326)..(384): n is a, c, g, or t
gagctcataggcttttccaatacctcagtcaaaacattgtactgattccagctgtgggaatagtatctgaaagttattttacagatggggaaaacgtacttatgtgacattggcctttgcactactgtgcccttttgggtcaggaaaaatctcttcccttaaaatcctaaaatctcttctgtcaggtctgaagggtgggtgggaaacagagttttttaaatctaagccacagatgttttattccttgcttaaagcagtgactagataaaggccactagaagagcctccaatgcttcttcagaagcatgtgcctgagaacatcttcnnnnnnnnnnnnnnnnnnnnnnnnnnnnnnnnnnnnnnnnnnnnnnnnnnnnnnnnnnnaggctgaggagatccaaggggatcactgagctctgaggcttataagagaagagagagaggtctaagttttttgtgtataaatttatgggttacaagtgcaattttgctgtaagcatggatggcatagtggtgaagtcagggcttttagggtatccatcaccagaataatgcacattgtacccattaaataatttctcactgttcaccccttccatcccctcaccctgctgtgtctccattattattccactctctacatcaatacctacacatcttttagcacccgcttatgagtgataaaatacgatgtttactctgtgtctggcttgcttcacttacaacaatggcctccagttccatccatgtgtctgcaaaagttatgattctattttttgtgcctgaatagtatttcattttgtatattttctacattttctttctccagtcatttgttgatggacatttaggttgattttatatctgtgctactgtgaatagtgttgcaacaaatatataagtacagttatctttctgatacactgatttcttttcctttgcatagatacccagtggtgggattgctgaatcagacagagccaatagacgatcagtaatggtggccaatcatcagctagaaacaaagtatttagcagtgcttgaaaacaccaaaactctgagaccactgaccttccaaaacttcaacagccctgagtgaaaagtccaaacacatttatccaccattcaaagaccctttattttctgtcctctgtgcatctcagtagtctctttttaccacactgtctatatactgcatgagccatttacgtgaaactatctgacactccaaggcatcttatactatatattcaaccatgtatccctagtacctagcacagtcctggcatatagtttgctactaaacatttgcagaatgaaggaattatcttgtatccaggttcaagttttaagttgattcttcactaaacaaagtattacagttcacaataatctacttccttttttacaaatgggatcgatcttaatcttatcccctaataacattactttcatttactcccatctaaatatactg

SEQ ID NO: 180910 - DNA, 773 bp, Homo Sapiens
ttggcctcaccctgctgagtctccattatcattccactctctacgtcaatatctacacatcttttagcacccgcttatgagtgatacaatatgatgtttcctctgtgtctggcttgcttcacttacaacaatggcctccagttccatccatgtgtctgcaaaagttatgattctattgttttttatgcctgaatggtatttcattgtgtatattttctacattttctttctccaatcatttgttgatgggtatttagtttcattttatgtctgtgctactgtgaatagtgttgcaacaaatacacaagtacagttatctttctgatacattgatttcttttcctttacataaatactcagtggtgggattgctgaatcagacggagccaatagatgatcagtaatggtggccaatcatcagctagaaagaaagtgcttagcagggcttgaaaacaccaaaactctgagaccactgaccttcaaaaacttcaacagccctgagtgaaaagtccaaacacatttatctaccattcgaagacgctttattgtctgtcctctgcgcatctcagtagtctctttttaccacactgtctatatactgcatgagccatttatatgaaactatctgacactccaaggcatcttgtactatatattcaactatgtatccctagtacctagcacagtcctggcatatagtttgctactaaacttttacagaatgaaggaattatcttgtatccagtttccaagttttaaggtgattcttcact

SEQ ID NO: 180911 - DNA, 943 bp, Homo Sapiens
ttggctcattttagatgacctttttttcttataatatttgcaagtgacaagtttgaaaacaaagcaagatcagtgcagagaagccacatgacatgttgggtgacagattggtcatttatttaaataaagttaatacagattaaatttgtttcaagagctattgaattttcaaattttcagtgtatttataacttttaagaacatgaagtattagcttaatatagttttctctgttggtttcttcctcaagtttgcattgttttcttttgttaaaattagagatttctttttattttccagttatagtaatactagctgtcagcttaaaccctctgtaatagaacatggaaacagacacataaagacattagctgaaaaaatagagtgaaaatcaactattttttactcccgctaatttcaatcaatcgttttcaaaagcgcacgagattcactcattggatttatgcagtgccctgtctgtataaaaactcttaagcgttcctttatatcatattcttcagagccaacatttgtcctcaaagcaacgtttcccacctccttttactgagtactgagaaagttttagcaaagtcacagattaggttgaatttcaaaatatatgtactttaaaaagttctgatttccaaatataataaagttaaaattaagtatatactttaggaagttaccaataacttccatcaaagcagagtaggatatatggtaacattaattttcggtcatttcaaatgaggtatatttcttattagggaaattaaagtccctatatttattatatattttttccttattaacagagtattaatctagtaaaaaataacccagcagtaaataataaagaaattactgaatgagaggataatgaatctgaatcatagcaggaatttgcaatattaattatggttagctatttttctctcat

SEQ ID NO: 180912 - DNA, 1149 bp, Homo Sapiens
ttggccttactctgtgtagctgattaaagaatctaaggacttgccttgtgttgatagaatgattgttactcttttcccctaagattaggtcaaagctgaatgtagaaatctcagttctaagaagctaattctgtcagttttagagagacagaaggtggactttgggattcagaaggtctatacaagggcctcaggttttataattacattcttaatatttcatgtttgtgcatgtaatttagcaggcctagtaaaggaatttttacaggttttggggaggtacaagataacatctagttttaaaaagcaaaacttattttgttttgtatttattcaaggttatcatagtgttaggtattgaaatgtttgacatatttaaaggtaattgagttgtaaataataaagctgacaataacaatatccccattgaccctttgcttcaaagaaaaataaaaaacacccagaatactatcagtttccttggtcttgtgaatgttttgatcagcagcaaaatgtcattctgtttccagctgttgctaggtgttgcaatgtctcagcctcagtctctgatttctccggtttccataactaactgcctacacttaaaagcgtttctttacctactcattttccctcaggcctttccatttttatcttgtatttttccactcttttggcagacctgcatgggcaaggacgtaacccttcacgtctcagcaagcaaccccgctatgctactgtaccagaagtttggattcaagactgaagaatatgtattagatttctatgataaatattacccattggagagtacagagtgtaaacacgcattctttctgaggctccggcgctgatgcgaatacagctcacagagaaacgcatgtgctattggagaacaggtctttgtggagatctaaaggcagtgattgatttcacagggagctctaatctctgtgattacatggtccttcaaactcccaaccaaagtgagaaaagcggcatgcagtgaaatgagcagtgagcagcccctttagcaaaatcgccctccagtccttcctggagatgccttcagccagcatcccagactccacagttatttatgaatgatgtcgtgattctccctccacctgacattttgaagagtgaaaa

SEQ ID NO: 180913 - DNA, 1387 bp, Homo Sapiens
ttggctttgctgctgaagtgttttctaccttctgagtgtgtttaaggcaggatttggagggaaggaccagcttagggagagtgtctgagccacagcgtcaggatgggggaaaccacatgggatccatcaagttccagttgaacaggagcaagatcagaacttaggagggcagtgtcagctcccttgttggctgtcaaggaacaccgatctagtagaaacccacttggttgtgacccaggtagaggtagatgccatacatttgagatatgcgtccttaaggaacctgacaagcagactgaagggatggtaagtgtgacagcctgataagttttctcaaagcccaggatacagagccagtgttttctgtaactggagacctcagttaggccaacttcgaattccagagcaacgtaggaagtctattcagcagaaactcgacattgttcagtgtgtattgctgtgcagggtgcctattgtgacaggacacaaatgttactatgttttaatttgctatatttttgaatgggtaaagcattactttacttctcttggttacttgtaccaccattccacccctatccctagcctgccccacaaatctaatattaggaagcctcttaactgaaaccaaatgaacatttgggtcaggtgccagatgtctgctgcctagaatagctttttctaggtgtctaccaccttgaatttatctcttaactgtgtgttcaagtctttgtcattgaaactagtttttcatatcttagattcagttgtgtatgatttaatgtcccttattaggagtctttaggcagggagggaagaaaaaacagatttgttcatagcaatgtcagtatccattttggcacataaagatttttgatgagccctgtttgcatagagccagatgttttcccctcccccaagagtatctacatcagggatgtgacttggtgcgaagaatcaggggaaagaggaaaaacccaatttctaaatgacctccttgcccagcttactaaaatggctgcagagcagacacaggatgaatttgaacctgacacaggatgaatttgaacctttggtctcatttatggaaaaacttgtgcaattttttttctgtgctacactacatacaaatcaccaaattacaaattacccttttgtgatccttggtgtactgagcagtttctttggggctttttctttctgggaagcgggagggaaaggagcaaaggtgtcatcctgctctttcatttgtattttggtccccaaaatgtaaatacaattttctatgttactttttttgtgggtaactaccgagatgaatattttaatttagataagtttataatgaaaagggaaaattccatgtcttaaataaaatacaaactcc

SEQ ID NO: 180914 - DNA, 1095 bp, Homo Sapiens
gatagcctttctaaatctcacaaaccctcagacttcaagattagaagggtgagatttaataattttcatcttgtccagtctgtctaatacagtgctgtttgcttcatttttcattcattattatgaagttacaaatatgtctttgaagttaaaaatgtggcaatggaggttaacatcaaatattaatgtttaaaatattgattcctgtgctccatttctaacaattgtatcataccataaaattctaatttgggggagcaggaccagttttatttaaagactggctgcacccattacatctcgattttggttttaactccaggcattttcttaaaattaagtagcatttattgtgtgttttaccatatgttcagaattaaattcattcctcatttaatccttacttattattattccaaaattacagatgcagaaactcaagctcagagaggctaatttgccttcattagtaagtagattgacactgaggcaggcaggctctagatcccgtgctcttcacctctcaactgcagtacagttcacatctccatgggaggttagcagagaaaagcaaatatcgaagctgtgttctttgttaacagttctttcagaggtattatttgatctttcttaaataaatgccaagactgccttctgacagtaggcttattctcacatcgtagtgtttggatttgaaaaatgttttacattttcaacctagcaactgtgtttttgttaagaagtaattgttgccatatcacaggtgaagaaacaagctcagaggactttctctagggcaaacctgcgtttgtagataggaataagaaatgaagctctcaggtagtgaataagaatgtagtttgtgagacagtgtatttagaatgattctttagtttacattgctgccctaaatatattgtgctgttcagtattaattatgccaaagaccttaatatttcatccttcaactcatgtacgtgtattactccatttccagggtttgaatgccggtgtggaaatgtttactgtggtgtacaccgttactcagatgtacacaattgctcttacattacaaagccgatgctgctgagaaaa

SEQ ID NO: 180915 - DNA, 998 bp, Homo Sapiens
  misc_feature (425)..(740): n is a, c, g, or t
  misc_feature (754)..(787): n is a, c, g, or t
gtgatcgacacgccttttctttccttgtctgcgtactgcagtgcccagcgcttccagcaccatgccggatccgatggttagagcagacgtcctttcttgttccggatctgaatggtgaagggtgattccttgccctcgaggagaatgctggctgcagggcttgtacagatgctctttatccagcggaggaagttcctctccttctctgtttttccaagtttaaatcatgaatagatgttaaacttgtcacgggccttcccaacactgacagatgtgatcgtgtgagttatctttcggtagctggtaacgtgtggatctcatcgactgattctcaaatacggaaccaaccttcatccctggaataatccctacttggtcatggcatagaattctttgttatatattggcaaattctatttagtaannnnnnnnnnnnnnnnnnnnnnnnnnnnnnnnnnnnnnnnnnnnnnnnnnnnnnnnnnnnnnnnnnnnnnnnnnnnnnnnnnnnnnnnnnnnnnnnnnnnnnnnnnnnnnnnnnnnnnnnnnnnnnnnnnnnnnnnnnnnnnnnnnnnnnnnnnnnnnnnnnnnnnnnnnnnnnnnnnnnnnnnnnnnnnnnnnnnnnnnnnnnnnnnnnnnnnnnnnnnnnnnnnnnnnnnnnnnnnnnnnnnnnnnnnnnnnnnnnnnnnnnnnnnnnnnnnnnnnnnnnnnnnnnnnnnnnnnnnnnnnnnnnnnnnnnnnnngagaacctgtctcnnnnnnnnnnnnnnnnnnnnnnnnnnnnnnnnnntgatgcttttccttctcttctattttctgggaaattaatcttagaattctccagtgaaaccatctgagcctggatatttctttttggagtttaaaatgacaaattcaatttctagttatagggctatttaaattattatttcataccaggtgagttgtggtagtttgtgttttttgaggaattggtctatttcatccaagttatttgtaca

SEQ ID NO: 180916 - DNA, 1780 bp, Homo Sapiens
  misc_feature (378)..(427): n is a, c, g, or t
ttggctcaaaggtacataagtgggttcttcagaagtcactattagaagaggagaggggttgtttttatagaagagtaaatgaagaaaggtatttttaatgctgtgaggcgtgaaatttaacaattttgaatctgccaccctccacgagcctttccttgtgaaagaaagatggcattacaacccacgttttgcctcttgagcagtgagaggcatgatagttgtgttggattatgggacatggcctattttaggtacatgtctgaggtgtggaacacctttcagtggtggggtttttagcagccaaacattataccatgaaagcagacaccacagatttaaggaggtgtgaattcctgggcaccaacatcacaagttacnnnnnnnnnnnnnnnnnnnnnnnnnnnnnnnnnnnnnnnnnnnnnnnnnncctcacaagtttgacttaaactgtatgacttctttacccagaagcgagccgacttcagttctcattttgaagtcactgagtggtaccgattctagtgaggaatttcttactacaacattgaacactcagtaagggatttgctattttgttaaccactcaagtttcagatggtgatttgagggcagaatacaggcagaaacgactgtaagctgtcaggccatccttggccctctggggagcactggagtgtggcctctgctcatcctgttagggtttcaagtacctgtattatgtggaaaggtcacaaggccagagacccagcacctagatgtgcaaatggggagaagaagcagggaagaaacgctggcttgcttttggctagggccaaataatctggcacattgaccaatccctgcctgtcttctggaagaaggtgcatttcaaaagcactttaaagaacttcagaaaccttaggaagttcagtgcagagaggctgtgacagaggtaaggtggagagattaccgtgttataaagaactttgggatatttttcaaaattaacctgaccattcttttgaaaccagagtccttaacaagcattgagatatatttctccatgaaggcttaacagtgaaaattggagattttggtttggcaacagtaaagtcacgctggagtggttctcagcaggttgaacaacctactggctctgtcctctggatggccccagaggtgatccgaatgcaggataacaacccattcagtttccagtcggatgtctactcctatggcatcgtattgtatgaactgatgacgggggagcttccttattctcacatcaacaaccgagatcagatcatcttcatggtgggccgaggatatgcctccccagatcttagtaagctatataagaactgccccaaagcaatgaagaggctggtagctgactgtgtgaagaaagtaaaggaagagaggcctctttttccccagatcctgtcttccattgagctgctccaacactctctaccgaagatcaaccggagcgcttccgagccatccttgcatcgggcagcccacactgaggatatcaatgcttgcacgctgaccacgtccccgaggctgcctgtcttctagttgactttgcacctgtcttcaggctgccaggggaggaggagaagccagcaggcaccacttttctgctctctttctccagaggcagaacacatgttttcagagaagctgctgctaagaccttctagactgctcacagggccttaacttcatgttgccttcttttctatccctttgggccctgagagaagaagccatttgcagtgctggtgtgtcctgctcc

SEQ ID NO: 180917 - DNA, 1640 bp, Homo Sapiens
  misc_feature (215)..(243): n is a, c, g, or t
  misc_feature (759)..(790): n is a, c, g, or t
  misc_feature (795)..(1049): n is a, c, g, or t
  misc_feature (1484)..(1497): n is a, c, g, or t
tgggctgtggtacactatgccagttgggtgtaagtttggcatcaatatggtgatgtccctgaagcaggaaaccacaaacttgcatcaggaggggtgaacccagcccaggttggaaatggagcaggccaaaactcccaggctgatcagtaatgggatcttgcctatgaatagccagtgcactgcagccaggacaacagagtgagaacctgtctttnnnnnnnnnnnnnnnnnnnnnnnnnnnnnggtaatatttattatattattcaggtttcaactctgtagcaaaaatgggctctcatttccctaacttgagataacatagggtaggtccatatattttcattcttacagtggtcttttcatgggagtgaatgagttactctccactggtgattaggtaatactgtagaatgaagagttgtataatatattcatttacagctgtggattgtggtaaggactatgtccacagtgatattccaaagaattgggtttatatttgtgcttcatctgttaatcccaggtgtcctcatgttgctgaaatatttagatagctaaaatatcccttaatttcacagatgaccaggaagaaattaaccaaggttttattgactgccatgtatgtcccatgatgcatttctgagcaaatgcttatcctagagaataactctgtatgaataaaattgcttaattgagtctcttactaaataagtaactagtgccatgcttttgtgagctcttggtatggcccatattacnnnnnnnnnnnnnnnnnnnnnnnnnnnnnnnngatannnnnnnnnnnnnnnnnnnnnnnnnnnnnnnnnnnnnnnnnnnnnnnnnnnnnnnnnnnnnnnnnnnnnnnnnnnnnnnnnnnnnnnnnnnnnnnnnnnnnnnnnnnnnnnnnnnnnnnnnnnnnnnnnnnnnnnnnnnnnnnnnnnnnnnnnnnnnnnnnnnnnnnnnnnnnnnnnnnnnnnnnnnnnnnnnnnnnnnnnnnnnnnnnnnnnnnnnnnnnnnnnnnnnnnnnnnnnnnnnnnnnnnnnnnnnnntgagccaccgcgcctggcctgtttgtttttttaacatgatttttctctaagcttaaataccacaaggccaaagagaaatggtcataatttaaaccattattatattgttgaggtatccctagctattattatagcaaagtgggaaaaaagtgtttattctattgaagttatgtaatgatccgacattaatgggaatatagaggagtcctaattaattggtataatttcacaaagcggaatggtattccttggagagttaaagacattctctttagtaagtgtaaaccaaagggcattttctttattcctgcttctaattccttctagcccagtgaattatttctcttttcactggtaatgtgatgaatgggaattgtttattacattgaagtgacttgaagtgaccttttgtgctttaatgcaggttgacactgnnnnnnnnnnnnnncactgaatttttcacacctatgtctgcattaaaggctgttttactaccggaagttacatagacttcctgcagtcagctgctgtgccccagtgccttactgggtcctttgtagatttgccttaatgatttgtacaaatgactgg

SEQ ID NO: 180918 - DNA, 1816 bp, Homo Sapiens
  misc_feature (808)..(832): n is a, c, g, or t
  misc_feature (1495)..(1510): n is a, c, g, or t
ttggctcaatacacaatgaagattttccagcattaccaggctccagctataaagatccaacatcaagtaatgatgacagtaaatctaatttgaatacatctggcaagacaacttcaagtacagatggacccaaattccctggagataaaagttcaacaacacaaaataataaccagcagaaaaaagggatccaggtgttacctgatggtcgggttactaacattcctcaagggatggtgacggaccaatttggaatgattggcctgttaacatttatcagggcagcagagacagacccaggaatggtacatcttgcattaggaagtgacttaacaacattaggcctcaatctgaactctcctgaaaatctctaccccaaatttgcgtcaccctgggcatcttcaccttgtcgacctcaagacatagacttccatgttccatctgagtacttaacgaacattcacattagggataagctggctgcaataaaacttggccgatatggtgaagaccttctcttctatctctattacatgaatggaggagacgtattacaacttttagctgcagtggagctttttaaccgtgattggagataccacaaagaagaacgagtatggattaccagggcaccaggcatggagccaacaatgaaaaccaatacctatgagaggggaacatattacttctttgactgtcttaactggaggaaagtagctaaggagttccatctggaatatgacaaattagaagaacggcctcacctgccatccaccttcaactacaaccctgctcagcaagccttctnnnnnnnnnnnnnnnnnnnnnnnnngacttcccttttcttggggtatggctgtctcagcacaatactcaacataactgcagaactgatgtggctcaggcaccctggttttaattccttgaggatctggcaattggcttacgcaaaaggtcaccatttgaggtcctgccttactaattatgtgctgcccaacaactaaatttgtaatttgtttttctctagtttgagcagggtctgaattttttcatttatttccttttttgccagcagacagacttgagtctgtaaagacaagcaaatacactgacagaagtttaccatagtttctaaaatgtaaaaaagaaaacccccaaaagactcaagaaaattagaccacaaattttgcattgttcattgtagcactattggtaataaaataacaaatgtttgtgcatttttatgtgaagatccttctcgtatttcatttggaaagatgagcaagaggtctgcttccttcattttacttccccttctgtttttgaaaggcagtttcgccaagcttaatgcaagaatatctgactgtttagaagaaagatattgccacaatctctggatggttttccagggttgtgttattactgagcttcatctttccagaatgagcaaaacactgtccagtctttgttacgattttgtaataaatgtgtacannnnnnnnnnnnnnnnggacatcacatgaataaaggtatgtatgtacgaatgtgtatatattatatatatgacatctattttggaaaatgtttgccctgctgtacctcatttttaggaggtgtgcatgggatgcaatatatgaaaatgggacatttctggaactgctgggtcaggggactttgtcgcccctgtgcactaaaaagggccagatttttcagcagccaaaggacatccataacctcaagtgaatgtgatggggacttaaagaagtgaacttgaaaccaattcactcctgggctgtttgaacagcagcgtttcata

SEQ ID NO: 180919 - DNA, 1670 bp, Homo Sapiens
  misc_feature (113)..(121): n is a, c, g, or t
  misc_feature (472)..(496): n is a, c, g, or t
ttggaagaattttgagggagggagttgggatggagaaggtatggcctttatgcgagcatagatccttttcttcctggctggtaatattcttctctgaatttaatcttcctttnnnnnnnnntcctccatctattgtcactatgttccccaaacataaactaagttccaggctgtcatgatgtatctgatatatggggtaacccagcaaggtgtaccttcctttggtgagagatggctgccggggcaaagacgggctttgattcagagcaagcattcccacctgttccatggaatccccctgaagtgagcacaaaggtgccctgggctccctgatggtttattcccactcctttcaggctggtgatgcaccttacacacaaacacctaatgcaatgtctttttaaattctccaagtgggatgggagcatgtgagggaaattccaatccaaaacccattaatgtgctgaacgcnnnnnnnnnnnnnnnnnnnnnnnnngcaacaacaccttggacctctgtgttggggtttgactgacctcaagctgatattattggaccttgtgcagctttgataacccatgtgagaatctaggcaggaccagtggggcccaaatcttgctgctcttgtacttttaggcactggccttgcagactcacctttctccacctgccctggagaaaggtagggtgtgctgggcctgccccttgcaaatgggattcaccagtttcatttatttgactctactgccacagtgaaaagagcaaacagctattgggttgcaaacctcctttgacattaggaaatgttgactttgtaacaataaaactttggtcctagaaagacacggttgtcctgggagtttgtagtgttaagttgcaacaacaacaacaaaaagcaacaaaaccagcttaggataacactttttgttgcttgttcttaaagatgtctcactatgattaaaacccttttcattaatgtagtgaaagccacacaggagttccttcttccaggaggagaataccaagcacatcactttctctctgcatcagtgatgtcaaatacgcatcagaaaatgttcaggttttaggagctgtcctaggtgctgtttcatcattggaagcagtgagaaagagaagcactgctgcttgtctggatataggctgaggatgattgagagaagctgtgggaactgacacaagggtctgcataggtcatcctgtgaccctggggactatgttaccaactgacagacagatctttcactgtatcctagcagggcaggtagtccaccaagaaatgtgcttattggattgggaggtgtttatttgtagtctgctgtaacacgtgtgaaagagcaggagcgtcatcagcatatgacttgcgctggtcatccggtaaatggatgtgctgtagtcccagtgctaatcatttctctccttcacagtgggtggaagtttagggttaaatgtcctttgaatgtcacctggtgagtccttgacaccttagctcttcagaaacaatggttttgttgaggatggggaacagggaatgccgattttatatacatggtacacagagagggtgtcacttcagaaaatcttccagcatgttcttcagaatattaatttatatgcgaggtgaggttgggcatgaaagaacaagtcagcac

SEQ ID NO: 180920 - DNA, 1354 bp, Homo Sapiens
  misc_feature (212)..(240): n is a, c, g, or t
tacaacacctggccaacctttactccttattacactaactttatcgttagtgttctactctacccacaactctggggaaactgaggctggggtagcttgctggtgcactagtaattccaaacttgaacgggagaaatgcttattggaagcactgtctttatatagtttgcaagttgtcattactttttatttttagagacatgtcttgttcnnnnnnnnnnnnnnnnnnnnnnnnnnnnnccaccatgcagtggcatggtgatagctcactgcagtctcaaattgctgggctcaagtaatcctcctccctgtaatcccaaagtgctgggattataggcatgcaccagcacatccagctaattttttgttggtccttcttttaaaagcaggcatttctcagaattactaaggcattaaggaattttaagaaaatctgattccagaatactttgttactgtaaatattgacactgctccttaacattttttttctgccattttaacgaaaaccgtatactacatctgcttgctcaaatgcaaaacaggactctgcctcttagactgtgttgccctggaagcctgagatggggcattctatgactaccaatattactttcactatcaaccacatgaagtgatcatatgtttcagtaccagatggtgtactgatactttatatatattctcatctgatccttacagggctcatttgagggagataactattatttccccattttatataagagaaaattgaagtttagagatgtgaagcttctttcctaataagtagtttccaggtactaattggccaattaagttttaaatccaagcaacctgacttgtcagtgtaaacagtttctagttaatcactgtgatgctgaataagtatagtgggtagcacatctgattcaactgagatctaccttcttaagaaaaaacaaatctaggaagcttacagtggctaagatgggtcatttaaatgtaggtgatttataactgcacgtaagtctatttcgtgttgctttgttatcttacctctcgataagaatggcaaataactactcttactcattgtgcatgattttctggttttatgtgactgtgttcaaattgaggaaaccagaatccagttattcaacaacaataattttctctatactatgatttatttacattttttcatatagttctctcaattatatataaagtctacgaaagtatgacttatgtgtgaatttccttacctattctttaagctgttttgttttttaagagcctatttattgttgtactgctggttcctaaatagaacagttaagtagccactgagcaggaaaaatactgcaaattt

SEQ ID NO: 180921 - DNA, 421 bp, Homo Sapiens
aaacctggatatccagtagtaccagcagtagcataacgggtaaatgctggtgaaaagtaatctagccctggtaagaataaaagcacacagtgggtattcagtgtaatagtgacgtaaacataccatttctttgatatggtcactccactcttaaaaaatgtattataaggaaataatttcataaataaaaagatgtacaggatatttaacatgttccatagctagtaaaaattggaaacatttccccatctattaaattatttatcagtataaagaaataatatgagctactaaaaattataatgatgaaggcaaataatgagaatattacttaagtagatgtgcccactttgtaaacataatgtgcgtacatgtggaagataattgtattaggattctctagagggacagaactaatgga

SEQ ID NO: 180922 - DNA, 1298 bp, Homo Sapiens
  misc_feature (209)..(228): n is a, c, g, or t
  misc_feature (230)..(488): n is a, c, g, or t
ttggcaacttcatttccctgagcagtttccattgtaatcaatgtattgggtcagcaccaacctctacctgaggtaaaatatttaacgcatgtttctgtcagccttggaatatgctttgccctcttaggtttatatttgtgagtttggggtctgggttaggcccaaaactagtggcctagccttaggccaacctcttccatgaggtgtgnnnnnnnnnnnnnnnnnnnngnnnnnnnnnnnnnnnnnnnnnnnnnnnnnnnnnnnnnnnnnnnnnnnnnnnnnnnnnnnnnnnnnnnnnnnnnnnnnnnnnnnnnnnnnnnnnnnnnnnnnnnnnnnnnnnnnnnnnnnnnnnnnnnnnnnnnnnnnnnnnnnnnnnnnnnnnnnnnnnnnnnnnnnnnnnnnnnnnnnnnnnnnnnnnnnnnnnnnnnnnnnnnnnnnnnnnnnnnnnnnnnnnnnnnnnnnnnnnnnnnnnnnnnnnnnnnnnnnnnttgagccactgcacctggcccttccatgagttttatatccagctacagcctctgaggacccaattatatgaagttttctgaactgaaacaaaattcaggagcgtgaccagagaaaaggctccattttccccctcactgttgccctagtcctggggaaattaacatggtggacagttatctctgaccttctctcagcagttgattgtacaaaatgggggagtaagacataaccacaggttctcttcctgcagaaaagaagctggaaatggatcctctcttttataaaaatattccacaatgaccaatgtgaagcagcattatcgagagcatgcattctcagcaggggcgacttacccctaaggagcaacaactgctccttgaggatggggcaaaaaaaatatcaaatactcaatggtgcgtaggcttccaggggtccacaacacacagcactgctacagagcacatcaccagcgttcaaatgttatggattgtgtggggttgcaattaggaaaaacgaaatctctgaaaaggctctttaagggtaccataattaaagtatggttaaaaatcattggtccagggtaaggtatgattttaggagctgcaggattgatagctatttgcgtacacttctccatggagcattgacacaattcgtaactttttcaaaagaaaatagaatccaggaatttttgatatggaaagagttcagtatctaaaactaacagtaagaaaaaccttttaaaaaataatatcatccttgaggcacaggagtcttactctctctgaagtattccctcaagtacattt

SEQ ID NO: 180923 - DNA, 2143 bp, Homo Sapiens
  misc_feature (120)..(139): n is a, c, g, or t
  misc_feature (356)..(457): n is a, c, g, or t
  misc_feature (1916)..(1960): n is a, c, g, or t
tttgttcctaagagacagggtctccttatgttgctgaggctgaccttgaactcctgaacccacatgattctgcctccttagtagctgggactacacccacctcccgttccgttgtcatcnnnnnnnnnnnnnnnnnnnnggaaacaaaatcttcctctgttgctcagggtggagtgtaatggcacgatcataccttactgtaactgtgtaacctcgaattcttgggctcaagcaatcatcccatcttcccaacacagccacggcaccttgcaaatatcccccccttggaacaggtgaaattccaggtaccaatgccactcaaaggaaagcaatttggttcaggctttgaatttagnnnnnnnnnnnnnnnnnnnnnnnnnnnnnnnnnnnnnnnnnnnnnnnnnnnnnnnnnnnnnnnnnnnnnnnnnnnnnnnnnnnnnnnnnnnnnnnnnnnnnnatatgaggaagctgctcagttattgtctcgttctgtaacctggaaagctacatcgaagatgagctcttcattcagctttgatttgacctgtacccctggtgggggattgcactggcaacatttgggtctcagcaaaaaaaccaagcacacacatctttccttccatttattgaaaaacatctttgtaagatccattcattgaaaaacataatccatttattgaaaaatatctttgtaagatcacctgctaaatatgaaaatctgacttgaatttgtactctttaaagttgcgtatctgctctagtgggcaggacctagggcttaaaggggaacttcctttctccatttctaagaactgggactctaaaatgagaagctggttgtctgaagtaaccctgcaggtgtggttggggaaggtctgttttcttggatgaaggaactaaactaagcatatcagagcactgtcttaaccagttttatttccctggagatagaattcttttaaaaagagttagggagctggtaataggaagtgcctttcattataactacattttgcagagcttcatatttatatacaagcctcctaggtgatacactgttagcttgcagactttcctatgcttcatttctcctgttgctttcaaagaaggcaggagacacgtttaataacggagtatctggtgataagaattgcttgggcaaaccagctcatctggactctttctcagtcttggaagtgggaagaggaaaacttgtttccttcctgcttcttaaggatattctgagggtacactgatcaataacactaaatttggaatgaaaataccatgtgatgagtttagcctgctgatgcttccagtagatccttgtatagtttcaagatttaagttttccgatttcatataaatttcttaaagtcgaggaccttataagggtgcaatggatgtttgctaaatatgaaaaactgacttgaatttgcactctttaatgttgcgtatctgctctagtgggcaggacctagggcttaaaggggaacttcctttctccaattctaggaactgggactctaaaatgagaagctggttgtctgaagtaaccctgcaggtgtggttggggaaggtctgttttcttggatgaagggattaaactgagcaaatcactagaagtatgccctgtcccctgctcagaacactggggagctcaagagtgggctgcaatgtgcacccctcaggaatagctgtgaattgcaggtctactggctttttgctttttgtcttttgctgcaaggtaccccacgtacttaaccattctcaacagtgtaaatcagtgtcattttagaatgagatactcagcttgcttctaaagtcactgaattactgagtgagtctctcctttagagtcttcggcaaccaaattccagaattgaagagtctactactcagaggcaacaagattnnnnnnnnnnnnnnnnnnnnnnnnnnnnnnnnnnnnnnnnnnnnnccctagctaggaacacagagaatgttttgtaggatcactgggatattttccacaacttcctcttctctagcacacacatctgttgataggaaatatttgagggtttttccactaccaaatgggagcttcatggtcctggtgtcaaacactataaacctttgaccagctgagctgtgactgctg

SEQ ID NO: 180924 - DNA, 312 bp, Homo Sapiens
ttttaggcttcagtctaataaaaatattggctggtaaaagttgtgagagtcctttttaataaactgattcaaggaagcatttcccttgcctctgatctgaacggtgcattaaaggcttatgatcggctgggtgcggtggctcatgcctgtaatcccagccttatgttgttttactgacttcatagctgtaatttttaatggctatgtaatatatcatcctgtagacacaaagcaattaacttaccataaaccataatataagacattagagctgttttgaattcttcaaaattataatggatgaccacccaa

SEQ ID NO: 180925 - DNA, 829 bp, Homo Sapiens
ttggctgacttgtccacagggcagcaagaagatgcgccccttggtgtgtcccgagtgtctcctgtaggcagctgagctttcgcagccatccgggtgacctgcataggttcctgcggggtctccaacaaggctaatgacacagcgtgggtagtggaggagggttacttcaacagttccctgtcgctggcagacaagggtaagtttgggagccagttcccgagtggtgacccctgggggcagcccttggagtggggcctgtctgtcctgtcctccccctttcctagatctgcctcttggatctggcactggcccatcttgtcccagggttgtgggccctgatggctttctcataggcgctgggtggctgaaggggccacctcccccttgtgctggatttgggtgggctctgacccctggcacagctgtttcacccttgccccattcccaaaccactctcctgttcaagccaagctcttatcctcagtccttcacccaagccacagccctgtgctgctgtggcgctggtgactgagacagggagacccagtgtgagctggtcaactgcagtgcccactcttatcctggccctgtggccacctcaggccacctcagggggggactgccccccacctccctcctgtctctgcagggagcctgcccgctggagagcacagcttccccttccagttcctgcttcctgccactgcacccacgtcctttgagggtcctttcgggaagatcgtgcaccaggtgagagccgccatccacacgccacggttttcaaggatcacaagtgcagcctcgtgttctatatcttgagccccctgaa

SEQ ID NO: 180926 - DNA, 1407 bp, Homo Sapiens
atctgtccccaagggctacacctgctgcaccagccagatggaggagaacctggcccaccgcagccctgccgagctggagaccgcgctccgggacagcagccgcgtcctgcaggccatgcttgccacccagctgcgcagcttcgatgaccacttccagcacctgctgaacgactcggagcggacgctgcaggccaccttccccggcgccttcagagagctgtacacgcagaacgcgagggccttccgggacctgtactcagagctgcgcctgtactaccgcggtgccaacctgcacctggaggagacgctggccgagttctgggcccgcctgctcgagcgcctcttcaagcagctgcacccccagctgctgctgcctgatgactacctggactgcctgggcaagcaggccgaggcgctgcggcccttcggggaggccccgagagagctgcgcctgcgggccacccgtgccttcgtggctgctcgctcctttgtgcagggcctgggcgtggccagcgacgtggtccggaaagtggctcaggtccccctgggcccggagtgctcgagagctgtcatgaagctggtctactgtgctcactgcctgggagtccccggcgccaggccctgccctgactattgccgaaatgtgctcaagggctgccttgccaaccaggccgacctggacgccgagtggaggaacctcctgggtgagcccccacccgcgagagcggcctggaactgtcttggggagtgcacgactgggggtcctggggggcgggtggtccctagctcagagcttggacccagggacctgatcagggatgccctgacccgggccagatctgggtggtgctgcagggttgaggggccagggtgccttttgaatgtcctgagtgatgtgtgacttggggcagctgccagggagggagccctgtggggtcatagtttcttgtccttccccacttagcaagcacctcggtgtgcatacatgccaacacgtgtgactcatcgaggaccggcacttgtttaagctaacacatacatgcaccgtcacatgacaggctgacacatgcgaactggcgtgctcacttgctgacacacagtgggccagtgcccaccagtacagcgtgtgctcctgggcgcatgtgatgacatgagctgggctgacccgcatcaatgccaacacgtgtgtggtaatatgtacatgcttatccagatccactaacatgtacacatgcttacatgaggggggacagcatgcatctgtgccaacacgtgctagcatgtgctgacacggggccaacaggtgtgtgctaacgtgatgggagctgacaaatgcatgagctttacttgtacatgtgctcaccgtgcacgcaacacacacatgaactaaggtgtacatgggggggg

SEQ ID NO: 180927 - DNA, 1443 bp, Homo Sapiens
  misc_feature (519)..(527): n is a, c, g, or t
  misc_feature (593)..(613): n is a, c, g, or t
tactcactggtaaagacagtgattagtaagaccagtgaatttgatacagccacttgaaagaaaaaaaggctgtactacaaatacccatgaaaacagattttctctcacccttccctctgccctcaaggagacagttaaaacaaaactatgacagcatttggtgatttcccacaagagtactgtcaaacctttgagaaagtactgctgaatcttcagggaagacctgtagaaagttgaaggccatgagcgaaatgaaagtagttagtttcagagttagaacttctttatgctttctttcaggcataagtgcttttgtgctagttcaggagaaaacacttgcttacactgcttacaccatcaacaaaaataatttcagtatggtgagatttgtcgcattttagcaaaatttttaaaaagggttgagtgttaaccattctgacccttttaaaaaacatgcttaaacccatgtaaaagctgtaagtggactaaaaatacattaaaaaagaggtggtcataatnnnnnnnnngaacacttttatacataggattttattttgcactgctgtaacaatttcattatagaccaagggagnnnnnnnnnnnnnnnnnnnnnccaccacactgagtaaattactaaagcttttctactttgtaacaggatttcccatctgatagatttattgtcatatccccttcaaaacagacaagatgctcaccatattttaaagattatagaggttgccactgaaagaaaaattttacacagtcactgtacatcaaggttgaaaaactgtcctgcatgaaaaatatacttagaaatcatgtgaataaaagaaaaaagaaaacattattgtgtttaaggaaagattaaagtcctcataatgtgccatctaaatgtggatactcattcttcttggagtcgctaagatgtagaaatttcttgcttctgcccttttcactcattatactgtgttttttcccaacagtattcattaaggcaaacaaatccctttctgaagaggtcttaaggaaattgtggacaaagcaaacttttggcattaaaacaggttaacatatacaaagcctttgtaatatacattaagcatatttttcataaaaaagtgacaagaaaagatgaacatgcttgttaacaatgtcaaaaagtttaaaattcagtgtccaagcaattcctaacaatgcttctgtagctttaagctctaaacagtatagaatttatgcaaatgcattaaagaattcaagcttggcaaattacacccaagcaggttattaaactatatatacagaaagtaaatgataaatacagaattaaaagagtcgttctgtttccttatagccgtgaaaattgacaaagtttctgaggacagttctataatattaaacattagtttaccagggatgttgggccaacttttttgtacaaag

SEQ ID NO: 180928 - DNA, 1156 bp, Homo Sapiens
  misc_feature (598)..(606): n is a, c, g, or t
  misc_feature (672)..(692): n is a, c, g, or t
aaaaataacaatttgcaaagaaatcattctcttcttggtatagagcagtacctgtccttagttgccttaactttttgtactcactggtaaagacagtgattagtaagaccagtgaatttgatacagccacttgaaagaaaaaaagggctgtactacaaatacccatgaaaacagattttctctcacccttccctctgccctcaaggagacagttaaaacaaaactatgacagcatttggtgatttcccacaagagtactgtcaaacctttgagagagtactgctgaatcttcagggaagacctgtagaaagttgaaggccatgagcgaaatgaaagtagttagtttcagagttagaacttctttatgctttctttcaggcataagtgcttttgtgctagttcaggagaaaacacttgcttacactgcttacaccatcaacaaaaataatttcagtatggtgagatttgtcgcattttagcaaaatttttaaaaagggttgagtgttaaccattctgacccttttaaaaaaacatgcttaaacccatgtaaaagctgtaagtggactaaaaatacattaaaaaagaggtggtcataatnnnnnnnnngaacacttttatacataggattttattttgcactgctgtaacaatttcattatagaccaagggagnnnnnnnnnnnnnnnnnnnnnccaccacactgagtaaattactaaagcttttctactttgtaacaggattttccatctgatagatttattgtcatatccccttcaaaacagacaagatgctcaccatattttaaagattatagaggttgccaatgaaagaaaaattttacacagtcactgtacatcaaggttgaaaaactgtcctgcatgaaaaatatacttagaaatcatgtgaataaaagaaaaaagaaaacattattgtgtttaaggaaagattaaagtcctcataatgtgccatctaaatgtggatactcattcttcttggagtcgctaagatgtagaaatttcttgcttctgcccttttcactcattatactgtgttttttcccaacagtattcattaaggcaaacaaatccctttctgaagaggtcttaaggaaattgtggatcataaagacaaacttttggccaacttttttgtacaa

SEQ ID NO: 180929 - DNA, 1134 bp, Homo Sapiens
  misc_feature (55)..(75): n is a, c, g, or t
  misc_feature (141)..(149): n is a, c, g, or t
ttggaaatcctgttacaaagtagaaaagctttagtaatttactcagtgtggtggnnnnnnnnnnnnnnnnnnnnnctcccttggtctataatgaaattgttacagcagtgcaaaataaaatcctatgtataaaagtgttcnnnnnnnnnattatgaccacctcttttttaatgtatttttagtccacttacagcttttacatgggtttaagcatgttttttaaaagggtcagaatggttaacactcaaccctttttaaaaattttgctaaaatgcgacaaatctcaccatactgaaattatttttgttgatggtgtaagcagtgtaagcaagtgttttctcctgaactagcacaaaagcacttatgcctgaaagaaagcataaagaagttctaactctgaaactaactactttcatttcgctcatggccttcaactttctacaggtcttccctgaagattcagcagtactctctcaaaggtttgacagtactcttgtgggaaatcaccaaatgctgtcatagttttgttttaactgtctccttgagggcagagggaagggtgagagaaaatctgttttcatgggtatttgtagtacagcctttttttctttcaagtggctgtatcaaattcactggtcttactaatcactgtctttaccagtgagtacaaaaagttaaggcaactaggacaggtactgctctataccaagaagagaatgattctttggaaattgttatttttaagcttctgttaatttttccagaagtttagtgcgtttcttttccatactttctcccctaattcttttatttgaagaagagaacttaatggcaaataaacaacaaaccaggacatgcattttaataccctaaggaaaaatggaaccctcaaatataactcctcccacaaccaccctaatgtgcctcagtctggggcagcaggtggacttctcaatagttcttttccacattctctacaaatcacatctaccattaagaatatgttatgaatcctttctgttaattgagaaagcaatgttattgtctgtgatttccagtctttgctcattttattatccctgtcaaataatgtaatattggtacctgcagttgaatttgtaatattgtaattga

SEQ ID NO: 180930 - DNA, 2151 bp, Homo Sapiens
  misc_feature (1596)..(1616): n is a, c, g, or t
  misc_feature (1681)..(1764): n is a, c, g, or t
actttgtacaaaaaagttggcaaggtcgtattacagaggtgcagcaggagctttactagtttacgatattacacggagagatacattcaaccacttgacaacctggttagaagatgcccgccagcattccaattccaacatggtcattatgcttattggaaataaaagtgatttagaatctagaagagaagtaaaaaaagaagaaggtgaagcttttgcacgagaacatggactcatcttcatggaaacgtctgctaagactgcttccaatgtagaagaggcatttattaatacagcaaaagaaatttatgaaaaaattcaagaaggagtctttgacattaataatgaggcaaatggcattaaaattggccctcagcatgctgctaccaatgcaacacatgcaggcaatcagggaggacagcaggctgggggcggctgctgttgagtctgtttttactgtctagctgcccaacggggcctactcacttattctttcaccccctctcctcctgctcagctgagacatgaaactatttgaaatggctttatgtcacagaagactttaatccgtcaaattcttgtataactttgaataaatggttaatgttcacttaaaagacagattttggagattgtattcatatctatttgcatttgatttctaggtcaattgatgtgattatttttgttaaatgttgtcttgtgcccttaactacgaactgaattgtattaaacactacaaagtcatcttgagtattttaaatcggtttgtgtagttaggtttcccaacatctgtggttacctaatgtttaatattatagaactgtcctcagaaactttgtcaattttcacggctataaggaaacagaaggactcttttaattctgtatttatcatttactttctgtatatatagtttaataacctgcttgggtgtaatttgccaagcttgaattctttaatgcatttgcataaattctatactgtttagagcttaaagctacagaagcattgttaggaattgcttggacactgaattttaaactttttgacattgttaacaagcatgttcatcttttcttgtcactagtccaagaaaaatatgcttaatgtatattacaaaggctttgtatatgttaacctgttttaatgccaaaagtttgctttgtccacaatttccttaagacctcttcagaaagggatttgtttgccttaatgaatactgttgggaaaaaacacagtataatgagtgaaaagggcagaagcaagaaatttctacatcttagcgactccaagaagaatgagtatccacatttagatggcacattatgaggactttaatctttccttaaacacaataatgttttcttttttcttttattcacatgatttctaagtatatttttcatgcaggacagtttttcaaccttgatgtacagtgactgtgtaaaatttttctttcagtggcaacctctataatctttaaaatatggtgagcatcttgtctgttttgaaggggatatgacaataaatctatcagatggaaaatcctgttacaaagtagaaaagctttagtaatttactcagtgtggtggnnnnnnnnnnnnnnnnnnnnnctcccttggtctataatgaaattgttacagcagtgcaaaataaaatcctatgtataaaagtgttnnnnnnnnnnnnnnnnnnnnnnnnnnnnnnnnnnnnnnnnnnnnnnnnnnnnnnnnnnnnnnnnnnnnnnnnnnnnnnnnnnnnaaagggtcagaatggttaacactcaaccctttttaaaaattttgctaaaatgcgacaaatctcaccatactgaaattatttttgttgatggtgtaagcagtgtaagcaagtgttttctcctgaactagcacaaaagcacttatgcctgaaagaaagcataaagaagttctaactctgaaactaactactttcatttcgctcatggccttcaactttctacaggtcttccctgaagattcagcagtactctctcaaaggtttgacagtactcttgtgggaaatcaccaaatgctgtcatagttttgttttaactgtctccttgagggcagagggaagggctgagagaaatctgttttcatgggtatttgtagtacagccttttttttc

SEQ ID NO: 180931 - DNA, 1148 bp, Homo Sapiens
  misc_feature (198)..(290): n is a, c, g, or t
  misc_feature (1042)..(1055): n is a, c, g, or t
ttggtgttttcataacaaccaagcagaagtgaagagaaaagaggaggactgatggaaagacagactctggacagctgcacggcttgtgaagtgagctaaatgcaccacatgatgagatgctcctgggcatttctccctatctgtactgctgtcttgcagctctgaacggtgcaacgtaatggcgacagaaagtatctnnnnnnnnnnnnnnnnnnnnnnnnnnnnnnnnnnnnnnnnnnnnnnnnnnnnnnnnnnnnnnnnnnnnnnnnnnnnnnnnnnnnnnnnnnnnntcacacacatttgggttagaaaatctatggagacttcatcaatggtactatgttattagagaaatgctttaattttcatattccaatcagatggcatcttctatcccagctggttgggaagggattgaagatggtagcaagtgctgcactaagggcactcgcatttggtcattctcttgagagctaggaggggtcagcctgaggccggagaggaagggcttttgcctggggtgagagggtgagagacttgacctgaaagcagctgctgcccctgaggtgcagccagagtcctgtgtgcggacagagagaatggctaatgatgctccgcgtggaattgcctattgttttatgccacctgatgtgtctgcatgagaggtttcctttttgttcctttttaagctgctgttaaaccaaaaccatgttgtgctactgtgtcagccttttcattattgcaaattttacttttactatttaagtgaatgcatagaatccaatttgccaaggttctaaaggcttatgaggtcctgaaggagccaggccttgtgatggagtaggtgacacaggcctggttgtcctgtcagcagaagggaaagcaggggctgggctgaaaggaggacacggagggctctgctgaggttccttcctgggttccaccaacagggacagggagtcacttgccttccagttctgtgctgggatggcgggacagcacttggcttgcttggccagctgcgtcatgagtttgatttggnnnnnnnnnnnnnngcagctgcttcatatgctctgctccagcccctccccaacagctggtagcttatggtttcttcaagaggaaagtagactttatgctgtacattt

SEQ ID NO: 180932 - DNA, 943 bp, Homo Sapiens
ttggggatatttaaattagatttttcatagtctattgttttgaactatggattctgttttatggtggatacctaaggtttatataatagttgctggaaaacttaaagtagctggtgagcttcctgttatgtcactattaaagaatgatggctgatgtaactctgcccctgaaatctacaagggtcatgcccaaattaatacaggttaacctttgtagaggtatatatgttggcattatttattgacatttatgcttcaagcatgtcttattttatgtaattttaagaaatactctatttaacttgtgaaatatacctaaaagcatactagttagctcttagactctcacttagggagggtaaagaaacatcactgatgccaatatgaagatctataaacaaatcctttgtttagaacttttttctcttcgtgcacctcacaacacacttaccatggtacatatttcttaatgccactaagaaaggcaagatagtgaacgcagaattatttatgtggtatagtgtttgttttcctgttttagtgcttttgtagctaaaacttactggaactgcatcacaactacatttgcagtctcagtgggaggtggactagcctgtggttaattttagagcttaaaagtttataagcattaaaaacacatacatgtattagaatcttgtctaacccctcacaaaggatgatggtgatcagcatgccatcttttgaagattaattctaaaattgaggactctggtaggttgttttatttccttcccaaccagccattcatttccaattgttctgcctttgaaactttttgtgaaaattgcctgtaccaattgcattggttgcgttgctctgatttaaatgccaaaaacactaaatatttgtgtagtgctgttaaatgagtttttgatatttccatcaaaatgaatataaaatt

SEQ ID NO: 180933 - DNA, 1835 bp, Homo Sapiens
  misc_feature (211)..(220): n is a, c, g, or t
  misc_feature (1482)..(1516): n is a, c, g, or t
ttggctctaattgaaaccaagcacacgtaaggtacaatatgttagactctgtgattttgttttcaaaatcctctgttatggctatatttaaatttattttaaatattcctgtatgtattcatctaagcatttgggcatttggagtcttaatatacaagaaacacgtacttaaatttttatgcttatcaccgcaatgatggcaaacagtgannnnnnnnnncatagtttaggtgtcattgttgccagcacctttagtgctcagtcttcagtgaaaaatataaagtgccaaaaaaatcttgcaagacagaatccatacttaacactctttccaagacactgtgaccatgtacagtagctatttcctgatgaccaaatctctcaacgaatcatgttattaataaatatttttagcactcatcagtattctccaatgtgaccttctcattggagtacacagaaggaaagcaaagaagagcatctgacttctagctctggcttacagcctctctaccaggccgaagcaagagacccgcggcagcagctccccgccactcagacctgggtggtgataacctcaaagaatggctctgttttctattgacagaaaacccacttgattttgcttctgagttagcagtcagaagaccctctaagtacaatagaagtgctcttaacggactctgcctgtgtgactcccaggccccggagtctccatctctctcgtaagccacctgccacagcacagctggaggctgttctctggtgttctcagcgctccggctccctccctggagttgtgcacccgtcccaaactcctccatgcaagttctgcttcctcttataagtacacaactcagttaagtattcacatacacacagaaaatacgggtgtgaaaagaaagaattttctgtaaaaattaagttgaatactttggtaaaaagtgataaaggctgagttgccaataaaagttgcttttaaattaggtgtggctgggaatattataagatattggggaaaatatacaaatcaagaaaatttctgagcttagattgcttcatagatttatttaagtactcatcccacctttaaaacctctaaactgagaagaagggacccaaatcatgttattggtgtgatttatgtgagaagtagaactgtagtcattggacccttaggcaaaggaaaatccgtgtctttatatcagaagatcggcaaacgaatgtatattacacagtttaggttatgattccctactttaacctacttactttattaaatgaccaactactgatactgatcacaatagttattagagattctaatttagttggaaggttctaatcactttcattacaggcatttgaaaaatagggattcatttcgaatatattagccaggagcatagttagatgttacccaggccatttatcatcctgttaatgatgattttcccgacccttgtgagatcagcgtgacaggannnnnnnnnnnnnnnnnnnnnnnnnnnnnnnnnnngttttggttgggtgctgccaggtggcaaaggcatatgtaaatacatctgatctgcatctttatttcacagttaactaaaagtaaaaatgtctattctgattccatattgattttgtctaagatgtaaaaatttgagttcatctttggccaaaacctacctgaattaacatacaaaatatttgatttttaaaatttaattcaaatctcaaaatcaattaagtattctcagatcctatatcttggttaatatgctcctttatactttaaacatggcaaccttttggcctaacacactgtttgttcatggaaaaaagctttt

SEQ ID NO: 180934 - DNA, 1398 bp, Homo Sapiens
  misc_feature (161)..(186): n is a, c, g, or t
  misc_feature (230)..(250): n is a, c, g, or t
  misc_feature (656)..(666): n is a, c, g, or t
ttggggtttcccatttcttacctgtgatgtgttttacccagcacctccggacactcaccttcaggaccttaataaaattattcacttggtaagtgttcaagtctttctgatcaccccaagtagcatgactgatctgcaatttaaaattcctgtgatctgtnnnnnnnnnnnnnnnnnnnnnnnnnncaaaacccacaagcacttatcttggctactaatgaagctctccnnnnnnnnnnnnnnnnnnnnncttcattgttgattgggtattttcttcattcctggggagtactaacccaaaagcgtctgtctcttgttttctagtccagtttgaaattaatttaaaaaaaaggaatactgtatgtgaaattcatcttgggctttcccctaaattgcaaaataaggccatgtgtaaaattttccctaaaactaaaatatattaatgcatgtttgaaaattttaaagcaccatggtcaaaaccagaagctatattttgcatatttggactcagccatccattaagaacccatgttgtcctctggacatatttatcaatataattgggttttaaatagtataaaagaaaacttgtgatctatataatttatgtatcaccttcattgtaaatttagcaggaaatgcatcacaattatgannnnnnnnnnngcaccagtgaaacaataaagatgctattaacaattttggagctttttttcccctttcatactatctttaattgataaaaagaactagtagtatggctatagagtttaatagtcattctcatatattcacagagctcacttaactctagttttaagcacttgttgaacaaggcagcatctactcttttagtcatttataccccttttctttcctcaactttaccctgcttttcccaaggcatgatgaattcacataaaccccccaaaggctcaccactgatactagttacctactatataataaaccatcccaaaacttactgtcttaaaacagcaaacatttatctcacaggtctctggatcaggaatttgggagcagcttagctggtggttctggcaaagagtgtggtgtaaggttgcaaacaagatactggttggggctgcagtcatctgatgctttgactggggctgacttttctgctcactgacctggctgttaggcagaggccccagttcctcttcttgagggcagaggccccagttcctctccttgagggcagaggcctaagttcctttccttgagggcagaggccccagttcctctccttgacggcccttccatagagtgtcctcacagcatggtggctggctttcccctgagtatgaaagcaagaagaaaccacagtgcctttcagtggcctccctgtggagtgacatgctcattttgccttat

SEQ ID NO: 180935 - DNA, 1445 bp, Homo Sapiens
ttggccagaatctgcaccacccccattcttcaacccaacccccatccacaccagaacactcacccccagttaatgctgctcttttcaagctcttcctctccgctcccctcaccccttcctgcccgccccactttctgcacagcatctgtctccccctagctgccgcctgcctggttttacccccactcgccatgtcactgggtgctggcaggctccaggcacatccccctccaagtattttttaaaattttttaggcttgctgacacccagttgaacgagctggactttgtcattagacacgggctgagcttgcagtctcagaaggcaccaggctagttcggaacacggcttggattaacttggttcggcacacacactcctccccgcagttcacagcttcctcctggagagagagagggccaagggcagaggacagcatgggctcatccagccttctgggatccagatccgcccctgggcttctgggggctcatctggcagacagaacgccctggccgggaaggcgaaagacagtctgcatattcccaagacagccctcccccttactctggggaaaggagcttgaagacagcattcagttagtatctcagaaagacagaccctcacccctgcagtgtgctcacctagccctggtgccgcggcaggcacagtcaggtgctaaaatcctgttgctgctttagcagacacactcggtgaacttgagctctcggaggcagtttctagttttcaaaaaatagaaggaaacaagcacgcgtggagcatttccctcatattgcctcctgcatgcccacctgcccacctcagggcagtccaagggacagggttaggttgtcttgcgctgtcaggggcctgccttagggggtttaaagccctttgcccagcggccatgcacagacttgctgactccaaagtcatcaagcaggccctaaacagcagctggatctctctcagccagagcattcctcctctctgctctgctctcagccaagccctgggccctgaagcccagaagcttccaagagccaccttctccctgcttttctcagtttttgcatccatgaggtgaggacagttcactcaattccaacttgaggaataattaataaaaaggcagtaaactacttcacacatctcaaaacacagtctgctctttccacatagcaacaactgccaacttgcaaagaaaaggctccatgggctgtaacgcagcctctctggtggcccagacttagggaggacaaatcagattgctccttgttatgaatgacctcacattccatggtgacttccctgctcaaggtgatggcccaaagctgcaatgcttgtggtcagatagatcagaaactttgccagcgaggactgcctaggaatgctggttagccatgtgaaacattctataccccccttggggggttttaaaggc

SEQ ID NO: 180936 - DNA, 1349 bp, Homo Sapiens
  misc_feature (366)..(630): n is a, c, g, or t
  misc_feature (897)..(912): n is a, c, g, or t
  misc_feature (1293)..(1302): n is a, c, g, or t
ttggcaatttttaaatcttgctttttacttttcacattataacataagggttttcttttaagattaaaagtattttttcatattatacatatttctagaaaaatttaatatagaaatatgtgaagtaaagtgaaatttctctctaataccatctgtcactgtacctaatactagaaagaaaatttaaaatattaaagtatataaagtagaaagtgatgtttcactgttatacttctaccagtgttacccactgtttgtttttttcccttttgcatatcagtggtatctgcaaattactgaaatggaattgtactataaatacacttgtcaagtttgcttttttcacttgttaatatattttcagtnnnnnnnnnnnnnnnnnnnnnnnnnnnnnnnnnnnnnnnnnnnnnnnnnnnnnnnnnnnnnnnnnnnnnnnnnnnnnnnnnnnnnnnnnnnnnnnnnnnnnnnnnnnnnnnnnnnnnnnnnnnnnnnnnnnnnnnnnnnnnnnnnnnnnnnnnnnnnnnnnnnnnnnnnnnnnnnnnnnnnnnnnnnnnnnnnnnnnnnnnnnnnnnnnnnnnnnnnnnnnnnnnnnnnnnnnnnnnnnnnnnnnnnnnnnnnnnnnnnnnnnnnggcattttgatttgatggtgctatgtggtagtgtttatgtactaaaaattttcagaaaattgtattaactcacagactagttctgaaaaatgtatagttgaggaaaataaccattaaaatatagtatacttaagcataattatttttttaaaatagattctattgtatttagactttaagaagctctaaaacttactgtaagatcttgggcaacttctgttctgcttctccatctataaaataagaatagtagtacctgttgagtcnnnnnnnnnnnnnnnncttgagaactacatgagaatacataaatacttagccttccggcacacagtaaaaggctcaaatcttagctattaaagggtaagttaagagtaaagaaaacagattactatgtaaaaatgtttgaactgataagaagatgttaattataggactgtttatatatctgtttcttcacctgccactctttgtaattaaagatccctttaaacatattactcacttaccatcagagtgcactacattttcttatagaaggaccaggaaattgtgaggtttagtacccaattctgttaacaacttgtgtatatttggacaggctacttagtttctttttcttcctaagtaggagatgggagggaataaattatatcttgaacttannnnnnnnnnaatatctcctgtgttgtagattttttttaaaaagtgaaccactttta

SEQ ID NO: 180937 - DNA, 702 bp, Homo Sapiens
  misc_feature (82)..(97): n is a, c, g, or t
  misc_feature (105)..(134): n is a, c, g, or t
  misc_feature (136)..(150): n is a, c, g, or t
ttggataaatgaaaaagttgatctgtttattttctctgttcctgtatgatgattaagtcattgagtagtgtatggcagtaannnnnnnnnnnnnnnngagatagnnnnnnnnnnnnnnnnnnnnnnnnnnnnnncnnnnnnnnnnnnnnncctctaaatatattgtgttaatttatagaaaaattgtaatttaaattacatattcatagtcttgcctacttgcatgagcatgtttttattgcttctaacctggattgaaatctatgactttttataacagtcattgagtctgtttcaaaggaatcttgtggtaagtatttttgcatgatgtactcaaggtatcaagtttaacaattgactttttttcattggaaagcatatgtgattaactagcatggattgcttcttgacctgcttgttttgtgtttgtctttttcttctaatataataaccagggattaatgaaaatcaagttccatcctcagacaagaggtaaagttcacacattcttcccatgtctgttcaaaaaagaaacctattcagatataagttaagctaatttagtaatcctataattgtcctctgagagatttagatggatgggccacttcacagtagcagccaactcacgggagcacctgggcaacgctagtggacttttttgtagtgagtgtgttgatcttagaaaatgtaaatataagg

SEQ ID NO: 180938 - DNA, 1426 bp, Homo Sapiens
  misc_feature (646)..(654): n is a, c, g, or t
cttgcacttaacatttatttttagagtaatatatgggtatagttaactctatgtaaaccaatactaaaattctgttatgtttgcaggcagagagacatgttcaaagaaaaatacataacaaaatttttaaaatgtttaagcaggactcagaattttaagactcaggattttatttatacttgtatataatttttattatacccatgaaaatgaccctatagtcaatagcaatttacttgtacattttaaagtaactaaaagtgtagaatcggtttgtaatacaaatgataaatgctggagttgatggatatttcatttgccctgatgtgattaatacctattcatatgcctgtatcaaaatatgccatatatggcataaatatatacacacactatgtacccacaaaagttaagaaaaatatgtttaaataagaataaaaatttaacctatgggaacaatgttctttaattaagttctttagtttaaagtcactggcaagagaaattattagagatgttagtccactctgttattaaatagtacattgttactatcttttaccaacacccttgagtaaggtgggataggttgaagttagtggcatgataatacttcactgaatgcacaattggtcttaacatgttnnnnnnnnngtttaattaaaaaattaagttcacaataatctaaaattttttaaatgtgctgcattttattacataaaagtagttagtaaaatgatatactactaattttaatttaattttaactaaaataaaagatattttcactagaatgcagaatattcctctgaacacttccctcatacatcattcaatattataaattaaacacaaagagcctctccacttagatttttatcatgcatcctacattgtaatgtctttactcttccatagaaaaggtaaaaaatattgcccacctaacaaaaaagaatgtctcatatctttgatgaagcagcaattgatcacatgctttcacgtgtgaatagaatgaaaagcatgaagtaatttgagttgaattacatcattcactttttaaaaattttgtaattttttcaaagaaaaaagtatactttaaatgtaattataactaaaaatatttctacctcttttaaagttatatacaaataatttatctaccaactttaattttggattattttctgtactcagcacactgattagttcaatgtctaaaatgtcagtgccttagatatttctactgtgaattctctgatatttacacacacttaattttggattaaatttcttttatacttactgcatctgcaaaaatatattttagtataaatcccctggtgttttctaagcagtagtttttgaaaaatgtttttccaaatatattacatttgcagtttttctccaatccaacttttttgttaca

SEQ ID NO: 180939 - DNA, 1260 bp, Homo Sapiens
  misc_feature (362)..(385): n is a, c, g, or t
  misc_feature (785)..(793): n is a, c, g, or t
  misc_feature (997)..(1040): n is a, c, g, or t
ttggctttgatcaacatcagggagtttatattggagaaaaactgcaaatgtaatatatttggaaaaacatttttcaaaaactactgcttagaaaacaccaggggatttatactaaaatatatttttgcagatgcagtaagtataaaagaaatttaatccaaaattaagtgtgtgtaaatatcagagaattcacagtagaaatatctaaggcactgacattttagacattgaactaatcagtgtgctgagtacagaaaataatccaaaattaaagttggtagataaattatttgtatataactttaaaagaggtagaaatatttttagttataattacatttaaagtatacttttttctttgnnnnnnnnnnnnnnnnnnnnnnnngtgaatgatgtaattcaactcaaattacttcatgcttttcattctattcacacgtgaaagcatgtgatcaattgctgcttcatcaaagatatgagacattcttttttgttaggtgggcaatattttttaccttttctatggaagagtaaagacattacaatgtaggatgcatgataaaaatctaagtggagaggctctttgtgtttaatttataatattgaatgatgtatgagggaagtgttcagaggaatattctgcattctagtgaaaatatcttttattttagttaaaattaaattaaaattagtagtatatctttttactaactacttttatgtaataaaatgcagcacatttaaaaaattttagattattgtgaacttaattttttaattaaacnnnnnnnnnaacatgttaagaccaattgtgcattcagtgaagtattatcatgccactaacttcaacctatcccaccttactcaagggtgttggtaaaagatagtaacaatgtactattaaataacagagtggactaacatctctaataatttctcttgccagtgactttaaactaaagaacttaattaaagaacattgttcccataggttaannnnnnnnnnnnnnnnnnnnnnnnnnnnnnnnnnnnnnnnnnnngtgggtacatagtgtgtgtatatatttatgccatatatggcatattttgatacagggcatatgaataggtattaatcacatcacggcaaatgaaatatccatcaactccagcatttatcatttgtattacaaaccgattctacacttttagttactttaaaatgtacaagtaaattgctattgactatagggtcattttcatggggtataataaaaatta

SEQ ID NO: 180940 - DNA, 952 bp, Homo Sapiens
ttggataggtgtgagtcactgtgcctgacaaatataagcctttaaagagaagaaggttttcattttgaagacaaacattaggtacataaagagggttgtagtgtctttacttgtatcacagattttattgtacacattatgtactaaaggaaaatcctgaagcagtgctcaaactttgatcaacatcagggagtttatattggagaaaaactgcaaatgtaatatatttggaaaaacatttttcaaaaactactgcttagaaaacaccaggggatttatactaaaatatatttttgcagatgcagtaagtataaaagaaatttaatccaaaattaagtgtgtgtaaatatcagagaattcacagtagaaatatctaaggcactgacattttagacattgaactaatcagtgtgctgagtacagaaaataatccaaaattaaagttggtagataaattatttgtatataactttaaaagaggtagaaatatttttagttataattacatttaaagtatacttttttctttgaaaaaattacaaaatttttaaaaagtgaatgatgtaattcaactcaaattacttcatgcttttcattctattcacatgtgaaagcatgtgatcaattgctgcttcatcaaagatatgagacattcttttttgttaggtgggcaatattttttaccttttctatggaagagtaaagacattacaatgtaggatgcatgataaaaatctaagtggagaggctctttgtgtttaatttataatattgaatgatgtatgagggaagtgttcagaggaatattctgcattctagtgaaaatatcttttattttagttaaaattaaattaaattagtagtatatctttttactaactacttttatgtaataaaatgcagcacatttaaaaaattttagattattgtgaacttaattttttaattaaac

SEQ ID NO: 180941 - DNA, 1937 bp, Homo Sapiens
ctttgtacaaaaaagttggcttactcaaggttgttggtaaaagatagtaacaatgtactatttaataacagagtggactaacatctctaataatttctcttgccagtgactttaaactaaagaacttaattaaagaacattgttcccataggttaaatttttattcttatttaaacatatttttcttaacttttgtgggtacatagtgtgtgtatatatttatgccatatatggcatattttgatacaggcatatgaataggtattaatcacatcagggcaaatgaaatatccatcaactccagcatttatcatttgtattacaaaccgattctacacttttagttactttaaaatgtacaagtaaattgctattgactatagggtcattttcatgggtataataaaaattatatacaagtataaataaaatcctgagtcttaaaattctgagtcctgcttaaacattttaaaaattttgttatgtatttttctttgaacatgtctctctgcctgcaaacataacagaattttagtattggtttacatagagttaactatacccatatattactctaaaaataaatgttaagtgcaagaaagttatggactgtttttgtgtgagtgtgagtttgtacctattttcaaaagaaaagagcaatattggaacaaaacaaatattttaataaattaatgtactagacaactgaaaacttcaaaaatgctgaaagtaaatgtatactctgctttgtattgaattcattactgccaaatcttctgacttatgattcagaatctctccatgcaaattatgtttttacttgcctgttagtcatgctagacctataattttcttgtttcttaccatttttttcttttatactttatgaggtattatgtgagctgttcatggattataagaatgatttttataaaattcagtactgcacacaagataagttttagatgtatttccaaaattgtgtattaattatatttagttagaacattccatttgttcttttaattggagaatcctatataagcctatatttcttattcttttctcttgttatgattgacataagtaaatttatttatttattgagccaatttgttcaggtaagaactaggaatgcttcataagtcatgaggatgtttttatatatatatgtggcaaacaaatatgacagtgcttgctgtgtaacagatgttccataataacctgtaaacattcctgctggagttagtttgtaacttcaagtcagagatggaaaataccaatagtgaagaaataacattgattcttcatgtgcagataacattttttttccatgctgcaaagctaaattttgctgaatttaaaaagaaattttggttcttttatttcctaattacctttagttttgtttgtcttattatgtgacttctgtgtattcatcacagcccttctccttctttttctatgtgatggctacactttgctcactgttgtcttcatgccatgtcattttatacagtactttgtaggttttgatgaggaagttggtatttttaatgcactcaaaaattgctttttattggagagtacttatcaatataactttctgatcagttaattaagataaaaggcatacattgtccacaggtgagaggattaaatcagttagcattatttttttctgtttgtaaaaggaaaaacttattaaatttttaaacggagttattaaacagagtttcactcttattgcccaggctggagtgcaaatatattgtggcaaatataaaatttgctagaaaatacatcttagaaattaagttataagagagcaaatggtaagtggagaattttaaatttaattttctatgatatagcataacatacatttccatgcagaatcttttatttttaaatgtgaaatttaaaggttgcaaaat

SEQ ID NO: 180942 - DNA, 834 bp, Homo Sapiens
ttggaaagttagctttatttattagattgtaatatacacctgtaattctactcttgatttggtagttgggtgtcaatttttaatgtttaatttcccaagagctttcactatgagtgttagataatatgacccaagtttaatgactaagtgaacaattgtcaaatgtagcaaaatgaaacaacttttaaaatctgagtcaccattttaaaaaaattgttatatcatttgagacattaacagatttttggtgacatccttttagccagtgatgacatgtaatctgtgtaaatgtgtagaaaattgaaattgttgaaaagaaaaatttgagggaatactggctaccatttactgagtacttgctatgttccagacacctttttaggtgctttacagaattatccactttaatgcctataacaatcatttgttacttgtcttcacctcctgttttacagatgactttcagtaacctgtccaggtacataagactcataagtaaaacttagacataaatctgactccaaagcctgtgcttctttgactacagtataccctgtgttatttaacctcagttgagattcttctttcgtaaacctggagtgatgtataacagtaagatttgagaacttgctccttgtcaggttttatgcctgggatttaacaggtctatctcatttggcccttattaacagtccctaggagtagacactattttcttcccatttgacaagatgaggagtttaaggtaagaggttaaataacttgcctgaagtctctcagccagtaagtatggctctgacatttgaactggcttagtaattgcagagcatttgc

SEQ ID NO: 180943 - DNA, 1991 bp, Homo Sapiens
  misc_feature (333)..(341): n is a, c, g, or t
ttgtacaaaaaagttggctgattttcccttaaataaattttaaataaaatagaattactacaattctgcaatttcatactacctaaaaaagactagatttgaaaatgtcaagctgatttactttattcacatggagaaaagaatccacaaattaaactgagtccttcactggcatgccagttgactattattagctgtcataagtaactcagccatttggaagcatttcctggacaaaattacattatacctgtgaagaaaaatatagaagctttcaagctgtcattctgttttggccctgtgtgaatttggtatattaaattgactcttgcnnnnnnnnncagtagagttttctttttaatcaatcaaacgcctacatttctggaagaaaaagtccaattagatcattacaccttaactaagaaggcaaatcttataaattttgcttgaattgttcttactcaaaactaccttagaatatggtatcttatgaaaatataatattcttaaaattttggaggataaaatgaaaagggtataaacttcaattagaactttaatcctaaaatattgttattcttgtatttttggagttttccgtcccttacaatttctccaaattggtctattccccaagatatccactgttttctacagattttagaatataaaattaaacatatcaacctaaaatctagctatgaatgttatttcaagagttttatatttttaattggctttttaaaaatatgtaattccaatattatagtgaatgttcagtaacttttgttgaaagataatgtggtttaggcttgctaaagaaaggcttgctagaatactaaatttaccttgttatttggaaagagaatctgctcctataacgttttaaaaatccccaaagtcccagagattagcacttgctatggattttggaactatggttcaagtctaagacaaccaatatgaataagttcaatggagaaggaagaagtagcattcagcacaagaaactgtagattgtttctcccacttgttactgcatctttgttcatttcacccatagcattgcatttgatgtctgaagtaattaccacaaaataaaggtaaactacatcttccaagatgtaccaacagaaaacattcgtctaattttgtcaacattgaatttttaggatttaaatcttgtcttaatgaagactctagggctaaaattcatggtcagttccataaaatgcatctcactttatttctgaatttttcacaacccctctattttcttacattaaagaacatctggataagttagaatagtgccaacttgtttgatttgttatatgattttcttgttaatgtgttgagtatgggaaataagggctttctgtgtgtcttgactcacaggaaaactgaaactgccaagggaagcaacattaaaacaactgggatagattgaatacatttgaaaaaataatttctggaaaaacgctatacatgctttttatgtttatatcttctttcttattaagacatgaatcagatccatgtggcattcaaaacaaatttattttggttatattctttacaagtcataatttttacctaaaattgtggaatatgcatgtgaattacacatgtgtagtaataaactcaactattgaatttttcctgtttcatttctaaatgactgaactgatggtaaacaaatttaatgaagtcagctaccatgttgaaaataaggatattagaactgatttcatacaatagaggtgatctgtgcattatccataacaacgttttctttcactataggaccacagacaaatatttatgtaaataggtatttttgtgtgatatttggtggtacatataactttttttagtgtttcacagcattattatttcattttatttgtattgaataatgtttttaggtccaagtagacttgaattaatgtcataattgtcagtattattgaaaattatgtcaactgtac

SEQ ID NO: 180944 - DNA, 1245 bp, Homo Sapiens
  misc_feature (880)..(991): n is a, c, g, or t
ccaaacatagaatcactttaaaatttcatgatctcagcatgttaaaatctttcaaagatttgttaaagatcattgaatatattattaatatatgaatattctgtaaaataatacatactatattaactataaaaattaataatattgtcaccactactaataatcactactaaaatgggcagcaataatactattagtaacagtaacatctatctaaacatgacaattgttagaaataactttagtgataatggtacctaaaaattgaggttagcctcattttcctgagccatgtatacaaagagaaataaaagtgaacctaagcacagctctgaggaagagacttttgagataaggtccaagggatcattatgagtcaaatggatagaatagacagtgaagtagggagaacagccaagacagagggaacaatatgtacaaaggttggaggtgggaagaagtaggttgcttttgaggggccacggagggagaagggagcagggagtgtgatgacactgaagaggtgggaatggccacagtgaggccagaagctgtagggcctagttggataagttaactgttttatcttcaacctctgagttagggcaatgctgtggtgggtttgagaggaggaggctttaagttcatgtggtaatgctgcattctggagtcaagttgaaatgactttggagcccaagtatttcagaaaatctgtacctctactcttccctagggcattactgtttcagaatcaacagtatactgagaacctgtttaaaatattcttaaatactcttcatttttacaaatgagataatattgcttatttagaaatattattaacttttctctatatgttgtggctatttatttatttatnnnnnnnnnnnnnnnnnnnnnnnnnnnnnnnnnnnnnnnnnnnnnnnnnnnnnnnnnnnnnnnnnnnnnnnnnnnnnnnnnnnnnnnnnnnnnnnnnnnnnnnnnnnnnnnncttattgatgataagcaattttaaagacagtttgtgtgtcatttcttatcatgagaaggtgagaagagggagagttggttattattgttgaaccatctgctacaatctattgttagaatgcacactatttttaggttctagatttgcttaggtaatatatttctaccttctgtgagtcaactttcttatctcctgtgggactatatacaagattaaaaggaaaaaaccactttagacaatttgatgagtaccaa

SEQ ID NO: 180945 - DNA, 1974 bp, Homo Sapiens
  misc_feature (170)..(206): n is a, c, g, or t
  misc_feature (1770)..(1798): n is a, c, g, or t
ttgggtaaacgttctgctggaattctgcatccagctctatccccctctgatgctttttgcccagaaagctgtctgtccatcatgtattgtccatggcaacaaattacattaggttgaacctttccttgattttatgtatttaatattagaatttgttggactcaactagnnnnnnnnnnnnnnnnnnnnnnnnnnnnnnnnnnnnngaagatttgaaatgttcatacctgagcaaagtctacacaggagtaatggactgtttaacaagtttcccaaaacagcattttcctgctccttcgtatgtaggtgagaaacttagctggaaagacatacaaatttagactctcgttgacattgtcgttttaaaaggaagttgctaaggcgatcaatctcaatattagtcttgtttacttcttcttaatgtcaaaattaacatttacaacatccaattataaaagtaatgctttatgtttatacactgctatgtacttgtcaaaatggtttccacattcttatcacatctgagccttaccaggtagagaaggtactaaatacactttagaagtaaaaatatgaagtaccgagaggctaaacccactggcctaagatctcaccaaagttcatgaaaaccaggactaggacccacggctcccaaagcccgttcttgctgtgttgtgctgcctccatatccgtcaggaagagcctttccagaatgattctgggcatatactaagaagagcaggtatggaaagatctattgtcagggaatcttagaattccctacacgagtgggagaaagatgtccaaattccttacgcagtggtattcatgatggtgccctatctaagtccaggactgttttcctacagcgtgcctcaaaagtgttgtagagggcaggattctacattcacagcctgttccatctacgagattttccagatgctacttgtggtagacattcctaactcatggtacttagccaccagagatcatgatggaatgagtgggtggcttttctacctgccattccctcagaattcatgaggggtgggggacagggggaccggaattgtcttagcaccccaatgttatgacaaaactatgctactttagaaacgcagtctgtttttcaccaattgacatactactgatctgaagtaaccagtgccatcataagaaattactgcattaagaaaatccttgctgtgccctttgaaaagctgttcagaaatcatttacagtgatctttcatctcggtcgctgtagtgaaacattttagtgtgataaatttcaaaattctaaacaaattacccacttttatattggaaatctctaccagaactccctcttcattttttaaggcatacatttgcttgttttcaagatcaagaattctgagctagctttaagtagcaaactgatttatatgtgcaattataggatgcattaagatgaatgatagcctttacatattgaaaactttgcagacgttttgttttgaaaatggcattgtatagtaaatgcaaattaattttgtaaaattatgttaaagagtatgttcagacactttctgccatggccaaaaagtatgtatgaaagtatgtgtgtatttgtttgtaaaaggatgccaatgttttacctgatatcttagtgacacttcagttatctatgcattctttagatctgtgattcggtaaacaggcagccatgttcacgatgccttctatgtcttaccatatttttaattaacctgttaaatacagcttaaannnnnnnnnnnnnnnnnnnnnnnnnnnnnctgaaatatactgcattattgtgttaatgtattatctttcctggatattatctcccagtgtatccagatctaagtaatctcagtgaactatacattgcctaaaaagtggttttgtaatgatttgtagtcacatttctattgagatatgtagaagaaaaagcaaaaatgcttaaagt

SEQ ID NO: 180946 - DNA, 1399 bp, Homo Sapiens
  misc_feature (444)..(472): n is a, c, g, or t
gtacaaaaaagttggccctcttcatttctttaaaagcatacatttgcttgttttcaagatcaagaattctgagctagctttaagtagcaaactgatttatatgtgcaattataggatgcattaagatgaatgatagcctttacatattgaaaactttgcagacgttttgttttgaaaatggcattgtatagtaaatgcaaattaattttgtaaaattatgttaaagagtatgttcagacactttctgccatggccaaaaagtatgtatgaaagtatgtgtgtatttgtttgtaaaaggatgccaatgttttacctgatatcttagtgacacttcagttatctatgcattctttagatctgtgattcggtaaacaggcagccatgttcacgatgccttctatgtcttaccatatttttaattaacctgttaaatacagcttaaannnnnnnnnnnnnnnnnnnnnnnnnnnnnctgaaatatactgcattattgtgttaatgtattatctttcctggatattatctcccagtgtatccagatctaagtaatctcagtgaactatacattgcctaaaaagtggttttgtaatgatttgtagtcacatttctattgggatatgtagaagaaaaggcaaaatgcttaaagttccttttattttttaaaagcagctagatagacacagacttgccacctcatacatctgctccttggcaacatcaaggggaacgactagccaacatgcctatggctaaaaactttcctttgcagactaaagcactgcttggtgcttcgtttttctacccttcacaacatgtgtgatttcatctaagagatatatacatgtacacatgccctttgtttccacctggatacaagatcactcatagctaattaggaccattgttttttgttcatctgtcttgttgcatgaagggacattagacccatttccattaaaataagttcttggtgataaactgtggcactgctacttctttttaaatccactttatgatttcaagatggacacttgtaagatgactcgacacaaggccattgcctggaagccccagagctttcctctgtttgtatggcccgttcatgtcccaggcattgcaacacaaactcaagatttcaccacaacatgacaagcattttcctaactgatattagcacaatttaactaataagccccttcgctctctagttggccaggcttaacctaatacacatctaacgtgtgtgccacacggccagtaggaagtttaaacttcagcttcaaggcaaagatacccactcacaccgtgtcaacgcaagcagtagttcctggcctccagagcagcttactttcccttgaaagaacgctttgttttcctttatgcccttttcctgttgacc

SEQ ID NO: 180947 - DNA, 1259 bp, Homo Sapiens
ttggctttcttgtacttggctgctcagataaaatcagcatcaaatcagtttttattatttatctgtgttggtgtaattttattttagaaacacattgagaattttacttttttatatgaaaatttagtgttcaaaattaattcagaagaattaggacagtaggatataattaaaatcctatccatagtctgttttctgctagaggttttgtggtgtgataaacaggcgacagttgaaaaatgggttttttggttaaatatgtctgggcaattttaggttattcaagatttaacaagtatttctattgcaggatttctttgagtctttactatgtattacgaacttatagcattttccaaagtttaattgagcataaaacatttttttcacaaaagactttacaagtcaagtattccagagaactttaaggagcacttttctaagtaaatcttttggaccttaaagcgatactccttgactgcttttatctacccctgatatgggacactgactgtcacctaagagggtggtgtgtggtaagggcacagccaggaggcatggattaggttctggttgcagtgtcccactgaacatcaaaaggaatacagcagacatccctgcaggagtgcccttggccggcggagggagtgggcctggaagatgcatttagagggcatattgagatgcatgagagtaggtgtggagaacattcaccagtctagactgctgttctcattgagacagcgtttcttgggtgttgatatggatggttgctcatcttagacttaggaatttagtgcttttactgtagccaataattgtgttctctcccacagaaagtatgctgaggccttggattaccaccgtcaggcactggtgttgattcctcagaacgcatccacctactctgctattggatatatccacagtctgatgggcaactttgaaaatgctgtggactacttccacacagcccttggtcttaggcgagatgatacattttctgttacaatgcttggtcattgcatcgaaatgtacattggtgattctgaagcttatatcggagcagacattaaagacaaattaaaatgttatgactttgatgtgcatacaatgaagacactaaaaaacattatttcacctccgtgggatttctgggaatttgaagtagaaaaacagactgcagaagaacggggcttacgctcattggaaacctcaaggaaaactccagattccagaccttccttggagaaaccttt

SEQ ID NO: 180948 - DNA, 454 bp, Homo Sapiens
actttgtacaaaaaagttggctgaaatcttctaagtcaacaacaggccacatacaggtttaaatagacctactcactttcttaatgtcttcaaatgtaaagcacgttgcagaatgcagtattgtacggtgccttgtgctgtccgaatctagggattgtgataggaagaggccatctttttgagaagtgattgagatagtataaaccaggatttcagtatctcatgcagtgattctcagccgtgttgctctttacatccttgggaagacagagaaacatccatgtccagttcccaactccagagcagatgctttaaagctcccaggtgatcctaatgtaccacaggcactgagaatcagtccaagtatgttggcagtggtgtgaggtgcgtcaacaagggaaacagaaaatagagtggttggattaatgggattctaacatattttagcctagtg

SEQ ID NO: 180949 - DNA, 1331 bp, Homo Sapiens
  misc_feature (672)..(684): n is a, c, g, or t
  misc_feature (1094)..(1102): n is a, c, g, or t
ttggcttccttaaaactgttcttttcccgttaccccactgcatctcctattagttgctttcccctttaaacccatattctgctagagctgtcccaccctctcacctgccagaaatgacttagagctgagggagtcctcactaccgatatggtgaagacaagaccccctttctactacatagaggaacataattataatgaaaacgacttacgtgtattgagaattaactatatattagacactgttctaagcactttacagatgttaactcagtccccacaataggcccacgacgtagttactaatattactcccattctaagatgaggaaattgaggcatagaagttacttgtccaaagacaccaccacaggttgtgagctgtactccatgttaggattcagatgcagtttgttgctgaaaacatttcctatgcatagtgactggctgggttctctagtcatgctgtatactctgtgctctaaagagttcagtagagttgtcggtgggcatttcagccctgtgtgtagcatggttttgtgggaaaatggactttaagagccatttaaaagaactttagagttatctatagtttacataaaaatctcagctctgtctacctaaactagactatgtcatacatactatataatgtttcaagtcactgaaatannnnnnnnnnnnnaagttttgctccagattactatgattgggggcaacaaactaaccgcttcctggcacaagcaggaactttgcaagactcaactttggatcctgacaaaccaagccttgggtagcatcagttaacagttttatggacgattcctcagatgaaaagcttcagaaaagcatagtgacagctgaatttttagggcacttttccttaagaaatagaacttgatttttatttgttacaggtttccaatggccccataggaataagcaataatgtagactgataaacccttattttagtactaaagagggagccttgctatttcagtgggtataatttaaactttttaaagaaaatctgtacttttataaagatgtattttgtataacttaaataataatgctaaagtatactagggnnnnnnnnncttgaaaatgttactgcaatcatgttgtagtttgcacaaacttttatgcataattcactttaaaaatatagaatatatggtctaatagttttttaaagcttttggactaaagtattccacaaatcttacctctttaggtcactgatggtcactccgattctgagtgccacattggtagactcctaaaataaagttgacaacttagcccaattgcaactcccagtgttga

SEQ ID NO: 180950 - DNA, 1193 bp, Homo Sapiens
  misc_feature (1023)..(1038): n is a, c, g, or t
ccaaatatctgcttggatgttcatctccaactctgcgaccttaaaataaggtgggagactgggtggagtttattaaagtaactactcaaagaacaatagtttgcatgcaatgcagagcaaaacacaaggaaattctaacctatttgaatccctttggttcaatgacgttatcactgcaaatgtgtgtcagctgagtaaaggcactgaaagacctgcattgtagtgacagccaggcttaaaggctacagctccagcattaagttttctacctagtctccagtgtgtgtctgctcagcaaacagaacaagctttatcccatcttactctcccaacctcattttggaaagaccatttccaggaataaagataattcattattaagattttcaattcttaatactgagaacccagcaaaggaatttctgccaaaagaaacagtatgttctagcacttttaacagatacatgataaaaacaagcttctgttccctccccctccatcaagagttcaactacacatcaacagttacatttttgcacctgtcaattcagataaactaatgttaattcctgtgacacacttaggaatgcaaagcaaacagtgtgtaaaaaatcataaacaacctatcacagctagaaagtactcaaaagttgcagaaccctatgttttaacataaattcagtgcatgtacaccatacaggaaaattctcctaaagttgtctctctgacattaattctgctctatctacttaaataaattattgttttaacttaccaagtgatgaaaaaggctagtttacttgacatataacagtggtaaattcaaatatacacccaaatactccctctccatttaattttatcataaaacctaacttttaaaatgttgaatttgggatatttccatttcctaggcaacatttccatttttaacaaaagaatacaacttcaatgaaggatgagaaaggatagtctgtgacagagaagtccttttaaattaagaaaggagggagataagggatnnnnnnnnnnnnnnnnctatccagaggttaaaaagaaaacatctgtatgaactgatatgaaatgacagctaaaagacactaataagtaaaaaaaggcacagtacatgacagtatcaacagtgtgcttagaaatatgtgtgagtactgtatgcattcatgcacatgggccaa

SEQ ID NO: 180951 - DNA, 695 bp, Homo Sapiens
ttggaagcatggccaccggcatctgcttctggtaaggactcaggaagatttcagtcatgaccagtcatggtcaaaggggagcaggcatgttacatgtgagagagagagcaacagagagaaggatggaggtgccagatttaaaaaatccaatcttgcagaaataagtagagcaagactccgtaccgtggggacggcaccaggcccctcatgagggatcctcctccatgacccaaacacctcccactagggcccacctccagggcccactggagatcccatttcaatatgagatttggggggaatgaacatccaaactgtatcatccaaggtcagtgcgtttctctgtcctccagttttgcctgccatgagcagctttcctgtgagccagctgtccttttcatctccagggtcattttcttccttcagtgcccagtgtttggactttaggctgaccttcaggattgtggagtcacagaacaagctcatataagtgtgtaagcaaggcagcaaattttttaaaataaagaaaaagttatttagactgtgccagtcagtctgtgtgccatcctagctacaacccagggtggatgcagagtggagggtagaggagtgcatccctcactcttatctgtgcttgtccttcctgcatactgctgaggccaggagcacctagatttgccccagtgggactcacc

SEQ ID NO: 180952 - DNA, 1032 bp, Homo Sapiens
ttggggcaactcccatcacaagaaagaatggtggcctgggagtgagctgtaaggttccttcaaacatcagttcctgaagcctcttttattcattattgttgggacttgtttttatttctgttgcgttctacgtgaccccaaaatctgtatgtgaacactaggaactttatcatgggctgaggtgtatttgaagtaaactcttaactatgtctctgggatatgaaaggtgcttacattctctgttgggaatgtagagagaaggatttgcagtgtgtggcccctgggaatgtagaggcatgaatttctgtctgttttcctgctgttgaaatctgagtgctaggaacggacctcttgctctcagattggccttgaagctgaagggaacctgtccaccctctgcacagggcaagagccacgccaacaggaggaagttggagtgcatcctggcacctgccaatcggaagactgacaaacaaaaaattagtttttaattaatttaaaaaatgatcttcctacttatcagacacaatcacttttaaatatgagcagaaaaacgaactccatagccaaatgcaacattttgtgtcatactgctttacatcatctattctacctccattcactggtcaaagaagcgcagagttaagttggccagtgtggcgtggacacagccaggcgcagaccctcctgccagcgaagccagcgtgaggtctgttggctcaggggtccagtccctgggtccccgaagaggtaagccaaagacatagtgatacttggttcaattcggctccagagagtatcagatgggaaatagatgacttgttttacctggtcaaataagacatcactaaaatctaccatgactggaaattacttaatgcaaccagaggagacttcgcagtcaaattttgcttttcctaaaagacacgaaattaaatttacatgtcactgaaatgctatttgaaactgtcatttccttgtatattagggggatctgctagacttcttatgtcattgtattttggaaatggg

SEQ ID NO: 180953 - DNA, 233 bp, Homo Sapiens
tgtacaaataacaggaattggggttagatgataaattctagggaatctaggtgatttggaggatttcatttgttttgcattacagctagttgctctcactaaaggtaaatttccggtgaaataactcaggtttaactagctgtgtgcccagaatcactgttccttcatacatgtgtcctctccttaaattcattactttcaaatgatgttcaaagcattgactattttcattc

SEQ ID NO: 180954 - DNA, 993 bp, Homo Sapiens
  misc_feature (101)..(150): n is a, c, g, or t
  misc_feature (279)..(292): n is a, c, g, or t
  misc_feature (308)..(556): n is a, c, g, or t
atgagccaccgcgcctggcccattttcttcctcttttgaggtaatggatttgtttggagatggcatgttagtagacgactgaatatggaaaggatatcaannnnnnnnnnnnnnnnnnnnnnnnnnnnnnnnnnnnnnnnnnnnnnnnnntcatggattagtctgaaatttaaagttctggccagtcggttttctttcatcttgtagtttttacagtatttccactgtgcatatgcaaaatgggtattacataactgtatcatatttggtattgataannnnnnnnnnnnnngagacggagtcttgcnnnnnnnnnnnnnnnnnnnnnnnnnnnnnnnnnnnnnnnnnnnnnnnnnnnnnnnnnnnnnnnnnnnnnnnnnnnnnnnnnnnnnnnnnnnnnnnnnnnnnnnnnnnnnnnnnnnnnnnnnnnnnnnnnnnnnnnnnnnnnnnnnnnnnnnnnnnnnnnnnnnnnnnnnnnnnnnnnnnnnnnnnnnnnnnnnnnnnnnnnnnnnnnnnnnnnnnnnnnnnnnnnnnnnnnnnnnnnnnnnnnnnnnnnatgagccactgtgcccagcctggtattgataatttatattcagataatttgttatggctctttaatatcccacaaggggctctaaaaagcaaacattcaagagtatgtagtttttagacattaagttaattattttaaacagtgacagcaaaacacaagtgattaaatatagtttatttgttccaatgactaattttacctcatttattaatctggtcattaaggaatatatttaataatattatgtaattattctttttatgcatgatacacctagaaaaatgccttttgtttctattgatggctttgttgtttggagctacttttgattacttattgcagtttcccaatttagtctttactttatctaactcacaaagtaaaattaactgatcacatggcaactactgtatttaaatagttctggaaaaatgaaa

SEQ ID NO: 180955 - DNA, 1125 bp, Homo Sapiens
  misc_feature (935)..(945): n is a, c, g, or t
gtacaaaaaagttggtttaaacagtgacagcctaaaaaaagtgattaaatatagtttatttgttccaatgactaaattttacctcatttattaatctggtcattaaggaatatatttaataatattatgtaattattctttttatgcatgatacacctagaaaaatgccttttgtttctattgatggctttgttgtttggagctacttttgattacttattgcagtttcccaatttagtctttactttatctaactcacaaagtaaaattaactgatcacatggcaactactgtatttaaatagttctggaaaaatgaaagtgctttttgctgcttggtaaatgggtaatgcccttgattccttgactgtaggacatagctgatctaaagtactctgtcagttttaccttcacccatgactgtcattagttgtcaaagttgaaaagtactttagctgtgagaaatccttgtatgtttttattataagaggtataatcatcctcaaagcctgtttttattacatgatgtggactgattattttttctatcacagtgttaacagatggattttattgtaaatacaaagaaaacatattgattattgtagtattcttatgtcacctggccttttgcgtgagattatttattatttctagcaaggctttcttcctttcttattgcccagagactgactgatacatcttttgttatttttacacataaattaaacatagcctttttggacaaattcactaaatattaatgtataaaatgtaattgagtaaatttttatcagaattttaaaaataaaagagcttagactcagtagaactcagtagaagcttcactatttactccagcgtgtgtaaattgtacttactctattctcagagtatatttactgtccttaccattgattctttccctttgctaannnnnnnnnnngttaatggtagctgcgactttaggtggggtatattttcttctcctaagagaatagacagtttttccagattcatcatcattgactgtcaagaaaggactcttcagcaaggctgtactctcaatgcagttgatgggcctgtcttcacggatttacagacttggacctgatgcccatgtaaa

SEQ ID NO: 180956 - DNA, 1008 bp, Homo Sapiens
  misc_feature (913)..(934): n is a, c, g, or t
ttggtgagactccaaaagattatctggatgggtgactgaacatcgttattatgacttagatgcttttaccttatctaacatgtaagagtcaaaatcaaacttgcctggaatggcttctatttcccatagctttctacctatctacttggcattttccctttgtgttgtgactattaaattcctatttaaaagaaaatgattgtgggcaattctcgcccttcacttttgcttttaaaagaaaaggccacaaaggagagtatattggcaaatacccagttctgttctgcctccccttccttcactgccaaaaagcttcctctgaagaacccatcctgtgtcatagcagtgctactttacatttatatagttctatgaaactgatgtctgaattggctttcccttagacaaaagaacaaaatttaccgtcaccatgtgtcaaaccattccactgtgcagatcactcagctgtgatatgaaaagaaatattaagtaaagaagtatttggtcagattctcttcagccataatgtgtaatgtcaggcaatgaaacagaacagtagctaagagtcaagccatgcgtttgagtctcagctctgctactaattattcctccactttaccttttgaaggagatccggactacaaaggaaaggtctttaacctctctgaatctcattgtgaaatgtgctcttccagttctataataagatgtacctttgatgcatcaaccaatacagcaaaattgcctttcatagctaaaatcatgtaacttgagttccacagagcactccagcatatcatttatacaattactcatatatcctttatccccatattttaacatcttcatttatttggaaacactcaactacctgccaattcaaaagtcaaccacatccccatatgtaactgannnnnnnnnnnnnnnnnnnnnnaaacaggtgaaggtgccgagctataaaccgccagaatattattagtctgcagggttaaaagtagtcatggataa

SEQ ID NO: 180957 - DNA, 1396 bp, Homo Sapiens
  misc_feature (94)..(115): n is a, c, g, or t
  misc_feature (589)..(719): n is a, c, g, or t
ttgggtttaaaaaaactttaaattcaaggtacttttaaaattcagttagaaaagtaggctttaaaaattattagagacaagagtaccaaagcgnnnnnnnnnnnnnnnnnnnnnnatgcatgcttgtggattggaaaaactttggagactgattacttttcattatatatgtgtcacagtgaaacagcttttatgtgtcatgtaagattactgcttgcctctctaaagaaggtcgtgactgtttaaatagacgggcaaggtggaaccttttgaaagatgagcttttgaatataagttgtctgctagatcatggtttgtattgaactaacaaggtttgcagatctgctgacttatataaagctttttgattcctactaagctttaagatttaaaaaatgttcaatgttgaaatttctgtggggctctatttttgctttggctttctggtgagagagtgaggaagcattctttccttcactaagtttgtctttcttgtcttctggatagattgattttaagagactaagggaatttacaaactaaagattttagtcatctggtggaaaaggagactttaagattgtttagnnnnnnnnnnnnnnnnnnnnnnnnnnnnnnnnnnnnnnnnnnnnnnnnnnnnnnnnnnnnnnnnnnnnnnnnnnnnnnnnnnnnnnnnnnnnnnnnnnnnnnnnnnnnnnnnnnnnnnnnnnnnnnnnnnngtttagctctgtttttcataatagaaatagaaaaggtaaaattgcttttcttctgaaaagaacaagtattgttcatccaagaagggtttttgtgactgaatcagcagtgcctgccctagtcatagctgtgcttcaaaaacctcagcatgattagtgttggagcaaaacaaggaagcaaagcaaatactgtttttgaaattctatctgttgcttgaactattttgtaataattaaactttgatgttgagaaatcacaactttattgtacacttcattgcaacttgaaattcatggtcttaaagtgagatttgaatttctattgagcgcctttaaaaaagtaataccaaaccataaagttaaaatctatgtatattgagtcatatctaaaaccacgtataaacataaattgtatttcctgttttaattccaggggaagtactgtttgggaaagctattattaggtaaatgttttacaaattactgtttctcactttcagtcataccctaatgatcccagcaagataatgtcctgtcttctaagatgtgcatcaagcctggtacatactgaaaaccctataaggtcctggataatttttgtttgattattcattgaagaaacatttattttccaattgtgtgaagtttttgactgttaataaaagaatctgtcaaccatc

SEQ ID NO: 180958 - DNA, 695 bp, Homo Sapiens
cagtcaagagcaaaatgctctgtttcactatacagtgtcccagtagcccacctcttacttggccattgaatggaaaaacagaagctccactctgggcaggaaataggatcactgaattataacagtgggaacatactggaagaggttaatgaagcttcttttgctgacaactctttttgcccttaggctccccaaaaagggcacaaagacagccccacctggcctggctacaggttatgattcagaggaggaggaagagagcaggcccatgagttacgatgagaagcggcagctgagcctggacatcaacaaattacctggggagaagctggggcgagttgtgcatataatccaagccagggagccctctttacgtgattcaaacccagaagagattgaggttgagtttgaaacactcaagccatccacacttagagagcttgagcgctatgtcctttcctgcctacgtaagaaaccccggaagccctacagtacgtatgaaatgaggttcatctcatggttctgaggacagttgaggaaagatggtggggtctgtttgcattcaggattgtcagctcccaggataatgggatgtgttggttggcagctgacgttcaagaagggaacttgggaaccttaggggcccataataagatgcttggggcaatcttaatgtatcttgtaaaatttctttc

SEQ ID NO: 180959 - DNA, 1147 bp, Homo Sapiens
ttggctggaattcagacaggcgatctgggctggagatgtattttaggagtcagcgccatctattccctctgaagatagaaactccaagaatcctgtccagaagccttcaagtcctgggagaagagttggagaacatgcagaatcacaaggaaactgggagagaagagaggaaggagaaggaaaggggtctggaggccaagagccaggaaggctgaaatgaggggtggagaagaaaatatcattccccaggataagagtagggatgagttaagccagctgcggagaagaaagaaacggtcctccaggccttctagaaactgaggacaggcagagggaggccagaatgctgccctgctgtccagagggtgacatgaaaagggccggacagaggccagtgtgtgcaggcccttcaggaccacagtgaggagtgtggacttcctctgactgtccttggaaaccacagggatgggtcattcagtgggggaactgcataatctgatctggggtcttcagtgtgcacctttaccctcacccacgtcctcccatactgagcatcacagaggtccctgactctgcccctccttctcccatactagaaatccttgccctggaggagctcaaaagccaggccttcccagaccttgctggacatgtttgcgacagaaccagggccctttccttttcccagctgtgcagaattgaatttgcagtcctcatgattccataaaaggagtttccaagacagaccttctgcacttctctttggctaagaggttctttgctataaaaaacacaggataatgggggagtgtaccccgcccccagcccaatgctgaagctagggacaggcgttctcatacagctctcttctttccttcacaatctttcctctctcctcgctctgcccaccacccaccacctcacctgtgttccgcccctacaatggtcagggcagcctgaggctcataagtctggccggctcagttttccatctcctggtggccttctgtggggcctcacgacagatcttcagggccagtggctgttctcagcctcgtggggataactctgaccacagcaagaaatgccctgctcttggagtcacttttgaggagacgttttcatctctatgtagtctttcgatgta

SEQ ID NO: 180960 - DNA, 238 bp, Homo Sapiens
agttgccagatagaatacaaatgacattcacatgtaatatctggaaaaacatgtaactctagaaacaagcatcttaatcaagctcagctgctgactgatgtgagaaatccattctagactattttagagcacgacaatgctcgttcccagagtactcagttatttgtaactctggtatctgggcagaaatttctataaataccaaactcaatatgtgtcttccaaagctgaaacccaa

SEQ ID NO: 180961 - DNA, 692 bp, Homo Sapiens
gaagtggcagctctgtctgcttctcacagagttgctagggacaactgctgaggcaggcacctgccctcgggctccccgggtgggctgctatttgcctgtgggctctgcctgcccgcctgtccagtccccagggatctgaactgtgacctcccccttgctcttcttgccctttgcattgcctggcttggcctcattaatgtccccaaatctgtgttcttctctccagctcctctggcaacccctgacccccttcattcctcacagccagtcctaactctcctccatcccaaccccaatccctcttccacagctgtcggaacatcccctaagctaaaaatcagattgctccttgtcaccttggctcgagtcctctctcccactcccctcactgtccttagaatccccatggcccacacggcctgtcctggcccagccactgcctggggctctggccctgtgactcaccgcgccctgtttccctctgcaccctgcatcctgtagtcctttccaggggctgtgctcttggcctggggtggtcttttctctccttacctggctgacagttacttgtccctccgcagaggatcatgttcggacctccaggccagcccactgctgctccttggcactttcacggccctggcgtgtccccgtcatagcccttatcagtcccttgtatttacctggtcacc

SEQ ID NO: 180962 - DNA, 832 bp, Homo Sapiens
gtgtgagccactgtgcccggccacatacatctttcaaaaagaaatactagtgagaagggccatccactctccgtacatcctctcctgtgatttgctgtgagacgtatggctgcctttgggaagctccttgtatgagaggggacagaacctgagtctgagaagcagagctcagaccctaagggagaatgggccactgccccagggagctccctgaggttgacgggcaactggataacacactctgctaaatggaagttaatgactgaaagtgaatcatgtgcttgctgtaaggaaattatgcaaacttcactgtagtgagttctttcaggttctcttgggtatggggagacatggaccagaataagccttctctagcttgctcagagtgccaaggtcctcagtgtctgggtgaaggatatgacaataccctcctctctcccttcttggcctcaggatgtccctttggcttgatctagagcctgtctgaattaaagtctctgcccctcacctcacctctagattaaagttgtctcccagtgaggaaacactctccagaaggcatgtggggggagtagcctgggtgctgcaaatgggatgaccccctcctcactcctattgcatcttctcctgcccctacccccagctgccctgtcaaaccctgttcctgaccgatgaggagaagcgtctgctgggggcaggaaagggtttccctgccctctcacctgcctctcaccaaggtaacatgcttctctctaagggtatcccaacccaggggcctcaccatgacctctgaggggccaatatctcacgagaagcattggggagttggggg

SEQ ID NO: 180963 - DNA, 932 bp, Homo Sapiens
actttgtacaaaaaagttggctctcctgtgatttgctgtgagacgtatggctgcctttgggaagctccttgtatgagaggggacagaacctgagtctgagaagcagagctcagaccctaagggagaatgggccactgccccagggagctccctgaggttgacgggcaactggataacacactctgctaaatggaagttaatgactgaaagtgaatcatgtgcttgctgtaaggaaattatgcaaacttcactgtagtgagttctttcaggttctcttgggtatggggagacatggaccagaataagccttctctagcttgctcagagtgccaaggtcctcagtgtctgggtgaaggatatgacaataccctcctctctcccttcttggcctcaggatgtccctttggcttgatctagagcctgtctgaattaaagtctctgcccctcacctcacctctagattaaagttgtctcccagtgaggaaacactctccagaaggcatgtggggggagtagcctgggtgctgcaaatgggatgaccccctcctcactcctattgcatcttctcctgcccctacccccagctgccctgtcaaaccctgttcctgaccgatgaggagaagcgtctgctggggcaggaaggggtttccctgccctctcacctgcccctcaccaaggtaacatgcttcccctaagggtatcccaacccaggggcctcaccatgacctctgaggggccaatatcccaggagaacattggggagttgggggcaagtgaagacccaggactcacacatcctgggcctccaaggcagaggagagggtcctcagaaagtcagaggaaaatccgtaacaagcagtcagctcagacagtccggcggcggaagaaggagtacattgatgggctggagagcagtacgcctgggttatttc

SEQ ID NO: 180964 - DNA, 1232 bp, Homo Sapiens
  misc_feature (888)..(896): n is a, c, g, or t
  misc_feature (991)..(1104): n is a, c, g, or t
ttggcttattacattaaagttatgggtatcttgaaactacaaacctgatgtataatttcagttttctctcatggtcttgttactaccatcatactcttgatattttaggatactttaggattacctttgaagaaccctttctagttaattctttgaatatgttttatacttatttgatggtagttgtaactgtgtacatttgaataaaatttctaaccataaaatttcgccattgcacaaaaagcctttatagaagtttctaacatattctattctgaaccctgtagaatattttatgtagtatagcagcttgcattgttacttactgtactggaatcaaacctcttgagcattattttaacaaacatccctttacattttttggaaagatttttagtactccattggcatagctatttcatacaaggattaggagaaactttgaaaggttatccacttgacttttctgattttagaaaggactaccattaaaccaccctatcagacaaaaaaaactggtttttagaaacctgagagaaggaattttataatttccctgagtaagctgttacagggaataacaaatctcctgccacatgtggcacagtgtaagtaatgctggagcacacatactgcattgtaaagaaggtaggaaaggtggggggacttttgttagctttaattttaaggctaaaagcatttcttctcagtttgaactacttttaaatgttataaatgtcatcataaaaatcattagaaaactcatttctccttatgttgtcgttgtaccattgggtattgtatagagaccaatttctagagattttttcacctctgtttctgttatttgctatactggaggtaatataataataatgaaatatagcnnnnnnnnncaactcagaaatcctattccctctccccatctgtgattatattgtactggacttctgacttggtcaaaagcataggttttgacttagatacatgnnnnnnnnnnnnnnnnnnnnnnnnnnnnnnnnnnnnnnnnnnnnnnnnnnnnnnnnnnnnnnnnnnnnnnnnnnnnnnnnnnnnnnnnnnnnnnnnnnnnnnnnnnnnnnnnnnttggaagaattaatttagaaattgtacagtgcttagcctcaataattggtaggtggtggtgtaaatattttacatagatacttgtgacagttctttgttctacaaaacagactaatattaatttcaga

SEQ ID NO: 180965 - DNA, 716 bp, Homo Sapiens
cgcctggcctggagtgaatttcagactaaaaccagtaccttcctaaggttatacagtttttaactaacccatatctctgttctgatttgattcactcatgattgcatgcggctgtatgccaatgtgcgagatgtagcaaccaagctgcttttattcataggagctaccaggaggctacggtcgcatgaaacctgacattgtcacctatggtgctggcgtgcggggttctggcgtgaaaggggggtgccgggccctctcagggaccagtgttgcttctccagtggttgcaggtgctgtcaccttgttagtgaggtgagtgctgccccctagagaccagtagctcccacgtcaggacaggagcactcggtgccagcagagcaggagtcgtgtcttgcttctgccctgtcttgggtttgagagcttaagcccttcacagccttgctctgtctctccttcttcatctctgcaaagaagtaggagtcacttcttttatagttagatgaagtgaatgtgaacacactttataagcctaagtaaacaaagtgctgataggcaaaataacctgtttctttatgtttgtgttctgttttctaatatcccatttatgtgctagaactgtgatttttatatccaagcaagcataaatatcatggcagggaacaaatagtaagatatttccctgccatatatcctccatttccttggggattcacttt

SEQ ID NO: 180966 - DNA, 882 bp, Homo Sapiens
  misc_feature (559)..(568): n is a, c, g, or t
tgtacaaaaaagttggtatctttggatctttcatctgaccatccatatccaatgttctcatttaaacattacccagcatcattgtttataatcagaaactctggtccttctgtctggtggcacttagagtcttttgtgccataatgcagcagtatggagggaggattttatggagaaatggggatagtcttcatgaccacaaataaataaaggaaaactaagctgcattgtgggttttgaaaaggttattatacttcttaacaattctttttttcagggacttttctagctgtatgactgttacttgaccttctttgaaaagcattcccaaaatgctctattttagatagattaacattaaccaacataattttttttagatcgagtcagcataaatttctaagtcagcctctagtcgtggttcatctctttcacctgcattttatttggtgtttgtctgaagaaaggaaagaggaaagcaaatacgaattgtactatttgtaccaaatctttgggattcattggcaaataatttcagtgtggtgtattattaaatagnnnnnnnnnnttttgtttcctaggttgaaggtctaattgatacgtttgacttatgatgaccatttatgcactttcaaatgaatttgctttcaaaataaatgaagagcagctgtccttctttcctcttttaagtgttcagctgtggcatgctcagaggttcctgctggattccagctggagcggtgtgatacccttctttttcagctgttcgtgccttcctttcttgtatccaccaaagtggagacaaatacatgatctcaaagatacacagtacctacttaattccagctgatgggagaccaaagaatttgcaagtggatggtt

SEQ ID NO: 180967 - DNA, 911 bp, Homo Sapiens
  misc_feature (555)..(565): n is a, c, g, or t
ccaactttgtacaaaaaagttggctttcatctgaccatccatatccaatgttctcatttaaacattacccagcatcattgtttataatcagaaactctggtccttctgtctggtggcacttagagtcttttgtgccataatgcagcagtatggagggaggattttatggagaaatggggatagtcttcatgaccacaaataaataaaggaaaactaagctgcattgtgggttttgaaaaggttattatacttcttaacaattctttttttcagggacttttctagctgtatgactgttacttgaccttctttgaaaagcattcccaaaatgctctattttagatagattaacattaaccaacataattttttttagatcgagtcagcataaatttctaagtcagcctctagtcgtggttcatctctttcacctgcattttatttggtgtttgtctgaagaaaggaaagaggaaagcaaatacgaattgtactatttgtaccaaatctttgggattcattggcaaataatttcagtgtggtgtattattaaatagnnnnnnnnnnnttttgtttcctaggttgaaggtctaattgatacgtttgacttatgatgaccatttatgcactttcaaatgaatttgctttcaaaataaatgaagagcagctgtccttctttcctcttttaagtgttcagctgtggcatgctcagaggttcctgctggattccagctggagcggtgtgatacccttctttttcagctgttcgtgccttcctttcttgtatccaccaaagtggagacaaatacatgatctcaaagatacacagtacctacttaattccagctgatgggagaccacagaatttgcaagtgggatgttttggtatcactgtaaattaaaagagggcctgg

SEQ ID NO: 180968 - DNA, 933 bp, Homo Sapiens
  misc_feature (571)..(580): n is a, c, g, or t
atgcttttttataatgccaactttgtacaaaaaagttggctttcatctgaccatccatatccaatgttctcatttaaacattacccagcatcattgtttataatcagaaactctggtccttctgtctggtggcacttagagtcttttgtgccataatgcagcagtatggagggaggattttatggagaaatggggatagtcttcatgaccacaaataaataaaggaaaactaagctgcattgtgggttttgaaaaggttattatacttcttaacaattctttttttcagggacttttctagctgtatgactgttacttgaccttctttgaaaagcattcccaaaatgctctattttagatagattaacattaaccaacataattttttttagatcgagtcagcataaatttctaagtcagcctctagtcgtggttcatctctttcacctgcattttatttggtgtttgtctgaagaaaggaaagaggaaagcaaatacgaattgtactatttgtaccaaatctttgggattcattggcaaataatttcagtgtggtgtattattaaatagnnnnnnnnnnttttgtttcctaggttgaaggtctaattgatacgtttgacttatgatgaccatttatgcactttcaaatgaatttgctttcaaaataaatgaagagcagctgtccttctttcctcttttaagtgttcagctgtggcatgctcagaggttcctgctggattccagctggagcggtgtgatacccttctttttcagctgttcgtgccttcctttcttgtatccaccaaagtggagacaaatacatgatctcaaaagatacacagtacctacttaatttccgctgatgggagaccaaagaatttgcaagtggatgggtttggtatcactgtaaataatacgagggccggggaaaaa

SEQ ID NO: 180969 - DNA, 1246 bp, Homo Sapiens
  misc_feature (341)..(360): n is a, c, g, or t
ttggctttatgattcttactgttcttcgcagctcatcttttcctgcttagaattaaccattgctaatttaaaggagcagctagctgcttttctgtcagtctgaagcgtagtagtggaagaggtagtaagcaccagctgcctctttgctgctttgttttcctcctgattctcttaaatttgggttgcaaagctatcccgccccccaccctgccccatgaaacttgagcattcaaatgaagattcagcagtgtctgttcttcatttctatagccaaagctgttagttaaaatcccaaatctatagcatttaaagataccaaatagaaacaccttccagctttnnnnnnnnnnnnnnnnnnnngtcttccctctgctttattctcactttcttaaaaacacttattctgggtggtactttttaggtaagaaactactgagtttcaggaaaaatgctagctactctgcagttaccgtgctttggacttgcagttatcatagttttgggagagtcagtattgtttaacaaatgcaagtgagaactagaagggttaataaagttgctccttagagtggtgtcaaaccagaacccagacacttaaaaagtacttcattttttgaatggaaaatattggagaaaagtatgggagatgcaggtagcatgtgagtaaatactacggtctagccttcgagcatcccaaattctgggggtaacttgacagtgctgtgctctcctttgtcatttatatctggcttaggaatggaatagtaataacaagatgccagtgatttggaatagtttgttatagaatattcagtgcaaaatagtgaaaatgtttggtcttcagaagtgctgtagttgttggtcattgccttaaagcagtctgcttgacgctaggagcactgaagcagtccagctccatcaagagcactgttgaagggagaagaacccttgttcaggaagccttagaaagggatccttaaaatagtactctacgcagacaagtgaaaattcttttaaactggatattactcaacatgttttcagatgtttccactacattgaggcaaactttttaaaagtggaatgcaaatagcattttactttagtatttctgcttttttctttctgtttctttggtaattgaaagtttgttgatgaatatttgtgtaaaacgcattcaagtctataacctttcaattacctgtggcccttagtcccacaggagtccctgttggacggggtaaac

SEQ ID NO: 180970 - DNA, 958 bp, Homo Sapiens
ttggcactaatcaacaaaccagctttcggggtctgacgcgatccttgcctcaggcctctcgaggtccagacagccgcccagcccgctctgcgacgcagcagtgaatagtgtggtacctccttgtctcggttcaggtccagacctccccgtcttccggctgccctgaacgtcaggcgacctcaggaccctgtgattggcgcctgcgccggcggaccgtgaccgaggaaacccctggagggacttgggcattccttgggctccgtgcctgttcttcgtgctcctttcgggcaaggatctcacattatcagtctttgaccgacacagaatgcctggcatttgataaatgtttgttgaacttgaagagacatatggacaatgaatctgcaaaggtgagttgaaaccagattgtgaattttgttgaatggtaagccaaggaattctgactttttccaataggcaatgggaagccatttgatttaagttttaaaaagagtaagtctagcagcagtgtagagaatagatgacatacaaagagagattggaggaagggataccaattagaaggcagcagaaatctctcacgttctatatgtcaaaagttgaaagcataatgccatttagattaatggttcataaatttttccaccaggatcatgcctaagacacacagagtaagaaccacttcttattatctttaaccctactagtttttctcctattgatccaccacagatgtatcaagataccttatcatgccttgcttattgttcagattgagcgtgatggtagttctggtaatgagttagtgagtgagatgggaaatagggatactagagctccagatgctgttgtagctattggtccactaatgacccaaattctaccctgtggttcagtgtagtagaattgtcatagtatgacataaccagcatctaacagttacatttctcttaattta

SEQ ID NO: 180971 - DNA, 1081 bp, Homo Sapiens
  misc_feature (691)..(699): n is a, c, g, or t
ttgggtgaaaagaggtccattaaatatatttcttgaggtttaggtggaaggtaacaactgaagcaataaacagccaccaccacacccagccattagatttgtttattaacatcattgttaaaaatgacagaaaaatgcaatcattgattcatccttatagaatctaatacttattcctattttcaagtagataataaatgataagaagctaagtatttaaggaccctaagtatttaatgtgccttaagtattcaagtatttattgttttttaatcaattagatcattaattataaaatagctactataaactacaaaaatactaggactgttgaattaggaaatcatatctattatctgctaattgctggagacttttaaaaatgaatcactgtgtatttcagaaatgagtcttttcataacatctttctaccatttataaacgagtctaaaattctttttcagaaagcagatgatagagaaaaacgacaagaagcccaccggtttcattttgatgctatgtgacttgcctttaatattacataatggaatggctgttcacttgattagttgaaacacaaattctggcttgaaaaaataggggagattaaatattatttataaatgatgtatcccatggtaattattggaaagtattcaaataaatatggtttgaatatgtcacaaggtcnnnnnnnnnaaagcactttgtatataaaaatttgggttctctattctgtagtgctgtacatttttgttcctttgtggaatgtgttgcatgtactccagtgtttgtgtatttataatcttatttgcatcatgatgatggaaaaagttgtgtaaataaaaataattaaatgagcaggaatttttgtgtccacttgacttggtcttgcttcttattctaatgatgcaaattatacttttgtgaatatatcacggagtcattaggcattcagcttcatcacagcacgtcaggggtctcactgatggcatacaatatagtgatcgggtactctgacttggtagcacagtaagacagacttgccttaaactcctaattcaaccacttacaaagtcat

SEQ ID NO: 180972 - DNA, 2933 bp, Homo Sapiens
  misc_feature (930)..(939): n is a, c, g, or t
  misc_feature (2392)..(2423): n is a, c, g, or t
  misc_feature (2655)..(2703): n is a, c, g, or t
ttggattttatgtaacaattagatataacctcctgtgtatctctctgttcctcttcaaagttattaaaattcagcttaggtcatggatttttaatatgagggccagctgtactggtgtcaggtaggtgttttgggtgtagataatttaggactggagggctgagttaagttttaggaggagaatgtggttgagaatattttgaaaggaatttatggagtttgtgaaataacttcgaagtcctcttcctttacaatatttgaattcatatttgtaccttctcaaaatagtgattcatttttcctagaattacaggagggagctcttttactaatgttgttttgtttgcaactttgatggcttataataggaagtattctagttgtaaagaaaactctttagagacttttgactggtcagtatactgaggtgtgagatttgattcatgatgaagaaagcctatagattgccaaaaaattaattctccaaaccacctttcactctcagaaaatgagaccacaaaggagtatgctataaatcaaatttgccaaccaattatgtagatattactcattctaggactaatgatgatggtaaagaagttgccagtgttatggcaatgaaaatttcagaaaggaggagttgatgatcttctagatgtatatgaacacctgtctatatctgcatgtatatgttttgacctgcagtggttgcaatgttgatatgtgttcaagattattcctgtctacaaaactgaaggcccatgttcaaattgttctttattgggtgtttttatggtcacgtggtaacaattttcttacctaacctacaaaaggttctcttgatgaacatttttatttatatttactaatctttttaaaaaaaagctttcatagcattatataatcagatgaagaaagcccagtagaatnnnnnnnnnnttcattagcctagcctatattatgttttctgtcaaaggaaaacaaattctcaaataggaattctaaaaatatttactaaagtaaaataactacttaaaatgttttattccagttggaaggaaggtacagggagaaatcgcaattatttaggggagaagtatatttattataagatggtgtcctcaaattagcctaccatggcacgtaggggcagcagctatattagatttactagaggtgctaagttagaacactaggcttttattgaggcaggttttaatattgatagatgctttttgtttggtttgtttcttctgggagagaatggaggacttaagtagaagtagctactgataacagactttctagtagcagtttccactccacggttacctttttagtttcatagtatcttttcacaaagtattacaaataagctagattctcccagtttgggaatgcaagtttgctacatttttagcctggcaatatttgtgtaggtattgccttattggaaattctggaaacctgatactgcaacctgcaatgtaggatgtttgtatggcatttaaaggtaatggtgatgtttattattctatactttgcattctgtgagagtaattttcactctgtcttaagtgtgagtaagcctcttctaaaaatcttgttcttgccaagaaatttataaatcacatacgaagacgtctgttgctaacagttaactttatgaggtaactatatccttctatttctctggactcatttttaaaaaatatgccgaatactgcatactgtttaaggtagtatataagtttatgagagaagtggagagctttcttccttgaaaagtcggtatttgttgagataccatttgcctcacagagaggtgttccccactcccatccccattgccagataataaatattttgagaaaagtgacctaaaacagctgaaatcttaggtgcatctgtctgcagacctccttaagcaggctgtatcttacaattcccttactgcactgggtaagtgttaacttagtttttgttgtttgctcttttgctttaaatattctccaaattaccatttatgcaacatggttagggttaatactgcatggtattcatttatcttgtttcatgaactttccagtactgtacaaggtcaacaaagtaatgcctgtggtatcctcatctctcacttttttactctgtgattttagcacagtaaggtactgcaaagaccttccttccaaatgttctccttgactttatttcttgggccaattcagtatcctcaacatcctaagattttgttgttttatcactgacctgtggttggcctgttttattctaatttccagaaaagtcaagtcccagtatttgcaatatcaaataactctaaaaccgatgtgtgattctaccttccttactatttttactgggcaaatgcccnnnnnnnnnnnnnnnnnnnnnnnnnnnnnnnngggacacacaaaaatcagcaattctcatgaagcgtttgttagtgtggcagacttgtctaattcctgaaactcattcatccccttgagccagccaatggggaggaataggataatgcaaacacatgttttgttttctcattttcaaataatttaccatgttaaaataaacttttctttgttttttatttgtagagtcagctaagtacccatatttaaatgccgtctttattannnnnnnnnnnnnnnnnnnnnnnnnnnnnnnnnnnnnnnnnnnnnnnnnaaataaggtaactgggcaatcaaacaccttttggggattctggctttagtattttatcagccattttaaaattaaatataaaaatcctttgtaagaaacttgcatcctaatttttctttattgcaattgaaagtgtaaataataagacaatgtaagtaagaccttcctaatgtctaatacaaactggggctccagcaagtggccctatttttattacggttttgaaggtt

SEQ ID NO: 180973 - DNA, 908 bp, Homo Sapiens
ttggctcatatcccatccttaagagaagaaatgttataaagtagaactaaatataaattttcagaattaatgcattcaaagtaatatatcaaatccaggactttgttaacttcaggtaaaaacttcattagggtaatatcatctcaattttttcaaatgaaaggattctctaattagaaatttatatgtcagagctgttataaatttatcaactgtcaaatatgttctggacagctaaatcatttgagatttttggttttttgatttctattccctaacttgtgaagacaatgaaaaatcaggcagaaatatttagtatctagtcagtatctgtagctacactgtataactgttcttcaataaaatggttcatattttatagatgccttgttatctcaagaaatctgattcacataaacttatacttctttaatgctttttaaatatttattctgagcaaacaattcatgagtacatcaagtgagatagttttatttgattataacataaaataaatgtgattatatcacatcatcatcaaaaaggtttaaattaaatgggaggaaatcagcatatgtccacccattaccaaaatttgactatcatttaaggttaaaacttacaaatttgtctgcacatcaaatttcacaaatttgaaaattgccttaaccattttgattaataagtttcatctgccataattaaagtctgaagtgttcatcaagataagtaaatttgcatatggataatacccaataacttgtttttcagaatttttcaccatatgtatactgagaaatacaatattttaatctgcgttgccgtatgatatgattgcacttagacacccaatttacttaaatcttggtttactttgacttgataccataatctttaaaatcattgtc

SEQ ID NO: 180974 - DNA, 2798 bp, Homo Sapiens
  misc_feature (588)..(597): n is a, c, g, or t
  misc_feature (939)..(974): n is a, c, g, or t
  misc_feature (987)..(1048): n is a, c, g, or t
  misc_feature (1124)..(1229): n is a, c, g, or t
ttgggttagttacaccttaatggtgttaatggaggtggggattgagaaaagtgttcacattagtgttggaatgtaggtaattgtacagtttataagacctttagcaccaggaaataaaatatgtgtgtgtacacacacagtttttaaaaacgattggaattcatccaaaccttaagattaggaaactgattggctgtaagtgttgcctcaagtaatgtgtcccccgccccataacatgtcttttctgtgccaagtatcctctcctagtgtcagtgtctcaaattatatttatgaagggttatcacataatatgctttgtatttaactacctgcttcccaggcgtccatgacatgaaatgggtgaagcatcagccatgactttcggtcagttcccaaaatacccaaatgatagggaggtaaagattgcaaaattcctcttaaaaggccatttttacagcttgctaaaatacagtggcaccttatggttgttaatattttttcttttaaagatggagaatgtttttattcttccccttttctcctttgttcttttgcgaacaaaaaaaattataatctgccttatttgannnnnnnnnnaagttttaccttacaggcttccctgtcacatgttttaccatattaagtacatagaagccatgtttgcagggcacttttattctcctagtcttataagactatgctaattgttactttctgaagtattctgtaccttagtatgcaagattgttaaacacatgttaaagtgtcaagtgtgtttttttccctttaattcttcagtatgtttatattcaataacagtattgtaattcattgagttaactagtaaattgtgtgcttttgaaaaaacatgaaaaatgtaaattgacagcatacttcatttggaaaaaagtaaaagatccgaggaactagtatgtcacnnnnnnnnnnnnnnnnnnnnnnnnnnnnnnnnnnnngagacagggtctnnnnnnnnnnnnnnnnnnnnnnnnnnnnnnnnnnnnnnnnnnnnnnnnnnnnnnnnnnnnnntgggctcaggtgattctcccacctcagccttccaagtagctgggactacaggcatgcaccacattgcctggctaannnnnnnnnnnnnnnnnnnnnnnnnnnnnnnnnnnnnnnnnnnnnnnnnnnnnnnnnnnnnnnnnnnnnnnnnnnnnnnnnnnnnnnnnnnnnnnnnnnnnnnnnntgagccactgcgcccagccttacttatttttaaatcagattttttaatcaactaaaacagctatgagttaagtacctgccctgcaaaaatttttagaaaaagttttaggattatgaaattaagaattattttccttaactggaacagttctaaaatttatctgatacttctctaacaagtgagtgatctcatgtaaccccagtttgtatcttaaaggctgcagcatagaattgagctgtataacagtgttagaactgtcaagtgataatcacagaacagtttgtatcggttttataattctcatgtcttgatcagatctgaaggaaataggcataccctccaacattctaaaaattatttatttttattaggatttgtttattaaagttccacgagctgctttatggtcagttgggctgagtagtagatatcttaaagacatgcagtgaaagtgaaccctgtcatatcatggtgcctctttcaaggttcctctgtaagttcctcatcttgcagaattatttcaataccaaggtatggttgaaccagctgtccagccttaactctatttagtgccccattactaatgttcttttaactggtttgtatgtgttttaactgtccagtgtttggattttacctcttgatagctccatttgtccctggtgctgcttttaaggatgtagggccatgtgatcaggtatcaagttgagtaggtacgcagttggcctggtgatgtatctgtgcctgttttatcttctcccaggaagagctgctttggtatagttgtttacttggattcatacaaagaacagggcagcaatcttggaaagctttctgaagcttataagaacctgaaggggtttggagggggaacagtaacaaaggctgcctttatgtctttggtcacaaagcacatagatgtatgttctgtaaagactaaagtgattgttataccagggcttcctgaccttcgggagagactcaaaaaagcagagaggagcacaaagtgaagttaatttggttggcttgctttatctggtttctcattttctttcaatttaaacctgaacataacacccttctccgatacctatccagcagactcctggttgggaagccctgtattaaattttgagaatgtacacagttttcttttgtacagtgctttacaactgctaaaagttaacttgtttaaagcaaaacaagaccttgaaaggtcaatcatattaaagctggtttgattattaatagttatcttttaggaagaagcttttttccctatgtaagatgtcatactgcagatttaaaatatagactatcaataaaatgcatgaagtgatcatttgtgcttgatcatctctccttgggtttttctttaaaaaggggaatctgctataaaggttctgttgcttcaaaccaatgtcaaatagacttgatttttagagtcatggaattacagtgccaccttgatttttattcccctcactgctatgagtgtgggcaggtactgggtttatatgttataaacttccgtttttatctgtgttgtgtaattgaatggcttaatct

SEQ ID NO: 180975 - DNA, 2018 bp, Homo Sapiens
  misc_feature (678)..(703): n is a, c, g, or t
  misc_feature (1892)..(1905): n is a, c, g, or t
tttgtacaaaaaagttggcacactctaaaccaaatatattttaagataacttttattttcttcttactcctttcctcttgatttttttcctataatttcattcttgttttttcatctcattatccaagttctgcagaccacacaggaacttgcttcatggctctttagatgaaatagaagttcagggttcctcactctagtcactaaagaaggattttactctcccagcccagaaaggtgattctttctttaccatttctggggactttagtcttaattaggtaccttattaacaggaaatgctaaggtaccttctctgtggaacaatctgcaatgtctaaatcgccttaaaagagcccatttcttagctgctgaaatcagtgctctttcacttcttcagagaagcagggatggtacctacccggcaggtaggttagatgtgggtggtgcatgttaatttcccttagaagttccaagccctgtttcctgcgtaaaggtggtatgtccagttcagagatgtgtataatgagcatggcttgttaagatcaggaggcccacttggatttatagtatagcccttcctccactcccaccagacttgctcatttttcgagtttttaactagactacactctattgagtttaattttgtcctctaggatttatttctgttgtccnnnnnnnnnnnnnnnnnnnnnnnnnnttaaggagaatttttggtgttaatgctgaggaattgcttgagtggttagttgttaccaatttctcttttgaacctttggagctaaggatgctgagtctagagaaatgctagtctcaagccctgttaagtccctctgtttctagcccgtagttcatagcatcagtgaactggagccacaacagcaaattctatcagctgtgtaccatacagcttgtgctgaaggcgaatttcttgagccattactcagtataaagcactgagttctatctttaggatttatctttaagagcaaatttctggtcagctgtgcttctgcaacctaaaatatttaaagggaggtaggtgtgggcaggaggaggaatgataaattgggccagggcaagaaaaatctagcttcatataatttgtctgggactatacaccctatataatgttagttttacagaagtaatatgacttttgattgctacataccacaaagagtttatgaactgagatcataaagggcaactgatgtgtgaagaaagtagtcagtacatcctggctcatgctctgaaagaatatccagagaggctctctcaaagatcagggagatgtattcccatgccatgcaccctgcttcccagcatttctgcatggtcaagtgagctttatgctcatgagctttaagtatataattatccaggattttaaatcctcaacttgttctagcttgtgatccctcaaagttgggtcatacgttagtgctagatactagaaattttcacttttccactgatcagagagacagacattaaaaacaaaaatagaagaaaggaaagctttcaccctgcagcttcttagcagggaacaattgtcttgccaaaacttttttcccttttctctcccattttcttttacccaatcccttcttactccttgccagtgtgaccatgctttcttctctgtagatgttaacagttaaggcctattttcctcgggcacttaaccaaccaatcagaacaccacatctgttaggggaggtaacctggccaacagtgtatccatcacgttagccctgctggagggaagggacccacattcacctgccctctgacctgccccttgatcccatatctattaccgtgtccataggaataataggtaagggctctgtctctgtcaagccatgtaacaaaggacactgttnnnnnnnnnnnnnngtctggcatcagagggagcatgtggagagcaacttgggaagaacaagttcattttgtattgaatgatttttaatgaatgcaatattaatcccttgcagatgagcaataatcat

SEQ ID NO: 180976 - DNA, 1684 bp, Homo Sapiens
ctttcttgcatcatctttccggggactctcttcctctggtttcctcttctttctgacaaggtgagaaatatcagtcacacaatttgatgaggaagcaccgtctgttggctttctactggcaatcatggagactgaagagcctcctccaccaggagtgaaacctgaagtagaactctccaccagagtagctttcagagccagttcagctacattcccactacgctgagactcctttgcatcttctatcttctctctaatttcgagtagcagttcctttagttcctcaatttctttcttgtattcagcagacgatccttcagcctccttcacctgctcgtttagtacagccattctgttctcaatgacttcaatagatttgctgaactgtgccactgcctcatcatactgagagttgtacccataagccaagcccagctggtagtgggtctctgcaaggagacggtcgtgggcttccaggtactgttcctgcaggttaaggcaggactggaactcctccacagcttgcacatagttttcagattcaacactaacttctccgagtttaagatgtgcctgggcagcataaagctgtgcttcttttgtttcttgccttttaaaaatgatctttgctaaatccagcatatcccaggcaagctctaggttcccaatctcctcctcctcattttcttgaagagacttgttttcaaggactgaatcatttggcatttcttcggtcttatcattttctttatcatcctcttctgagccttcagtttctacaagtaaaaattcctcagtattgagaatataactaagaacgtattctgactagtcagagattccaatacacgtctcaacctatattcagataggacaggccagatgctaatccaagtgagttaacacttgaactgaatatatcgtcagtgggtgcagtctagttcaagtgtaacctagactaagaatgtgcaatcttagtctatgggtcagaccttcagcaattaaaaggctgagtgtttctcttataaaagtcaacctggaccattcagaataagaaacattggctactgcctcttattcaatggctagaagctcccattcattcagccagaagcaggtggagacctcagtcagtgtttctggtatctttaagccactcattagataatactaatagcctgggaaagtacgaaagttaaattattccagtccattctgatcaagaatgctcaagagactagctttcccacaacagagatgtggagcaaaaagcatagtccttaccgacttacaccaatgagcatgccacagactccagccagctctagcacatacagaatttgagtaaggaatactataacccctattttactcctatacctttgctaatgacacctctaaaatctgcagccatatatcaacaccatatttcaccatattgaatacactcacaagtcaaccatctaaaggtcaggctcctaatcaatagcgctactgtgattagacaaatcaacaatgttaagtgattaaaataagctttctgttaacacaaacaactcatgaattggatataatatgcctctctctgccatctttcattatgcatttttaacaccagcaaaaaagctcaaacactatctccaaacactcttagtatgggaataccaacttttttgtacaaagt

SEQ ID NO: 180977 - DNA, 897 bp, Homo Sapiens
ctaagcttctttgaaaacggaatctctttgtggttgctgctgataaaactcctttgacctgacgattgctctaagtcctaattgccatatttatattcccatagtaagagtgtttggagatagtgtttgagcttttttgctggtgttaaaaatgcataatgaaagatggcagagagaggcatattatatccaattcatgagttgtttgtgttaacagaaagcttattttaatcacttaacattgttgatttgtctaatcacagtagcgctattgattaggagcctgacctttagatggttgacttgtgagtgtattcaatatggtgaaatatggtgttgatatatggctgcagattttagaggtgtcattagcaaaggtataggagtaaaataggggttatagtattccttactcaaattctgtatgtgctagagctggctggagtctgtggcatgctcattggtgtaagtcggtaaggactatgctttttgctccacatctctgttgtgggaaagctagtctcttgagcattcttgatcagaatggactggaataatttaactttcgtactttcccaggctattagtattatctaatgagtggcttaaagataccagaaacactgactgaggtctccacctgcttctggctgaatgaatgggagcttctagccattgaataagaggcagtagccaatgtttcttattctgaatggtccaggttgacttttataagagaaacactcagccttttaattgctgaaggtctgacccatagactaagattgcacattcttagtctaggttacacttgaactagactgcacccactgacgatatattcagttcacgtgctaactcacttggattagcatctggcctgtcctatctgaatat

SEQ ID NO: 180978 - DNA, 1549 bp, Homo Sapiens
  misc_feature (409)..(463): n is a, c, g, or t
  misc_feature (578)..(639): n is a, c, g, or t
ttggcattcatgtggttcacaaatcataaagtagttaaaagcctttcttgagttcctgatgcctagcaagctccgctcctcactccatgaatacctactattggtttgttccttgggtatccttccagagatcatttatgcatgtacacacatgtgtatgtgtgtctatataatttttctccttttctactcatgtgataccagacaagtgtattcaaggaacgctcctactaatgtgggaagagccatcccagaaatcagaatacaaaatgtgaacccagaattgggggatgtttttgcaatcacactcctgttgagtaagacatattttcattttattgcaacatactgaaattttagttttctgtacaaatcagaatctgcagtccctcccttctcgctctgtcannnnnnnnnnnnnnnnnnnnnnnnnnnnnnnnnnnnnnnnnnnnnnnnnnnnnnngttcacgctattctcccgcctcgggagctgggacaacaggtgcccgccaccacgctcggctaattttttgtatttttagtacagacggagtttcaccgtgttagccaggatggtnnnnnnnnnnnnnnnnnnnnnnnnnnnnnnnnnnnnnnnnnnnnnnnnnnnnnnnnnnnnnntgagccactgcgcccggccaataatttttttagtttaagttcatttttgtccccgctgatgaaagttagagctgcttcctccaggcagccctgggagtaggggcacagacttgtgcctcgcttcccagcagctgcccagtgcctctgtccacacccacctccctggtgtacttgccccctacagcagcagcccagatcctcccctggattaaaattgcaactggtgccctaacccaaaacttgagaaaaaattctctatcacatccactcttctggcatttgtagaatctctggccctgggtgtgtcttttcctgtagctgttacagatttcttaagcagatttcttaagcagatggacatgtccagattcatgcctaaatatccagttgataactggaaaatgctggttcacggttctttagtaaagattaataagggatccccatgtgctggggagtgtgcttccatttgagtggggatatcagaagaaaaagaggggcttgtgtagtaaaccttactttgccaattcagctgtagagcccaaattgttacaagatgcaaagatgtactccactttttgaccaagcatcagcacctttggcttaccatccagtccttacttctgtgactgtaagggccccaccagtgtcagcagacttgtttgtgctttgggggaactctcttctcagctccctttgccagtcccaagcctggtggatctgcatctcacgcccactgcacaccgttcctctccatctgccctttccctcccaggcccccggtcggggggagcagtgtggcaagtgttagaactcccttctgggtgacagctggtcttcctagatgttgctggtaactatcgcctcttggttcttctgacatcattgccaggaacggggcacttttttc

SEQ ID NO: 180979 - DNA, 655 bp, Homo Sapiens
tttgtacaaaaaagttggcaaattgttaccatataaaaagatgtactccactttttgaccaagcatcagcacctttggcttaccatccagtccttacttctgtgactgtaagggccccaccagtgtcagcagacttgtttgtgctttgggggaactctcttctcagctccctttgccagtcccaagcctggtggatctgcatctcacgcccactgcacaccgttcctctccatctgcccttccctcccaggcccccggtcgggggagcaggtgtggcaagtgttaggaactcccttctggtgacagctggtcttcctagagtgttgctggtaactatcgcctcttggtcttctgacatcattgccaggaacggggcactttttcgtcttgtagtttggccctcgggtttcctcactaggtattgtgtaactccctcaaaaaaaggtttatgaaatgctgaacctcaggtttcatagacgtctttgtacactaaaaattctgcagcagaatatttttaaacattcgcagttttttgtaagctatatttttgtatatttaattgctattttaaaattttaatgcattttgctaatcactcctcaaaaataaaacatgcatgtaattgactcaaacgtgtaaataaaagcaaattttg

SEQ ID NO: 180980 - DNA, 1748 bp, Homo Sapiens
  misc_feature (277)..(285): n is a, c, g, or t
  misc_feature (775)..(1084): n is a, c, g, or t
caggctagacacaaacacctccagcatattcatggccccgttggagaggccatgcagggggcagatgcaaatggatctaattctgcctgtaatggtagttagcgcccctctttcctcacaaagtgttgtattcattcctgtaagcaatctcttctcaatgtatcatcctgccctcagccagtaagtcagcaaaacctctgcgtagtgactcactggattcccagcccaagcctgacaatgggcttctctggggagatctggtaagagagaatgtggnnnnnnnnntggacaaatcccttggaatttccctattgaggtcagagagaagctgggaatggatttctgttgagagagctgagcccagggctactgccactagactaggctccctccttggacctaggaaaatgtcacctcacaaagtttaatggaagtccactgctttgtatgcagaagaggcataggaaagaaaaactgaagtgtgaagcttataaacccaaggatggagacactctctttgtgcggtgaactgtgctgtctccttaactacatacgaggcacagctgtccaatacaacatcaaagtcttgctgaagacgtaagactctccactctgtagtcaccaggaaaaatgacaaaccaggaatcacaaaggtccccagttcctgctgtgggtgccaaaaaaactgacacgaatctggaactcatggcagcaatacctcagaggctcatctttagcaattccagacccttccagtccacagtcaggtcattcnnnnnnnnnnnnnnnnnnnnnnnnnnnnnnnnnnnnnnnnnnnnnnnnnnnnnnnnnnnnnnnnnnnnnnnnnnnnnnnnnnnnnnnnnnnnnnnnnnnnnnnnnnnnnnnnnnnnnnnnnnnnnnnnnnnnnnnnnnnnnnnnnnnnnnnnnnnnnnnnnnnnnnnnnnnnnnnnnnnnnnnnnnnnnnnnnnnnnnnnnnnnnnnnnnnnnnnnnnnnnnnnnnnnnnnnnnnnnnnnnnnnnnnnnnnnnnnnnnnnnnnnnnnnnnnnnnnnnnnnnnnnnnnnnnnnnnnnnnnnnnnnnnnnnnggtcatcttttcatccaagctgctcacaatgtttccgcacaccaaccaatctcttaatccttaccacaatgatcaggcagtaaaaactattactcttacttcccatttgggaaaactaaagctgagaaactcaaaaacttgtgtagcattaagtatgaattgcctacgtcaacgctgtgtccctaattttcagaccctatccttctttaattcccaactgattctagtaagcacccgaaagagaaccagaacatgttacaactcttttttctacctggagaaaggcataattctcaagaaataacatagttcatatcttatgttaaagttaattactctagtagagaagattctcttaattgacttggaagtagttcactgaagagtattaagtgctgctttaaggtaccaattagtctgtttagatgcttgagtctttaatgtgtattaacaatgtgttgtcagaaactcaagagtctgagttctgagcagagggaaaattacagcaggaaatacacaggatcaaagtatgtccaagtatttaatattctctcagaaaccagatgcctaatctacgtaacatataaaatctgctgggaagaggggatgggatgcagtggatgtggatttgattaacattagaacccaacttttttgtacaaag

SEQ ID NO: 180981 - DNA, 1227 bp, Homo Sapiens
tttttcaactctaccattttttaaggtaacacttctttcattttttaaaatatattttatttaacaatctaggaagttcacagccatcagcagttctatagcaacttcaggtgcaactgggaattcaggaatctcggtggagctgttggtgtagcgaatacttttgatagcacatgtgaaggtatctctctcaaattgacctcattggtttcattctcagcaaattgacctgggccactcaacatggcttttatcgtgctgatgttaatgtacgttctgtttttacaataaattcatggccatcggatgatatcaatttgacatacatggcatcagggccttcacagctaccataggttttctcctctctccatccattttgttcttacgaaattctactttgcttccccaggaacttcagtagtttcccggtgaagcaaggatgcagagtgtgttgctcagacggaagtctggaggaagtcgaaggtaacatttatttctgaccaatctatagtgggcttttctttacaggtacagagtacattccttttattagtctttctgttattccattccctataaaatgactatgtcttaaaatcagaaaacataataaaagtacaatactgaaatacaaggaactattttcaaagcactgatagtgcattccacaaaccacataaaaatctttattgaaggtattacagaaagatagctgactactagtatactataaatatttataaaacttaaattccactcatactgaagacagtattaggtggttttataaatgacatgctttattatttcaatcatccttcctctgttctcttacctatttcacactgcttacctcaccaacaagcatttcatatataagcacgccaaggccccaccaatctacagcccttgtataagaagtttctgttaatacttctggggcaagaaattcaggagtgccacaaaatgtgcttgttctatctccatatcccattccttctttgcaaagaccaaaatcagcaattttcacaaagccctctgtatctagcaataagttatccaatttcaaatctctataaacaattttgtgttcatgtaaatactgcaacccaagaactacacaagcagcataaaatctgtttgaagaattaaatcaacaggagtttaataaattttattgctcttgaatcccagcttatatgtttatacttcaaagcagaccta

SEQ ID NO: 180982 - DNA, 1550 bp, Homo Sapiens
  misc_feature (161)..(169): n is a, c, g, or t
  misc_feature (1046)..(1124): n is a, c, g, or t
ccacttttttatagtccctagctttgccatatgcccgccttaagtggaaggaaagttaatcacttaactatgttttataaaaagaaaaaagggcttggaatgctattactgttcacacaaagtatgattctgtttgaataaggcaaatgctcctttttttnnnnnnnnngacattactgtaatatcaaaaaccgtggcagtttgtatacaactcggggcttgattttttttaaaaaaacagaatgaattgatgtcttattttataaatgttctatatttattaggagaaaactttatattgcctttttttatcaatcatgtaacaggcttatagctttccaacagagctgcttgccaaacaattttttttgtttattaaacagtgctgaaacaaacaggatcagcatttacttaagatgttaagaatgaggacttttaatcagccgaaccaagatattgttacctgtatgcattcccaaagtctagatgctcagtatgttcagtcatatctttcagaatcagtgaaccgattaccctttttttggtattcactctacatctgccaacctagttcaccttggttttgtgtctgctgtagaagggaaccataacttggttaaaccgtagggattatcattgtatacatgctgtgaacatgtatatgtgcaagttttaatgtattctatgttgtaggcttattatttaattttaccacttcatcacttttgtacagtggccaagcagacacctcaaactccagcatttacattaagtgcatttgtacattttaggccactggatccagattttatattggcagttattgagggcaaaagcaatatattgtaacagaatgtataaatatttttgataaaacagtctatattttattaaaaaatgaattataacactaaagctgtacctcaaaagtctcaaaaataatttgatgaaatattttatacaactcttcaaaggatccgtctgtggctttttatactcttttagggttgtctttttacaaaccatgactttccacttgcctgtannnnnnnnnnnnnnnnnnnnnnnnnnnnnnnnnnnnnnnnnnnnnnnnnnnnnnnnnnnnnnnnnnnnnnnnnnnnnnngtaatagcatctttgatcctgtgcttagcatgttagggtcattatacctcaggaatagcaagctgttaagtaaccatactgaattaactatttaattacagtgagctcatctcttaaaaattgttcaggtgtaaatcttatgagaaacatgaaaaagcacactgatttatggagagttgagctaaaaacatttataaatatttgctgggatgttttagcatcttttcattgtactctgagaacaattaaaattgtccagagatcatttatattacccttccaaattgtttattacccaagatcctttgggagaaaatcttatagaatgggggaacaatatgtggtttaaagttattttaaaatgccagttaatttcctcggcaaaggacatagaggaacttagcttaaatggtctggctttaaatt

SEQ ID NO: 180983 - DNA, 1695 bp, Homo Sapiens
  misc_feature (504)..(545): n is a, c, g, or t
  misc_feature (1421)..(1429): n is a, c, g, or t
  misc_feature (1590)..(1606): n is a, c, g, or t
aaaagtatttagtgtttattttaatgttgtataacacagtttaaattaaagccagacaattaagctaagttcctctattgtccttgccgaggaaattaactggcattttaaaataactttaaaccacatattgttcccccattctataagattttctcccaaaggatcttgggtaataaacaatttggaaggtaatataaatgatctctggacaattttaattgttctcagagtacaatgaaaagatgctaaaacatcccagcaaatatttataaatgtttttagctcaactctccataaatcagtgtgctttttcatgtttctcataagatttacacctgaacaatttttaagagatgagctcactgtaattaaatagttaattcagtatggttacttaacagcttgctattcctgaggtataatgaccctaacatgctaagcacaggatcaaagatgctattactaaactaagaaaaaacaataaagtcatagattaggagnnnnnnnnnnnnnnnnnnnnnnnnnnnnnnnnnnnnnnnnnntacaggcaagtggaaagtcatggtttgtaaaaagacaaccctaaaagagtataaaaagccacagacggatcctttgaagagttgtataaaatatttcatcaaattatttttgagacttttgaggtacagctttagtgttataattcattttttaataaaatatagactgttttatcaaaaatatttatacattctgttacaatatattgcttttgccctcaataactgccaatataaaatctggatccagtggcctaaaatgtacaaatgcacttaatgtaaatgctggagtttgaggtgtctgcttggccactgtacaaaagtgatgaagtggtaaaattaaataataagcctacaacatagaatacattaaaacttgcacatatacatgttcacagcatgtatacaatgataatccctacggtttaaccaagttatggttcccttctacagcagacacaaaaccaaggtgaactaggttggcagatgtagagtgaataccaaaaaaagggtaatcggttcactgattctgaaagatatgactgaacatactgagcatctagactttgggaatgcatacaggtaacaatatcttggttcggctgattaaaagtcctcattcttaacatcttaagtaaatgctgatcctgtttgtttcagcactgtttaataaacaaaaaaaattgtttggcaagcagctctgttggaaagctataagcctgttacatgattgataaaaaaggcaatataaagttttctcctaataaatatagaacatttataaaataagacatcaattcattctgtttttttaaaaaaaatcaagccccgagttgtatacaaactgccacggtttttgatattacagtaatgtcnnnnnnnnnaaaaaaaggagcatttgccttattcaaacagaatcatactttgtgtgaacagtaatagcattccaagcccttttttctttttataaaacatagttaagtgattaactttccttccacttaaggcgggcatatggcaaagctagggactataaaaaagtggnnnnnnnnnnnnnnnnnaaaaatagactattgatccaaaagtattcgtgatggattttcatggccgatgttcactcaacttaaactccatgaaactgtttccccaa

SEQ ID NO: 180984 - DNA, 1770 bp, Homo Sapiens
  misc_feature (1610)..(1629): n is a, c, g, or t
agcccacttatatgtctctcgcttcttctagctgcagtacccgagaagtttaccttctggggaacttgttgggtgatgctatgctcgacttcttgatttgggggtgtggtgcatctagtgggcggccagtcttgtctgaaaggagatacaatggcaaggaaacagctgtggaaactactaaagttcctggggaagcaaagtagaatttcataagaacaaaatggatggagaggagaaaacctatggtggctgtgaaggacctgatgccatgtatgtcaaattgatatcatctgatggccatgaatttattgtaaaaagagaacatgcattaacatcaggcacgataaaagccatgttgagtggcccaggtcagtttgctgagaacgaaaccaatgaggtcaattttagagagataccttcacatgtgctatcgaaagtatgcatgtattttacgtacaaggttcgctacactaacagctccaccgagattcctgaattcccaattgcacctgaaattgcactggaactgctgatggctgcgaacttcttagattgttaaataaaataaattataataaactgttaactcttttcagtatttaatacctgtagttcagttagtaactttttcatatatagcatgttgcctgtatgcagttgaactatataaagttcattgcaaagcagattatcttgtttttttgcatagcaatcaaagttgaaatttgtttgctacatcaacaaattaaggacattttcacaaactgagaaataaacaaatatgccaattcgtaggtggttttgccttatcctttgaatgtgacttaaaatcagcaatgatgatatagtaaatactgaaatttaggtgtaaatcaatacgttctacagggaaataatgaggctaagtatttttatgtttttagtggttttttagaaacctaatcttatagccgccattagcattactagagttatgcaaataattgcattataaacatgtttataacttagccaaaacattgatttttataactctccaagtatgagttgaaatttcttatgtcttttgataaactgcagtattctttaagtgtactttgtccttttgtttattgctacaatttaagaactttatttaaaaacaattttggaaggttactaggtacagcttttgcagaagaaactgaactgtagccagatggtcagcaagtaaactacatgacttagagttcttgtgcattatacattttgggtaattcaaagtactgtatttgcattgactataaagcgtcgtttgcaatatttattcttccttcatagtcccttgttgtgattatacttccagttgtttaaatgtattttaaaagactcactattaactttattcagatcttaaaagctacacctttttgaactattccagtctttctccatccaattagaatgttatggaataacatgtgaagagatacagtgaaaatcatattataatgcattgaagatatcctacatgaattatcttctattaaaatatgtcccaataaatatacccataatcagtgggtcttctactgaaatcaagctcattcagcttttctattaagcagccnnnnnnnnnnnnnnnnnnnntatgacagcatcattccttatgcatggggaaagaagcactggagatgggtttagtattgtctttatctcagaggtggaacaaagttgtcattatagggtctataaacttaagtctccagcttatttgagactggcttaata

SEQ ID NO: 180985 - DNA, 1405 bp, Homo Sapiens
  misc_feature (56)..(75): n is a, c, g, or t
  misc_feature (305)..(344): n is a, c, g, or t
  misc_feature (348)..(442): n is a, c, g, or t
  misc_feature (524)..(598): n is a, c, g, or t
actttgtacaaaaaagttggggccgcacaaccttatagaaaagaagaaagttgggnnnnnnnnnnnnnnnnnnnnagagatagggtctctctatgttgcccaggctggacttgaatttctgggctcaagagatccttaaccccccaagtagctgggcctacaggtatgtgccaccataaccagctgtcacgtgggtattctttcacatgtgccaaatgatatgtgtataaaaatatccagggcagtattattattattttagtattaattggttttaacaaaggacggcaaaaccctagatgtcnnnnnnnnnnnnnnnnnnnnnnnnnnnnnnnnnnnnnnnntgannnnnnnnnnnnnnnnnnnnnnnnnnnnnnnnnnnnnnnnnnnnnnnnnnnnnnnnnnnnnnnnnnnnnnnnnnnnnnnnnnnnnnnnnnnnnnnccacaggcgcccaccaccacgcccggctaattttttgtatttttagtagagactgggtttcaccatgttagccaggatggtnnnnnnnnnnnnnnnnnnnnnnnnnnnnnnnnnnnnnnnnnnnnnnnnnnnnnnnnnnnnnnnnnnnnnnnnnnnattcttatttttggttttcagagagctttctggtagagaatgctgccggaacggtgctggcacctagcatgatagcatatctctttgaaagagaagtctgccctttaaagagagagactgtagactatactgtgtgttgactacagccacatcacagcatgtgtaagtggaagccccaatctctttgtaggcctctacttaacgtttgtcccagaaaagggggacttgtagttgtatgctgtgtaatagcacatacacatgtggaaaccaccttcgaaaacctgctcaccagaaccagtctctttagagcaggcagatcatggtttccataagcaaataattataagtttatggatttgtaagtgaatgttggccatgtaagacaggatttcttaaattgtttcctccaaagtatgagattgttgtttgggtcttgtctcacagttgaagttggttaactgtgccccatcctaccccctttttaaaggaactccatgagggcagatagtgtatcttcaagcaatatcaaaaaccgaattggtaacaaattaccacctgagaaatttgcagatgtccgacatctattagatgagaaacgtcagcactcccgtccacggccaccagtcagcagtactaaatcaagtactgttcttcacttggattcctggctggattctgagctccggaaagcagactggggcagagagagggtccctgaataaacatgcgatgtgtgaatgattttaactgtcctggttccacatgtcctaattgtgggctagggttgggaaattgaggaattgaaaa

SEQ ID NO: 180986 - DNA, 2313 bp, Homo Sapiens
  misc_feature (461)..(482): n is a, c, g, or t
  misc_feature (507)..(742): n is a, c, g, or t
  misc_feature (1513)..(1557): n is a, c, g, or t
  misc_feature (1730)..(1753): n is a, c, g, or t
actttgtacaaaaaagttgggtatattcaggacttcctcagagtattggccaagaacataatgtttacacaggagtaccttggtataatgcatacattgtctcatgatactagtcataaaatattttatggattatttcacattcttcatatataacaagtaaaattaattcagttttcttctcccaacgtttaattctgaataactctatctactttaccctaatttttagcctcttaatttctggaaggactctaatttctattccaaatttctatgaattctaattgtaaattatcggaacagagttttatttatatgatctggtactagacttcttaatataactgttacactgtccttgtctttcctactcaaagacagtatcatctgaagttgcctaataaggtcatgtgagtcaagaactttatctgtgggagctgatttgcaccattttaccnnnnnnnnnnnnnnnnnnnnnngaaacggagtcttgctctgtcaccnnnnnnnnnnnnnnnnnnnnnnnnnnnnnnnnnnnnnnnnnnnnnnnnnnnnnnnnnnnnnnnnnnnnnnnnnnnnnnnnnnnnnnnnnnnnnnnnnnnnnnnnnnnnnnnnnnnnnnnnnnnnnnnnnnnnnnnnnnnnnnnnnnnnnnnnnnnnnnnnnnnnnnnnnnnnnnnnnnnnnnnnnnnnnnnnnnnnnnnnnnnnnnnnnnnnnnnnnnnnnnnnnnnnnnnnnnnntgagccaccgcacccagccaccattttatctctctaaagtctggtcccagtattaaacctattctttagtaaactcatattactgttctaaattgaagaaattatttattactctgtacttctagactcaaaattctttatcaaagatagtctcaaagaggtagtacaagtcctgtttaactgcactttttcacattcacagtgcttcctctgatatctttccttacatcattatacactgttgatatcattttactcttctttctcttctacatttcttaaattttggttcttttcctgtacatgtgttttagcggggcccttttctttgaactttgtctaattagcctgtacatttttgtttcttttaaggtagaacagatctttttttgtttctccttttaagtctactggttttaaaagaggtaaatgtatccatagaccacagtgccttgctttttcctctgccagcacatggagcacgggattagatgcacaaacctatttagggaactattttggtagatgtttgagtttatacagaaattgcagctggtattttattttgctgtacatttactcaacttgtccattagtatttaactatttccagagtttgtttaggagtaagaattgacccattcgttagtttaccatattttttcctggtataaaaaggagccagaaataagccttattgctaaataattaattatgtaagcccacctaggtcctgcataagatccccctcacatacttcacaatatatannnnnnnnnnnnnnnnnnnnnnnnnnnnnnnnnnnnnnnnnnnnnatttggctaaaaaattatactgccaaaattactgattataaatacttgactacactgattgatgggacaaaatgattaaagtattttcagggatcttattccatatgtcaccaccaaagatttctacagtgttataaagtatataaatattccaaatttctgtggttaaatannnnnnnnnnnnnnnnnnnnnnnnagaataacacagtctgtgctttccaaaaatgcttgaacttttatgttgttaagaaatatataatgatatcttacattaagcatgagtctaatttgtattaattgggatggactaaattttcatttgattatcaggaaaattaaggagttatatatttaaaagcaattttctgtgttttcttctttgtaagttgactcatttgtgaagcaattaggcaaattttgagaagatcattgttattgtggtttgcagtatatatttcttagtaaatatcacttaagattaaatttttcagaaagaaaattatagcttttttcccaaaatatttttaagatttaatctttttgtagtatgctacagatttaattatattaactcttttttaagacattgaccatgacttaacattttgccttctaacaccttttaaatctatgtactttaatagttaagagaaaataagtttgcagatttttaataatctgtttgtaaaaggctatctctaaagctagtatgtgggtaatttttacaggtgtgtttttgataactttaatataaaa

SEQ ID NO: 180987 - DNA, 2121 bp, Homo Sapiens
  misc_feature (450)..(476): n is a, c, g, or t
  misc_feature (509)..(564): n is a, c, g, or t
  misc_feature (594)..(630): n is a, c, g, or t
  misc_feature (1831)..(1868): n is a, c, g, or t
ttgggatcagatagtgaaggtaactcttattacttttgattttaatcatctcagaggggacatgttcagaggtttattactgacatcagatagtatgatttatgaatatgatatatttacttgtctattgtaagagtgcagctatttggtgatatttaacattgagtttttactgtgtggtagacattgctttaagaaatttacaagtgttacgtcatttacatctctcaataatcttataaaataggcattattaaaatttttctgatgaggaaaaacaggtcaagagaagttaatttgcgcaaggttactcagctaataagtgttaaagcttgtatttaggtctggaaagtacatttataggagtagatcatctgaaaaggaagcataccccaagtcaaaagggaagcatctgatatcttcagccattttcgtagtcaaatattgtcnnnnnnnnnnnnnnnnnnnnnnnnnnncactggttatagtattaaatctgcctttaactnnnnnnnnnnnnnnnnnnnnnnnnnnnnnnnnnnnnnnnnnnnnnnnnnnnnnnnncaataaactatatttgagggattctctacnnnnnnnnnnnnnnnnnnnnnnnnnnnnnnnnnnnnnaggaatacttctcataaataattttaaagtacataaatctcaataaatttttgcatacgtatacacccctgtagccaccacctagatcaagatacagacaatttttagcaccctgcgaggctccctccctgtcagtaccctcaccatcacctagaccctcatccctgtgtaaccattttcctgacatctgtttccatttgtgacttttacctgtttgatgacttcctataaatgtgattgaacactgtgcgcccttgtgtttgaccactttcagtcagccttaagtgtattaaacatccaggtagttgtatatatcagtactttgttggttttttaatgctgtatagtattccagcctgcgagtataccacagtttatccatttctgctattcatggctatttggtgttttcagctttgggctactgcaaatcaagctgctgtgaacattcttgcacatgtctttcagtagacataagcactcatttctattggtgtatacctgggagtggaattgttatttcatagaatatatgtacgtttagctttggtaggtgtgacaaatatccatatatttttctaaatttattttgtatactgataacctatgatttaccagaatattttcatttctgttaatagtgttttaaaaaacctttgggaaggggacctaattagggaaatagtattcagattgttataccaatctataggtagtgctatgtagaaaactttgttgttttttacttattactttgttaataccgatttctaccttgttcatagactaatactaggttctgtaagagaaaacaatgaagtacagccctgcttagagaaacttgtggtttagtcagaaaggcaggaggatgaaagataagcaatataaggcagtgtgtcagtggcatatgatttctatagacaatatgtgctctagggtggtgaagagtagtcactagactggaatgattggattggaaaaggcttcatggaagaagaaaactcagatgagccttggtgagtgggtagaattggattggtaggaatggttcatgaacaatgttattggaaggtgagaaaagcttgttgggtaactaaattggcctgcctgaaatgaaaaattggagttgggagtgatggggcgatagttggaaaagtagcttgtggtcaagctttggaaactttaaatgccaggccaagannnnnnnnnnnnnnnnnnnnnnnnnnnnnnnnnnnnnngaggacccaaagcatcagaattgtacaaactattctctttcctattgcattttcccttgagaacatgaactgacaaggaacaaggtgaaggagtttgactggactttatgggataatataactctcttaaaagaagtgttaaaatgaaggagagattttacaaatggcaagtagcataaaaaatgggaattgtaaagaattagtatagatgatttttgactggggaaacttaaacactaattactttcagaaa

SEQ ID NO: 180988 - DNA, 886 bp, Homo Sapiens
ttgggtgtttccctgaaggttagtgtttcctggcatcgtgtttgttttgttgttgtctcagagggagaaactgagaaaaaagatgatggaatatactagatgccgaagaaacattctgatgaggagccagataaaacttgaattggaatggatgcgtgttcttaaccgggctccattatcaatgacctttcataactttaagaataagaatgttcttctctctgaaactgtgatgttgctcttcaggagtcttaccgccagataatgaagatgcgaccgaaagacttgaaaaaacggctgatggtgaaattccgtggggaagaaggtttggattacggtggtgtggccaggtgagctgcttgttcattcaccttctctgctgtgtggatctcagtcttttcaagagaagtcatttgcccttctccagtgctcatcaccaagcactcctgggcagggctgatgtctccttggagcagtcgggccatcatgcactggcttcagccaccctgcggagaataggaattcctccgagcatgctcgtgccagcctcttgccataacctaccagaatatccgtgattgtcaccactaattgacttcttgtaaagctagaattaaacttttaaattcactcccttcttttgaaacatgaagagcatgctcctgaaatttaacacaggaggcagccttgctctcctctgtagaggatttgctgcagggagcaggccagggattgcatttgtgcatgtaaattgcatttgtgtcaaggaattttgtaaaatgttaaaattttggtcaaaataattcaagaaaatgatattaaaaaacagaatagaatgatgaaaaactgctatttcatgtcctgcttcttttcagcttcaagacaa

SEQ ID NO: 180989 - DNA, 849 bp, Homo Sapiens
agtgaaaaaaaataacattgaccatttattaagtattgaaagtgtaccgggatccatgctaaatatttgataaaaatatatctcaaagactttgtgaaggattaataaatacacacaatgcttcccatgtgctgtgcatcaagtgatttctgcaggctaactcatttaatcctcacaattgtcccatgtgttaggaactattattgttacaacggtttgcaaagggggaaaagggacacggaggaattacagacccacattctgccttcctcataacgtgcattctgagggctgccatctttcttctgagtctcttctgaggatgaaatggaaaaaatagctctatcctggctggggagagggatggacagaaaaactgacttctgccttaacatctccagggtgctgtgtcttcctctgagggagccatgtgtgaccagggaaaaagttcgaaaataaggacaattctttatagagccgcgaatgcattcccctcccctaccccaaggcgtgaaagaatcaaatgaggaaatcaggaagagattctggaataggaataacaagatttcccttcccttccactgaattggccatcagtaattttgcacaaattcaattttgaagtcatgcttcgtaatttgtggtaaatcatattaaattaaacagatccatgtctgggcaacggcttctctcatttaggaacatatggtggctcagagcctctcacacagcagaactataaaggctccttccaaataagcagcagagtgaggggctctggggcaaccctactggttttcctgagaatgttagttaggggtgaccattatttcagggggaactgcccaa

SEQ ID NO: 180990 - DNA, 2700 bp, Homo Sapiens
  misc_feature (167)..(216): n is a, c, g, or t
  misc_feature (247)..(263): n is a, c, g, or t
  misc_feature (2254)..(2311): n is a, c, g, or t
ttgggtggattcttaagaaatactaacacttgagtattagcaataattacaggaaaataagtgcgaccacatatatcttaacattactgaattaaaactatggcttctaagtccttatccaaactcagtcatccaaactagtttatttttttctccagttgattatnnnnnnnnnnnnnnnnnnnnnnnnnnnnnnnnnnnnnnnnnnnnnnnnnngtaaaccaaaactatactaagtatagtaatnnnnnnnnnnnnnnnnntttttcccctccccctcttctttcctaactaattctgagcagggtaatcagtgaacaaagtgttgaaaattgttcccagaaggtaattttcatagatgtttgcattagctccatagcaaaatggaatggtacgtgacatttagggtagctgatatttttattttgttaaataatttccaagaatagagtatggtgtatattataaatttctttgataagatgtattttgaatgtcttttaatcttcctcctcctctccaaaaaaatcagaaacctctttaagaaaacatgtaggttatatatgctagaattgcatttaatcactgtgaaaagactggtcagcctgcattagtatgacagtaggggggctgttagaattgctgctatactggtggtatggattatcatggcattggaattttcatagtaatgcagatccaatttctttgtggtacctgcagtttacaaaataatttgacttcagtgagcatattggtatctggatgttccaatttagaactaaaccatatttattacaaaaagatattaatccctctactcccaggttccctttatatgttaagatataatggctttgaggggggaaaaaataaacctaggggagaggggagtttcctgtagtgctgtttcattagaggatttcagtaaattaaattccacagctaattcaataaataatggtacatttaagtgttctgattttaataatatatttcacatttatccacacagtaacaatgtaatatgttaatgtaaataaaattggttttgatactcagaaataacaagaatttaattttttaaatttgtttacagtcctgggaaaagtaagaattatttgccaaaataagaggaaagaaaaccttagtattattaatgagtttaccatagaattgttggaaatactgaagacaggtgcaatttactaaacttttgtttttaaactattgtagaggctgcattagaagaaaatgtttataatgacagagcaactatgactatataaaaaagctgaaattagaactgtgtttagaaatagatcagtaacccagtgccaaggatgccaagctgccaccatggtcttggctctcccacaacccagtgtttctggggtaagtttcacagtttctaggccctggaatagcaggcagtgtaagcctttgataactttagttcgatgtttttcttgtttttgtttgttggtttggtgcatatgatagtgggtgttatgctattttgctcttcccatcaaaataaagaaacttccagaggtttactgttaaaaatactgatatttccataaacgggtttaccaagggtgtagtatttcataccgcctgaaatgatcagcattggcacaaatcaaaattgagccgcctttgaaatgcaaaaatacctttgactagtaagtacatcctaggagtttgaaaacttaactaaggtttaaaatttaccttgtttaaagaacttctgacttttgaggaaaatctagctttccaagtaactaaaatgtacatgagataaacctctcaccactatgtgtcccttgagaaatgcaacacttttttagtcttcatacttgtaatctataaaagaaattctgaagtttagaccaagttgcccatttctgcgtaattgacataagttctgttaaaaatattataagtaattcgtttcggtttgtagatgtttcccctgacttgttaaagaggaaaccaggaactcagtcatgtttttgtcctggataatctacctgttatgccagtactcccatccgaggggcatgcccttagttgcccagatggagatgcagttcagtagatttggggcaaagtggctacagctctgtcttccattcactcaacacctgttcatgactgagccaggtgcccaggacacatcctaaacagtcagcttctatcctgtgtcctagtcggggagacagagtgccagccagcaaccctcccaggnnnnnnnnnnnnnnnnnnnnnnnnnnnnnnnnnnnnnnnnnnnnnnnnnnnnnnnnnnctacatccttccccgactcccaggcataatgaggcatgtcttactcaatgttatgcaatggatttaggcaaaaattcattcttagtgtcagccacacaattttttttaatgcagtatattcacctgtaaatagtttgtgtaaaatttgacaaaaaaagtatatttactatactgtaaatatatgtgatgatatattgtattattttgcttttttgtaaagcagttagttgctgcacatggataacaacaaaaatttgattattctcgtgttagtattgttaacttctttttgcgactgcgttacatcatttaaagaaatgctgtgtattgtaaacttaaattgtatatgataacttactgtcctttccatccgggcctaaactttggca

SEQ ID NO: 180991 - DNA, 1622 bp, Homo Sapiens
ttggtgacctctgttctgtgaggaaccagggagggggcactgctacaatgcattgaatgcatctttgttctaaatgtatgatcccaatctcatctttcgcatgcagaaggtgagtagctccccgaggcaccctcctctccctgcacacagatggggaaaccgagggctggtagggatgagcctgaggttatacaggagttaggtgggcatgaaatttgtttcccccagtccctggagcaaaccttacaatttgcctttagattctagacctgaaagtgttcctgatcagagaggccttcctgtcactgccttgcaggaggcaagggaaatggggttagacattagggaggattccccgcccggagtcctagcacagcaaaccaggaggtggaactgaatcagcctggaatggctgctgagagctcggctgcaagttgctggtccatctggggccctggttttgctttcagtcaaatggggatccaactcctgccccacctgccatcttggttgtcaaagtcaaaggagggaatgaagttatgaattgaattgggcaaatgatgactgagaacaggcttggaaaaggttttctggggaggaggaggctggaggccaggacactgtttgttgtggaactaggagctctttgagacgagactccaagtagtaatcccagaccccaccttgctcatcccaacctgttccggtctccccatcagggacctccaggtgcatggattggtgctgcccctcatgctgcccagcttctactcagagctcttcacgctctacctgctgcttcatgagcgggaggacagcttctacagccagggcattgccaacttgagcctctttcctgatacccaactgctcgagttcctggatgtgcagaagcacttgtggcccctcaaggacctcacgctgacgagcaatcagaggtactccctggtcagggacaagtgtttcctgtcagccaccgagtgcctgcagaagatcatgaccacggtggacccacgggagaagctggaggtgctggagaggacatacggggaaattgagggcacggtgtcgagggtattgggccgggagtacaagctgcccatggacgacctgctgccacttctcatctacgtggtgtcgcgcgcccggtgaggcagtcaggagctgggggtgcagggcaggggcagggtcccacccccaaccacgatatcttctgatacctctgaaccccagggtttatggatgcagcttctctctgtacagatggggaagccaaggcccagaaaagggagggtcccagccagggtgctggggtgctagaggtagagtgaggaccacaccccaggtgtccagccatccaggccagcgctccttccccagctgcctgtccgcgacaggcctcttctccttgtctccctcgctctcttggtggggcggtgttctccagaattcagcacctgggagccgagatccacctgatccgtgacatgatggaccccaaccacacaggaggcctgtatgacttcctgctcacagccctggagtcctgttacgagcacatccagaaagaagacatgaggctgcaccgcttacctggccactggcactccagggagctctgg

SEQ ID NO: 180992 - DNA, 447 bp, Homo Sapiens
cgacagggtgagactccatctcaaaacaacaacagcagcaacaactaactaagaactcaacctgagaattattttcactcatatgttagcctccaagttgcaaagataataggaaaaagtaggctttaaaatgtaaacattttagaagatactatatattctcatctccaatgcacaaggcatcaagaaaccagataatacaatttgtaaggtgccaattatgtctaaatattacatttgataatggattctttttctaatttactctgcctggagttagcatggtaaataaattctcactgaaatctagcaaaatctccatctgaaggtactgatgactcaagtctgtggtcctgcataagcaacatctttggagctgttagagaagccctgcctcaggttatctgcaaatctcagcaactgaacagtcaaaaatgacacaaagga

SEQ ID NO: 180993 - DNA, 1747 bp, Homo Sapiens
ttggaacttccttaagtaataatcaatgaaagaaattctatgcatggttttgaaataatgtccttgaaagaggaatcaccattaggaaaggtgagtcagggtcctttgtttaatgtgactagtggctcatcatcaccagtgacctggttgggcctactctccttccagaacctgcattgcttcccagacctccccactgagatgcctctaagagccaaaggagtcaacacttgagcctagggtgggctacaacaaaagattctaatttaccttgcttcatctaggtccaggccccaagtagcttgctgaaggaacttaaaaagtagctgttatttattgtattatataagctaaaaacatttatttttgttgaatcgaaacaattccatgtagcaatcttttttctgttcacggtgtttgtgatagaaccttaaattccgcaagcatcagttttttgaaaaaatgggaattgaccggatagttacaggcaaagattataaatagctacaacatcatttaacttttataaacatgccttctctctattgaagacatctgatatttttgctggaaagttggatctatcctcagtaactctgccatgaattcctgtttcctggttccagaaaaagaaaagattacatttctgatcataaagaatgtcttgcatatgggaaatttttcaaaataaggggggtattatttatgtggcatgggaaaacttttgccatggctgtttgtcttagtggcatcttttgatgacattggatcagatatatgtagatgctgatatatgggacacatgtttaggttttggtgcagttgcacaaaactgtgttagtttatatgttactgtgttgcctttatttattctctccaaagtgtctctttatatttgttttacaatctgtgaaagagtataccataatacagaagtattttcatagtctttacctctggattgtcctgtcagtatagccacgttgatgagattacaccagtgcctttgatggtcaaccaatcatctttaagtatttgagccctgataaatattttggtaacataatccaaattagagacttagagctctggttagcaatcatgtttaaagagaagcttcttaaagctctgtatgctgggagattcatgattattaccaacgttttgatttcatgaaggtgttctcaaatttaaagcacattttcagtaagaacaaaaatatttaatgtttttatcttagacttgatacatttgcatattactatggaagttattcaccttgtccctgtttttctttaagatattttaaaatcatagttatactacagtccttttttaaatgtatcctgatacattgtaaaatattttaatttcattgtggaaaataatgttggataaggagatatttttcactgttaacttttagcccatgcattttcataatttatttttttcacttgctgctttatatgacatatgtgacatttgattatttaacacttgatgtgatctgcataaacccaagttgcacaaccctcctgctgaagataaaattgaggttaaagataaagatttattttcatatttgtacagtgatcggcttcagtgatggtttttgtgggcatttattgtgtgtgtgtaagaaatttcatatgtatatattaagtaggcctctgagtattgaataattgttctatgattttgatttatatggtttacatcttcagtgtgtgggccatatttcgtt

SEQ ID NO: 180994 - DNA, 2087 bp, Homo Sapiens
  misc_feature (1713)..(1725): n is a, c, g, or t
  misc_feature (1798)..(1852): n is a, c, g, or t
ttagccaccacacccggctgtaaaaatgtacttattctccagcctcttttgtataaaccatagtaagggatgggagtaatgatgttatctgtgaaaatagccaccatttacccgtaagacaaaacttgttaaagcctcctgagtctaacctagattacatcaggccctttttcacacacaaaaaaatcctttatgggatttaatggaatctgttgtttccccctaagttgaaaaacaactctaaaacactttaaagtaccttcttggcctgggttacatggttcccagcctaggtttcagacttttgcttaaggccagttttagaaacccgtgaattcagaaaagttaattcagaaatttgataaacagaattgttatttaaaaactaactggaaagattgttaagttctttctgaattattcagaaattatgcatcattttccttcaagaatgacagggtcagcatgtggaattccaagatacctcttgacttcctctcaagctccgtgtttggtcagtggaggcccatccgagctcagcactgagaagtgttagtttctttgggacccatctaccctgaccacatcatgatgttcatctgcagctgttgcaaggtgttcagattgtataaacataaatgtcacaaaaactttaaaagaagtgcaattctcaaaaggttaggtggactaaagcattctgtaaagcaactgctaataatgagcttacagtggatttgaatttgaaaaatatagtaacaagcctgtcaaatatctgcaagaactatggaataaaactactgatgcagtgaagacagttgaaaagatcaaacaaatgccaagctatatttataatgaacaaattcaagaaaaaggactacggaaagttcaggacatcaaagaagtcaggcaaaactcatcttgacccctgttgcaggcaaaggaacgcagctggaagaaaagatgatataacagttaacaggatgcagacatggcagaggtttcctaaaaatctcattatctataaccatttctatatttacatttgaaaatctcctttggagacttagaacctctaaattattgacttattttttatataaggtcactccgatgaaaggtgattacaaaatcatctacattgctgtctacaaaacagataatatggatgtttgatcgcatctcattgttaactctttactgatatgtttgtaaatacagaagtgaaatgtggacataaaatagttacgctatttggttaatggtactagacaacatgtaattaatgacattcaaaaatttatggctagtgatatatataaagtaaaattttctttgcagtaaaatatgccctttattatagaagggaggatataaggaaccaacagtttgtatgaaaatagctcaaataatatcttttattttgattttaatatttcttattttggtttattagtgtcttagaacaaaatggccttatataatgaagcctagttatgctggactgttttgatctcttttaattgttctgacagatagttggggatgagagccgaataaggtttgcctgaaataactgacactatataatttctgctttggcaaatactaagttctaacttgtcattcctggtagaacaagctttatttttcgagcctagcaatgatctagaagcagatgttatctcagtgccttttgcaatttgttgtgtgggnnnnnnnnnnnnnaaagccacacaataattttggaaaacaatgtatgggtagaacatgtgtctgttaattgcacacaaaaccactnnnnnnnnnnnnnnnnnnnnnnnnnnnnnnnnnnnnnnnnnnnnnnnnnnnnnnngctccaaatggtgctttgaggacctccaaggggattagtggtttgcctgtggaggtcctccaggcattgtttggagttgataatacttcagctacaactaagcagaatctcttttttttggaggtcctcgaagcattatttggagttgataatacttcagcttcaatttggagttgataatatttcagctagaaccttagtagaatctgtttttttcctttggaggtcctcaagg

SEQ ID NO: 180995 - DNA, 2646 bp, Homo Sapiens
  misc_feature (878)..(905): n is a, c, g, or t
  misc_feature (1027)..(1044): n is a, c, g, or t
  misc_feature (1325)..(1341): n is a, c, g, or t
  misc_feature (1444)..(1461): n is a, c, g, or t
  misc_feature (2435)..(2465): n is a, c, g, or t
tgcaacaaattgatgagcaatgcttttcttattaaagagaggcacctttgtacaaaaaagttggcccacgcaagacccatgaaaatgaatcacatttgcttgacttagggcaaagtacgaaagagagacaaagggttctcttggaaacaagaagagtgactccagatgtggcctgaataattgccatgttaagttaatgcaaaagatcagaacagggctacatttgcacaggcagtttctctccgggccgtagttttcactgatgatcacctttcacagcattttccccaaccagcatttcacttagtcttctctatacccagcacctcccccggcacccccggcaagcccactatcacttccgacttccaacgtggcatccgtgagatctgtccacattaggcgaagcaggagaacactgagagcagcaggatgggtttggaaagagcatgcctctggaaacacagcttcctgggaattcacatgaggccagtcctacagagagcaagatgcaccccaggatttcttcattttctaatagatgtgggagtgctccattttccccgacagcgaatttcccctgagaaacgatactagaccctgggtttgcccaccttgtaactcttccttatctcctccttttcatccctaattcatcctccctctggcatggaattgacgcccgtgcagtacatttgccaagtggcaccttctttcaatttatgttttattttgctatggtggtgattctttatttgctggttgtcttttctcacacatctttctctctgtctctctctttcctgctctttgtttttctgcccagaaaaacctgacttcgataccaaaaaagatgaaactacagaaactcaaatttnnnnnnnnnnnnnnnnnnnnnnnnnnnntactcaacgattctttcagctttattaacattttccattgtttcttgcgacttgtgtctcgttctttgtagtattgatgatgaacatttgataatgaatgttcttgtatattcagataaagnnnnnnnnnnnnnnnnnngcggtctgaatttaatagtgtttataataaaaattttaaaaatgaccctcatagcacgcaaaacaggatggggaatttcccctcttctttctgtgacaatgcgcatcattcctgcattagtttttaacaccagactacctacattcatcatttccctcatttttcttttattttcttgcatttgtgaattagttcaagaatgctagaaaagtgtcgagttgtgcacatccatttcttgtttcacaatgtttaaaagtgacagtaattcattttgtaaactnnnnnnnnnnnnnnnnnggttggaatagtgagcataataggtacaacctaacacattattatgtttattaactttgagacccagaaataaattcttttcttttcttgattcttgctcttnnnnnnnnnnnnnnnnnntgttttgttttgtgttatttttggtttgtttattggggggctttttttaattgtcaggattatgatcttgctgtttttcttcaatatgtatacaaggtgatgtgaaaagatgacttgggcagaggagtaagaacaagtaggcttgttcttctactttgcttcagaattcagttaatgccaaaagcgaagatcaagcccatgttgatgtctcgttgctcacctgcatttccagagagtgtgacactcatgcagtccctgagaaaaataaaatcagggacatacttctccttttagccttttaaaaattcaaaaacgtttagtccaagggaactttttatgctatcaggaaaggtttttgctgtttttgattctgattatcacagccaagtactttgttttatttctccctaattaataactacattccatgaggcctcttccaaccaaagaggccttttcttccaggagagtcccgcaggagatgctggtatgatgggcaccattggttaagtaaactacatgcaggaagaagtccttggggccagtctgccagctgagtcctggttttggatgaagagttaatgagatattgggccaggctcaatgctgtagttttaatgctaagaggttacgtttacttcacagagtacacctcttagtaacctctgacttaggcagctgcttaaagcaaattgcaaaactggcttgatttggaatgtttttattagaggaaaaaagaaagccatattatctggaaaaaaattcattttaaataccatcattcaacaaattatgttcagaaagtggtcagaacttaagcaagaaaagtaaagaaagaatgcagaattgtggagcaatgctttaggaaatatttctacctgaacacttgtactcttgaagtcacaacaaaataatgatgagcttttcacatcacctttatggtttcaatccctagctcaaagcttcctggaatnnnnnnnnnnnnnnnnnnnnnnnnnnnnnnngttaaaataaaataaaacattcaatgtttttctccttttctctcttattacttctttcctttggcattttcaatttgaaatgctttcctttggttgttggttttattctccccctacccctccccttttcttattattcagaatataaacctgcaagctctgctctgtttggttttgaaag

SEQ ID NO: 180996 - DNA, 1380 bp, Homo Sapiens
  misc_feature (181)..(211): n is a, c, g, or t
  misc_feature (1137)..(1203): n is a, c, g, or t
  misc_feature (1306)..(1322): n is a, c, g, or t
tttcaaaaccaaaacagagcagagctttgcaggtttatattctgattataagaaaagggggaggggtagggggagaataaaaccaacaaccaaaggaaagcatttcaaatgaaatgccaaagggaaagaagtaataagagagaaaaggagaaaaacattgaatgttttatttattttaacnnnnnnnnnnnnnnnnnnnnnnnnnnnnnnnattccaggaagctttgagctagggattgaaaccataaaggtgatgtgaaaagctcatcattattttgttgtgacttcaagagtacaagtgttcaggtagaaatatttcctaaagcattgctccacaattctgcattctttctttacttttcttgcttaagttctgaccactttctgaacataatttgttgaatgatggtatttaaaatgaatttttttccagataatatggctttcttttttcctctaataaaaacattccaaatcaagccagttttgcaatttgctttaagcagctgcctaagtcagaggttactaagaggtgtactctgtgaagtaaacgtaacctcttagcattaaaactacagcattgagcctggcccaatatctcattaactcttcatccaaaaccaggactcagctggcagactggccccaaggacttcttcctgcatgtagtttacttaaccaatggtgcccatcataccagcatctcctgcgggactctcctggaagaaaaggcctctttggttggaagaggcctcatggaatgtagttattaattagggagaaataaaacaaagtacttggctgtgataatcagaatcaaaaacagcaaaaacctttcctgatagcataaaaagttcccttggactaaacgtttttgaatttttaaaaggctaaaaggagaagtatgtccctgattttatttttctcagggactgcatgagtgtcacactctctggaaatgcaggtgagcaacgagacatcaacatgggcttgatcttcgcttttggcattaactgaattctgaagcaaagtagaagaacaagcctacttgttcttactcctctgcccaagtcatcttttcacatcaccttgtatacatattgaagaaaaacagcaagatcataatcctgacaattnnnnnnnnnnnnnnnnnnnnnnnnnnnnnnnnnnnnnnnnnnnnnnnnnnnnnnnnnnnnnnnnnnnaagagcaagaatcaagaaaagaaaagaatttatttctgggtctcaaagttaataaacataataatgtgttaggttgtacctattatgctcactattccaaccnnnnnnnnnnnnnnnnnagtttacaaaatgaattactgtcacttttaaacattgtgaaacaagaaatggatccaa

SEQ ID NO: 180997 - DNA, 1207 bp, Homo Sapiens
  misc_feature (62)..(80): n is a, c, g, or t
  misc_feature (1056)..(1086): n is a, c, g, or t
ttgggtttattaactttgagacccagaaataaattcttttcttttcttgattcttgctcttnnnnnnnnnnnnnnnnnnntgttttgttttgtgttatttttggtttgtttattggggggctttttttaattgtcaggattatgatcttgctgtttttcttcaatatgtatacaaggtgatgtgaaaagatgacttgggcagaggagtaagaacaagtaggcttgttcttctactttgcttcagaattcagttaatgccaaaagcgaagatcaagcccatgttgatgtctcgttgctcacctgcatttccagagagtgtgacactcatgcagtccctgagaaaaataaaatcagggacatacttctccttttagccttttaaaaattcaaaaacgtttagtccaagggaactttttatgctatcaggaaaggtttttgctgtttttgattctgattatcacagccaagtactttgttttatttctccctaattaataactacattccatgaggcctcttccaaccaaagaggccttttcttccaggagagtcccgcaggagatgctggtatgatgggcaccattggttaagtaaactacatgcaggaagaagtccttggggccagtctgccagctgagtcctggttttggatgaagagttaatgagatattgggccaggctcaatgctgtagttttaatgctaagaggttacgtttacttcacagagtacacctcttagtaacctctgacttaggcagctgcttaaagcaaattgcaaaactggcttgatttggaatgtttttattagaggaaaaaagaaagccatattatctggaaaaaaattcattttaaataccatcattcaacaaattatgttcagaaagtggtcagaacttaagcaagaaaagtaaagaaagaatgcagaattgtggagcaatgctttaggaaatatttctacctgaacacttgtactcttgaagtcacaacaaaataatgatgagcttttcacatcacctttatgggtttcaatccctagctcaaagcttccctgggatnnnnnnnnnnnnnnnnnnnnnnnnnnnnnnngttaaaataaataaaacattcaatgtttttctccttttctctcttattacttctttcctttggcattttcatttgaaagcgtcccttgtggttgtgggtttactctccccctacccctccc

SEQ ID NO: 180998 - DNA, 1560 bp, Homo Sapiens
  misc_feature (98)..(114): n is a, c, g, or t
  misc_feature (217)..(235): n is a, c, g, or t
  misc_feature (1210)..(1278): n is a, c, g, or t
ttggattagttcaagaatgctagaaaagtgtcgagttgtgcacatccatttcttgtttcacaatgtttaaaagtgacagtaattcattttgtaaactnnnnnnnnnnnnnnnnnggttggaatagtgagcataataggtacaacctaacacattattatgtttattaactttgagacccagaaataaattcttttcttttcttgattcttgctcttnnnnnnnnnnnnnnnnnnntgttttgttttgtgttatttttggtttgtttattggggggctttttttaattgtcaggattatgatcttgctgtttttcttcaatatgtatacaaggtgatgtgaaaagatgacttgggcagaggagtaagaacaagtaggcttgttcttctactttgcttcagaattcagttaatgccaaaagcgaagatcaagcccatgttgatgtctcgttgctcacctgcatttccagagagtgtgacactcatgcagtccctgagaaaaataaaatcagggacatacttctccttttagccttttaaaaattcaaaaacgtttagtccaagggaactttttatgctatcaggaaaggtttttgctgtttttgattctgattatcacagccaagtactttgttttatttctccctaattaataactacattccatgaggcctcttccaaccaaagaggccttttcttccaggagagtcccgcaggagatgctggtatgatgggcaccattggttaagtaaactacatgcaggaagaagtccttggggccagtctgccagctgagtcctggttttggatgaagagttaatgagatattgggccaggctcaatgctgtagttttaatgctaagaggttacgtttacttcacagagtacacctcttagtaacctctgacttaggcagctgcttaaagcaaattgcaaaactggcttgatttggaatgtttttattagaggaaaaaagaaagccatattatctggaaaaaaaattcattttaaataccatcattcaacaaattatgttcagaaagtggtcagaacttaagcaagaaaagtaaagaaagaatgcagaattgtggagcaatgctttaggaaatatttctacctgaacacttgtactcttgaagtcacaacaaaataatgatgagcttttcacatcacctttatggtttcaatccctagctcaaagcttcctggaatnnnnnnnnnnnnnnnnnnnnnnnnnnnnnnnnnnnnnnnnnnnnnnnnnnnnnnnnnnnnnnnnnnnnnctctcttattacttctttcctttggcattttcaatttgaaatgctttcctttggttgttggttttattctccccctacccctccccttttcttattattcagaatataaacctgcaaagctctgctctgttttggttttgaaagtttaagcttttctgcttctgtgagagcacaggcttctgttcccttttgattccaactgaacttttgtgttctctaatgatactaaacaccggtgtaggttttacagtcttctaatttgtactggtaatgcatattccc

SEQ ID NO: 180999 - DNA, 5590 bp, Homo Sapiens
  misc_feature (461)..(488): n is a, c, g, or t
  misc_feature (3039)..(3070): n is a, c, g, or t
  misc_feature (4482)..(4534): n is a, c, g, or t
  misc_feature (4560)..(4620): n is a, c, g, or t
  misc_feature (4742)..(4759): n is a, c, g, or t
  misc_feature (5040)..(5056): n is a, c, g, or t
  misc_feature (5159)..(5177): n is a, c, g, or t
  misc_feature (5182)..(5226): n is a, c, g, or t
ttggctcaaaaactcagcttcccaaagtgaaattctgcgctcattaaacaatagctccccactcctccccacaactcatggtacccattattctactttctgcctcttataaatttgattattcgagattccacatacaagtggagtgtaattttggaacaaagcaagtccctccttcattttctcaccctctcagtttctctctttttccagcctttcttctattcctcaaatggcatcttgcaagtaacttggcagcttatgtagccaaagaacacaaatgtgttgtgtttttttattttctttcttgggttactattaacgctcccttccctgtctttttctgtagttttgagtatccgaggagcccaggaggaggaacccacagacccccagctgatgcggctggacaacatgctgttagcggaaggcgtggcggggcctgagaagggcggagggtnnnnnnnnnnnnnnnnnnnnnnnnnnnnttctggaggggcaggttcagacaactcagtggagcattcagattacagagccaaactctcacagatcagacaaatctaccatacggagctggagaaatacgagcaggcctgcaacgagttcaccacccacgtgatgaatctcctgcgagagcaaagccggaccaggcccatctccccaaaggagattgagcggatggtcagcatcatccaccgcaagttcagctccatccagatgcagctcaagcagagcacgtgcgaacggtgatgatcctgcgttcccgatttctggatgcgcggcggaagagacggaatttcaacaagcaagcgacagaaatcctgaatgaatatttctattcccatctcagcaacccttaccccagtgaggaagccaaagaggagttagccaagaagtgtggcatcacagtctcccaggtatcaaactggtttggaaataagcgaatccggtacaagaagaacataggtaaatttcaagaggaagccaatatttatgctgccaaaacagctgtcactgctaccaatgtgtcagcccatggaagccaagctaactcgccctcaactcccaactcggctggttcttccagttcttttaacatgtcaaactctggagatttgttcatgagcgtgcagtcactcaatggggattcttaccaaggggcccaggttggagccaacgtgcaatcacaggtggatacccttcgccatgttatcagccagacaggaggatacagtgatggactcgcagccagtcagatgtacagtccgcagggcatcagtgctaatggaggttggcaggatgctactaccccttcatcagtgacctcccctacagaaggccctggcagtgttcactctgatacctccaactgatctcccagcaatcgcatcccggctgaccctgtgccccagttggggcaggggcaggagggagggtttctctcccaacgctgaagcggtcagactggaggtcgaagcaatcagcaaacacaataagagtctccttctcttctcttctttgggatgctatttcagccaatctggacacttctttatactctcttcccttttttttctgggtagaagccacccttccctgcctccagctgtcagcctggttttcgtcatcttccctgcccctgtgcctctgtcctagactcccggggtccccgccctctctcatatcactgaaggatattttcaacaattagaggaatttaaagaggaaaaaaattacaaagaaaataataaaagtgtttgtacgttttcatgctggtggtttgaggagccaaatttacctcactcgaatccctcactccctatgttaacaggcaatccttctctgtttctcttattactctcactacctcttagcaggaatactccacattgccctattcattccaggcctccctgcttcctcttgctcttcctccctggggacagtactgattggaacactttcctcctcttccttcctagccccagctattcactggggactgtcatagctgggattctaaaggtgccacatttttcagtttcatctccactaggttggttcccgggcaggaagtcaggcagcagggaaggacacgggaacagcaggtggagaattcctacagtctttcttaccctgctagcaatagctctcagtttcagaggcacagtctttggagaccatttagcactgagaaagcaatatttagaacctattgcaaaactgggcctgagttaggcatggtgatgaatgcatcagcaaggaatagaaagttcttatcgtgaaacccttcaacctcaactatgccttcatagacacacacgttcatgcacatgtaggcacatgtaccatctcacatcttcactttcccgagatgccatatacaattacctacattaataactgtagcactatgccttttgagcccgagagagggaattagtgactctaagtgaaggtcactgacacagagaagcagtatgtgtctggggcttccaggacctgcaggcccactagcgtgcacttaccagaatggcatacacaggacctgatcatgaggaagaccaggtttccagtgtaaactactcttgttcccaccacctctggagcactcagggagccccatacagtacttacaatgtctttaatggacttgattctgtttaattttttgttttatattaggcacactgtattaattttccaaaatgttataccacactatgttcttggtcctgacctattgctctggaggaaagagttgtataagaacgtggctcatgtgaacttttgctagcttcatttgaggacctgagaatcatggggaaagggaaggtaatgttttcattgaaatcatcacagtgatttttattccctgggaacacagcgtgtactaaaaatacatgagaaaatagcatgtatatgaaagctattctcaaaagtcacctgagctcaccatcttcatagccaaccctaccagttataaagatggcagctctatcacttgattaagtgggaggtggtcaaatattttgnnnnnnnnnnnnnnnnnnnnnnnnnnnnnnnnctgttatgcctggcttactaagagtcttgtgagagactgagaagttgattttgttcatatccaatctgtaaatgcgaagtcaggggaagtaatgtccctgaaataaacgggttcatgccatctagggacaataaatggttttcttgttgtaacttctggttaatatcagtaccttgatgtcatcaccgtgatgacaaagagaagagttattgttgatcttcttggttttggtctggctcttttcttaggataaagaaaaacttccaaactagaaaaacaggccctggttcccttagtttgcacttgaacccaatatgttgccttgtacatacttggtccctgtcacattgactgcttgggaggcttccagggagaagtatgagaccctgaggggtgagaatgggcagctagcaagaacatggaaattctgcttggcactacagtcataaatagaaaacactgtgtgtgctcaggggagcaggggatgccactgaagaaactcaagggaatgtgtatttgaaggaaatgcaaaaactaagtatttagcaaaatgaaattatgccttgatgactaaaaggcactagaaaggttgtgtctactaacttcagccctaatcagaacagatgcctagaaggagcatttttgtgacaacttcatagtgattagaatcagtggagaactccatcttagtggcaggaatataatgaaactacccacgcaagaacatggttgaatcacatttgcttgacttagggcaaagtacgaaagagagacaaaagggttctcttggaaacaagaagagtgactccagatgtggcctgaataattgccatgttaagttaatgcaaaagatcagaacagggctacatttgcacaggcagtttctctccgggccgtagttttcactgatgatcacctttcacagcattttccccaaccagcatttcacttagtcttctctatacccagcacctcccccggcacccccggcaagcccactatcacttccgacttccaacgtggcatccgtgagatctgtccacattagcgaagcacgagaacactgagagcagcaggatgggttggaaagagcatgcctctggaaacacagcttcctgggaattcacatgaggccagtcctacagagagcaagatgcaccccaggatttcttcattttctaatagatgtgggagtgctccattttccccgacagcgaatttcccctgagaaacgatactagaccctgggtttgcccaccttgtaactcttccttatctcctccttttcatccctaattcatcctccctctggcatggaattgacgcccgtgcagtacatttgccaagtggcaccttctttcaatttatgttttattttgctatggtggtgattctttatttgctggttgtcnnnnnnnnnnnnnnnnnnnnnnnnnnnnnnnnnnnnnnnnnnnnnnnnnnnnngcccagaaaaacctgacttcgatacnnnnnnnnnnnnnnnnnnnnnnnnnnnnnnnnnnnnnnnnnnnnnnnnnnnnnnnnnnnnntactcaacgattctttcagctttattaacattttccattgtttcttgcgacttgtgtctcgttctttgtagtattgatgatgaacatttgataatgaatgttcttgtatattcagataaagnnnnnnnnnnnnnnnnnngcggtctgaatttaatagtgtttataataaaaattttaaaaatgaccctcatagcacgcaaaacaggatggggaatttcccctcttctttctgtgacaatgcgcatcattcctgcattagtttttaacaccagactacctacattcatcatttccctcatttttcttttattttcttgcatttgtgaattagttcaagaatgctagaaaagtgtcgagttgtgcacatccatttcttgtttcacaatgtttaaaagtgacagtaattcattttgtaaactnnnnnnnnnnnnnnnnnggttggaatagtgagcataataggtacaacctaacacattattatgtttattaactttgagacccagaaataaattcttttcttttcttgattcttgctcttnnnnnnnnnnnnnnnnnnntgttnnnnnnnnnnnnnnnnnnnnnnnnnnnnnnnnnnnnnnnnnnnnnaattgtcaggattatgatcttgctgtttttcttcaatatgtatacaaggtgatgtgaaaagatgacttgggcagaggagtaagaacaagtaggcttgttcttctactttgcttcagaattcagttaatgccaaaagcgaagatcaagcccatgttgatgtctcgttgctcacctgcatttccagagagtgtgacactcatgcagtccctgagaaaaataaaatcagggacatacttctccttttagccttttaaaaattcaaaaacgtttagtccaagggaactttttatgctatcaggaaaggtttttgctgtttttgattctgattatcacagccaagtactttgttttatttctccctaat

SEQ ID NO: 181000 - DNA, 420 bp, Homo Sapiens
ttggagaagaagaagcagaaggaatggaaagcctggagaaagaggatgaaatgacggatgaagcagttggagactctgctgagaagcctccttctacttttgcctcacctgagactgctccagaagtggagaccagcagaactccaccagcctgtgaaaccacgaacccttcaatcaagaaaagacctttgatcaggagaagacttctcgtctcatttctggggacacattcaggatttctccaaagcaggtgaaggtacgctcgagcgtggtcattgaggacaagtcgacgagagatcccgagtacatctacagtcagccttacggagaaaatcagcttcctgtttggatacccactagacatttgaagttctacaatgaacccattggagatgcaaagaaaagggcctccacggagat

SEQ ID NO: 181001 - DNA, 1011 bp, Homo Sapiens
  misc_feature (193)..(221): n is a, c, g, or t
  misc_feature (358)..(415): n is a, c, g, or t
  misc_feature (926)..(937): n is a, c, g, or t
acgagaaacattatcaaaatttgctactaaaagatgacagtgctttcacaagaatagtacaagttagctcgcaagtacaagacaatgggggtaaacagtcttaaattttctaagtagtaattttaggcttttctggcaaccataccatacttaattatgcataaactttgcagtttgtaacgtgaaatctgtnnnnnnnnnnnnnnnnnnnnnnnnnnnnngagctaatttcaaaaattattagatatttgataaccctgtatcatacattatataatttcatatttttagcctcaaaacataggtgtaaaatattgaatttaagacttgaaaaataaaatcatttttgaaatgctgnnnnnnnnnnnnnnnnnnnnnnnnnnnnnnnnnnnnnnnnnnnnnnnnnnnnnnnnnngaccttgatttagcttaacaatgtgcataaaagcactgtatgtctttaccatgttttcactcacttaaaaaaaagtgttctttaatgtttttccttttgcataatgtgcaaaataaaaggcaaaaagattaaaagcaaatttctatctttctcttgcctagtgcttttatgactccgttaacattacaaagtcaacagggactatgcaaaactttggtataaatgataatactactaccgtcacagttgagggttaaggggtggtcaaaagaaatggaagtgggaagaaagattcagtaacacccccatttattaaaacaccagcaaattaaaagtgaaataaatcacaatgaattataatacaatttacacattgagcacagaaaaattaataaatctaataatatttataaaaaaagcaaaatcagtctttttccagagactaaaaaccgtttttcagtctgatcaactgctgctacaccaactttagagccaaatttaatttcaagtnnnnnnnnnnnntttacaaccacagatttcgcataaatggaaactggtctttccttgatttccctttgaagtcactaatgagccaa

SEQ ID NO: 181002 - DNA, 1896 bp, Homo Sapiens
  misc_feature (1554)..(1562): n is a, c, g, or t
ttggattagccctatgacttgccgagctatacagcaagtaaaggtagactcaggaatgaaaacccagactcctggcttcttgtcagtgttctgcccatggctctcatcactagaccatatttcctaattcatatttggaaagtcactaataaaattaatggtaggaactgtaactcacaacatcatacattattataatttatacattcatatcttaaagaccattttggttttcgtgttaaaacacataggtaattggatttcacattttggttgcattcatttttcgcccccctcaacctttacaggttattttcttttatttgagctgtgttccaaagacccagcattccaaaaccttggaacggttttgttcagttatgccagctaattctggacttgcattgaggtaagaaaaacttaacattcttttggtcctctgcctaatggaataggctctttatataagattattcttgaaaacttgataaaaatagtctgttgttccactatgtcctcatgaatatatactgcttaatttcagagttgttaagccaatatttagctattcattcaaaagtcagtgtaaaaattctggtcgcttcagaaaacttcaggttacaaaggggcaaataattccattcaagtaaagttcatctgtgttccctaaacacacaccatctgtccttagcatgtgcattataagcagtaagcttgttttccacggcaagggaatattatttaagatgttttcatattttcacctaggtcagttgctctcaaatattggcaaacattagaatctcctgggatgctcatttaaaatgtagattcctgaccttgagccctcacactacatttttgaagcactgattagggatttcatatattcgatcagaacgagatttctcagcctttctttgtagtttctctgctctgatacagcaaatccactttcatccgcaagaattatgctttttaattcaaaaaggtaccctgcatgctaatgcactggcttccacgtttgcagtcattcccactgcatcagttgtatcttaatgttttatggatcataagatgcctaaaatatttatgaaatgttcccttatgttttaaaggatttacatttcatttagcatgtatgtggggaaaatcgtataaaagtttaaaaactaaagttgagacaaacataatggtagtattttacagttttcttagcaagcctgccaatctgtagaagctcattacagaaatgttaattatgaaacacctttgataaaacgtgaaatagaaaatgtcatattttgacatgattttctattgtgataggcattttagaatataggtagtttacttgtttattttgttggtaaatccctacatctgtgttttgatacttatttcctctggtcatccctgttctttttttctaggagaataaagaactttaatagttactatacatgcattttagttcaagaaacattcaagactgatcatactctaagaaagaaaaataccaggaaattgcattactatcaagccattactttnnnnnnnnnttggggtgggaaacagggactgttatttggcgggaatgctttcatgtcctatagaaatacatggaccttagtgtagtttggtaagatgagcatagatcttgacttgacctcttcgtagtttgcacattcctgtcccagggtaatttttgtaagaggcattctaaaatattttgctgggtagtcttgatgggaatttaactaatcaaaatttatacttcgtcattgtgctcatagagcacatttgggggttcgttacaacttgcaatgctttgttcattttcctgaatgtacctttacaggttacttcaaacatgaatgggaaagaaagcaatgg

SEQ ID NO: 181003 - DNA, 1215 bp, Homo Sapiens
ttggcactaaggtaggaatgggccaactatggcctataggccaaatctggcctgctgcctgttgttacgtcctgtgagctgagtgtttttctcatatttaaacggatggagaagaatcaaaatattttgtgacacatgaaaattaaatgtaattcagtgtccataaatattggcatgcacccacactcagtttacatactgcccagttcacctattgcctgtgactattttagtgttacagaggcagagttcatactctctggcccttcacagaaaaaacttgccaagcactgccttaaagcatctattgaatataacgaattaagtcttctcctgtttatctagaatgatatcagctaagtactgtcctgggggaaattgacaaaactcatacaaataatttttctgataacccaggagcttgggttgagaaaaactggattaagtcttactgtgacattggtagaaaggttattgaatgtctggcaggagttgtgccttgaaaaaatggatttcaaccaagattggcctgtggcaatcttgagcaactatgcagagacaggcagtgggaaaaacaattcaggatggcaatgggagcacattctagagattacagaagctggtgtagaaaagcaggatgaaaagttaggttggggccaaaaaccagagaagaaaagtacactggaaaaaggattgagtatcaagtgctgcagaggatctcagaggtcaagaatttagagcggaacgttgagcttggccttcaggagcatgactgtgataaaaggccagctgtgaaacctgtaggagaaatgatgacccagatagtgctgagcagccggctggcagcgttcttggggtccctgtggggatgcagagtggtacaactgcagatggggaagcagcatcattattaacctgtgtttatatgacattcagaaaaatatatgatggcctttctttctcttttcctttaatattagtgttctagaacagatcagacattttgtaatgatgcctgaaataaacactaaccacctcgacaagcaacaggttcaactcctggcagagatgtgtatccttattgatgaaaatgacaataaaattggagctgagaccaagaagaattgtcacctgaacgagaacattgagaaaggtgctgctttgaaacagtctttcttgtaaagcgatttgtgtaaggcattcccgatttgctga

SEQ ID NO: 181004 - DNA, 1970 bp, Homo Sapiens
  misc_feature (262)..(274): n is a, c, g, or t
  misc_feature (1248)..(1261): n is a, c, g, or t
ttgggatagtgtcctaaacgacttttttaacttcctaaatggaaagagcataacaatgtagttgattggtaagatttacagggatttggtttctgagtttgaggcacattcccagtgaataagctgagtcccataccacactcaaaaggttttaataaatctaatcctatttcttcttaaagtttggttttcagacagtgctggtgcttctgcttcttaagttcatcaagggaatgaggagttcttgtccttctcctcctcnnnnnnnnnnnnnccactttctccttcaggattaaagattttgctgcacaattgttatttgttaggttaaatttggacaaatattcaaagcacacatagacatataagtaaggagaaaaatgttccaggagagtaggttgggcagtgacaggaacaaacagacctaggatgatcctgagaacaaatagaggggttcctttacttgtataggatatcaaaagtgctgttaatcacaaacctcattcaaatggcaggctgtcgagacagtgtcttgaggggctggctgtactgtttattttttcgtttacacaaagaagcaattgagtatattgcatgatgagaaatcacacactagggtcatgttatacagaagtaaggggttggaaaaatggaatgttgttcactccatggaattattggcattcattcctgtgtttcaaatgaaacatagatgcttttcatgaaaactgacctacaaaaagcaatttgatgttctgcaactgctatgaaaacctaagccatttattttagctgatagcagattgcataatatactcatttagctgcccaatcagattgttttataatattacctggggtacaaaatcctctgttcctggccctggaccacagatctacctccacatggcatatttcctttctggtcaggggtaggggagggggctttgcatcacttgaatttagactcagcctctctttaaaagattgtctttatattgaacacctttttcttttcaaccctgcttgaatactttaggttactatttcctgaggctgtccattctcactatattgtagaattctagcaccaagaagggatcccgttaaccatctagtcctatccatccctcatattttacagatgagacaaatacgggtcagatttttttctccagatgtttctttgagcccttatacacctgcacgcttattctcctgggtgacagagcgacacacttgatctcnnnnnnnnnnnnnnttgtttcagcatcttgttcaggattccacattacatctaatagtcatatctccttaggatccttttgattgtgacagtttctcagactttccttgttttcagtgaccttgacacttttgagagagattttcctcaactgggatttgtcagttgtctttctcatgattagactgaggttatgagtttttgaaagtaggaccacggagaagaagtgccattttcatcacatcatacaggcatactttggagacaatgcagatttggttccagatcactgcaatgaagcaaatattacaataaagcaagtcacacaaattttttggtttcccagtgcatataaaattttatgtttacactatcctgtagtctggtaaatgtgcaatagcattatgtctaaaaaacaatgtacataccttattttaaaatactttattgctaacatgttactggcacaaacacgaagtgagcacatgctgttggaaaaatggtgccaatagacttgttggtcacagggttgccacaaacttttaatttgtaaaaaatgcaatatcagcaaagtgcaataaagtgaaacacaataaaacgaggtatgcctgtatttacatgactcatcactgttgtttaaccttgatcacctggctgaatagttgttgtcaggtttctcccctgtactctttttttcctcccctccatactgtactctctgaaa

SEQ ID NO: 181005 - DNA, 1252 bp, Homo Sapiens
  misc_feature (910)..(976): n is a, c, g, or t
ttggcattggaatttttgctgatcacagtcttatgtcatttttttctctgtttttattcccagcaattttctcctaggttaacatatttttggtgaacgtttaggcctttcataggtattaagctgacattatctagcttcttaataatttaacactgtcacaaaaatgagaagttattattttttaagtgatcacatagttcataccactagtaactagaaaagatatttattcacatgatatttacaaggctcttcagaagggaacagtcagcattttaaattactagattttagcatacttaacaaggtttgaacagattctacccctattttcctccctttttagcgtcttctttccttaaagataaaagaaaactcaaatttgtttacattaggctttcttagcatataaatatatttccaaaataaattacatgttgtgtaaactttctccatgatgaaatagtcaaggaccagaatctgtaatatttttatgtaagattacttgtcaagactactacaagtcagtatgaactaccttcccataaagatttttggtatttgtacttatttatgaactttacttgagacagaatatggttaaaattaggaacatctactttgaatgaggtttatttttctattttgaatttgccttatgtatattcaaaggcttatggaaatactgtaaaggaacattaggaaaaggacaaataggctataaccatctatcttaaaatcagacccttagtataagcacctctttttcttttcctctttgacaatttagtctcttatttaggtccatgtaattaatttcattccattattttttagctgtttattctaaaaaacaaaaattttcagccactcccatttattctcccatgacatggtcctatatagnnnnnnnnnnnnnnnnnnnnnnnnnnnnnnnnnnnnnnnnnnnnnnnnnnnnnnnnnnnnnnnnnnntgtattttcagtgtaacaaatttattataaaagtgtagttcgactcttcttggtcttggagtttgagagtacagaattacagggaatgaagagaggtataagtagatattttaatggaaatgaagtataaattaataacttgacttacccctccataagttactgctaactggagatacccttgtatgcccaacctgtaaaggaaaaagttctatttctatatttataggacattcttctcagtcaaggaacagtaagaaatatgtaggtttcaat

SEQ ID NO: 181006 - DNA, 899 bp, Homo Sapiens
ttgggtcagggaaggctcctgggaggggtctgggctggacttttgagacagggaagttaaggtcagcagaggtcggggaaggagcagcattccagaatgagcagatatttggagttggaaatgtagctgagggcctcaggaggtagtaggaagctggtctgggtaaagagaacacatgtggaaatggatgcagatttcattagagagacaagagtggccagattatgaattgtcatggaattcaggccaagggtttggatttcataatttagcaaatagcatgatagactttacatcaaaggtgagctgctgtgaggcagtatttagaacagaagagaaagaaagccagaagcaagaagaccatttggctggcagttttctgagagtaggaatgatatagatacctgaattgggatggtgcagctgagaattactgaacgattaacttcatattgcagagaaagaaagcactttacttagaaaggcgacaaggagggctgaacggtgtactaactttgcaaggctagttcacagagagaacaggagagttcttgcaggggggaaacatgggactttgagctagattacagggaataagttgaggaatttggtttcagacacattaaatcagacataaaagctagtcttcatagcagtgtcatgaaaacatttgaagccatagtctgaaattccagtgagaagccaaaccatatcgaagaatctcctgcattcataagggaaaaacattagtttaagtgaagacagcagcggggccaaagcctaactgtgagggctaactactgtttgggtggaattataatattttagataagatttaagaggattctaattctagctacttgataggaatgcgaatgatgataaggcttttagagtta

SEQ ID NO: 181007 - DNA, 3209 bp, Homo Sapiens
  misc_feature (77)..(92): n is a, c, g, or t
ttgggcattcatgtatattcaatgttagtcaatagaccatagtggcctggatgctttaacaagccaaattccgcaannnnnnnnnnnnnnnnccccttcatacttgtatgatctcacctgaccagtgatttcttttcctcctaaccccatgctaccaccattttctggaaatcaaagagatgtggtagtaaatcatacagtacacacgatcatctgagatcaatatgagcacaaaactcatcaagtaggtctgcctggaatgtatataaaaaatgtaaataaaaatttgtaaattagtgtgaactgtatcttgcatatgagactgtgtattgttttgcattctcttcccttttgtagaaatttttctgtaaggaaatgattcagcttgttggttttagagtaaaaatagccaacagttgtggctacacagtgagatcacaggaactggaaatagggtttgtcggctttggttaatgtcagtactcatttatttagcctctcagtgcttaataagacttttctttattttttagttagccgttaggttttgtgaggttagattcctggaagcagtgaatttatacactgttatattaatagagctccgttctttgagtcatgattccaagctaaaggaaattaaaaatgtaatttaataatttcctatttttagggttgttaatttttttctacaaaaaaaccttgaaattttagatatcccaatgtgaatctaatttccatatatacagaaattagacaaataataagtctttagttcaacttaagcatatctcaaatgacttctctaaatttaaagttgatcatgataggatcataaaagacagaaaagacttaagtaatcttgtaatgacaattatttccatttttgctgaactaaaaatatttaacttcataaatatgttactacagcttccagatttaaagaaaaaaagtttcccccactctcaattaaaagttagaaccctccacttttaaaattatacaaatatttcttttttacattacacagaagccttctgtaccattttacgaatttctgtcttcataatataagtgaaaatactgtcatttcaattttctgctttaaattgtttttaataagcattccaaagtgatacagacttaagcttttaatcaatcagtcattcagttgatagacaaagttagcgatgctttatgctaggaaacttgttgacagtaacctgtgcgactttatgcagaagacaaatgctagtaattattatgcacagaggaaaaatcattttaagtatgtggtaaagcagcttcatctttcaaaattgatttgctctggtttttctttagtccattagattccagaatgtccttttactgggaatttagttatgtattaagataacctgttttcagttctttttgaaaagaagacattatttatattgaaccaccttattttaaaatttttaacttttatataccacttgtgtgattccagtgtcatgtcttgggtttgatgtcgttggacagaaaagtgtatcaattattttaaatgaatttttccccatgtttgaggcttagtctgtaaatgtgttgctgtaacagaaaatacttgggtatgcattacttgaatacttgaaaactgaaattaataagatgtattacataatgaattagatttctctgaacagtttttacactgaaaatcttcatttctggattgcagtttgaaatggaatgaagacctgaattatttgggtagaaaaaattatgatagtgcttataagaactgtaaactgttttaaactattttgtgtttgacgcatcaaacttcaagttttttgtaagtttctctcctgaaattttctttctcttctatactttatgcacttactatactactgatgtaataaaagagcagggttaaaaatattgtatctgtattcattgtgaatcctgtagcttttctagttaacaaaaaatcgctttctaaaatactcttaatcccattgttttggttaacatcttacccatttgttgtatttcaaatgccattaatcattttagtacaacacctatgtttataaaaatttgaaaacattacatattgtatttaaaactaattagtgaagagtaagaaaaaaactagccaacagaattgtaggtgatgcattagttaaatttcaaaactcataataaaggaactttcagagattggttgaaacccagtggtatccctgtaaattagctcctgtgactggaaaagaccccaaaaaggcagtagaggagattagtgtttacttgctgtggttgtggtgtgctgctacttaattataggtagtgacacactgaaattcttatttgtccaataatctgaagtagtttcctatatttatctgtactaaattgactataaattgagtctgcaaagaggaaactttttgactgtactgtatttaggagcctttgtacagcttggtcaaatttccatgatatgaagtatttgagttttaaaatatactgttattaaaaggaaaaagacatggccattattccatgtgcttaaatgataatttccttattcagtttcagaagaaaaagaatgaaattgggtaactgtcattgcgttagctttatgttgaattgggaaattgtggcataaagcttaaattcgtgtttatcaaatgtgaaccatagtagtataatgctgctttgtatataatgtaagtgctacaaatagtctcagcactgaaaatgtattgatacctcttaaatgaatgcaacttttgatgtaggtgttttgctatgcctcagaaaatatctgtctgagaatttgttaatctgtttgataatgaagatacttcctgttttcttgtttcatattttcatgttcaaaatttaagttttacatttttactactgttaatttaaataaaatttgttctgtggataaaatgaggttggcagtgaagaaaattaaaaacagcctcattcctgtaactgggttaagtaaaaaatacattttcactatgtgttcataaatttttaatgaagctgtttgtctttcagtttcaaatataagtgatgtttaggctttatttctgtttataaggctttttaccctttgattaaatggaaggaatgtatcttttttgaagaaatttaaattccggtaaataaaaatttcgtttgtaaccataaagttggagttc

SEQ ID NO: 181008 - DNA, 1589 bp, Homo Sapiens
  misc_feature (254)..(264): n is a, c, g, or t
  misc_feature (364)..(372): n is a, c, g, or t
  misc_feature (509)..(537): n is a, c, g, or t
  misc_feature (1045)..(1058): n is a, c, g, or t
  misc_feature (1247)..(1305): n is a, c, g, or t
ttggcaagttttttaaattgttcttttattgttttaaattaagaactttttgaactaaaaccagaaactctgccatagttcattgatttttacatgaaacatttatttacaagatgatatcaagattacttttcacaaaataggcacattatatcaacactttgctctgctttgtaaatttgccatccaggattttggggtggtattcatgtgaaattaaagcagattctctagcagtttcctatagctacagnnnnnnnnnnncattgcttctaattggatatagttactatgagtccatgaaatacaatggaaatgtgaataaagaatttactacattgaagattttaaacatttggtattnnnnnnnnntcctttgtgaatgtgatagaaaactagtagtgtggagcagtgtaaatatttgaggtggtgatttgtgaagtagcccagtattgccttaaataaaatcacatttcatttcttgttttatacatgtgatcttataaagnnnnnnnnnnnnnnnnnnnnnnnnnnnnnctgagatttatagattggtgtatagctttaaactgtataaagttttgtggaaagatttttttaaacatttttataaatcttaaaattgatatcatcaaagtgagcccatcttgtgtttataaaatacaagagtccttaacatttataattacatagataaaacactttctataaggaagttggatgttttgattttactgtttatagatgttagattgtacagatttgtctgtatttctcaccatatctaatgatacttttttcattagattggtcttcaagaacagtattagttataattattttggttattcagtatatagttagctcttacagtttagctttattcaccatatttatactgtggattcacagcgagaggtagaggttattccaggagagttgatgaccttcatttaaagtccaactaaaatcagtagtagaaacataagaaaacatctttgcaatatttacttttgtttctgtttgccgcaaatagtaacattgnnnnnnnnnnnnnngtgtttgttataaaacagttgcattcacaatattattggcctgagatattgatgatattgtgatggtatgaaaatgtgtacattccctgtgcaacatcagatttgcaggaaaaatgaagcacttactgaaatcgctggtactctgaataaataagcatggtcaaggagtgaactattttcttttggaannnnnnnnnnnnnnnnnnnnnnnnnnnnnnnnnnnnnnnnnnnnnnnnnnnnnnnnnnngaatagttcatttcacctgtttaagacttactaccaataagcataaaacctgacacgttaaaatccctgccctttggtgagcccactgttatttattaaaataaaagttattttatgggtgattaatacatggggttttctttttcctaaattaacaataatttaaataaactgagtaattttaatattaaatttttgttaacaactgaaatgtttccatacagttttcttagaaattgacctagctcttaaagtgggcacttggccaaactgccctatatagc

SEQ ID NO: 181009 - DNA, 1837 bp, Homo Sapiens
  misc_feature (141)..(150): n is a, c, g, or t
  misc_feature (1421)..(1537): n is a, c, g, or t
gaaaagggggaaaagaggagggtagaagagggggagagaatgaggtctgcatcagatgtcagttatggaaacacataaatgcttactttttaaacatttacatttaaaaggtgaacatatatatagaccacttatactttnnnnnnnnnntcaaaagcagacatgtttggctgaaataaaaccaagaaacacagctaaaactcccccataaacctaaaagtccatggagaattcaatttctcatttccattcagaaatctggctacaaagtgatttgtttgctatttgggacagtacagagtgctgaaagaaacccagctcttgagtctcttagatcccatcctgtaggaagtggtgggaaagccagcggaccatgggcaagtcaactcctggctacttggcagggagtcagactgtgctctctccattccccaggactccacagaaccatctggtactgctagtgctgggtgaacagtgagagcagagtccacaaaacacagagaaccagaatgtgaccgcaaggagccaggaccttgtgctttttcatggattacaaatctagggccaaggagagggaaagcagaaagagccctattgggaagaggagctggctgcgcccctaaactgagatggaaagagtaaggctcttgagcccacacctggccaagtagaaatagtgtccaaagttttctcaaaccagagggaaaaaaggtcaaggttaggttcagactgcagacactaagagatgacagatgttgaatacggtgaatgggatgaagctttaaggatcaatgcccaattctgagtgttatacacatttctaggaaaaataattccaatgtagcttttgggggtggggggtggaaataaggtggtcacatttattcaatcagctggtccctatgaggaaggagaggcccaggtacagatccacaaaggggtacagtgacccagctgtcctgggattggttggggagtggtaagcaatgacataaatcaaacccattgagggttgctttgatcctgagacagtctgagtctgcttcaaacccatggggaaaggaactttaatccccaacctgcagagagaaatacgcagtagcatccctgcctcacgattccctaatccaatgctcttgaatctgaaatggcctccctctgtgaatgcaagacacagaaaatcccaagtgccttccccaacaacatcctaagtaagtctggactagtaagattccaacattcatgaaaacactgtcaacatctgaactagcagctttgatgaggggtggggggcagaaaatttgccgagtcactaagtagttccagtcttggagacagctcagtgaggaccaaagcctgtgtgtcaggcttaaactctggctcaagacatcctccacagaggaccctgaagtattctnnnnnnnnnnnnnnnnnnnnnnnnnnnnnnnnnnnnnnnnnnnnnnnnnnnnnnnnnnnnnnnnnnnnnnnnnnnnnnnnnnnnnnnnnnnnnnnnnnnnnnnnnnnnnnnnnnnnnaccattatcaatcagttgaggaggtgggcacacagagtcagcatccactcgattcttgttccatttcccagagcattttacctctcagagtgtacttgggagcagagggaagttggcaggatacacctcattccacaaactagattaattcaataactgaagggtattaactgagggcctattatttatctagtataatgtgaggaatcttggaaaaatgaactgcttctgaaagtcatgttatagatgttttgaaaataaaattacatctttaacattaagccaacttttttgtacaaa

SEQ ID NO: 181010 - DNA, 1010 bp, Homo Sapiens
tattaatagaagtaggaaaaggttggagggaggtctcagggtagggcaggttctgaatggcacgaaataatggccaggctactccgccgtatgaatgcccatcagctgagcctaacaggcaggcctccagacacaccgcagccagttcctgagggcttttgtgtgtcagggtgcaggtctgctgggctgccagccaacttgacatcacctctcttgcctgccaataaaactgaaccttctaacgaggttatccattcctgattccctgggctcataacccttctaggtggcctttctggtcactcaggggtgggccttcatacctgcgtctctttacttcctcccaccatcactctaaggcctctccctgggagctggctgagctcactcctgcacatttggctgtctttagaactcctggtcccaaattgcagttctggcccctctggctgctggggaacataacctctgcctgctccccaggggctcaccgtgtgggggagcaaatcatgtatatccagtgctgtgagtggctccagtcatggaggagcaaggatgagttctgcctggaagaatctgggaaggcttcctggaggagggaacaatggcatggaccttgaagagtcagaagctttcaattcattccattcaagcattgctctcatgtggcattcaagcattctatagtgcttgccgtgactcaggcgcacagtgcaaaaggaagcacatctttctctgccatgaggacttattagtgtctgaagagctttttctggactataggagaaagtcatggtctccctcactaataaacactgaccctgcttcggatgagctaacagccctgctcagaaagcatgacacccatcctgttcacttttccctgccccggtcaaaccaccaagccctagatttcattgccaagtatcctgtatttactggaatggacatcacagtagcatgccttcctagccacatctatgagtttgttcattttcattctgcttttg

SEQ ID NO: 181011 - DNA, 96 bp, Homo Sapiens
gggtgaaccacgcacccagccttgagtgtgcctttctatgagtcctaagaaacacacacatttgtgcatccaaccccaaaaccaagatacagccaa

SEQ ID NO: 181012 - DNA, 1102 bp, Homo Sapiens
ttgggaaggatacagattctaataattcacagttgtagaggttctagactgttcttagtatgaagtcctggcagtgtatgtggcagagtgaataatgtttcacgacctggtgagtcatgtgaggactgtgagtaacttttatcttctgtgtgtcccacatagcatataacagtactatgctagtgatttgcttgacagttattgaatgaatgctaagtttcaaatatttatttgatagtcacttgattaccaagtaatcaaataattacttatagtgttttagggagttttcagaagatatttgtgattaaataaatgattatatatgtatattagcatactgtatgcatttgtcagttgggaaagaggggaatatggagaagtggggaactgcattcagtttttattttataggcaactaatatggtcctttggttttattttaaaatgaaactgagccttgagcattttgagctttcatgtcaaatgccttgaatggaagagtaggaatttcatgtaagtagcttacatctgccctgtatgttggagaatgtgattagatatacttgcttttctgcccaaggcactatttttgtatttatattgctttttgcaggtttacttctgttaacaggggtctgtgagaaataaggcttaaaatatcaatacttctcatttttccacagccttccaaggcttccatctttgtgccagtgtgtggctctgggtgccatctaaccccaaaagcagcagttgggtttggatgagctgtgtgacatttggcctacacgtaggtctactcaccaccctggtcagggaacctggaacaatcctaaaactcacctactctaatgcaggccatattttttaattaaaattgaaattgtcactgagtattggaataagaagggactttggggtggagtgggtgagcagggcattgtcttacagaggaggtgtggggaccggtaagttttaactttcatcctttcaatctctcagtttcagcaaagatcttataaagaattttgttgctttcttaaattcatgaaagaaatgtaagcaattgaggtgtgtattttcttgcccgtattctctatat

SEQ ID NO: 181013 - DNA, 2286 bp, Homo Sapiens
ttggggtctagcaggggggactcccctgaggggccgctgcgggtcgccgtcttcggaggcaccggcgagggcagagccaacagcctcttcacggtctgtaaggtcattgtttgccagtcgtgggcagcgcggcaaacctgctgggaaaaggttttctggttggaataggatgagtaccgcaccagctttgccttccagctgagatgtaaatttcaggcctccatcctgtggaacgtgggaaaactatcttgagtgttggcatgttctaagtatgacataatagtttaatgtatgataaatcatgggtgtttagacgaaagatttacacatataaattggaggctttagcggtcttagtgtaactaacttttcgtccccttaacccttgatgcctgttctatgggtctctagagcggaaggagcattatactccggaaacatttgctggaaggggttatgagaaattcctctctgtatgctaactccgtaatacaagcgtttgtgtattttaaaatcacagctgttccaaatataatctagcctcgttttccccctccgtcggatgataggtgttcttcaggacagttttattttaagcaattcttagtctcaagtaaacaccatcattaaaagaactgagaactattatcaattcttcctttggagtccatcttcaatggaaaggagaagggaaaaccttttttaaaaagaagaaagaaactgaagtttttgatttgactagagaaatattcagaagactccttattttcacctagtctaatcacaaaattgagaaacaaacattatcccttgaccatgtaaattttacaccacattatgtcaacagcatgtaccttccacattgagtattcagaaagaagtgatctgaactctgaccattctttatggatacattaagtcaaatataagagtctgactacttgacacactggctcggtgagttctgctttttctttttaatataaatttattatgttggtaaatttagcttttggcttttcactttgctctcatgatataagaaaatgtaggttttctctttcagtttgaattttcctattcagtaaaacaacatgctagaaaacaaacttttggaaaggcattgtaactattttttcaaatagaaccataataacaagtcttgtcttaccctaaagtcaaatgctgaagattctttactgctgtcatcagcatctacaagtagcatattttggatggtgtttgtgtgctacttcaaagtaactaggaaaaaataatcctcgcaacacaggtaccttgtcatgtcagaattgggggtgttaggttgccagttgtatcagtgttgattcatttcattacttcctacagagcaaacatgaacgttggagttgcccacagtgaagtgaatccaaatacccgtgtcatgaacagccggggggatgtacgtatttttgcatgcagtgaaaggaacacctttcgaaactcctgaccagggtaaagcaaggctcctaactcattgggaacaactggactatggagtacagtttacatcttcacggaagtttttcacaatttctccaataattctgtaagtggcagaaatttttaggtatgaggaggattggataagaggaagatatcttttcatcagattgaattggaattagaaacatattttgttgcaaacttctatcaataagtagcacctcggatagaacataaaatatagacaaaatttttaacaagttgataataaactaattttcacttcagtcagtacatatacggagacaatattacatgctaatcagtgcacctagacatttaggatatacaggtcaaatgtattccagctcccgtccttaggtttcatataaggacacaaaatacataatcatattctatattgcactgtcagattaatctccttaagcaatgatttagataatgagaagaatttcactggccacctatcctattaagatattcagactccttgggaaagagtatggtttcgaaaaaagtaggtcaggctttcattataggatagacctgggtggagtcctatatatatcactcagccagcttggtttgctcatatataaaattctagctggtgatacctaattcaatccctaatgctgtaagaaataaatgagataataatctacctggatagcatgtaacctgtatctggtatctaatttctttctcctatctgatgttctgggccttccagaaaatagttcttacctccttttcccttgatgtaaatattttatcccc

SEQ ID NO: 181014 - DNA, 856 bp, Homo Sapiens
  misc_feature (190)..(256): n is a, c, g, or t
tggcatgagccaccgtgcctggccagcaattagaattttaacactggcagttatgaataatatgaaggagaggtagatttctgagtgattctggtttaaccagctgggtggatggtggttccacgtattcaggtggcaaacaggaaaaacatgtgttcgaagaagaatggaggtaggtggtctcttaagnnnnnnnnnnnnnnnnnnnnnnnnnnnnnnnnnnnnnnnnnnnnnnnnnnnnnnnnnnnnnnnnnnncaaacttgtcagctattatttgttgagtacgtactatttgatttatgaccacaggcagctgagcctcagtgttggtgcctagtgtacaagattgttaaagaataaagttattttgcaaagtgtaacccatttttagcactgacatagcactgacagtagctgctgatctcattatgggctaaaataagacaatattcaaaggtcagagatatctagccagaatctgatggaggctggatttcagattttgttacagaattagacagaggaacacagaggggacaggctcagttagggtggaggtgtggggtagggaagcaggacttgatataaattattggaatcattgtcttttaaaccagtggtttatgtcagggtatagcgtttcaagggatttgagggtcagatggggaaatgtagccccttattttgccagtgtgaagcagataccctgcttttctttacagtagcggagtcagcttaagagctttaaaggtcctaaacttcaaaaacattacagtgccccatcctccgccttaatgtaattcaaaatacaaacaatactaaactgtaaaataaatgtaacaaagtccaataaag

SEQ ID NO: 181015 - DNA, 1033 bp, Homo Sapiens
ttggcacggaaaggacagggcagaagaacccagaaatgctttggctgtggggagagctgccgcaggctgctaagtcttcttctccacacaagatgaaagagtccagcccattgagcagtagaaaaatttgtgataaaagtcactttcaggccattcacagcgaatcttcagacacttttagtgaccaatcgccaactctggtcggtggggcacttttggaccagaacaagcctcagacagaaatgcagtttgtgaatgaagaagacctggagaccttaggagcagcagcgccactcttgcccatgatcgaggagctcaaacccccctctgccagtgtagtccagacagcaaacaagacggattctccttccaggaaaagagataaacgaagccgacatcttggtgctgacggcgtctacttggatgacctcacagacatggatcctgaagtggcggccctgtattttcccaaaaagtaaaattcctgttaattcctcacatcatttcctataatctgaatatcattctgtgtgagaccagtttccccttatgtttgattagaaagtgtgcttacaggcgtgagctgtgcctggcccaccccagcattttttaagatgtatgtattcgttgttctgtttttccagatgattctgtcgtaaagtgatgctatgttgtcgttaaaacatcaaagtgattttacggtttttgatgggattattcaagtgtcagaattaactgttcaaaatgttctgaatcatgtagatacatggcaggtaactgtttatgggagaaaagtacagtgctgttacgtggcactgtacagtcatgtgccacgtaacagcgtctgggtcagtgacggacacttacctgacagcggatccacaatattctcgtgcagtgtgtttggaatcctggtctgggctctcgtcgttggccttgtagatcaagtaggggaagtgagtgatgttcagtcatgctgctgggacacttggttttccagatgaaacacataaataaaactacatgcaccatc

SEQ ID NO: 181016 - DNA, 1601 bp, Homo Sapiens
ttggcacacagccaatatttattagtgacatagcatataccagttattactctaggtcatgagaatggagtgataaataaaatgaatccagtcgccatcactatatgccatgtaacattttgcaatgactgtgtatcaggcctatgaatttcagtattcaatttcaataatgatcctgttgtatctgtggtatttaaaaacatatacatctctggaatctaaaattgagaggttataagtaacacccagtattacaaatttagtgctggaaatcagattgcagtttaaatctgagcatatagaaagtccgtttcttctatgtcagcagatgctttttgtgtgaggtttaggtatactgcattatttgacataaaccagtgtttctgccctatgtcttcagaatgacaattctttatgaaactaatagaagaacagaagacaattgcaaaatcatgatgaagatactaattgctttagaattaaggaatacaaaaaataatatgagctgcagttataggatcagaaaagttaaaatgggaatgtattcgagtgtttattatgtgatcagtgctaagaagtgtcatcatttaattttacacttaacggtaatcctgtgaggattacgctattattaaatgcatttgatagattacaaaaaggcttatggttggtaaaaattgacccaagtagaagagatcgtgtttttattcagattttctgattgtagggtttgagagtttttccatcattagtgagtagtgactatattgtgtctgaattattgacagaatttctgatattcatatataccaggttgtttctttgagtggggacagagatgcaagggctgctaattccaatgtataggagaaactttcaatgattttgcatttatcattttaaaagttcagtatgtctataatggtcatgcgttgacaaacacaaggaagtattaaatcactccttcttctgaggtttgactagcaaattgggcaagagttaccaaataaaacacatgttcctagttaaatctaaatttcagatacacgaccataatttattggaaatccaaatttaattgggtaccctctggttttatttgccaaatctgtcaaccctaagtgggacacatggacatggattacagtgctacccatgcaagccacagtgacagcaactttacacatgtttacattttaactttctctctgtaagaaagtgcttagataatttagggataaaaagatagacattgtttgatccagggtggacacctctctgccatcgtttctaaagggcaaagggagatttctgcaggtcttgctcacagtctggggacctgctcatgttttgaaactgtctgtatcagaatgtcattttcttggtttctccctttctgaggggacttgactacaaaaccaagagttctgcctctggccaagctggaaatgtgatgcctgctagcattgttgggagtgggagactgagagaaatgagttagttggggcatttaatgggaataaatagctgtggttgtgattcattactatagataattagtggaccagtggccggagaaattaagaaaaaagatgatgtga

SEQ ID NO: 181017 - DNA, 1130 bp, Homo Sapiens
ttggtgctactttagtttattaagtatgcaatagcattgtgtctaaaaaaaccaatgtgcatatctcaattggagaatactttactgttcaaaaaataataatgaccctttgagcctgcagtgagttacagtcttttagctgttggaaggtctggactcaagtgctgttggccgctgactaatcagggtagttgttgctaaaagtgggtttctcctaatagatagcagtgaagtgtgctacattaattggctcttcctttcaccaaagatttctgtgtagcatgtgatgctacttgatagcattttattctctgtaaaactttgaaatttgggatcaagtcctctcaaaccctgccactgccttatcaactaagaaggtagcattctaagtcctttgttatcatttcaacagtgttcatagcgtcttcaccatgagtagcttttacttgagaaacctcatttttgcttatgcataagaagtaactcctcatctgttcaagttttttcgtgagattgcagcaattcagtcacatctttaggttccacttctaattctagttctcttcctatttctaccacatattcagttatttcctccagtgaagtcttaaacacctcaaaattattaatgagggttggaatcaacttctcccaaactcctgttaatattggtattttgacccccctcataaatcatcaatgttcttaatgacatcttaaatggtgaatcctttccagaaggtttccagtttactttgcccaaatccatcagaggaatcactgtgacagctatagccttgcaaaaaacattcttgcataataagacttgaaagtcaaaactattccttgatccatgggctatggaatggatgtgttagcaggcattaaaaaattcaactccttgtacatctccattggagttcttgggtgaccaggtacattgttaatgatcagtagcatttcaaaagaaatcttttactgaatggtggacttaacgtcttcagtaaaccatgattttaaaagatgtgctgtcatccaggcatagtttttctatctatagagtctatagagcacaggcagagtacatttagcaaaattcttaaggaccctaggatttttggaattgtaaa

SEQ ID NO: 181018 - DNA, 1137 bp, Homo Sapiens
  misc_feature (685)..(735): n is a, c, g, or t
  misc_feature (748)..(781): n is a, c, g, or t
tttatgatcaaatcttttagtgcctagtaaaatgatataagaaatgtgcctggaaatattctgcagttaaaattcataatatttaataaatattcaatgttttgtgttttaataagttcgtcagaccttagaactgagggaaattttgccaacttaaaattctaatttctgtctctctgtactttaattttcagctcgaagacgcgacgtccatttgtcgaaagaacaggagagccgcctaccctctcactggctgaaaagcaaaggggcccacaccaccatggcagatgccctctggcgccttcgagatttgatgctccgggacaccctcaacattcgccaagcatacaacctagaaaatgtttaatcacatcattacgtttcttttatatagaagcataaagagttgtggatcagtagccattttagttactgggggtggggggaaggaacaaaggaggataatttttattgcattttactgtacatcacaaggccatttttatatacggacacttttaataagctatttcaatttgtttgttatattaagttgactttatcaaatacacaaagatttttttgcatatgtttccttcgtttaaaaccagtttcataattggttgtatatgtagacttggagttttatctttttacttgttgccatggaactgaaaccattagnnnnnnnnnnnnnnnnnnnnnnnnnnnnnnnnnnnnnnnnnnnnnnnnnnnatatatatatatnnnnnnnnnnnnnnnnnnnnnnnnnnnnnnnnnnagagtttacagattagtttaaattgataatgaaatgtgaagtttgtcctagtttacatcttagagaggggagtatacttgtgtttgtttcatgtgcctgaatatcttaagccactttctgcaaaagctgtttcttacagatgaagtgctttctttgaaaggtggttatttacgttttagatgtttaatagacacagcacatttgctctattaactcagaggctcactacagaaatatgtaatcagtgctgtgcatctgtctgcagctaatgtacctcctggacaccaggacgggaaaaagcactttttcaattgtgctgagttagacatctgtgagttagactatggtgtcagtga

SEQ ID NO: 181019 - DNA, 1037 bp, Homo Sapiens
  misc_feature (923)..(935): n is a, c, g, or t
ttggctttagttgttttctaacccgtaggctctctgggcacgaggcagaaagcaggccgggcacccatcctgagagggccgcgctcctctccccagcctgccctcacagcattggagcctgttacagtgcaagacatgatacaaactcaggtcagaaaaacaaaggttaatatttcacacgtctttgttcagtgtttccactcaccgtggttgagaagcctcaccctctctttcccttgcctttgcttaggttgtgacacacatatatatatatttttttaattcttgggtacaacagcagtgttaaccgcagacactaggcatttggattactatttttcttaatggctatttaatccttccatcccacgaaaaacagctgctgagtccaagggagcagcagagcgtggtccggcagggcctgttgtggccctcgccacccccctcaccggaccgactgacctgtctttggaaccagaacatcccaagggaactccttcgcactggcgttgagtgggaccccgggatccaggctggcccagggcggcaccctcagggctgtgcccgctggagtgctaggtggaggcagcacagacgccacggtggcccaagagcccctttgcttcttgctgggggaccagggctgtggtgctggcccactttccctcggccaggaatccaggtccttggggcccaggggtcttgtcttgtttcatttttagcacttctcaccagagagatgacagcacaagagttgcttctgggatagaaatgtttaggagtaagaacaaagctgggatacggtgattgctagttgtgactgaagattcaacacagaaaagaaagtttatacggcttttttgctggtcagcagtttgtcccactgctttctctagtctctatcccatagcgtgttccctttnnnnnnnnnnnnnggtattatatgtaggagttttcttttaatttattttgtgataaattaccagtttcaatcactgtagaaaagccccattatgaatttaaatttcaaggaaagg

SEQ ID NO: 181020 - DNA, 1029 bp, Homo Sapiens
  misc_feature (607)..(619): n is a, c, g, or t
  misc_feature (722)..(755): n is a, c, g, or t
  misc_feature (778)..(794): n is a, c, g, or t
actttgtacaaaaaagttggttttcttaatggctatttaatccttccatcccacgaaaaacagctgctgagtccaagggagcagcagagcgtggtccggcagggcctgttgtggccctcgccacccccctcaccggaccgactgacctgtctttggaaccagaacatcccaagggaactccttcgcactggcgttgagtgggaccccgggatccaggctggcccagggcggcaccctcagggctgtgcccgctggagtgctaggtggaggcagcacagacgccacggtggcccaagagcccctttgcttcttgctgggggaccagggctgtggtgctggcccactttccctcggccaggaatccaggtccttggggcccaggggtcttgtcttgtttcatttttagcacttctcaccagagagatgacagcacaagagttgcttctgggatagaaatgtttaggagtaagaacaaagctgggatacggtgattgctagttgtgactgaagattcaacacagaaaagaaagtttatacggcttttttgctggtcagcagtttgtcccactgctttctctagtctctatcccatagcgtgttccctttnnnnnnnnnnnnnggtattatatgtaggagttttcttttaatttattttgtgataaattaccagtttcaatcactgtagaaaagccccattatgaatttaaatttcaaggaaaggnnnnnnnnnnnnnnnnnnnnnnnnnnnnnnnnnnagagtgatgggacagttcttgannnnnnnnnnnnnnnnncccccaaacatttatctacctcactcttattttttatatgtgtatatagacaaaagaatacatctcacctttctcagcacctgacaataggccgttgatactggtaacctcatccacgccacaggcgccacacccaggtgatgcagggggaagccaggctgtattccggggtcaaagcaacactaactcaccctctctgctcatttcagacagcttgcctttttctgagatgtcc

SEQ ID NO: 181021 - DNA, 1635 bp, Homo Sapiens
  misc_feature (1246)..(1255): n is a, c, g, or t
  misc_feature (1451)..(1490): n is a, c, g, or t
cacccacttaccccctcgtaaaattcagtggttttagtttattcatggagttgtgcaaccatcaccataatctatttttaggacactttcatcatctcaagaagaaaccttgtgcccattaactgttgctcttcattcccactccccacccccagcccctggcatccactaaactactttctatctccatggatttgcccattctgaacattttatataaatggaatcatacagtatatattcttttgtgactggcttctttcacttagcataatgttttcaaggttcatttgtgttgtggcatttatcagtactttattcccaaataatattccgtggtatggatatgtaccactttttgttcgtccattcatctgttacaggcatttgggttgttttcatttttggctattatgaataatgatgctatgaacatatgtgtacaggcctttgtgtggacatatattttcgtttctgttgggtgtatatctagtagtgaattgctgggtaacatggtaactttatgtttaactttttgaggaactgctaaactcttccaaattcgcagcaccattttacattcctccgaacaacgtatgaaggttctaatttgtccacatcctcaccagcccttgttattgtctgtccttctggttttagccatccttgtgggtgtgaagtagtatctcattgtggtttttatttgcatttctgtgggttttcttttcactttcttgatagtcttatttgtagcacaaaattttaaattttgaccaattctaattctgttttttttatctgttacttttggtgtcatagtctaagaaatctttccctgacccacggtcatgaagatttattcctctgttttcttcaaagagttttatagttctcagtctgacatttttaggtctgtgatgcgtttaagttaatttttgtgtatggtgtaagaaagggctccacctttattttttgcatgtagatatccacttgtttcagcaccatttgttaaaaagactgtttttcctccattgaattttggtacccttattgctgttacttattttaaagataccatgtgcatgggactataaaacccaatccatatctgttttgcctggatgataaaagattttaaaacattttgaagaaatgagaatttagtaagatttgagaaccctagaactggcagtgtaacttttcctgttaaagtagtagcctaagaaactctcaataatgcacacannnnnnnnnncttcatagggacatccaacgggctcatagagtggtagctgagcttcaggctgggacgtgcttcattaacaactataacgtcagcccagtggagttgccctttggtggatataagaagtcaggtgaggagctgggaggtgtgaatgcaaactaggtctctagagctaggtcgtaattcagaccttataaaccagtannnnnnnnnnnnnnnnnnnnnnnnnnnnnnnnnnnnnnnnacaggttcctggtccttccccagatccactgtagcagtctctgggaatggaagtcaagcatcttcccctacccaacactccctaaatctttctggagggttctgatgtatagcctggcttgtgaactgctgatagatatctcaaa

SEQ ID NO: 181022 - DNA, 1053 bp, Homo Sapiens
ttggatcttttagctgactataaatcactttgtttttaaacaagaaaagctgtgctcttttatgtgatgccttttttatttattcaggctatacctacaatatgtgaatcaaactgtttaatgaatcctgggacatactgatgactataaactggcctctctgagtcatagaaaaatggccttatttctccagaagtgagtaaaccacacttccaggctatctgaactcctgaagccctaaaaataaaaagcacagttgtaactacctgaaatatgaagatccagtttcatacaaacatttgtatgacgtgaatagttgatggcatttttttgtcatgaaaaaaataatgtaaatcacagacttttgccaaagctcttattttttttcctaaatctctccagaaaaaaaatgcaagtgactaaattcaattattgactaatttccactttttatccatgacttctccaaatcaaaccacagtatatgttgtaacaatatctatgaccactgttagcccattatattcattccaattagaagaaaaaaatgtgaatactatattccgtgttttgagtgacaagtttcgaaaaataaaaacactgtatttttaaaagggaaatgcacttaaatgaaaacagttattacaaaagttaagatttaaaaagaaaaagcaagagtttttattatgatgtaataccagtagaatatttaaaaggcacaccacatctgaataatcaatgtaaatattttctttcaaagttgtaagttttcatatcatgtgctgtaaagttttcctaaatgaggctttaacgtaaacactgggtgacataaaccattcattgctacgttgcttattgtgtttttatgctgttttatacttttttatgagttatgatagcagcaattaagttgtttgtattttgcttaactaaaacaaaaatgcttttatcttgctatagaataaacacatttcagtaaaaactgtggactgtattttgatgcaacaacaaagaaactgttcacttttcaaataaaatgatatgtcagatttc

SEQ ID NO: 181023 - DNA, 1045 bp, Homo Sapiens
ttggcttaactgagagaaacttttcaagagttcctctcacacaatttcaatgatgttcttataatgtgtttggctttgtcgcacatgatatgcatacaaagaggcattttttctgtgtctggaatttggaaaagattgtgctttgcatatgcttaatttgaatgatgcctataggaagtaagctagacttcaaagggggaagattggcatttggagaagtacagcatgcactgcatttaatgtgtatatcaggacaaaaaatattaatgagagaacacacacagttttcttcctccccgaccagccaaattctccaccctccagccccattcaaataaaggagagaagagtctttcttggtggataagaagcttgattgttttacataatacaagaatagagaaaaaagcgggaggtggggaggtgagagggaaaggagagcctgatgagctcaacaggaagtgagtatagacagagaagagaagaccagggactaagccctgggaccctcctttggtaataggtcagagagaagaagaaaagcaaagaagcctcagagaagtaaccggtaaggtaggaggaaaaccaaagagcatggtgtcctggaagctcagtgaagaactggatcaaggaggaggagtgaccagccaggtcaaaagctactgatgcatcaaggaggatgaagaccaagaactggccgttgggatttaacaacatgaaggtcattgctggtctcaccaagcagttttggaggagtgatgggggccaaagctgattggactgggtttaagagagaaagaaaggaaaagaattagagacagtgggtgctgacaatttttttaaggatttttgctgcaaaagggagcaggtaagtgagatggaagctggagggagaaatgaggtcaagggagggatttttaaagtcagagacatacagcatttttgcatgctggtgggagagacgaatagagagaaaaatgtatcatgtagaaagaaagagcagaattactagaacaatgcttttgatttggggagagaagatgga

SEQ ID NO: 181024 - DNA, 1445 bp, Homo Sapiens
  misc_feature (744)..(856): n is a, c, g, or t
  misc_feature (1235)..(1246): n is a, c, g, or t
acgcctatattactatatagtggcctatattacaggccactccgcctggcctccaaatttccaagtttttaagtctccatgcaaacaggcataagcaagcactccttggctctacatttgcaggacaagctggaccaccattcagatgttggtagaaatgtaatccaagtggctattctctatgcatgtagctcctaggttcaagagcagtgtggtctgcggattttctacacaacctgccataaacgaaatttaagcctttggaaatttatagcattttcagctaatttgcattatttatctctgcaagatattgactagaaatcacgtttcagaacttctcagatgaaaacatcatacaacccttaaaactaagctcataatttaaaaatgtatgcagattaataggcttaaattgccagggctttagatagacattaccacttccaggttaatacttttagcggtttttatgccttcaatggtttgaagccctcaaccttagttgaaaacttaaaaatggcattgaatggctgctgcaataaggacacatgaattttggcttaagtggactaggaggactaaatcttgcttaggcttttaaaaaatgcccacccactgggtctagggattgaggttattttcctgaattatggctaattatggattacaattcaaggttaaagatacacatatagtattctcaggttattcatatgatagcattttttaagagccaaagtnnnnnnnnnnnnnnnnnnnnnnnnnnnnnnnnnnnnnnnnnnnnnnnnnnnnnnnnnnnnnnnnnnnnnnnnnnnnnnnnnnnnnnnnnnnnnnnnnnnnnnnnnnnnnnnnnacgtacctatggccccaaagcactttaacaaatgagtaacagacacagttaaggtagaacctagcattttatttagatcttcattaaactgttggaattgagaaccagacatacgtaataaacctccaaaaatagatcctgaaaggcactttctgcttagggcaagcagtcatggaataagcatgtaaacaagctggcttctctgtaccacaccagccaagtcagctttctccatggccagccgcaccagctctgccctcccttctgttaacaccagccagaccccctgtaggtctaacccaaggtttttctgtaggacaccttggcctacctgggaatgctggaaacatgttgttaaaggaatcatggtgttgagagnnnnnnnnnnnntcttttaaaagctgccatctgaggtgatggcttctctgtacttacgccataccccagaatacaataaataagcaattagaaaacgttcaagtatgaagggatttcctcctccccgccaaaagcactgctctctgaaggaagctggtttctctgtagctacaccagctgttcagaaagctcccaacttttttgtacaaag

SEQ ID NO: 181025 - DNA, 1676 bp, Homo Sapiens
  misc_feature (122)..(161): n is a, c, g, or t
ttgggtctctgtaccgcacgtccggagctttcgtctacgactgtagcaagttttgacacaccctcaaagccgaactaaatcgaaccccaaagcaggaaaagctaaaggaacccatcaaggcnnnnnnnnnnnnnnnnnnnnnnnnnnnnnnnnnnnnnnnncccctgagaatattcaccacaccagcgaacagaatatccctccaaaaattcagctcaccagcaccagcacgaagaaaactctattttcttaaccgattaattcagagccacctccactttgccttgtctaaataaacaaacccgtaaactgttttatacagagacagcaaaatcttggtttattaaaggacagtgttactccagataacacgtaagtttcttcttgcttttcagagacctgctttcccctcctcccgtctcccctctcttgccttcttccttgcctctcacctgtaagatattattttatcctatgttgaagggagggggaaagtccccgtttatgaaagtcgctttctttttattcatggacttgttttaaaatgtaaattgcaacatagtaatttatttttaatttgtagttggatgtcgtggaccaaacgccagaaagtgttcccaaaacctgacgttaaattgcctgaaactttaaattgtgctttttttctcattataaaaagggaaactgtattaatcttattctatcctcttttctttctttttgttgaacatattcattgtttgtttattaataaattaccattcagtttgaatgagacctatatgtctggatactttaatagagctttaattattacgaaaaaagatttcagagataaaacactagaagttacctattctccacctaaatctctgaaaaatggagaaaccctctgactagtccatgtcaaattttactaaaagtctttttgtttagatttattttcctgcagcatcttctgcaaaatgtactatatagtcagcttgctttgaggctagtaaaaagatatttttctaaacagattggagttggcatataaacaaatacgttttctcactaatgacagtccatgattcggaaattttaagcccatgaatcagccgcggtcttaccacggtgatgcctgtgtgccgagagatgggactgtgcggccagatatgcacagataaatatttggcttgtgtattccatataaaattgcagtgcatattatacatccctgtgagccagatgctgaatagattttttcctattatttcagtcctttataaaaggaaaaataaaccagtttttaaatgtatgtatataattctcccccatttacaatccttcatgtattacatagaaggattgcttttttaaaaatatactgcgggttggaaagggatatttaatctttgggaaactattttagaaaatatgtttgtagaacaattatttttgaaaaagatttaaagcaataacaagaaggaaggcgagaggagcagaacattttggtctagggtggtttctttttaaaccattttttcttgttatttacagttaaacctaggggacaatccggattggccctccccttttgtaaataacccaggaaatgtaataaattcattatcttaggtgatctgccctgccaatcagactttggggagatggcgatttgattacagactttc

SEQ ID NO: 181026 - DNA, 699 bp, Homo Sapiens
  misc_feature (490)..(535): n is a, c, g, or t
gatcttattctggctctcctttaaatagcaaaacagtagcctgggcccataatatcttgttgctctgtttaccatcatataacaaatgcttttctctgggtcattctctatccatttagggactattttggctaatagtccctaaaaccattagctcctccatatgtgccatttgtataattctttagtaaattgtattaatgggagaatctgtaagttatgtctgaactttcaggttgtcttataattgtctttttccttatgtcagatgttctatgtcataagaataaaatggttcacaccaatacaagtacttagttgtggaaagggagagtagaagataaaaatggagattttcctgtgctacaggcttagtcaagcttatggtctatttaatggttatcaaaggcaattaaatagtgttgagtgttctgcttttacctacatttcatttttcatgtacttagttacaaattgaaccctcttctannnnnnnnnnnnnnnnnnnnnnnnnnnnnnnnnnnnnnnnnnnnnnctgattatcatttaggcatgtaagtgacacccagtagcattgctttaattctgctggtgacagtgccaaagctttactatactctttttgttgtctgttgcttttctcttgctaatttgcttgactagataactaagaattcagtaagcattagctctttgttc

SEQ ID NO: 181027 - DNA, 918 bp, Homo Sapiens
ttggctatgttattttttcctggaggagaatatggtctcctttttgatactgtgatgaaaatgcagggctacctgcctgttcctcactctgatgcccatcctcagtgccggaattcttgtaggtgctcaggaaatacctctctggatggtgggttcttgtcagggcaacagtaaagctctggttattttttgctgctcctgaaagatccatgggactaactttccttctctgttgcaatagtagaaacagcgagatgtctatgtatgcctttctattgccactctggaacttttattgtttaagcatatgcttgtaagtatgttgtatagctagacttctaagaaccttccatcaagtggcaaaaggagggaactgcaagttcaaaatgtttgtttctcagtggactaactggacacctttgcttattatgctgacatttattgagaaaaacaaagtcatacatttaacattctctagataattcttttgttatctgggaaaacagtatttcaaaaataattctgaggtctaaagtagagctgtcaacttcttaatttttccaagtaaagtcttcaatactgtcatcaggtaaaattaccccattttataaaagacatcacattatcagtaagtctgtgttcttattttgatttttatttcaatgcagtctgtgtctcagtattgcaccttttgggaataactgataggaatatccgaaaaccatttctagattctaagaaaacagtcaaagtgatcaataactacatattttatcaagtaacttcaggtcagatttctgagatggttgtgttatgttgcatgttatgggcttatattacactagagtttcttttataatcagttaacatttaatcttattctacttggcacatagctaatgatagagatttagaatc

SEQ ID NO: 181028 - DNA, 929 bp, Homo Sapiens
  misc_feature (99)..(108): n is a, c, g, or t
tacaaaaaagttgggcattcaacaaaagacagacggaaataagacagatgcaaatagatctcatttattaactgtgtaatgcagctgccactgcaattnnnnnnnnnnttttagtatcaacctttcaaattcctcaaaattaaagttatgactaacttcaccagcaaaggaaaaattgaaggatgtatcaagttgccatttctagcccatcaaatcggctttataaagggaagcatagtatctggtattgacgaccttgtagagaaacaggccttttcctgcctcagggaagagagctgactcaaagtaaaggctttgctagaggcagtcggcagagtatttttagcatctaaaatgctcttccacttcggcagtgaccatgcgatgtaatcaaaggagaatacgtaagtgtatggaccaggaatggtcactggagtgttgatgtaggcacaacacaagaagtagtcacagaaattgctaagtctaggtttatgtgtgcatgctgtggagtgtctctgtggtggatttctttttaagaggcagaaaaaaattctaatttaaatgtattaaattataagttctaatttaaatgtattaaaattaaattataagttgataggattattattgacacacaaggagctccaaaagagatcgtatttttattagagacaagccagttgggattgaaacaaaaatggaggggggtatagccctgtgtatgttgcacagaaaaagtatctgaatgataaaggcctaagtgataactctggacaagggatttggattttgggagtagtgcagaggtagaggcatttttgtgatttattgttctattttttcttctagaaaaatgtaagtagtcatatataattttaaaatataaaggagaagaaggcaaaaatgtttgaaatgggcaccttgaagat

SEQ ID NO: 181029 - DNA, 1782 bp, Homo Sapiens
ttggggaactgtgctgtgctaccttggttctaacttggggagattgataagtgctttccacatcatatttcagctaaatctcaacatgtcttctacagggtgtcacgttttgtctttattgctgtactagccttgaatttgtcctaaagctcttgcaaggtgcctgcttcctgagaaagatgtggttatagcacacattcatctaaactcagtccttggcatgaatctgaggacagggcttatccaggtgaactgctgaagtcagtaaaggcaacatggctcaggcaatagaaactcagtggagggaatatgggtttagtaggtggccgggcgaagacggtgcttgttaattgccagcgtcagggagaggcttctaactgcactctttgctctgataggctgggatcatctgtcagctcaatgcgcgcacctctgtcctggcagcagcaaatcccattgagtctcagtggaatcctaaaaaaacaaccattgaaaacatccagctgcctcatactttattatcaaggtttgatttgatcttcctcatgctggaccctcaggacgaagcctatgacaggcgtctggctcaccacctggtcgcactgtactaccagagcgaggagcaggcagaggaggagctcctggacatggcggtgctaaaggactacattgcctacgcgcacagcaccatcatgccgcggctaagtgaggaagccagccaggctctcatcgaggcttatgtagacatgaggaagattggcagtagccggggaatggtttctgcataccctcgacagctagagtcattaatccgcttagcagaagcccatgctaaagtaagattgtcaaacaaagttgaagcccattgatgtggaagaggccaaacgcctccatcgggaagctctgaagcagtctgcaactgatccccggactggcatcgtggacatatctattcttactacggggatgagtgccacctctcgtaaacggaaagaagaattagctgaagcattgaaaaagcttattttatctaagggcaaaacaccagctctaaaataccagcaactttttgaagatattcggggacaatctgacatagcaattactaaagatatgtttgaagaagcactgcgtgccctggcagatgatgatttcctgacagtgactgggaagaccgtgcgcttgctctgaagccttgtgagcaaggaaggctccctgcatgtcctgcttgctgcacgccacaaccagaacattctgggtaccatccttcatccaaatggcaacatcacagagctcctcctgaaggaaggtttcgcacgctgtgtggactggtcgattgcagtttacacccggggcgcagaaaagctgagggcggcagagaggtttgccaaagagcgcaggctgagaatatggagagactatgtggctcccacagctaatttggaccaaaaggacaagcagtttgttgccaaggtgatgcaggttctgaatgctgatgccattgttgtgaagctgaactcaggcgattacaagacgattcacctgtccagcatccgaccaccgaggctggagggggagaacacccaggataagaacaagaaactgcgtctcctgtatgacattccttacatgtttgaggcccgggaatttcttcgaaaaaagcttattgggaagaaagtcaatgtgacggtggactacattagaccagccagcccagccacagagacagtgccttgccttttcagagcgtacctgtgccactgtcaccattgggaggaataa

SEQ ID NO: 181030 - DNA, 1337 bp, Homo Sapiens
ttggctcggcctttcagccgcataaagggccagtgaggtttgggacagccacagcccaaggctccgaggctaaaagcccctgggtgggggtgttccaggacacctggccctgtgtgagctgcctcctctcaccccaacccctcggatcctgggaaagagacagccatggctcaagggccagggacccctgggctgagccccagaaatggctttccattctcgcctgggccggggtgggggtggaggccagaggccctgcccaggcagatgaagcccccagctttcaagggggaaactgaggctgtgtgagggacacagctgtgcagggcccacaaacacggtcctttctctaggttagcggatgcagatgcctgatgagtgccatgccctctgtggacacctgggtgggggggtcacctccagcgccgccctgggacttccactgcacgtgcaagagacttaccctttcacacagatcacctgcctgccgcagggctgatgaggatgggtgaggagcgcagccactgggtgtcatgcactgtgggggttctcccaccttctgcccctcctcaggttccttgctgcttctctcctctcccaactgtggcacgctgagggctcaggcacaggaccgctcctctggggcagcctccaataacccttggacaacctccactttttcatcttcagccctgaccactccctggggcccatagccttacatccatctgcccccagcccaaacacttctgcaaacactagaaaaggaggtagcccgtgtgccctcctgcaccgcctcctccactcctgtcttggagaggctttcccgtgggcccagcaacccccttacctttggcacttgccctgattctctggccagcttcctacaacctctccttttcagccacacccaagtccacctgttcacaaacaccctgggctgggccctggccgaaccctggcttctacctacctgtctcaggaagtgcctgagccttgcacctacagaccctcccagagaaagccctggctttgcaaccagctgtcttctcatgaaacacagggccacaggagcaccacggtgcccaaatgggtcttggagcattagaccaggggcttcatgcctgccctggggacaggtggccaaagtggcatgggagatagggagacagtgtgggtgagcaggtgggcaggagctacaggagcctgagggcctgtggatcacagacaccgccaggcaagtgccagtttcacacaggtacaggtggctgcagagtgcccataggcctaagcagcatagtgcctgggtgtggacggggagaggagtgggggaggtt

SEQ ID NO: 181031 - DNA, 1672 bp, Homo Sapiens
  misc_feature (259)..(305): n is a, c, g, or t
  misc_feature (516)..(526): n is a, c, g, or t
actttgtacaaaaaagttggttttaaaatcgtagaatgttctaaacttgaaaggcaattgaatgtagtatgatgaaaatgtgaatgttttgctgctttcatgaccaaagatacagggctagtggacatttagaataataattaaagctagagtcttgtatgtcttttctttgaaggagttctaaccttgtaaattgagaatgacttcagagaattttgattaagaaaacattaaaatcttaaccggcacaaacactccnnnnnnnnnnnnnnnnnnnnnnnnnnnnnnnnnnnnnnnnnnnnnnncaaaagcctaccttctgaatttatttcttgtttactcatttcagagagggtagtaaagaagatctatttctggtagtcatatcgcttgaaaggtattggtaaatgtgttttcagtcgtgaccatgtggaaagtgaacagtgttggcaaacattaccgagaaaatcatgcttttcaagatgcccttgctttgggatatccttcctagggagnnnnnnnnnnngtagtttaacaattgtgaattccatttcttatttcagtttctgctgcagtaatgggttcccacccactataattcccagcatttatgttctgttgtattctccccttagcccagtaacatttttatctaataccccattccccaagttttgagacagattgaccccctactcattatgtggctctagttgaattttaaaatgtggaatattgggcttgcaggcagtaggagctgcaaatctggtagagtgggagtgtggagttaatggtgagtatgttaataaagggaaactgtctctgacagaatctcagtaatgtttaccaaaacatgtctttctacagctggtaggataaatgatgctaccctgtagctcagctacaggctgcagtgcaaacttttcttccatccagagaaagcagaattccctcctagtaacctcattacaaatactgttactagaagggcatgtgctgtctgtcaccttcagtaatatttgtgccatctcttgatgactgatgacctggatcgagtatttctatgaagggtcttcttaggccccttacatacgcaagaggggtgctctagtgccatagctgtagttcacaggaaggacaccaggagaagttatacctagggctactgagcagctcatcatccctgtttctgcacagtttcctgaaactggccatcagggcctctgaggcactcaaatcagtttacttttagcatgcccccatcagggtgggtctcactgttagtgaggatacgggtctggtttgatgtttttctaggcaaaatgcttaagtgttctggttatgccattcattcatacgatgtgtgaaatttgcttaaaagggaattttcatgatttgatttagattagtatttaaatatctgctttagatagcaattaattttattgtaaaaataaggaaaaatatgtgaatatgtgaattttttaagcctgagagatgatagaatgttcccatatttttcttgtaaagaaaataatattttaacttacacatcctgtagaaaataccaccttttccccttgtattacagtacaatgtttacattactatactgtcaagctgaaagtataaaaaatgtacatatacattttgagttatgtatccttttttt

SEQ ID NO: 181032 - DNA, 1257 bp, Homo Sapiens
  misc_feature (480)..(512): n is a, c, g, or t
  misc_feature (1006)..(1023): n is a, c, g, or t
ttggatcattttagcaccatgaccaaatacaagggtcaactgtatttgttggtaacggaccaggggtttcttactgaagagaaagttgtttgggaaagcctacacaacgtagatggtgatggaaatttctgtgactcagaatttcatcttcgacctccttcagatcctgaaactgtatacaaaggacaacaagatcagatagatcaggattatcttatggcattatctctacaacaagaacagcagagccaagagatcaattgggaacaaatcccggaaggaatcagtgatttggaactagcaaagaaactccaagaggaagaggacagacgggcttctcaatactatcaggagcaggaacaagcagcagctgctgctgctgctgcttctacacaggctcagcagggccagccagcacaagcctctccatcaagtggaagacaatctgggaatagtgaacgtaaacggaaggaaccacgnnnnnnnnnnnnnnnnnnnnnnnnnnnnnnnnntagctgtgttattttgtaacaagtgttggcttctgttggaaccacctatatgtcttgagaaacaaaaccacaggaggaaaggaagaaaaaccgatcaataccgtctgtgcctgatttcctaatggattttgttcgttttttcaggggaacggttgttacttagttacaatcagactttttcaagtcacacaatacactctttatgagctggagtttcatgttacaagttggaaatgctgtgtgttgtcattcatgaaaaatactgcacttgtagccagattagcaaatcacagcaaattttgtgtcatagtgacattcataactcatatcagttagtaagctattatatcttctgttctaacaatgaatggaggtaattgatttagtctgattccttcctgaaatctaaatattagcacaatagtttctgaaattttacaatgttaaattatgatctaattcatgagaaaccacgggtttaacatagggattcnnnnnnnnnnnnnnnnnngaataggaataaataacccttaattgtatattggactagttcagcccttaaacagctttacctttatttagaatgtacattttacgtattatcttgatcatggagcttagatttaatttagatagcaaaaataaagatttgtatttcttttccaatagcaaaaagttacataacactaatacttataacctatcaatatcagatattaatgactttgtagtgttgtaaaatttt

SEQ ID NO: 181033 - DNA, 990 bp, Homo Sapiens
ttggcttctaggtgtgaaggcacagagggtgagtggtgtaacatcacttccttagagctttgcccacagtgggtccaggttgccatttatcacagtgctgatggtgaaggtgatttctttaaaaattggagccttggagggtttttctcagttccttggggcctcatccatgatgagctctgtctgttcatccatgatgatctttactgtgggttctttcattaactgcgggacgggaggaaggattttcctttgcatggttgtcatgcagagtggtcctggatgacagagcatgtgtgcccacctctgcatggctgatccaccatggagggctggtgctatcttttggcctctgagcttcagtcggccactccctgcatgaggctggggctctttagccctcgtgtcttttctccatgcttgacaatttaatttgtggactgcaaggaactgttaagtattgattcactttactgcaaatagttccctggtttctgaatcattctcatcaaaccccatctgttgacttcagtttagatttgagagttgccttgtaatctacccactctttattcccaatggtatttgtgtctctcacggttcaaagaggagtgtgactctctgccactcttcaggagtttctgttccacagtttaggtagtgtggggcagtggttctgaatcagcagaaatacccatggaatccttaaaaaaataacaactctattgagatatcatttacacaccatacagcgtactcatttaaagtatatcaggcaatggcttttgtgtattcagagttaagcaaccatcatcacataatttagaacattgtcatcaccctaaaaagaaaccctgtactcctattaccagtcgctctccatttcccccaacctccacgaccatccctaggcaaccactaatttactttctgtctctacaaatttgtctattgtggacatttcatataatgaaaattatacaatatgtg

SEQ ID NO: 181034 - DNA, 1402 bp, Homo Sapiens
  misc_feature (171)..(234): n is a, c, g, or t
  misc_feature (451)..(459): n is a, c, g, or t
tttttaaatctgagctcattctcatcagatgcataaaaaatttaaaatagtatcaattgacactaactgaactggctcaggatggaaattccattccttggcatggataagtaagttcaatgcagaggtgagggatgcctttaacactgaagacaatgctgacttagcttnnnnnnnnnnnnnnnnnnnnnnnnnnnnnnnnnnnnnnnnnnnnnnnnnnnnnnnnnnnnnnnnggaaccgtttcttctttagttacaatccatgaggctctctagggcctctccgtgtggccagcacagcaaccctgctaggagcacaaacggctggcctgagatctggcccagctgccttgcccactggtctgcacagggactcatgggcacagcctgtggtgaggaggagacacctgtcatgccagtcctgggagcacaccacccttctgcaggcccnnnnnnnnntccctacacagacgccgctcatcctctgtctccccttcccaagtgacttcacttcagtcctgtggaccaagataaggctatccccacaggctctctcttcttcaaataatgagtaggaaaaagagacaaactttctgaaacatgcagtttccgacccaaataggccacataccccaacttctgtgttacttggtcagttgagcccctggagccctcaggacctactgataaagcatgtcctctgcagtatactcaagagtctgctgcccttcagaaagccagagggaacactcacaaatgcagaggtactagaggggagaaatacgtgctctgccttcccccaggccaaccacactctgctttagagaccctctcagaaagcaccagagaggaggaccagacgctgccacccacctcaagccacacccctgccacctgctgctgcgcccaatggaggtcctgtcctgtccgggcaacagccaaactggcgacaatggacacatccaacagtcagctgtcggataaggtgaaggtggcccaactgctcagagtaacactgttctcaaatgtttaaaaaggacaggtgaagtctgggtctccttttttaaagcagacaccaatacttacataactagtacatgttggcctttcaccagcactcactggcactcacaggtgccttacataccttacgggggccaacactgacaggtattagtacgtcgcaagttgctgtaataatgtatttcctctcgttactgttgtgtcccccaagacacatgcaaattatttcctagacctcattcatcacagccagatgatgccaccagaaagagcaaggtactgtatgcccagctggggaagggcaagacactcactgaccaggtgcccaccccaaggctcaggaccacccccattgcctgccaacttttttgtacaaagt

SEQ ID NO: 181035 - DNA, 1152 bp, Homo Sapiens
  misc_feature (929)..(937): n is a, c, g, or t
ctttgtacaaaaaagttgggtcctgagcccctggggtgggcacctggtcagtgagtgtcttgcccttccccagctgggcatacagtaccttgctctttctggtggcatcatctggctgtgatgaatgaggtctaggaaataatttgcatgtgtcttgggggacacaacagtaacgagaggaaatacattattacagcaacttgcgacgtactaatacctgtcagtgttggcccccgtaaggtatgtaaggcacctgtgagtgccagtgagtgctggtgaaaggccaacatgtactagttatgtaagtattggtgtctgctttaaaaaaggagacccagacttcacctgtcctttttaaacatttgagaacagtgttactctgagcagttgggccaccttcaccttatccgacagctgactgttggatgtgtccattgtcgccagtttggctgttgcccggacaggacaggacctccattgggcgcagcagcaggtggcaggggtgtggcttgaggtgggtggcagcgtctggtcctcctctctggtgctttctgagagggtctctaaagcagagtgtggttggcctgggggaaggcagagcacgtatttctcccctctagtacctctgcatttgtgagtgttccctctggctttctgaagggcagcagactcttgagtatactgcagaggacatgctttatcagtaggtcctgagggctccaggggctcaactgaccaagtaacacagaagttggggtatgtggcctatttgggtcggaaactgcatgtttcagaaagtttgtctctttttcctactcattatttgaagaagagagagcctgtggggatagccttatcttggtccacaggactgaagtgaagtcacttgggaaggggagacagaggatgagcggcgtctgtgtagggannnnnnnnngggcctgcagaagggtggtgtgctcccaggactggcatgacaggtgtctcctcctcaccacaggctgtgcccatgagtccctgtgcagaccagtgggcaaggcagctgggccagatctcaggccagccgtttgtgctcatagcatggttgctgtgctggccacacggagaggccctagagagcctcatggattgtaactaaagaagaaacggttc

SEQ ID NO: 181036 - DNA, 1719 bp, Homo Sapiens
  misc_feature (1547)..(1557): n is a, c, g, or t
ctttgtacaaaaaagttgggacagattaccatcagagagtgagctcctccttttgtatcattcagccttttgttttagtttggtaagttttaagaaatttcagcagcaaagttgttattcagtgggcacgatggactccaaatgcctcaagttatgtatacctgtcccagatgtaaacttcattgtcctttgttggatgatattttaaatggatataaaataaattggtctaaagggctgccctccttgttgtgtttttaaattttagttaaaaactgctacagcttatgactttgtactttaagataattgtattgatcttttttcagattccttgtatttttaataaagtaatcttaaataaaactcagataggttaagtgttagaaattttaaacagcttacattgttagcgtaaagttatcttttcttttttcctaatcagagttcttgaccctttggttattgagtttaaaacttcaattgaaattcaatagtatttattttttaaaaaaatcactaaactgtgcctaaagaacataactgccatattaatgttttggtttatatcctctatagtaatagaaaaacatttaatacttgtaatgctgatgtgttaatttgataccagttgagtagaatgtgatcaatccagtttacaatctatcatgagtattattaactaaaatctatgtgcttttcaataggaatcattcttctcttgctgtaacacttgaccttaacttttagaaagtgttcatttttaaactgcaactggaaaggttgaaaagttaggactcttgtatttgtgaactgtaatctgaagcagattatttaaagtgtagaaaaagaaacaagttcttcttttttgcaaaggtctgtgataccatatttcagctttgtgtaagtaatttgaatatccaaagggttgtgatgatcagttctgaatatgcaactgtccacttaataaggacaagtattccagtatctcttatgactgtagtcataaatgatgttggaatgtacattttgtgaaatagttggtatccctttactatgattaatttttgttattccaggaaatacttgtgaagccagccaattaataaagcactttagcatctgttcaggtagttttgaaaacccacttttccccttcaggataagaacttccaggttacctaaaaatgcaataaaaatctttatagtctaagcttcttggcatataatttttcatcagggttttcttttattaattgagcacaatactgttttgatttaatttttttccctcaaaccacccagctccttacatagtttttaattatatagctatatgaaagaggtggctaagacatttgctgcacacacttgaactaatgttgggtcagtagcttcgtgttactgccctgatcccagtgtaattcaggtggaaaggtatttttatctcacagggatatgtagctatgtattttactaattgtgaaacactggaaattaatgatgcagacaacttggtgtggtctttgaacagctctctgcagtannnnnnnnnnncctgttaccataaattgtatttaagtgcttgctttccacttaagttgtactaatagaaccggtaactcccagccctccctgtttgacactccttagcttagattgatgtagttgtttttgttatccctataatgtgacttttatttttaagtcattgtgtac

SEQ ID NO: 181037 - DNA, 948 bp, Homo Sapiens
  misc_feature (849)..(875): n is a, c, g, or t
actttgtacaaaaaagttggtttcacattgccgctattcagtataaacctgctctcaacattcatgtgcaagtctttgagtggacatatttgcgtttctcttgagtgaatgcaccttgttgggtcacgtggcttaacttaaaaaaattttaatcactgtggtgcatatgtagtgattattagtgattatctcataattttattttcttgatgactaatgatgttgagtgtatttcatttgtattttagtttgcaaatgtttgttcaaattcttcacccgtttttaatgaagatgtacgacttatttttgtgttctgaacagaagttctttgtcacataaaatgtgctatgaatgttgagttttaaatactccaaatgaatggctagagaattactatttgtagaaatatttatatgtcaaagggatgctaacaatttactttattgctctaaaatagaaaagttgccagaatgctgtggagttttagtggaaaacatgatagctggtgttactgagtaaatttgagtgttaaatgtcaatgtaagctaacggccaagatagggaccactgcagggtggttacttgcagctgtgactcaactggtccttcactgccaaacatacctggggttggatcattggcctgacgtttgcaaattgaggaaccttagggcaaatcagtgaacttctgaactgccttcgtcttcagttatatggggatttccccacttttgagatccttgtaaggattatatgagatgaagagatgagacaaggtatataaaagtcctagcacagagcgtgtcatataatatggcttcacaagtaccctcatctcctttccagtcgnnnnnnnnnnnnnnnnnnnnnnnnnnngagaccatctcactctgttgcccaggctggagtgcctcttcatttcttatttctttattcatcaagtattgat

SEQ ID NO: 181038 - DNA, 2234 bp, Homo Sapiens
ttggcaagttggagtaaaacttattgttacatctgtttgctttaactatcagcaaagagatttgtcgaagttgattttgaattttattcattcatttattcatttttggtaagaaagctcccatttcttgttagatttgcagctctttttattactggttgagcttttaataaatcgtacattttcttttgaagtccttgctgaggtttatatatggtaaagatttagaaaaagaacaaaatgctcttttacaaaatatttttcaaaatatttttgaaatatagactgatgctcagtttattccacagattaagtgctgcctatgaaaacacacctgacaggtagatgctcctttcagtttgaatctaccagttagcctaatgtaattctttcatgtgaaaccatgaattttcataataaaaattaaacttttacgttaaaaaagacatacttgaccagttttcttgactgatgtgttatttatctctgtgccatggactgactatgttataggtgagacagttgtagtaacatctttctaagtagacacaaccttaaacaagatgaatatgtctttataatgtgctagagcagcttgtgtgtaggacttaagtatgtatcactaaaacctgaaacttaaatttttctgaaacagaagcagtgaagattctccctggtaacaacttaagtaaatcaagccaacaaatacgagtccaaataaacatttaatgagaaaatactgcctactttttaattttattgttaatatccttttgtattctgtaataattactgcatgtggagtgatttatccttcacctttggtgatctggtaacttagcagaatgcttgtctgcagaacaggtatgtgctaaatgctgaaaagcaaaggacattcatctcactaaaaatgtctcccaacaagcaggctgctggggggtttgtagcgcttgtagggtggctgagttatttctttctgcaaacactcctgtcagcattatagagacttgcactatctgttaagtaaatgtgacttaggagaaggaacgacaccacccattcatggggtcatggctgcaagttactgccctactggttttctctttacctgataactctcaataattctaaagtttatcttagagaagtctttgagtcacctattttggaatttgagcccagtgaaatgataagcacctgcagtttgtatcacgtctctctctaaccaaatctctgagcattcttgtagcttgatagcaaattgggtgaactgctccattcactaaaagattgagttcagctttattgcaaacagaattatgaaggtctgttctcatgcatttactcagcctccttcatctgagtcacacaccactggaagtagcccctccttatattaagcaatattgacttgaaatggatcatttcctttttttaggtttactaaagaataccagagaaagaactgtatcttaatctatcttcctttccaatgaagtaaaaaacaaattatttgacctccaaatcctcagttaatgtaaattttgcatttgttgaaaacttggtatttcgcaggaaggacatcaggttttgtactgaacataacattgaacacgaagaacctttataagtcagtgttcactgggctgaaacttttactcctatctgaatatgttggcttttgagagctcttgggggattgatgttgttgtttttcaacttctatctcctacttaagtgatattaacagttgtgcttatgtaacatctgtgttgtgtgtgtatgtttttaatctctacttaggttgacctgacagttcaagaaaaggagaaatatcttaatgtgtctcgctggttttgtcacattcagcattatccaggcatcaggcaacatctgtctagtgttgtcttcatcaagaacagactatatactaattcccactagaagctgtccatgccatacagaagatctattaaaaatgttttaaatggaaaatgtactctagaccacaggactaatgtaaattaatatacagtcattcattatttgttgaagttgatagaatttttgaagtgtaaacttgtgtctgaatgttttatttgttctttagctgaagttttgcaatttttatgtcaaaattcaattgctattaaacaagttgagatccagttataaattaaccttgtttttagtagatgacatttatttcaataaaagttgcaaatcgggcttaa

SEQ ID NO: 181039 - DNA, 1281 bp, Homo Sapiens
  misc_feature (547)..(561): n is a, c, g, or t
  misc_feature (580)..(609): n is a, c, g, or t
ttggcacttagagtttttattatataagatttgaaagttgcctagcagataagtagttctcgtgaatgcttcttttaaaattattttaaatttatatttttaagccattcatatctctaaaaatcaaaaaactacagaagatttagaatgaaaaatctaaattattcttcctgcaccagtaccccagccagtcagttctcctctccagagacagccaggtccttggcttcttacgcatccttccagaaagagtttcaacatacatgagcagtgcatatacatatacgcatacctagcagtcattacactgctctcttcaaatttttccagtttaaattttgaggataataccatacatatatgaagagcttctgttttcctttttacaaattgagtgtttcatcatatggtcgtgtcatagcccagtccccttaatggatttaggttgttcccaggcttttgctattgccagtagtgctgcagtgataatcacttctacatatccgttatcgtacacaggcagtgagttatctgtagggtaggttcnnnnnnnnnnnnnnncattcgagactccatctcnnnnnnnnnnnnnnnnnnnnnnnnnnnnnncctcatctgttaagaatttgtaaaataaagctatttaagataaatgaaaatataatatgtgatatcagaaatgtagttaatgaatgtgaaatcactgtcatttggtatattactatatagcaaatacttgtcatacttctttagagtggggaatacacttgttatttacatgaaatattgccccccgtcaaatggcaatcttagtatataccattactgtcagtatggatagcttagtccagcttctggttgaatttgttatgaatgaaaataatattttatcatctataatcacacttgactttctgcccatggtttttaataagggacaggtgtcgtttatagatagaatgttcttaggctcattactttaagccagttgtgcttaagaacacacagatttttgacatagcctctaagatgccatcagttgttaatgagccgttatgttttacaaagaaagagaaaagctgccaattaaagagtttccatatcacttggaattttatttataaatattgaaaatgctccttcaaacttaactatacgtacatctttaatccaaataacttttgtgattacgtacaagtaaaatataagtaaaataaagtattcttaaaatttgcttacactcaaagtccaagtttcgagctacttttgaactaaaagttg

SEQ ID NO: 181040 - DNA, 434 bp, Homo Sapiens
taaagaacctgcgagtgagttcccacacgttttcctaatgggctgctgctttcctaggagtctctcgctcatagaaaaggcacaaactgaaagaggaagcagatcccattgctgtggaagtcccattgttaggaagctctgcttttctggagttcaaattcgcattcatgacgctttaaaccgtcagagctgggtgggtcctcctacaacaaaatagtttgctctctctctcctagttaacaggctttcaaatattagaagatcaatgttctgaccccattaaaatttctcttttgtggaatgaaaagctctgatttaacccatcttcaaggctggtttgatggaggaatatgggctgagtcacctgcatttcccctccctgcacaaagtcctgggcccagatctggggtctgtctctgctgagggtggggtga

SEQ ID NO: 181041 - DNA, 2642 bp, Homo Sapiens
  misc_feature (78)..(94): n is a, c, g, or t
  misc_feature (569)..(578): n is a, c, g, or t
  misc_feature (2101)..(2227): n is a, c, g, or t
  misc_feature (2384)..(2393): n is a, c, g, or t
ttggcactcctctagaataccctcttgaatgttcctaaatgttatccacttgcagtcactgcatcgcagcaggtgtcnnnnnnnnnnnnnnnnnaatgtttgttacatggccaccaaactgctcagcagcttagtctatttatcatcttttgttgcagctgaactttctttcaaactttgttttccttccagtataaacatgaaacatctcttaaagctgtcattaatttacatcgtttactcttgttaccgatcatatttctttcatttacttacttgcccatggaatggggatgttttgtgagtctggtcttttacagtacgcagcacaccatcagtctggtatcaataaaagctgctctattgtagtggctggattcttgtaagcacaactttttaccaaccccctcaagggaaatattcttactgtgagggagaaaaatcagaagataaactataaagaaagactttatttgcaaatatacccatttactttaaactgtataatggttagttttctaacatgtgcattaaaaacaaaacaagaaacaactaagattcaaatttgnnnnnnnnnnaactaaaattattttttaaatgaatagatgtgtttaaaaaataagcttacttattgctagactggcaaaatcccctactccatttactgaggtacttaaaaataactagcatgctgtatctctttttttcccagctttgtcttgaattggcattgccatccttgttttatctcaactggctgtagcttttagataatatcataaggattaaccagtaacctcttacattcattactgttttctaggggaaaatatttggtatttggtttttctgttgcagcaaataaaacctcaggtgtaccaggaaatcgtcctggaagtgtaatccgtgtatatggtgatgaaaacagtgataaagtgactccagggacatttataccctattgttcaatggcacatgcacagctttgcttccatgggcaccgggatgctgtgaaattctttgtggcagtcccaggtcaagtcatcagcccacaaagtagcagtagtggcacggatctgacgggtgacaaagcagggccatctgcacaggagcctggtagtcagacgcccttgaagtctatgcttgtcatcagtggaggagagggctacatcgacttccgaatgggtgatgaaggtggagaatcagaacttcttggagaggatcttccacttgaaccttctgtcaccaaagcagaaaggagtcacttgatagtgtggcaagtgatgtatggcaatgagtgagcccatgggaaacaggtggagatggggaagccgtctcttctgcatggtttattttccctctatccttttatttaatgctcttttgtgagataagtttcaccacataatgtgtgagcattttttcctgttaactttatattacaaaatccgttctaccataacaatacagaggaactagctgtgttactgcaccagtgttataggtaacttcagtatattatgaacaaatcaaagaatgtttacttcctgcaaactggtgaattatagaaagcaatccagatgtggtttactctgccacagtctaatgtcattcacttcatttgatggggtcacttgttagctgtcactaataatggaattaatgggaaacacttgataaatgaaactgtaccgttaaatacaatagctgagttttccccagtgtattgtaaaattgacacacactaatacaagatggattatcaggatgtatctaaatgtcccgagagggttaaaagctaactgtaaattactttaactttcactttcaaatctgacaaatcttgtttatatggtatataaaactttgttttcatcagatttgggggggttttatattaaagaaattaagactacactatttaaataaacgtttcctgtttctgacttattagagctctaaagtttatgaggcctacttctctgaatattctgatgggttttttttgagaccagtctcattttcatactgacatgtctgaaagatttattatttataaagcttaggacatactctgggaagcttagaagatacttcagcnnnnnnnnnnnnnnnnnnnnnnnnnnnnnnnnnnnnnnnnnnnnnnnnnnnnnnnnnnnnnnnnnnnnnnnnnnnnnnnnnnnnnnnnnnnnnnnnnnnnnnnnnnnnnnnnnnnnnnnnnnnnnnncgcgccggtccgaagcaaagctaaatgtaattttatgtactgttttaacagtataaacctatgggataaaggcccccaatcatcagaaggactactgaaaagaaaagaaagcaaacgtagatgtcaaattgtctaaacattcttaagtaccactgannnnnnnnnnctggactattatacaaagatgtctgtaaaaagtataccagtggcttttatgcatatacacgattacgctagattgtgaagtacatgggatttcatgagccagaggaggcatttggatccattgggccacatgtgactataagcacattgtgtacacaataaaattgtagccactcatgtattaaaactgttttggtaaaagctgtattaaaagaataattttttgcttgagctacttagtcactttttt

SEQ ID NO: 181042 - DNA, 1317 bp, Homo Sapiens
ttggcatacttctgggtttacatttcaatttttttaattttaattagcccagagaaagcatttttttctatgagtgtcaatttttctaaacatgggtttgaagcttataaccagttttataaaccccttgaacactgcagtgagttatcaaagccactgcctgcaaagtggatgatttaagattttacacgcatgaaaatgagtgtgccatctcctgaccagtgccttttgacttaggtacccagatgccacttgtcagcagcaggatactttttacaacacgaaagcataattattttagaagaagagagtagaagggcagaatagaattcaacttacagaagcacggagtagtgtgtggttggctgttatctgtccccctgggaggaggactgttttgctcccttgttttgatgttaaacagtagcttaaaggctttcccccccataccaactcacagccaaatgacaaagaaccgtggggtttcaacagattctacaaacatgcattttcccttcccactaatgggcactgcagggaaagcccattggcatttgaccatggagctgatgcagtgccaaagatgagctctttcaactgatggcattttagcccctgtggctcccagcggatcccccagcccgggctgcaggctgagccaaggctgtgcagggtccatattggtcaggccaagtggagtggaagactctgtccacttatgtggtgtcctttgggactgagggggtttgttagcacatcaggctattgctgggaagcgtggcctgcccagtgagcattgcctgtggacatcctgactgcttagctgctccgctgccacacatatgtggtcaaaacagaaaccaatttcacactgccctgggaaaggaatgggtctgacctccaggggaagctctaccatatcttgactggcagggaaggctgggagtggaagctatttatggactgatccaaaggacatatgcatgagtaagggtaaaaatgagcatgcaggtccacctgtgttcttactctgggtatctagaagagtcctcagctctccctactccacgctgcctagacatacacagctgcagggtctggctgaacaatcaaggggccgccagagaaaggccatctacggtgcgcagtgtatctggagttgctgggcccaagatagctctgtggagttatcactagagatgcctctggattaactaagagtgtgcctgggtgtgggtgaggagtcagaacctttgagagctttgagatgacagtttctatggggcgggaagaaggaggtgcatttctacaaacact

SEQ ID NO: 181043 - DNA, 1353 bp, Homo Sapiens
ttggagccattgtaaatcattagaagcccattttaattttgttattatgaaagttatttatcccttagagttcatttgaaaccctcaatataatttgtttttgccaaaaatatgctgctcagtagtgagtcttgaaaattcctttgattttaagatttctaataagatctgagaattaatattttgtcagttgatgtcttatattttattttttataggagagacgataataaagacattgactcagagaaagaagctgccatggaagctgaaattaaagctgcccgagaaagggccattgtccctctggaggctcgaatgaagcagttcaaggacatgctgctagagagaggggtcagaaaacaatctttgggggagatatttctgttttgtataagtaatataaatatgtcttgctaaaaggtcaaatctaaggttagtgctcatgttatggggggggataaggggatttttaaaattactgtacattttttgcaacagcctttttcttggctaatcttatcatatttaactaaatgccattttactgtccttttaagtacaaataacacttaacatttattgggtcattaaattgtggtgagtaatataagacgagtattaacattacagaatggcggactgcttgggataggtaaggtatatatgattattcttcctttaatatcttgagaatggcttttgttaaaggagaactgatactttgtgatattattatttgcaatttaattgagaagggatttcaactatttggttatattcacagattcatttgaataagtaaaattgttcaattttaaatcacaacattgttcacaagattggagcaagcatgagaaatcaaaatataaatcttcaaggctttttctgatgtactgatttttaaaatgtcacacagtagtagttattttaatgagtaattaagtgtctgttatttctatataatataggaatgttcagagccaattagtgtggaaatttgctattgctagcctcccactgcttgtcatttattagtgatggaaacttcagtatggttttatgtctcctttataaacagatatcctgtagatttcaagcaaaattatgacctttatatttttagaggagacttaattatgaggcaatacgtttttattttaaaggtgtctgctttttcaacgtgggagaaggagttgcacaagatagtttttgatccccggtacttacttctcaatcctaaagagagaaaacacgtgtttgatcagtatgtaaagaccagggcagaggaagaacgcaggaaaagaaaaataaaataatgcaagccaaggaagatttcaaaaaatgatggaa

SEQ ID NO: 181044 - DNA, 1551 bp, Homo Sapiens
  misc_feature (354)..(383): n is a, c, g, or t
  misc_feature (786)..(960): n is a, c, g, or t
ttggcgcctggcctggctcctcttcttcttccactcagatatgcctgaccctgtcaacactttggttgaggtcttctttcttctttcttttttgctccgcacatttagcttatgacttcaaccatcatttctcagagcatgggtctggctcaacctctctcctgaatttcagacctacaagtctagctacttggtggagacctccccagaatgacctgctgcttcccaaaagcagactctccaaattacagtcagtatctcccccggaagcattcccccaggcatttctctttctgccttcaattccccattctcctacattgccttgccagaagcctgctggtcagcttggannnnnnnnnnnnnnnnnnnnnnnnnnnnnngctggtgcctagtcatgtagttgctgcctctacactttctcttctttaaaaaaaattattaaagcaccacgtgcttgttgtaaacatttccagaaaatacagaagtgctcaaagtgaaaaaaatggaaatgccttgtcccttcctcattccctgccctaacctcacgccccagattcagctatgtaatagtctgtcatgccaagtcttatttccagctcctcttttccatccccactgccatcatctgaactaaacggattgttttccatctggtctccttggcttttcctttcagtgcagctcaacagacattaatcaagtgccttccacacaccaaagtcctaccctagatcctagaggttcagagacaagtaagatagttaaagagatccacattccagnnnnnnnnnnnnnnnnnnnnnnnnnnnnnnnnnnnnnnnnnnnnnnnnnnnnnnnnnnnnnnnnnnnnnnnnnnnnnnnnnnnnnnnnnnnnnnnnnnnnnnnnnnnnnnnnnnnnnnnnnnnnnnnnnnnnnnnnnnnnnnnnnnnnnnnnnnnnnnnnnnnnnnnnnnnnnnntgacaacaatgataataatgacaatgtttggaggagtttatagcttaatggagagacttaaagcataagaattatctaggcgaagaatgatgagaaaatatttttggaaaaggaaaacaaacagttctactaaaattaaaaggctgatgtagagacttgggaaactgggaggtaagagctcggactgtgtcctctaagacagtaattcccgaagtgtgagcaaaagtccacctgcatcagtcttacttggggtgattgctcaaaatgaggatttaatggctgcacctccgagcaagttggtaatttacatatcggaatgctatccatcaaggaaaatgggcagactacagttacatgcatcaacacagacaagcttcaaacaatattgagtgtaaaaagcaagacatagaaatatatatttagtaagagtaaaaatacagtaaaggtaaaaaagaggcaaaactaaacaatatattgcttaagcaataagatacacaaactaatgaaaatcaaaggatttactaatacaaacttcagtatagtaattattggaatgggagagaaagatgccaaagtttctatttctttttt

SEQ ID NO: 181045 - DNA, 1320 bp, Homo Sapiens
  misc_feature (962)..(981): n is a, c, g, or t
ttgggaatttactatactttaattttcaagagtctcttagatagaggactggaaactacaaccaagaatcatttgtgaagactgagatctaatgggcagtttttggttgatgtatttgctacttaagcttcagcaggaagcacaacttactgagaagcacaatgatttcaggtaatgtttgtgaagtgctttacacctggagccctgtataaacctaagaactatctgagtaagacgagcctttgcagcacttagattagtgtccacagaggacttctttgacagttactatggcattatggcaaaaagaaagtctctagccagccactctcatttcttgcgcttgttagttctctgtatttattgtctatgggtttcccttagagcaatcagaggcaaagcaattactttacaaggttgattgggtctagatctggggtacccccagtagatctttgtactaacattcaacacaaagtggtgagcagtaaagccatgttttgtctttccattctgtctcgtgccagcttgtcatatcccagttcacatgactggagatttagcatatttgctttaggtatgtttctgaaaatagtacaattggacccttggggtgggggagcaaataaactacaaacacttataacaagttccactttatattcacttcactttccttgtgttattgagaacacatggcagtttctcttatttcactgctttcccttggttttctcatctgtaagaaatgggcataaagtgcagacataacagggtctttaaggataatttattaaataattaagttaaataatatattgtatataaaatttatggtgtaaagactatttttgaaaactggatataattcatatttaacatacacaaactaaatgagaatttggaactatagtacccctgttggcaatgattcaagtgaagcattttgaaattcagacaannnnnnnnnnnnnnnnnnnngctttcttccctattttaatgactgttgaattataaaggatactttaattttgaatatgtgccaatgtcacatacattttagacttttatacttggctagcaaatgcttccagagctttcagcttcaactggctcttttaattttattctcagatatgtattccaatccatgtgtactccagagaactttcgttagatcagagatgttctatttttaaaatattattgctgaaccttattgcatcttatgaaaacagtgtagcttaaaaagtattattttcctctttataaatcccaactccaaagataataaggtgagctttgctttttctataagaa

SEQ ID NO: 181046 - DNA, 1196 bp, Homo Sapiens
gtcctagactatccaagcacttcagaccactgtgataagaggaaaaccaaacccgcagtgagggcgacaggagctatgaggccagcagcagctcagttacctctggtaagagacagaacctgactgtttctggggaatgaggtgagaagcagcagaggcctggagcatttccagacaactaaggaatgaaggcgaggtcggatgcaaagtgcaatgaaacaggtgaagttgtgaggtgggtcacagagggtgagagcccgactgagctgggagagggagggagagtaagagataagatggattcaagattcaccccttaacagaggacaggacagcaggagggggcagcatccccgagaaaggggacacaggagtaagaggtgtggagagcaaggccggtgggtgagttccctacaggacatgggaagctgaggtgcccacagcagccaagcagctgtgcccgggtggtcaccagacacctggatcactggcccagaagcaggcggcacaggaatgaaaaccaccacccaaaggtaacgtgaagagaggtacagaacaaagagcaaagcctgaggaagcacggaggctcccgagggagggcagccctcagccctcctgagacacagaagcagcagctgagagacgacaagcactgtactgtctccagaagcagtcaggtcacatgcaaccaagaactcaaaaccaaaacacaggaatagcacattagagaaaacggggcaaaccccataatgacagaaaagagaacactagcaagaatcagaggcaaatcctaaaacgatgcagaatccatcagggtctccaacctgtaaggtaagatatcagactactttttaaaagaaataactaaaaaaggaatgagaagatcctgaaagacttgtgtatggattttttaaaagtctctgaaacataaataactaccactctatctttcacgaaaagcttcttcaagaaacctgatcaaacgagaggccaaaggctttcttgtcacactctagttggcaatttaaaagaaaggcatattggccatctttggttttggtgtgtataaataaaataaaggcagccacaccaatctgtgatgtgaggcggccagcagctacaggacaaggcacagctgaaatacagaggcaaggctgtttgtcttaatagttcactatacagtttgttttagccaa

SEQ ID NO: 181047 - DNA, 1158 bp, Homo Sapiens
  misc_feature (177)..(195): n is a, c, g, or t
ttggtaaaaagatatcaaaatattttgtcacatcattgaatgctcttccacatcagagaatcttacttagcttatggaccatctcccaagaaaaacgaccattcattaactctggttaagacccatatcattgtttttagtggctccatagagcatttcatcatagggatgtgctannnnnnnnnnnnnnnnnnnaccaatcacaatttggaggcttttagttgtaaacagtcctgtgacattatgttggtagataaatctttgtccacatgtttggtgatttccttaaggtaaattcccagacattgaattggtagtatttactaaagattactccagaaagtggcaccaatttccttttctaatgtaagtgtatggtagagttccttccctcaacactctggaggaattggagaatctccatcatgtctaattccttttgtatttcaatctttaccagaaagagccctgtcccttttaattggttacttgacttttaatttgctgttacataattcaggtgtgttaagtgtgttaatagggcttcctattataagggatccacaaataagaatagaatttctttttcatagccttaatttttatttgactcaataaatatatgtgtatgccttctatggtgagctgtcataaatttattttggaaagagtggaaataaatctgtaatgtgcgaatctgatgtttttggtaattaatttccctagcatggtatgatattatacaagcagtaggctataatcctgatatctgagttcacttctggctctgtccctaaacacttggtgagctcaacagctggaagagttttggggattatattgggaattaattataatatttactttattacttaatactaggaaaaactggaggagtgcctaaagcagttaaaggaagaaagagtgataaacttaaggttgataaacgagtcagtgagctggaacatgaaaatgcccagttaagaaatataaatttctctttgtctgaagcccttcatgcacagtcattgacaaatatgatcctggatgatgaaagtgttttgggcagcattgagaattcttttcagaagtttcatgctttcttggatctccttaaagatgctgggttagttactttctccctatgacattcgtccc

SEQ ID NO: 181048 - DNA, 1827 bp, Homo Sapiens
ttggctcatggctttttgaacaaggaggctgcgcaccctgtgaagcctcctgcattcacacctctgctgcatggtttatgcctcagtgttatgtgcactggaatgcttttcactatacgtttccaagttagaaagattagtgttatggaagtgcctaatgtatcctagtccaaaatatttaaagattgttctctgtgtcttgaagttttgcacaaaattctttatgaattttacacttggcaaatgttaatgctagaagccatagtccgcttcttatacaagtccaaagcgttgactgttgtatcattagctccctggttacactggtttcccagctccttgtgtagaccactgctaatcccttagaaacaagaggtctggcactagtagcacaacctaaggtggcattccaagtctttaagcaagtcacagcaacttttctgccaaagtcagcttagtttagacttcagtgaatcaggctgttgccatcctaatgtatgtctctgtgagtctgttcattcacatatctgccgttggctgactttcttgactcgctgcttgcttgcttgtttccttgctttggaaagctattgaagatgtgtacataattctttaggaaggggattgctaaaaaatacactgcaaagcgatggaaaacagtggagaacaggggagtagccaggctggatggctcaaatataaatgaatgaggaattctttatgaagtgtcagttggactttgtgattgagtgatgtaatacaggaattatatagaaagggaagaatatctgatactgatctgttagatacttcagaggctccttgatttgcatatttaaagttcctaaaattgtagcttttcccttcttttggctgtacagcagactgttttaatccacggttgtgccttattgttccattaaaattgtgtcttcagtccatcaataaatactcgtggttaaaacaaaacaaaaattctttactgcatgctgactaagggcagggctctatccatgtgcatcgagtggcctcgtaagctgtgaacagagtgcctgtgggacgtgggatgaagtctcttctgcctgattttaagtctttgcaaactttttagaccgtaaggagctaagctcagtctgctcgtgaaaaatgatggtgacatgccatgtgtgcccttcccgtttgacagacggcgatctcgatgtcgtgtttgcctcttcctctaagtgcggaaaggataagaccaagtctgtttcttccaccatcttcttccactgtgaccctctggtggaggacgggatccccgagttcagtcacgagactgccgactgccagtacctcttctcttggtacacctcagccgtgtgtcctctgggggtgggctttgacagcgagaatcccggggacgacgggcagatgcacaaggggctgtcagaacggagccaggcagtcggcgcggtgctcagcctgctgctggtggcgctcacctgctgcctgctggccctgttgctctacaagaaggagaggagggaaacagtgataagtaagctgaccacttgctgtaggagaagttccaacgtgtcctacaaatactcaaaggtgaataaggaagaagagacagatgagaatgaaacagagtggctgatggaagagatccagctgcctcctccacggcagggaaaggaagggcaggagaacggccatattaccaccaagtcagtgaaagccctcagctctctgcatggggatgaccaggacagtgaggatgaggttctgaccatcccagaggtgaaagttcactcgggcaggggagctggggcagagagctcc

SEQ ID NO: 181049 - DNA, 1077 bp, Homo Sapiens
ttggaaaaaaagttgtttcattacctttactacttctaaattctgaaaatgcactacccagctccttctgaactttaggatatgtgactgtctgaggtgcagagtcagtctcctcaagggtgttaagactaagatctgctctctgcttccatcctgtgctacacgtatcatacaccaggcacatgcatatatgcctgtgtcttctgattctcttttcctaaaatttttcgtttcactctttggaaataatatttaagacttctttaatttctttggcaatatttcctttctgcattccccctggagacacctgccttgttggggccaactctttcatatcctgacctgtctcgttgcttctcttagcatcagtcattgaaatactttgcttctgaaggtgtcgtctttctctttagtcaaagagagtctcaccgccaaaccttaaaagacagggcccattgttttaataatatttggactttcctttcctatcttataaatgaattaaaagactggaaaattattgggtttaacttctttagttaaggcactaaatgtgacagctttcccttaaaattgatgcttgagtcttcagtgagatacaattagctttccctgcacagatgacttcttcggcaaattgttccttttccctctcttcacccacccatatatcttatttcttcactaatttaaaatatgagtgagctgtaggatgcctggacctatgttaacttctgaaacaaacatgttaagttccaattttagccttaaatattttcgacatttagccttaaatgttttcttctttatatgagtgttcatacggaatttcaacatgagaataatgatggctgattttttaaaaactgtgtgaaggtttaaaccagagactccacatatcttaagcccttactaccttcaaaatcctactgtaaacaggatattttaaaggcttactaaatgcaaggctttttctcgtcatacgcaatataattaattttaattattttttcttttgaaaattagttttattaattgggttcttactacgccaatctttgttttatcagcttt

SEQ ID NO: 181050 - DNA, 939 bp, Homo Sapiens
ttggcaggcgtgagccatcgcgcccagcctaatatcagtattttaatttacaaattgtcttggatttggccagtagagccccttcaagctgttttgacatactccatgattctttaagcactttctttctttatggcacaacaaaacatcttgcttttccagactcattttgcatcttacctgctccacatctggaatcagccatttctccaaggagctggtgggcatggtttgaggggttcgggggttgggggctatacatactggtttgtgttgtcacgtttacctacagccctggatatatttacagtggtgtttgttctttacagtcagagtgtccaagaactgtggaaggtctttgtattactacttttgacaaaaatttatgatgactgaccacctttctttcctgttaactgacatttcaacttgacaaatgtgatctttaccacatttactcatttgagtggctgagtacattctacatgtatagtattatgctgttttctttaagccattttgaggagcacaataaactggaaaaatgatttaccaaatatatggaattatatgtagtctgtttccttaatcctgatgctgtgttgttggcatgtgatccttcagaagtgaatatcatctttcatggggtggcaaaaatgccactattttgagaaagtctttttgattcctgggtacctgtaatgacctaaagctcttttatgccttttggaaccttgtatcttgtattgtttatttttgttttctccattaagtcatctggctccaaacagcagttttaacctcattcgtctctgtattttgctttatcccctctacactgcattgctgtagtgggcactcagagtgtgaatgttggtagtggatttttactttttgttggcaaattgcgctgatctgattccagctatggaaaacatt

SEQ ID NO: 181051 - DNA, 1177 bp, Homo Sapiens
ttggatatatttcaataggccctgaacttaagtgatgaaagtacacatctttatgtggattactgaaaatctccagtaattgttatatttaaacaattttcaactgaaatagcattcaaacttcaaatgatgacatgcagtatactttttacctggaagaggtgaaatacattgagcacaatgcctctatgttctttgtagatttaacccacctaaaagaacgaaatgttgaagatctttcaggaggagagttgcagagatttgcttgtgctgtcgtttgcatacagaaagctgatattttcatgtttgatgagccttctagttacctagatgtcaagcagcgtttaaaggctgctattactatacgatctctaataaatccagatagatatatcattgtggtggaacatgatctaagtgtattagactatctctccgacttcatctgctgtttatatggtgtaccaagcgcctatggagttgtcactatgccttttagtgtaagagaaggcataaacatttttttggatggctatgttccaacagaaaacttgagattcagagatgcatcacttgtttttaaagtggctgagacagcaaatgaagaagaagttaaaaagatgtgtatgtataaatatccaggaatgaagaaaaaaatgggagaatttgagctagcaattgtagctggagagtttacagattctgaaattatggtgatgctgggggaaaatggtaagttttctgttttgtgataagtaaaaatcttcctgtttatctagtaaattagttttaactgttttgtggaaaaatttgaatcatatgttatagggctagaagcagagttttatttaaacccacaaatttcttagtgtactttcacatttttttggcattgtgtaattcaatttcactgtaattcaatcaggttaatagttcttattttgttttataacctctagtgaaaataaggtgttctttgtcagctggttttttacatgtaaattgataaggcagttattaatcttataaattgactaagatggaaaggataaatggtgattcagaaataatccagctttaaaaattttttcctcatacacttcaatgtggaacttttcttattttaaattcagagcaatctacctttgtaaataattgtattaccagcatatatttc

SEQ ID NO: 181052 - DNA, 1516 bp, Homo Sapiens
  misc_feature (129)..(157): n is a, c, g, or t
  misc_feature (1129)..(1158): n is a, c, g, or t
  misc_feature (1443)..(1456): n is a, c, g, or t
ttggctttgaattgagccatctataaaactgcaaggtcttgcccttttttttaatcaaaactgttctgtttaattcatgaattgtatagttaagcattacctttctacattccagaagagcctttattnnnnnnnnnnnnnnnnnnnnnnnnnnnnnactgagctgtaacaaagcctctttaaatcggtgtatccttttgaagcagtcctttctcatattgagatgtactgtgattttactgaggtttcatcacaagaagggagtgtttcttgtgccattaaccatgtagtttgtaccatcactaaatgcttggaacagtacacatgcaccacaacaaaggctcatcaaacaggtaaagtctcgaaggaagcgagaacgaaatctctcattgtgtgccgtgtggctcaaaaccgaaaacaatgaagcttggttttaaaggataaagttttcttttttgttttcctctcagactttatggataatgtgaccgggtcttatgcaaattttctatttctaaaactactactatgatatacaagtgctgttgagcataattaaataaaatgctgctgctttgacagtaaagagaaggaagtattctgattagctgtatctggtattaattgcatgttaaaacactggaatttttaaaattgaaattagatcagtcattcttttcttttctcaagatatctcatggctgacactgaagaagaaatgtaattcataacttgcactaaatgtatattttttttcttaaaaatttaccattcttatttatatttttatggattaaaatttataaaatacagatcagttaatattgcacttaagtaattttacctttttaatgtgatttttatagaataattcagacttacaaatacagagatatgaacaaagtttacagtgggaacaaaggtttaaaaaaaggttgtggttctctctctgtgatccagtgtgcacataaacctttctctgatctttcactgccatcctctggattatgtcttctgacctgtccattttgacccattaactggaaagttgaaaaactacattaactggaaagttgaaaaactacattactttggagaataaaaccgaaagttcgtgtataccttcttnnnnnnnnnnnnnnnnnnnnnnnnnnnnnncaatagaattgcaaagatagcagttaaaattttaatctgaaaataacctttgaatctcgggctaggttacgtccatatttgaagtggtcagtgatggtttgaacattttttgcaggatgagttaaaatgcactggattatatttgggatttttgtttttggaattgtctgttttaatcacagccttaattcacaattggcaaaggcagtttactcaaaggactgggctaaatattctgtaattatgcatttttgataggaaaatgaaatttttgcaaacagacannnnnnnnnnnnnnggctggagtgcagtggggcatggtcttggctcactgcagcgttgaccacctgggctcaag

SEQ ID NO: 181053 - DNA, 1797 bp, Homo Sapiens
  misc_feature (206)..(235): n is a, c, g, or t
  misc_feature (520)..(533): n is a, c, g, or t
  misc_feature (594)..(729): n is a, c, g, or t
tgtacaaaaaggttgtggttctctctctgtgatccagtgtgcacataaacctttctctgatctttcactgccatcctctggattatgtcttctgacctgtccattttgacccattaactggaaagttgaaaaactacattaactggaaagttgaaaaactacattactttggagaataaaaccgaaagttcgtgtataccttcttnnnnnnnnnnnnnnnnnnnnnnnnnnnnnncaatagaattgcaaagatagcagttaaaattttaatctgaaaataacctttgaatctcgggctaggttacgtccatatttgaagtggtcagtgatggtttgaacattttttgcaggatgagttaaaatgcactggattatatttgggatttttgtttttggaattgtctgttttaatcacagccttaattcacaattggcaaaggcagtttactcaaaggactgggctaaatattctgtaattatgcatttttgataggaaaatgaaatttttgcaaacagacannnnnnnnnnnnnnggctggagtgcagtggggcatggtcttggctcactgcagcgttgaccacctgggctcaagnnnnnnnnnnnnnnnnnnnnnnnnnnnnnnnnnnnnnnnnnnnnnnnnnnnnnnnnnnnnnnnnnnnnnnnnnnnnnnnnnnnnnnnnnnnnnnnnnnnnnnnnnnnnnnnnnnnnnnnnnnnnnnnnnnnnnnnncaatctgcctgcgtgagcctcccaaagtggtggaattacaggcgtgggccactgcgcctggcccagacagacattttctgaaacacaactggcaatgagctgtttttacattttgaaagtgattcttcacttcctagttcttaattatagtatacctattaagatctgtaagatcctgaagacataagatcatgaagccatataagaatgaggattgaaagttgagcaaaattttcgggattttgggaaacattcttagctgtgctatctgcctaaaattattccttattacttctctcctttgacagacttcaagttttcttcatagccctttcaaagttttttgagccatccagagtaaaatcatttctaaatgatagttctgtatatctccaactcgtcttaagtgtatttgcctgtgtgcaacgtattgctagactatgaactcctcagcatggctgctggataacttaattgtcctgagttaatagccttcaaaggacaaatcggtttctttgcagatagcttcgtaaaacttcacatggagtttattttatcatatttcccttttttatttctgctcctcctttaattgcccatcttgcttcagagactgacatttcagggtggatattaattaaagcattaattttgttttttggtatatttctatccctagtatttctatcttactgctaaaatacaggaaaagtgccgtatttttaatgcatttagtggttttctttggtgttatctgttccatttttctttttcatacattgaagtgtgtctccttttcaaccaaaataatgaaatagtggagaccatgaaattgttgtgcctggctaattggcaaattaatttaccaatataataagtgtagcgccttgtttgaataccctttttgagaaggtatgatgagaatgggcaagggtgtcagcatctcttcttcttaataattaattgttttcagttttggttcacgaagaatgcttagttaatctgtaatgttgcctagagctgtatttatctgttttatttatactagtgtagtaaagctgcatatca

SEQ ID NO: 181054 - DNA, 1909 bp, Homo Sapiens
tttggcagtgagggagtaagttatatttgccaaataacttggtctcaagaaacatacaggtctcagtcctcaactgtatgaggttttaaagcattcagatagattcctcacattatctttttctttccaagatttaaagctgtcacagcaaatttattattagagaataaactttttcagtcagctctgtaaaaatgtagtaacagctctgtaataattcctgcagcatatttcctaaaagtaaaactatgaatatctgttaactatttagaaggaattaaaaatcataatatcacaaattcatgtcaaaacccaattctttttgtttattttgagctggaaggtggacttcacttgtgcaactctgagtgagcacatttttattaacactgtaaaccattgttccccggatgtagtcatcatttaagtagctggtctgtattatataaatttacagcagtagtcacttgattctcatgttgtcacgatagtcttaaaataatagtttatttaaaagagcagataatttgtttttatcaccgggtaattcttctgttttgcttttgattttatgtaaaataaaacttacccataaatgatgaagataaatacttctacagactgtttagaaaacaaattttaatttagtattgtcttgggaagcaagctttcttttcttctggaaagcacaagaggaaacaatttgaggtttttaatggaaacttacataattggtacatttagcacatacctctttcttgctctgttcctttaacagattaatatcaaatgaaacagtttaaaggaaaacgtatagttttttattgtctttacatctcatcaacttacggtagctctttcaaatgcagttcagcaagtggttaattccatcggggaatcttagctttcatagcaattttccatggaattgggatttttcgttgttatttccaaaacgtagtaaaagttttagaaaatgttaaaatcagtatattcttataaagtgcatatgaatttgctgcctttgtcttcacattatacttgtgcctaaaaaagacctgaaaaagaattatttttgtgctgtttttgaagtttatattaaatttggggacatatacttagcatatattatatttttctacgaagaatacaatatcatacagttttttgaaatgtatttaggaagcgactcctttttatatattccatcaaggcaaccctttaaatttttttcctttgccaagtttcaactaagattgagaacagaattatctacagataacagggtcatgaactcaaaattctcatctacttgatcctcttttatattgactgtaatagagggctaatttctgaagtgactgggtatgtttgctttggccacataaagtgggcagatggaggcatataaaaatctgtggatcattcctctgaactcaagagaaactagcaatattctgatagttttattggcatttccagtaagaatatttgaaagcctctgtctgaaattacaaagcttaatttttttgttttacaagattcctcaacctctactttttactctatactagtttcaaattggtttataaatagaacttaatgtttaatggctataattttgttattggcaaatattaaagtgttgttagctctacctaatcgtgatcaagctcttctttcacatttgtttcactttagtttcttaccattttggctatgtacccagaattctttaggtatgcatgaactgtttcagtaatgctcatcccctcttctcaatttaagttgaaaaagcaattttctccatttttaaagtacgttaaactggagcccagactcccccctgtgtagtgagttcataactctcattaaattaatctgcatttttatttttcacatccctctg

SEQ ID NO: 181055 - DNA, 1393 bp, Homo Sapiens
  misc_feature (1142)..(1167): n is a, c, g, or t
gccttgctcttcctgggcggctgttcgttggttgatatgccagagcctgttctgttgtctgtattggctattgccgctgtcagtcagggccgtgggtcgaaccttcacctactctttgtctgtacaagctcttgttgtctgggtgagcggcggaggcgctgctgtggattggtcacagggagaaacctctgatctgttcctattggcccgtccgtcaagggacgatgatgattggtagggcagagcaatctgagtcctagttggtggagttctgcccggatggaagctccggccgcggagtgatggtggcctcagcgaagatgggccgggcagggaccatggcggtggcagcagaggtggcaggggcggggcggctggcggtagaggaggctgtggtcctcagggggctgtaggtggaggtatggctcgggccagcagcgggaacggcagcgaggaggcctggggggcacttcgggcgccgcaacagcaggtatcccaatagctccaaaacctatcacgacagccatttgtctctttcccctttccttgtcccttccttttgggggtgggggaggaactcacggagccaaaggtactgtgaagttcctaaacatgtctcttccactctttgtctaaactttgtaacgtagatgcagctgactttgcctgtagcctcatagaacccatcccatggctgcagtggaagcttgcggtggctctccagtgaccagaggcatagtgaggtcccagggaggctccctctgtcttgcaacagttatttgtgatctttttctatgtgcctattgtcacaacagagtccggcagcgtcttctcttgagggagcaatttggagaagagctggaacccagactcgcgccctggatgccatcctttatcatccacagcaatcccatctggttgggagcactgctctgggtctcacactgcccctcctctatcctagggagcctgaggcccaggggtggaaagatccagttgcgggtggggggtagtgaaccgcgcaggataatgaaagcaacttgctttggaaatgacctaccgctacccgttgtctgagactgagattatctcagactgtcttctggcttctgccaaaacactcccttaacagaaagcaccgnnnnnnnnnnnnnnnnnnnnnnnnnnagagtgaggcttgagtgtgaaggaagtctcatatatgcagagctgaaatctccctctttgtatgtccacacttttgtcttgttctctagactgattcttgctattccaaatcctcttccacgttgacagcccttcagatatttcaacactcctctcagcatcctccacttcccccatctctccaagctgaacttggttcacagggtgggattgtgtatgtgcatgc

SEQ ID NO: 181056 - DNA, 1537 bp, Homo Sapiens
  misc_feature (1295)..(1340): n is a, c, g, or t
ttggattggcataaaagatatattagggaggaagcctgaagtagggagatgaaaataaggagccatcaaaggcagaatgaaacttaggcagatttcaagtgattttcaaaaatgttgtgatcagaggtaccagataataactattacataacactttctttgttaggagcttatttctcacactgaccaaagcttttgaagtaagtactctttacaccactatataaataaaccttacaaaggattctgctttgaggcatgagagagttaagtcatttgcccaaagtcacagagttagaaagtaatagagctaagatttgaacctaggcagtttggctccagagtctgtgctcttacgctatattaccaccaagaggtcaaataaataccaaagaatgtattttcgaatttaacaatgaggaacttaatcatacaggcagaagtaattccagagcactggagacagaagccagattgccatatgggttaaagagtgtgtaaaccactaggaagtaaagacatagaactactctcacaagtgcttttctggttattgtgacgctgaacttcatggcttgttttaattaagacatcttacaagtgtcaaaatttggtatttggacactgtacactctggttatttaaatatctaacaatggttcttgagcattttgagaaacctttgaaaatctgatgaaaggtatgtgccattactctagaaaaatgttcctgtgtacatgcacatcaagtatcacatactgtttcaggctgttcaaagactacaaagtctgttcatgacctaatggtccatgttccctcagttaagagctccagagataaaggatgtggaactcaaaggtaagtacccagagccttgaaaactccatctgtgacttggaagaattctacaatttgaattaactttgtggagagagatatatttttgaaaaattgtgtgtaccaaaaaaatttcatatcaaataatattttcctgtagtgcattcaaggatctggttccacagcaaaaaattgttttggtctcagttcctcaaaatcacatttaaggagcttgagatttatattttctacttaataagtcttacaaaagcaagttaagaaggaaaatggacaatcatttctgcacatatagggtttaataaaacatgtataataaaatatctcatattttaaatttccaccttattggtagctttcatgacaaagggctagggtgctgatggccatacaattaaggtttttggttagttagttagcagaactaactgactcctacnnnnnnnnnnnnnnnnnnnnnnnnnnnnnnnnnnnnnnnnnnnnnncccagatggctcacgaggaaataaatagcagtcattgtatgtgtgacagagtttgagatagaatgagcatattgaatctcacatcctattcttattactgtcagcagcgttgacctagcagtataaaactatctgaagcaatgtagtcactcagttctcataaagtttatttcaagtactgtaacaattcatgtttg

SEQ ID NO: 181057 - DNA, 83 bp, Homo Sapiens
ttggcacggtgcaggggttgaggggagggaggagaggtcagtggcaggagagaggggacaggtgtgtagaggcaaggtgccaa

SEQ ID NO: 181058 - DNA, 1358 bp, Homo Sapiens
ttggcacatttcaagtgctcaatcgctaaatgtgactagcgactgccataccagacagtgacgtcctaggcaaggatgaatccatacttttcttcctttgaataaaaggctttggttttctaattgtatgatgcactcattttttgctcttgcttgtaaaagctacatttggcagggatttcactagcttgagccatgattttgtttctaaaattgagcagctcccatcagtactaaaaaaaacagtcaagaatcaaggatcgggaacctatttcactcactccattcctgccgtgaatgtctggaagctatacttagctatgtttctgtatgtatgtacacacacactgctatatacatctgaacaaccttgattgtgaacactcttctgtttcatttcctgatcatctttctcctgctttccccacaaaggtctgctattgtatatctgtataataaaataaaattatttgtaagaattgtattcttttagctactagctatccctctgggatgttgttaacctgccagaaattttacaactaaaaacagttacgataccttttattcattcttagtcttgacttttctgacgtgatgttttaaattctttcaatcagtgatcttagagatagggcagtttttgtttttatctgccacttttatccttgcagcatgcattggagttcactgcagacactttttctcaaacaggagattgggcaaccttgagtccccaaaaggaacttacctgtcagctcaggctctggacctgcttaaagcttgagacacaggagggccctgagcaagagagagagaataaaactatcagttaagtaggaatgataaacaaggttccattccacatgtgggagatggcctggcagtagctgctggaacgcagggttgagagagaagtactgacagaagaggattcttcgggtggaagtgcagagtcagctggtgatggctacaggagagggcagctcccagcctgtgccgtggccatccccaggtgcaagtgaagaaagaaagaggtggggtgaaaggaggagaatcaccatatcaccatttttattttgatgcttacactcatttattctgtttttgtaaaacagtttcaagaatttaaaaatccttccagttaatagagcttttgttattatattataattttgtaaacccactttgtttttcccactttaaagccacagggtcgactcatggatgatacctctattgctgctgcatgatgttcaagaccggcccttggctgttgttacagagatgttgggcagagctatgcagtgtttcattgtgaactctagctttgatcatggtaaaaagttaaccttttc

SEQ ID NO: 181059 - DNA, 414 bp, Homo Sapiens
gtcaccaacccagggtgaaaatgggacattcccaactctagctcttaggccaagcttatttgtaatagattcttgttttcaaaggatatagatattgagattctcaatgtatttgttaaaatacattgtttcttgttaaaagcataagactttgaaatgtctctgtgttgcagatatgtagatgttctgagccataatttttggaaaattctttcaaagaaaaggaaatctactggacaaatagcatgattaatggggatctagtgacaaaataatctgccctaattggatttgtgatgtttttgcaacttgaaattagcttcaaaatccaacaataatacgaaagaatgttcagtatcacgaatcaaattaaaaccataattaaatcacctcctttcattagggtagctacta

SEQ ID NO: 181060 - DNA, 494 bp, Homo Sapiens
tgtgaatcactgagcccagccacaattaaatctttgttcataagtctgtgcatttatttgcagttattatcttttgtatgtttcttggtttttaaataatacatttgaattgccaaatgcctttttggaaagtaatgctgggtaacagttttcagtcacactaggagggtgtaagcacccattgtgcccttgccaacatttttctattttttaatctttgctaatttgataatgtaagtattctcttacttaaattttgaatttctttgattactagtatggttgaacgtcttgtaaattatgcatatgcctgtttacattttgggttcacaatgtctttctgattcatttgtgggaactcttctcctttaatattgttaataatggtttttgacaggcattggttttaaatatatataatcaatctccccctttcccacttttttaattgactataaaaacttagaaagtaattatccatcctgtgtttaccc

SEQ ID NO: 181061 - DNA, 1320 bp, Homo Sapiens
  misc_feature (386)..(440): n is a, c, g, or t
  misc_feature (617)..(763): n is a, c, g, or t
  misc_feature (825)..(880): n is a, c, g, or t
  misc_feature (906)..(918): n is a, c, g, or t
  misc_feature (1155)..(1170): n is a, c, g, or t
ttttgcagattaatctatagctgcccatgtgcatgtagtccagaaaacatgccaagaaggaagagctctgaaccagacacagaaaggcagtgtggcttcctcgctcaaggggaatgcaaagggctaagagccctggcttcaagcagctgttatgctagatgaggaaaatgcaaacagattcaatctctgggatattgctgccaacatgctaagcccttcaccagttgccttgattcgaagcagttcctctatgtatactggctaaatgatggactccggcagtgaaacccacatactcagcaggctgcattctaatgagaatgaaggaatttaactaatggtgtttgagctggaaaggtaaggtctgagagtcccagtgagctggnnnnnnnnnnnnnnnnnnnnnnnnnnnnnnnnnnnnnnnnnnnnnnnnnnnnnnntcatttaaaggtactctaaagatgagttctttacttctggaagaagaatccttttcttatagctccctcaacagcaatacttcttatccaagtatactctcaagcaagcagggctacagataagaaaatgctgggaagaggcagagcataaatccaaacaagaatttgcatctttgnnnnnnnnnnnnnnnnnnnnnnnnnnnnnnnnnnnnnnnnnnnnnnnnnnnnnnnnnnnnnnnnnnnnnnnnnnnnnnnnnnnnnnnnnnnnnnnnnnnnnnnnnnnnnnnnnnnnnnnnnnnnnnnnnnnnnnnnnnnnnnnnnnncatagtggtacatgcctgtaatcccagctactcggaaggctgaggtacaagaatcgcttgannnnnnnnnnnnnnnnnnnnnnnnnnnnnnnnnnnnnnnnnnnnnnnnnnnnnnnntgacaaagtgagaccctgtttcaagnnnnnnnnnnnnngagagagagaggcgtaggtcctagaatagccagaattatcttgacaaagaagaaacaagtgaaagcaatcactttacctgatatcaaggcttaccacataggtacagtatttgatatagtgtggtactggtgaaggaacagacacaaacatcaatggaagagaacagagaacccagaaacagatccaccaaaatatgcctaactgactgtgttgcaacaactggaaatccacaaatnnnnnnnnnnnnnnnnttgtaaaacctcaaaatgaaacattaacttcaatgtaaaacataaaactataaaatctaaaaatatagaagaaaatatttgggatctagcaccaaagtgacaagttcttagacttgcaagcacaatccataaaaggaaagatcaacccaa

SEQ ID NO: 181062 - DNA, 1353 bp, Homo Sapiens
aaataaaaacatatgtccccccaaaaacctgtgcacaaacattcatagcaggattattaatgacagtcaaaactagaaacaacccacatgtctatcaactgaggaatagatgaaaaaaatggggtaaagccacaatgaaatattatatggcacttaaaaggaatgaagtactgatacacgctacaacatggatgaatcctgacagcattacgctaagtgaaagaagccagtcataaaggaccacatgttgtatgaatctaatcatatgaaatgtccagaataggcaaacttacagattcagaaagtagattagtggttgcctcaggctagagggtgggacacaattggggagcaactgctgtgggcatgctagatgggcatggggtttcttttttgtggtgataaaaatgttctaacaatcatattgtggtgattgttgcacacctctgactacgctaaaaaccattgaactctatactttaaatgagcaaactctacaatgtgtgaattatatctcaatatatttctttaaaagaagatgggctacaaccaagtgtgttgaatgttatgactggggaggggtgatatgtgagtgaataatatgggaacccataatatgggaacccaactgggctaagacataaaggatcaggagtttggtgactgacagccaagacagagcagacagtaaggccaaaggcttcaggctgggaaaagcatggaaaatagaaggaagtaaaggtgtaatggtgtggttggagtagagagcaggaaaaagagggacaagttgtggttagatggtgggcagggtccagaggagacaggctcctgtggtccatgttaatgatgccagatttttcctgtgagcaatgggaggacattgaagcgtttttaagcctggagaatgtaatgattggatttgaattttaaaaagtgtagtccagctgccggaaattgatttgagggatatgagtagatataggaaaatcagatagggaggccatgccaaagtcagggagagagatgatgtcaaagaaatctcaactgaagcagttagcagggagagtgggaagtgagaatatgtagacaatgagctcttccatgaaatttggttgcaatgagaggaaacaggtggagtttagctggaaggggtaggagatgaagaaatttaaaagatacacatttttaaatgggagttaaatgactccagaagacagagacaggtttagtattcagaagacagaagagagaattcattcaatcaggcccttgagaaggtgaaggataatgaggaagaagtggggagatagttacagaggaaggtgggtttgtagatttgcaggcagaacccaa

SEQ ID NO: 181063 - DNA, 1366 bp, Homo Sapiens
  misc_feature (510)..(523): n is a, c, g, or t
  misc_feature (967)..(1010): n is a, c, g, or t
ttgggaccagttctgaactttgaagataaataattgctgtaaattccttttgattttctttttccaggttcatggtccttggtaatttcattcatggaaaaaaatcttattataataacaacaaagatttgtatatttttgactttatatttcctgagctctcctgactttgtgaaaaagggtggatgaaaatgcattccgaatctgtgagggcccaaaacagaatttagggttgggtgaaagcacttgtgctttagctttttcatattaaatatatattatatttaaacattcatggcatagatgatgatttacagacaatttaaaagttcaagtctgtactgttacagtttgagaattgtagataacatcatacataagtcatttagtaacagcctttgtgaaatgaacttgtttactattggagataaccacacttaataaagaagagacagtgaaagtaccatcataattaacctaaatttttgttatagcagagtttcttgtttnnnnnnnnnnnnnntcatctgaaaagcatttgtacagtaaaatgtataatgaagctttgccaaccagactgtgctagcaacaaatttttttaaataagctttatgcagtggtaataaggtggcctcaaatatattgtgtctgatggagagttattagtgaaatgaatgtggtctttcttaaggcctgggtggactgtaaactttgccaatagtataactcttgtcttctggccacttgatgtttaaatatctgaaatatcattttgaaaaaaatacatctatatataacatacatgaagagatgctaagctgacagtgatattttagcacatttgaagactgggaagagattttcaggtgaattttaactggtctattcttgcccttagtatctacttcaaattgaagtctacaaacaaagcagttcctttgggaggtttttagtttgagttttagcnnnnnnnnnnnnnnnnnnnnnnnnnnnnnnnnnnnnnnnnnnnntggaatttcctatctgcctggatatattagcagagtttgaatgtagttttggcctttggccattagacttctattaaaattcattaatagtcatacaaccaacatagagttgaatgagaactgccgatgtaattaataggcatgacatccatttcaaacatctcaacactttaaagaaaagccctttgtttcaagaaaaaaggagtttgtaactaactaaaatacctaacatgtaattgacactaaatatgaactttgtcttatttagtttctgttatagctgtaaaattcaagcagagccataacattgtacagagtgtaccatttgtgattaaacatagcctgttaatcctgaa

SEQ ID NO: 181064 - DNA, 1129 bp, Homo Sapiens
  misc_feature (442)..(455): n is a, c, g, or t
  misc_feature (900)..(943): n is a, c, g, or t
gtacaaaaaagttaggatttcattcatggaaaaaaatcttattataataacaacaaagatttgtatatttttgactttatatttcctgagctctcctgactttgtgaaaaagggtggatgaaaatgcattccgaatctgtgagggcccaaaacagaatttaggggtgggtgaaagcacttgtgctttagctttttcatattaaatatatattatatttaaacattcatggcatagatgatgatttacagacaatttaaaagttcaagtctgtactgttacagtttgagaattgtagataacatcatacataagtcatttagtaacagcctttgtgaaatgaacttgtttactattggagataaccacacttaataaagaagagacagtgaaagtaccatcataattaacctaaatttttgttatagcagagtttcttgtttnnnnnnnnnnnnnntcatctgaaaagcatttgtacagtaaaatgtataatgaagctttgccaaccagactgtgctagcaacaaatttttttaaataagctttatgcagtggtaataaggtggcctcaaatatattgtgtctgatggagagttattagtgaaatgaatgtggtctttcttaaggcctgggtggactgtaaactttgccaatagtataactcttgtcttctggccacttgatgtttaaatatctgaaatatcattttgaaaaaaaatacatctatatataacatacatgaagagatgctaagctgacagtgatattttagcacatttgaagactgggaagagattttcaggtgaattttaactggtctattcttgcccttagtatctacttcaaattgaagtctacaaacaaagcagttcctttgggaggtttttagtttgagttttagcnnnnnnnnnnnnnnnnnnnnnnnnnnnnnnnnnnnnnnnnnnnntggaatttcctatctgcctggatatattagcagagtttgaatgtagttttggcctttggccattagacttctattaaaattcattaatagtcatacaaccaacatagagttgaatgagaactgccgatgtaattaataggcatgacatccatttcaaacatctcaacactttaaagaaaagccctt

SEQ ID NO: 181065 - DNA, 1101 bp, Homo Sapiens
  misc_feature (941)..(990): n is a, c, g, or t
atgagccactgcgcccggcccaaatcttttattttttaacagccttagttatttataattcaaatgcactaaaatatcatcgctgtcatgaactttgctgtttacaggttctgtgtaattcagaatgctttgtacttagaaaataatttctaggcttatcttgttttgcagttttcatgttttgacaattgcccaccatttacaatactcaatttttgattatgaaatgaatagtaaaattcaaacatatctaataataatttgccttagtttgattaataaattatatcaaaaaacttggggatagaaagaggcttttttttccccctgtagtatttttaaaactttttagatgagctggatgaaaccttagtacattggagctggagttgtattgagtacagccccaactctgaagccttatattcatgtcttaagtaccattgattgttctgtgaattgttgttagtttcatatttgacattgtagtaatccaccttgcattttagtctttgcaaaaaggatattgctaggtatattcttatttctgattgagtattgaatttacatttttcagaatttcattctttgtcattataatccaaaaacaatgtccacatcagacttggaacttctcacttcaaaaatgaaatacagatttagcagtgttgtacataatgatgtccaagcatttttccacctgtttactgagttttccaaccatttactatgtgttgagattggtgggttttctggctgtttttctgaggtgaatgacttgttacagagcctcagtaagaaatttcaactaaaatcacaaaaacataaagtccaggaaaccaccagaagatggatttttagtgtttttgaaatcttgtatttccttttgatatcatttactcattttaattttacgactgccaacttgttacggtattaannnnnnnnnnnnnnnnnnnnnnnnnnnnnnnnnnnnnnnnnnnnnnnnnnaagaataaagttaagatttggtctaactatattttcccattcaagtacaaaaatgttttcaaggctgcaaaaagtgtacagttgttaaacaagttgtaaataaagacttgt

SEQ ID NO: 181066 - DNA, 1741 bp, Homo Sapiens
  misc_feature (988)..(1015): n is a, c, g, or t
  misc_feature (1028)..(1148): n is a, c, g, or t
  misc_feature (1163)..(1279): n is a, c, g, or t
  misc_feature (1439)..(1448): n is a, c, g, or t
ggcaccgtctttctctttgccaaaatgtgttcagtatttgtggtgaatatgtctgcatggtatctggcactgaagtatatactaaagcgttatggttgacttagtggttctgtagtttatagttacatatagtcatactttgcacagctcactaaaagcatttaaagcccagcacatataaagtatttgttaatgatccataaatcctttctagatattagatatacaaaacctcttttcatcttagaaatagtagcagcaagaagtgaaggtagtatgctgtaattaatgtggttaatgctcaaataaacaaacgtagtttcccatgtaatgattcaagatttcaaggatttagaagtggaaagtccattgaggcattgacatcaaccccttgttttacagatggggaaactcagatccagggaagttaaataggtgatttgctgatgtcccataggaagtgaatagcaggatatcacaggacaggatatttctgagcctcaatctgatacaacattatgggtccacaccatctaaagtaaagtagtttccaggtattttagcactaaaatcttaggtggagtatactttatgaagaatatttagtaacatataaaaaattatcttttcgtattgatacaataagctacagtatcagatttttctttacaagagtaatttttaaaaacctaataactgtttttagaaataaaattcattaaaaaacaataaaagggtataaattccagctattcttactacttaatacatggtagaatataaaccaccaaagaggacaattagccttctgtgttattatcatacaattgctaaggtgatatttgaacttggaatgtgcttacaggctggataacttttcagttattcccaagaagaactgatctaaaccacacataccttataggtgatttttgccagcaagtaacctacagtcaaatacatgtaggtctgccagaatgttgtttcnnnnnnnnnnnnnnnnnnnnnnnnnnnngagatggagtttnnnnnnnnnnnnnnnnnnnnnnnnnnnnnnnnnnnnnnnnnnnnnnnnnnnnnnnnnnnnnnnnnnnnnnnnnnnnnnnnnnnnnnnnnnnnnnnnnnnnnnnnnnnnnnnnnnnnnnnnnccaagcctggctaannnnnnnnnnnnnnnnnnnnnnnnnnnnnnnnnnnnnnnnnnnnnnnnnnnnnnnnnnnnnnnnnnnnnnnnnnnnnnnnnnnnnnnnnnnnnnnnnnnnnnnnnnnnnnnnnnnnntgagccaccacgcccggctgaatgttgagtttcttgttaaccaatcctgcccaaagactttctgaaccatttttagaagccattaagttttttttaaaaaactagatgttaaagtataaaacttataccagaaaagtcttactaagaggagggactaggnnnnnnnnnngtcaagccatcatctgaattttactacaataagtaattattggaatttctacatgaaaggcaattagaatgtatagttggttaatgaagaaatttaagagatacggagaagacactgcccatttaaaatgtatccttttaaaaccactgaacagagaaattcttaatacaattgagagttagttttaaagtagcatacatgtattacaggcaaattagaaatgttggcactacaaaggacctgtagaaatcatctatttactgagactttcattttagaaatgagagctttga

SEQ ID NO: 181067 - DNA, 1455 bp, Homo Sapiens
  misc_feature (1365)..(1377): n is a, c, g, or t
gagcaatgcttttctttaatagccaactttgtacaaaaaagttggcctccaggtaccgtctggagcagctggagggaagatggctgaatctccctgctcccctagtggccagcaggtgagtgtcccaagttaacgggtgtgccccatggtgggtggagggcagggcagatggccgctgtgcacagggcccctcctccagggatggggggtcaggggccatcgtggggtgctgttgactctggttttccctctgctaccatggggcctcctgtgtgaggaaggccagggacgctttcctggccagagctgcctggcgatggggtggggggcctgagtgtgctgttcctggaggggctcaagctcctgagaccccagtcagtgtctcaggcccaacacctcccagggcccaccttatccctgcctgccttttgtctgggggtcgttgcccccccactgttggcacctcccaacacactgccacgtgggggtggaggtggcagcccccatgagacccagccccagctcagcccctcacaggcaagatgtcagccccacccaggttggtcggtctctctcactctgtctctcccacccccctctctacccccgtcccttgccttaaacccctgatcctgctctcctctgcccccgccgcccccacctgccttttttagacaaaaccaggggtgatccagccattggctcaggcctggccaaggggctccccagcccccaggggcagaggttgtccccactccgtgagtgctctgtcccgtgggtgggggtggcagagcctccttccccagcaggatggtgggtggggatcaaaggcaggcggggggacaggcggggggacagccggtggtgagttgcacacagctgcagccccgacagctgccccagcatagctcacaagagccccaccccccagccgccctccccgccttctccggatgagctgcccgccaatgtgaagcaggcctacagggccttcgcggccgtgcccacttctcacccgcctgaggatgcccctgcccagccccccacgcctgggcctgcagcctccccggagcagctgtccttccgggagcggcagaagtactttgagctggaggtgcgcgtgccccaggccgagggcccccctaagcgcgtgtccctggtgggtgctgacgacctgcggaagatgcaggaggaggaagccagaaaactacagcagaagagagcgcagatgctgcgggaggcggcagaggctggggccgaagcgaggctcgccctggacggggagacgctgggcgaggaggaacaggaggatgagcagccaccctgtgccagcccgagccccacctcaaggcagagcccggcgtnnnnnnnnnnnnntggggatggtggcgccccgtgtgcggacggccaaagctgaaccggcgccaccaggagcggctgcgcgtgcagaagtcc

SEQ ID NO: 181068 - DNA, 598 bp, Homo Sapiens
tacaaaaaagttgggcacatcccccccggggagttacgttattcacaaggagaagcaccctctgcaacaaaaaggaaccagcaagcacaggctccctgttactccctgtggtgcaggaggcatttttctgagggcattaagcacttcaaagtgtgcctgtggtgggagtgctgtgtgggcaggaccagcactgggtgggatgttgggggcggggagctctcagctgcctgcccctgcccccatgcccacactctggcagtctctggtgggccagaaatgatgagtgctcatttctcttccaccctgcaggcacagttggcgggcagctcccaggtctccatgagtacggggccgtcgggggctccacacacacggccactgcagccatgtgggcctgtcagcactgcacgttcatgaaccagccaggcacaggccactgcgagatgtgcaacctccccaggacctagggcgcctgccctctgctggctaggaccgggcccagcccagcccttcctgaagccagaagcgttgctgagtgtgttccctgtaactgcctcatagtgggcagccctggaggaacaaggggctggctgtcctg

SEQ ID NO: 181069 - DNA, 224 bp, Homo Sapiens
ttgtacaaaaaagttggctacatgctcaccctctgagcctcagctctcagctctcatccagtgagggggcgtggtgctctcagccaagagctgccccgggtgaggagggctgggggtgtcgggggcaggccaggcggcgctcatctctctgtctcccctcactgctgctgctgcaggatctgtgtgaggtagggtcccgagtcctccccctgccctcccctccc

SEQ ID NO: 181070 - DNA, 1456 bp, Homo Sapiens
ctttgtacaaaaaagttggcaaattttggctatactactacagaataagagtaaagcaaagatgatattgaaattgacaagtgcaaaacgtgtaaaatatgacattgcaagagaagatgacacatgtagaaaagaatttatgtgactataccatgtaacattatttgttttacaacagaaaccaatagctatattgagcagaaagtgaatgtaataggacatagaaatgttacagaatcagagagagggctgaagagcaacttggaacaaaaagtgtcaagttggcataggggatctctatagctgtactatcaccttgggacaccctgcaattagtaacatggactatttcttccacccttctgttactctactcaagacacaaagtccctgaagaaagaggctaattgtcagagtttcagttacatgcagcctctttggggatcttggagaatgaaaaaggatatgctagaagtcttcctcaaagtttggattcatatcccgtgaagactgagtagtataaggaagtatagataattcctgaacaggaaatcgaggccctgtgagaagagtagggagataggacgtgtaggagccaacaataagatttcgcccactatggtgaatataaatatggcagagaaaatagacaaaccacatggaaactgacagttgaataagatacctgaaaaaatgtaatctgatttgcaaaaatattttgtaagctaagagacgacatttagaatagaccagagtttttaatcctcaaagaaaatattctgccagtacattttaactttgtaaaatagaaaaacagtagccaactcctggaagccaaatgattaagaactagctttcaaagaaaaaagatgcggaagacatcttatccaagactggtaaaagacacagaatggatttttacagtagatgagtttactatgataacctctcattttgaaggcagcaaaaggatttttcttcagattccccctaaaagttatccactgctgcaaacaccagtatgaaatactgctgaaagagatttactcaataaatataatactgccaaattttaagactaacaaggaggaaacacagaggggagtaggattgtggagtagggaggagagagagaagattaagaatgtcagttaactggtgggaagatgtagttgttttttcataatagggttaagacattcggagtatttgggggttagaaattgattttttagagtttgtttagttatggataatcgtaaaaatgtttagaaattctctagaaaattaggatatatgactggttacctttcaaactcaatgtctgccacaattcattagaaagtgagtcatctcccagactacccatctgtctcctgcctgatttctgcaaaaaatcagagtgccagaaaatgtgtatgatttcaaacagagctgtggaaaaacagagaataaa

SEQ ID NO: 181071 - DNA, 1312 bp, Homo Sapiens
  misc_feature (105)..(118): n is a, c, g, or t
  misc_feature (581)..(613): n is a, c, g, or t
  misc_feature (1157)..(1182): n is a, c, g, or t
ttggctttatttaccgatttacacttttgttactctattatatattcagttagtgtctgataagattttctttgcttaaggagaacggacattgccttggtatgnnnnnnnnnnnnnnccctccacttttggagcttatcaggtaaaaatctcaagccacatgaattgttaacacctctgttgggaaaagcctttgtgagtttttatgtacttggtctttgtttttgttattcatcctgtgtcctccctcttcccgatgtgctgttttacctaggagttagtctgctttctgaggatcttttaaagagaggctgtgaagtgctgaatcacctttaatgatacagcacttctgccatctcagcatctacataggacttacatagacttcctgaatgtgtcttcttcaaatactaaagtacagttggatcattttcttatctccttttcttaagcagtactttgcaggtactcccctttgaaagccagaagcataaaccattggggaatcttaacttgtagacatgcagtaaaagaaatgcatttatgtaagatctgtgagtacttaaaaagaaagctctcannnnnnnnnnnnnnnnnnnnnnnnnnnnnnnnnatacatagaattcccaaatagtttagcaaaggcagggcgcaatatcaagtaatttaaaaatggtccaaggaactgtaagaaggaggaactaattctagaataaatgttaaaatgccattcaagaacaaaaccacagatgccatacagacctcctgtgcttaagttatagaagaataaaaatctgaatgaatggaaggccttacgtgtatacagtttacaaattcctatttctaaaatttaagtcccttatttaacagaagtatgtattttaatgcttaactgtctcgggaaacctcatttgtgacatcatctaaggggatgggaagactagggagccagtgccacgttgaacagaacagtggtttagtgaatgtgtgaggaaagacatgggcaactgattattaatgtttttgtaattcagtttataacttggaaccaatgaaaagcaacaaaactaaactggtttgacagcctgccacttctggcatttcctgtaagtcactagcagtaggtgtgaggtgggcttgcccatgaccaggagggnnnnnnnnnnnnnnnnnnnnnnnnnnatatgcgtgttggtctgcagtcacagcatacctttatgtgcatgtgtcctcgcagcttgggactcagcagtattctgggagggtggaggtgaactgtcccatgtattgtattatatattttttgagatgg

SEQ ID NO: 181072 - DNA, 1088 bp, Homo Sapiens
ttggcaattgtcttaggaattgaagtgaagaaagaaggatgaagaggaaattatctcttggattgctctccaggaaatccttctctatactttaaaagctcttgttcttttctaggagtccaatgtgctgattgctgctaacagtcagggtacaattaaggtaagctatttactatatctccattttaaactcaggcccatttttagactgaaacaggattatggaaatacaccattgtactgagccttagagatcatcccaaatcatgggtctgtgtctccttacaaatggcttgatttaagggaaaagaataggtagcttgcatctgtggagaagatgatagtgcttattgaggttgtatggatgctggatggattaatagatggtcagtttgaaaaacagataaagactagtgaacattcactgtgggctaagcacagtttagcttctgttatgccagtacaactctcccacagggctttcagtagatagagcccaaaatatagcaggagatgcaagatatagcagaagatgcttagacatcaccagatttaaacatatcttggtcatattttattctcttcctcatggttctctttcttctgtcccctaagaagtaggtttttcctcagttgtcaaaggggagaaaaagttattttagtgttcagttgaaaattgatagatgtgattcaaggaagcctagccataaaaaaaggaaagaaaattgattgatgcatatatagcacttgtacatgatacattggataaataaatcctgagataagcagtgaactttctaaacaaaacacccttttggtggagtacgtgtttctgagagtacctgttttttccacatattctctgctgatttggtagaaatattgaaagttttttaacataacgtgtgtgtttctcctgccacttagcattaattttgccatagcttccttagactcatcataagtggagaataatccatcagccaaggcagcaaatcctagcctaaacattctacagaggtgaaatgagcaaacttaacgcagaagaactgcactaatttacatggtagtctccttttttagcagcc

SEQ ID NO: 181073 - DNA, 1397 bp, Homo Sapiens
cttaaaatgcccactttgtacaaaaaagttggattgaaagtccctttaacataacgtgtgtgtttctcctgccacttagcattaattttgccatagcttccttagactcatcataagtggagaataatccatcagccaaggcagcaaatcctagcctaaacattctacagaggtgaaatgagcaaacttaacgcagaagaactgcactaatttacatggtagtctccttttttaggcagccagtttctctgtttgaaaagcctctttagagaaccactgagagcttaaatgaaaacgaggttttttaactgatcagtgtttgttatgttctggaagcctctagcaagatggtagaaggtcttggaatatctgatttaagtggctttctatactctctcagtctctctcttactctcatgtcaagtcatgaattgaaaagctacaccttactcttcaaaaagtttatcctttacaccaattgggattgccagcatacctacaagagctcaaaactacataggttctcataggatcccactgacaaatctaagattttgttcagcatcattgacttcttatgttaagtagcctagttacctaatataaagacaaaagcattatggaagcacatatattagtcaagccttagctgagcagcaggggaaaggttgcacgtttaaatatttgctacttagtgagtgttgtagtgtccatctaatgtaattctttttgacagtgtctcataactatcctcctgttccgtgatctttcttagccatttgcttcctcttagttttagcaatatcacaacttacttttttatgacagtatactactttaattctaaaaatacaaagtatctggacgctagatgattggctagaaatggatgaagcagcaggaaagagcaagactttaggtcctgtaaccttgatcattataaacagtgtttattgatgaaagaagaaaacagattaaaatcctaaacaaggatacttaaaactttcataagaatgtggaaagattccaacatatattccaaaaatgtatttgtgctatgcattagccaatttatttttccatgtgttttatgtagtttaccttgaaggctcccaagttaactgtggagatagctcatctgaaagagttcatgcagctgttaagctgcaggtcaaaaaggattaatgtccaatccattcaaattctttggcattttcccagatgggaaacgttttttaaatttgcttttctattggtaaatatagtaaagagtcattaaattccttttatatcttaaatgattttattaaatggatccttttttccccccaattaagtgctagaattggtatgaagggttaactcaagtcaaattgtacttgatcctgctgaaatac

SEQ ID NO: 181074 - DNA, 957 bp, Homo Sapiens
tttgtacaaaaaagttggcttggagattgtgggattggttttgtttctgttttgttttgtttatcatttacctgtagtgctattgctgttgatactatcacctataccctgtttctagtgagtgctgaatacagtatggtacaatgacagtaacagccgcgtggtgctgccaggactgcccttgggcatatcagtgacagcccaaatgtgggtggaggaaacctgtaatttccttcttaacatgtgtttgaaataccaagtgaataatactgttctggaaaaaaatgataaactagtggaaattaaagaaattaagggttttatataatagacaggccccacctctcaaaatatttttagaagtctttttgtaaactaatttcttttgatcactattttgcatcagtaaaatgatttttttaaaaccaataaatcatcaattattagaaatagttgtctcacagtgatactggtttttcttttgtgctgttatgatttaacattgacaggaacactattttaaatccttacgttcaggtgtttgtaacttggccttataattaggctgaattatggcttcaaggtctacaatttatgtgtatggttcacagcctagcttctatttacatttgaaaatacagatttttaccaactttggattcttttttagttatatgtttgtctttcctttttaaattgttcaaaactattttttaatggtcaagttactaacacttgaaaatcagatactgcaccaaatacagtgtttttccgtagtgtttttaatgagtgcacctattactactgtgcgagaattcatgttttaccagtcattgttatattacaaacagacttgcatgattaaccagttgttacacttactttttcaagttggagtatatatgactcagttgcaggactggtctctcttatgtgaatgcaacacatgcagaaatg

SEQ ID NO: 181075 - DNA, 1639 bp, Homo Sapiens
actttgtacaaaaaagttggaatagacaggccccacctctcaaaatatttttagaagtctttttgtaaactaatttcttttgatcactattttgcatcagtaaaatgatttttttaaaaccaataaatcatcaattattagaaatagttgtctcacagtgatactggtttttcttttgtgctgttatgatttaacattgacaggaacactattttaaatccttacgttcaggtgtttgtaacttggccttataattaggctgaattatggcttcaaggtctacaatttatgtgtatggttcacagcctagcttctatttacatttgaaaatacagatttttaccaactttggattcttttttagttatatgtttgtctttcctttttaaattgttcaaaactattttttaatggtcaagttactaacacttgaaaatcagatactgcaccaaatacagtgtttttccgtagtgtttttaatgagtgcacctattactactgtgcgagaattcatgttttaccagtcattgttatattacaaacagacttgcatgattaaccagttgttacacttactttttcaagttggagtatatatgactcagtgcagactggtctctcttatgtgaatgcacacatgcagaaatgcagagtcaattttacatgcccataaagatatttgtaaagaattcagctcttatggtctgttgtataaatgtgtatctaggcactttattataactggaatttgacctcacagatgttacaacttgatcagtcgtttgacctaatttgtggtagctatctgtatgttttgcaatcttaatacagacatgctttccaaaaagattaatacagaaccatcctgccgttttggataagtctatccagctgtggaaagggcaacctgtggtttctctgtactggtgtttaatgggggaagaatatgaacagctttaaagagctgtgtattgtggttactactattaaaaaataagatctgcacgagtctgactggcctttgggtggcctttgtggacggctcgtagctggaaagtgttgatctgggttttctggcattcttttaagttaaaaagttaacatcgggacatgggtttgatcttttgttgtacctgatgacagtgcagagattctccacagctggataaaaatgtcacaaagctacttactgtacatgggcagtatcagatttcaaatcctaatatttcagctgtgcttttaatactcaaaatattaggggatggggtgttgaagctttcccttttttgcttttaacaatttatagaatttaacagatgtactgtctttcatgtggcctcacatttaaagttatgagaacatacacatggtttacaacttttactatatacctttccttggccaccaagtattttaaaagtgtgccaccttttaacctttactttttttaagttgaaggtgatactttttctatatatgatgaaactcatgtcaactgaagtgagtgtaatctcagatatcaacattattatattttaaaatcacgctatggaaatatcacctgaattctgtcatttgtcagatttacagtacctttttttctttaacttttacattaaataaaaataaaattgggagc

SEQ ID NO: 181076 - DNA, 1525 bp, Homo Sapiens
  misc_feature (672)..(698): n is a, c, g, or t
  misc_feature (741)..(783): n is a, c, g, or t
  misc_feature (965)..(979): n is a, c, g, or t
  misc_feature (1274)..(1292): n is a, c, g, or t
actttgtacaaaaaagttggcatgactcctacatcctcttttgtgtctccgccaccacccactgcctcacctcattccaaccggaccacaccgcctgaagcggcccagaatggccagtcccccatggcagccctgatcttagtagcagacaatgcagggggcagtcatgcctcaaaagatgccaaccaggttcactccactaccaggaggaatagcaacagtccgccctctccgtcctctatgaaccaaagaaggctgggccccagagaggtggggggccagggagcaggcaacacaggaggactggagccagtgcaccctgccagcctcccggactcctctctggcaaccagtgccccgctgtgctgcaccctctgccacgagcggctggaggacacccattttgtgcagtgcccgtccgtcccttcgcacaagttctgcttcccttgctccagacaaagcatcaaacagcagggagctagtggagaggtctattgtcccagtggggaaaaatgccctcttgtgggctccaatgtcccctgggcctttatgcaaggggaaattgcaaccatccttgctggagatgtgaaagtgaaaaaagagagagactcgtgacttttccggtttcagaaaaacccaatgattacccttaattaaaactgcttgaattgnnnnnnnnnnnnnnnnnnnnnnnnnnnccaagacaagggaaatgtagacttcataaacatggctgtatannnnnnnnnnnnnnnnnnnnnnnnnnnnnnnnnnnnnnnnnnngacgacaaaaggtatgtacttataaagacatttttttcttttgttaacgttattagcatatctttgtgctttattatcctggtgacagttaccgttctatgtaggctgtgacttgcgctgcttttttagagcacttggcaaatcagaaatgcttctagctgtatttgtatgcacttattttnnnnnnnnnnnnnnngccaaatacattttctgacattgtaagattgccttactgtctgtcattccttattgctggcccctttctcaggccggaggccaagtggtggagaaggaaaggaaatgatcgaacgggcatgttgtcaagtgggcatgccactgggaaataccaccagtttaccctgaaacattgtcctcagaggagtaggaaagtggattttgaatctctattttgctcaaaagttcagttcctgagatactgatgactgagagtgctgctgggaaattttcaggattgtgtggtcttttggggnnnnnnnnnnnnnnnnnnnaagacaaagttgaccgctgttcactgtccacgtgatcagttgtaagattacaatgctgcatgctagttggttacataagatacaattccagtgatggaaggcggttataatggatggtggtgtgtacaagatggcactgccatctttgagcagagcccagctctgcagcgccacttcatctttttaacaccctaaaggtctgtttgttgttgctgttgtcctttattttgaaa

SEQ ID NO: 181077 - DNA, 936 bp, Homo Sapiens
ttggctgggaattcagattcagtggtcctgatgaatggctgatgattatacatttttaaggagccccccactcccaccctggggattccgagtgttcagaacacacttagagaaacactgctcttgatcctggttttctctttcatttgtagtgtttattgattcaaaaactcacgtaacaattaacaaataaaaatagagggagagaaattcatctgcagtattagcactgtagcacattcaacttttgtaaatgttggttctcagtctttgtctggataatcctaaggccaagaggcatatagcatgtatttattccattactttttggatcagggaagagaatatgttgaatttatgactgttaagtgttaaattgcaaccttggatagcccatagttataaatttattaaagattttgtaagtcttccatacttgagggtatgaaacagactttgcatttgctaacaatgtattttctcaaactagatgctgatggaaagttaagcgtgaaatttggggtcctcttccgtgatgataaatgtgccaacctctttgaagcattggtaggaactcttaaagctgcaaaacgaaggaagattgtaacatatccaggagagctgcttctgcaaggtgttcatgatgatgttgacattatattactgcaagattaatgtggtttacatatctttatgtactgccattttttgtttctggtaaactggaatataaagtgaaagaacaaacatttgaacatacttaatgtatttttatagaactttgtaaacgaaaggagattcatgttttagaagtctgtcctttttatatcttgaaagaaaatctatgtatgatgctataaaataaatcctattatttttctcagaatctggttaggaattgcaggcatgagattttttgccggggcaggatgggaa

SEQ ID NO: 181078 - DNA, 873 bp, Homo Sapiens
ttggacctgcagtattagagaaagaacccacagatcagtttttctattaaaatgttaaaataacaacctcaggcattgattatcatatttagttaggattaacttcatggcatttgataattgtgtgtgcataagtgtgctttttaactgatgtctaactttgtgattactagtgggggaaaccttgttatcaagttgttagactgggttttcatcaaggaagttggatgttatactcgaattgttagtcctctacgagaaaacagaatggttctcttgagtgaataagccaggataatgaggcgaggggttttatttcaaagtttgttttggtgatggcataaatacataacaggttctgaaatccaattactatattaaatttcatcacttgttttttaggtattccaataactgtaccacctccaggtaaaacttttttcatgttttctccatcattgttaataaacatgaaatttcaagcttatagttacaggagagacggtgttgatgcggttagaatatggaataggctatggggatttcaaggtcctattttcagctctgcctttgcttcattccagttttgattaagatatttagttttcttatacctgtcttacccgtttctgtagaaatagagattctgagaaaattcttacctattcaatttgtgaagaaaacagtataggatataaaataaaagttttcttaaaaatgtctttacagaccaatgaattttttatgtaatatagtgactataagagaagagaaagataatttattttgactttatcattatttccgattttttaattttagtcctgctggcttagtatcgtgagaaaatgtgttctaaaccccacatagcaa

SEQ ID NO: 181079 - DNA, 1478 bp, Homo Sapiens
  misc_feature (1218)..(1271): n is a, c, g, or t
ttggcacagatcttgcatcggtacctggcacatagttaacactcaactattagctgctgttgtttgccaatgataatggtttcctcttcagctgtcattaaactgtttattgttaaactgttaatttattcttaagaacctttgacattcctgactcttatttcttcctatgttaattgactcagtgctgccatagcactttgattctgcatcttttcagagtttttattcctgccttccatctagggctttctgtttagtggtatatcctctcattctaatatcctataattcctgaccacatgcccattcttagcagcacacatgtgcttgagctcacacacttccatctgtcctttttaatttgcaacagtctgccaggatttagaaaacttgattgcaaacctcattcagactcagaatgaggacctaaagttctaggcatttgtgaaaattatttcaacagccacatatgtattaacaactcttctggagcttgtaacaagtctgatcaccagaaaaatataatagggaacatttttttagccgaggcatgtatgcagaaaactattcaaagtacatatttaacaattctaagtttactttttaaaatctttaattacatgtgattttagtgtaataccacctttttctgacatcagtcttaatagaatgtttaaatatggaattagaaattatataacgtgattgtaaatctgtaaaacaccatcatgaaataaattctatttgtctgctctgaacgagctttttagccactttcattgaaagagtgaggaagaacttgattatctgatactagaaaccttggttagatgtgcattctatacttatgatctaattctaggagtacattacgattgtgtaaacacaggatcacccagtttgttaatattgctatctgacttttcaatcctaattctaataaggttgacttgactaacaattttaatgtgatttttttcctttttaatccttggaaggtaatgcacaaaaatttgcacaaaggtactttccctttctgttcctaagattttcatttaactgactttcaagagggcagcagaatagacttcatctttttggaatgaaaaggtctgccgtgaattgtggtatgttgccactaatgtaatgcctagaacaagagcctagattatattcatttctaacacttttaagactgttttcttaactgtttgnnnnnnnnnnnnnnnnnnnnnnnnnnnnnnnnnnnnnnnnnnnnnnnnnnnnnngacaggtctgagaactgttgcccaattcaacagtgccagcattccaactttgttaaacctaccaacatcttaaatggactttcctgtggtggtaccctttaagaggcggatgaagctactatatcagtttgcacattctaatcactttccagtatcacaagagagatttttactaatataatagtcctagagtttgcagctggtaaa

SEQ ID NO: 181080 - DNA, 1374 bp, Homo Sapiens
  misc_feature (250)..(292): n is a, c, g, or t
  misc_feature (653)..(697): n is a, c, g, or t
  misc_feature (706)..(826): n is a, c, g, or t
acaaaaaagttggctattccaccccccctctcccattttgtttatcagttcatctctgggtggatatttgtgttgtttccacttcttggctcttgtgaataatgctgctatgaacatgggtgtgcagatgtctcttggagtctgtgctttcaattttttgggatatatattcagaagtaggattgctggatcatatgatagtttaaacagcaatttcctttggttgcagttttgatactgagagtagtannnnnnnnnnnnnnnnnnnnnnnnnnnnnnnnnnnnnnnnnnnacccctgtgcagttgaaaatctggttataacttttgactttgtcaaaactgctaagtatagcctactgttgactggtagccttaacagtaacataaacagttaacatatatttgtatgttatatgtattatatactgtattcttacaataaagtaagctagagaaaagaaaatattactaagaaaatcataagggagaaaaattacattttactgtactgtatggtgtttatcaataacattagtttacgttgtctgtttataagatatgtcatctgttaataaaatatgtcatctgttagaaattgtaggcaaccacagctgcagatttcagtccgtggtacatatcaagcaattcaacnnnnnnnnnnnnnnnnnnnnnnnnnnnnnnnnnnnnnnnnnnnnnaaaattaannnnnnnnnnnnnnnnnnnnnnnnnnnnnnnnnnnnnnnnnnnnnnnnnnnnnnnnnnnnnnnnnnnnnnnnnnnnnnnnnnnnnnnnnnnnnnnnnnnnnnnnnnnnnnnnnnnnnnnnnttcttgtgatgtcatgccttctctctgcttcttgggagcactttcagcatcactaggggcactttgtataggactcatggtgttatttaaagtttatggtattgcagtaatcatgatgaaaaataatgtgaaaaccgtgagagatcactttttactgcaatacgcaatttgttggagacatgaactgctcagcagagatgattagcatcacatggtgttttacacaaggtgttttaagcagatacttgtaacatttgagtacactgagataacaggaagtggctatgaagttaacactagtacactactgtagttaattttatgcagttatgaattaatactccatctttgtttacatttctctctaacttcatataatagatttgtatgttttatgatagtaagtgataaaataacctcatatctaggtatgttttatgcattcatgacatacctaactttttcttaatgttttcgttatttctaggctatgcagttgttctgtgagttttttcaaattgtcaagtctgcaaaatttttccagtata

SEQ ID NO: 181081 - DNA, 1257 bp, Homo Sapiens
  misc_feature (1044)..(1063): n is a, c, g, or t
tgggccatatccatccttacaaaaaagcctggtccttgattctctggccgctccctgaccttcctccttccactgccttgactttcttcctttttattcctggtgccatctgtccaggcagctagacaagaacttgttcaccagcagccggattcaggccttcccaggggcataataagtgacgagcccctcctctccggacatcagatccaacacataaggaccctggcctaccctccagcccaacagccagttctgggtcagctgccaacttaggggtggtttgattatcccattgaaattcaccagtgcctttgccaaagaccctctcatttggacatacccagattcattccctggctccaactgaaaagactcagtttcaatcgttaaaagttcctttagggccagaagaataaatgaattataatcccattttgaagaaccgatttataaccaatgaaaaggttataatgtaatttatattcttggaggaacaagattttcatttgggattatttccttcaaccattcaacaaacatttgttgtatgccactaagcgccaggcacggcgttgggctctgcaaacacagtggttagtagcagtctggacctggtccctactggcatggaacccatcactccccaacatgcaaagcccacatttaaaggccagcctctgccccttcagtgatgcgctctttagaaatgccagtccactatattcagaaatccgcagggcacaaaacttccagcaagtcactgttgtggtgaaatgggcagtgggggtggggggtcttctttaaacaggcccccttcccatctacctagccagtacccatccaatgagtccccagagcctccagaagctgctgtctcctctctggggacagcagctcctgcctttggaggccaaagccccagatctctccagccccagagctgaaaacaccaagtgcctatttgagggtgtctgtctggagacttagagtttgtcatgtgtgtgtgtgtttggttaatgtgggtttatgggttttctttcnnnnnnnnnnnnnnnnnnnnagtctacattagggggaagtgagcgcctcccaagtgcagacagtgtgtctttatagatttttctaaggcttaccccaatgatgtcggaaatttctgatgtatctgaagttcccagagactcacacacccgttcccatctcacttgcccaaccaatgtgacaacgctcgatgtgggatatacccccgtggactca

SEQ ID NO: 181082 - DNA, 789 bp, Homo Sapiens
tgtacaaacaacctttccccttgcagtgtttattgaaaacagttaaaggcagttgttgaacaacttgagtgctcaccatcttgagtgacagtgaatagttagatcgaataataggctaaccaagaagcttaaaaggaaaagctgggaaatgagatgttcataaggaaatttaagaagctctggtatatttctgggaatctagaaggctatgtgcatgtgtagggttgtgtgctgcatgcttaggaaagaactaagaaggtcctaagctgtcagttctgattaatctctagactttgtgcaagcaagaagtaaaggctaaggaagggttgtaaactgcttggctgaatgtgaaaggtatgccctaacacatgtagttaggctgtcaatacacactgagtcttatactggttttaagcatttaaggaagtctctgcccagtcattagctgatcacaaatgaacagcagagactttagtgaccacatatgatagaaaattaatattttagataattagttcaggaaagtcactaaaagaaacaacaataaacagtaacaacagtaaacagtaataacaacaaatacctggtaggggaagaatctgatttttcgagttgtcacattaccttatttaaaatgtttagttttcaagagactgttattacaaagcatgcaaaaaccacttaagtatggtccacacataagagagaaagcagtaaattaaaaatgttccctgaggaagcccaaatgttagacttttagtataggcaaagactttaaatcagccattt

SEQ ID NO: 181083 - DNA, 1046 bp, Homo Sapiens
ctttgtacaaaaaagttggatgattaaaaccctaaactgtcagtattggatcttagaagtaaatgattattaggactgtaatagtaattattaggactgtaaaagtaaaggattattatctgcattagatatcattatatctaatgatatagagactgcagacataactacagggctctttttcttaaatcagaaaatccagattcaatagaaatagggtaaagtgataggaggacaaatagccttccatccagtggttatcaactgacgactacaagtcggcctcacttgctttaattattctattctatcctttgatgctgcttgaagaactgtgttttacctcttgactagtttgtttattcagtatttttccttgtacaggtcctcattttatctaaaagcacacaaagctcttgatttctaaactttttgcaattttccttctagttatgagccagagttatttcctggtttaatctacagaatgatcaaacccagaattgttctccttatttttgtttctggaaaagttgtattaacaggtaagttgtaacaggaagtagtatctgaaagtttgtaagtgttttgagtatggcattttctcagtgctgaaaagaaatttcagtgttcggacagtgggctagcttcttgtacaaaggcctcccacccaaagtctgatgagaaacgtgcccactaaaggcacagtgagagcagggaagtctgaccacagctctgcaagcagacttccatttacagtgaggaggtgagcattgcattgaacaaaagatggcgttttcacttggaattagttatctgaagctttaggattcctcagcaatatgattatgagacaagaaaggaagattcagaaatgagtctagttgaaggcagcaattcagagaagaagattcagttgttatcattgccgtcctgcttggtttatggcctgtttcagaccaaggagagaagtgtgaatacatgcctcttgagctatagaatgagacgctggagtcactaagatgattttttaaaagtattgtttt

SEQ ID NO: 181084 - DNA, 1098 bp, Homo Sapiens
aattgatgagcaatgcttttcataaataggcacactttgtacaaaaaagttgggtgaatgataacctttttttcctaaccagtagtgagtaaagttcttgaacaaaatttagtagccaaattgttttttaatgacatgtctctttagtacaatagttttgtgtatcttttagatacattaataggcactagatggaaaattaaagagttaaacatatttaaatgagagaatctaatgtttcagaaatttgtaagaaatgtatcacagcaaagggttgttataagtccttagtttttgactctaatagttaatacaattatagttaatcttaagccataatgtttctaatcatgtcacacagctgtcctagaacttatctatttaaaatagtttcctgagttaattttggccagcagggcaactgccctaattcagatagatttacagtaacctacgtacagtagatgcacatacacacagacacccctttgctggagaaacttaggaccctgtcagccttttaaaggaaacagcaggagtggtgtcctaaatgatgttcatgcagctgctttaccatgttcacagtcaagcccatgcatgccaggttaaaactgtggaaatcaaaagtaaattcactcatattttaatcattttaactgagatttaaaattagaagtttaaaccactatatataaagaactaatcttttcttaataccagttctttccatagcatatgctttgcaaaggcagcatgcataaaatatttaaaatgagaggacagaatgttttcacatttgattccattttaatataattcctaattgtggtaacacagttgagatatgtattatgagttatgggaactaattgagaaaaggaagttactctaatccccgtatgttaagagaatattgagttttcttagttgtaaagttggggagatggcaccttctcaaaggattgtgaaaatatgaggaagaaacaaaacagtgcatgtagagcacagggccacacaaaggcattctattgttatgctcattctgcttctgtaatgacttttcatagtcattcttgtgaaccattttgttttgcaagc

SEQ ID NO: 181085 - DNA, 1217 bp, Homo Sapiens
ttggattcatttataaaatgaatgtgaaatgcctggaggcctaccaagaatacccggccatgcatttcacattcatttataaaatgccttttttctacttcaaattaatcttatgttctttccaatcaccattgtaatactcttttgactttatattctgacaagcttgaaatagcctgataggattgaactaaagtataaaaaaccagagttacaacagtcagaaacaaatgaaaaactgaaaccgagtctgcagcgttaccttcacagctgtgttagtacacaattcgggccttttctagctttatgattctaaaatatgtctttgttttgaattaagttgctggcattatgtttgcagagcagttaatccatctccaaaatttgtaatagtcatggttattctgtgactttcattgcaaatggaacttcagtgtcaggtttatgggacagctattaaaaaagcagaaggagagttatcacaagtctcttatggaactcgttaacttatggtaattaatctaaataggacatttatttgaattctatctcaggaaaccaaatgaactttctcttcttgaatgtgcagtttaatgctcatttatgttaatattatatttctttaagttgttagtcacaatttgtgttgctgtctcatctattcatctaacaagcatgtatttggcacctcctgtatgtctgacttgtaattgagtgatgaataggactagttcctgtcctcagagagttcctagtctggtggaggggaagctttgcaggcaaagaatgagtaaggtgcatcaagcccagtggtgagtaacatacaccaggcagagggataacagaagagaatggcattaactcattctgggagttgaaggaacactttctgaagaaagtgatgtctcagctggatgaaaaggagtaaaatagtgacaatccatgatagaagctcaggtatagtaatttgttaaccaaaatattccaagtgaaagtaattgaaatagggcatctgaacaatttgcatggggctttatatttaacactttcctgctttcaactgttcattttttcctccctcttacagaaaactccctgagatacacaaactgatattcctctgagttttcaagttggagaactggcccctaagggtacactcagtggctatagttgaatgggataacacaaccaatatttattgagtgcctactgcc

SEQ ID NO: 181086 - DNA, 1286 bp, Homo Sapiens
  misc_feature (224)..(245): n is a, c, g, or t
  misc_feature (262)..(497): n is a, c, g, or t
  misc_feature (581)..(617): n is a, c, g, or t
  misc_feature (779)..(793): n is a, c, g, or t
ttggcttctacctcctggcttcccgggtagctgggattacgggcacccaccaccacgctaggctaattttttatatttttagtagagacaggatttcaccatgttggtcagactggtcttaaactcctgacctcaagtgacccgcaccagtgtctcccaaagtgctgggattacgggtgtgagccactgcacccggccttctaatctttttccagccttcaaannnnnnnnnnnnnnnnnnnnnngatacggagtcttgctnnnnnnnnnnnnnnnnnnnnnnnnnnnnnnnnnnnnnnnnnnnnnnnnnnnnnnnnnnnnnnnnnnnnnnnnnnnnnnnnnnnnnnnnnnnnnnnnnnnnnnnnnnnnnnnnnnnnnnnnnnnnnnnnnnnnnnnnnnnnnnnnnnnnnnnnnnnnnnnnnnnnnnnnnnnnnnnnnnnnnnnnnnnnnnnnnnnnnnnnnnnnnnnnnnnnnnnnnnnnnnnnnnnnnnnnnnnnaccacgcctggccctaatctcttctcaaagtacttttttctttaatgaatgtcttaaataaaaacttttttctaaccacaaacnnnnnnnnnnnnnnnnnnnnnnnnnnnnnnnnnnnnngagagttggtcttgctgtttggacccggctggagtgcagtgatattcacaagtgtgatcttagtgcatgagagcttcatattcctgggctcacaatccttctacctcagcctgccaagtagctgtcactacaggtaccagctgctgtgcctggcttccaccnnnnnnnnnnnnnnnctttaatcagttccttttaaagaccaaagaaaacctgtcctcttgtgtggcctgagttgatctatgaacattattcactatgacccaaaaaatcccacgaagtcgtgcatgttaaaaggatgaaaccctcatgttcactgtaaactgtgaaggtgctcaggccatcacaggtatgcctatatgaaaagccaccaagtatctgaaatattttcttttacagaaattatgtgtaccatttcagtcttagaaagtggagttggtcgctgtacgcaagacagacattggggctggactcaccatcagtggccccgaaaaggtactgaaatttgcttacaagtgcagagttatgctgaacttaagggtatagatgtagattccctggttattgagcacatccagggaaaaggcacccataatgtaccacctgacttacagaactcatgggcagatgagcccatccacaaactcccctgccacatccagatgatgctta

SEQ ID NO: 181087 - DNA, 1585 bp, Homo Sapiens
  misc_feature (1083)..(1098): n is a, c, g, or t
ttgggtttctgacactgtataatatgcttttgggtgatttggggggcaaccacaagttttgcgttttgactacttaaatcatcatggctataaataccaaaacgatttggatccatttatgtttgtaggataatatactactgactgacttgactgtcaggttcacaacagctagatgatatatttatgactatgtctaatagttgaaataaaatctgaatattgatttactatacccaagaggggagaaaaattaaccattgtaaatttttaaaaattttttcaaaaatgttaaaatgaggcaaatttaagtttacaaattttgaaattttcttttgaatatttatgaaattgtcagtaaacttacctaagatcctgtgaccttttgatattttttattttaattgtagtgccatggaccatttgtaaacaaattgatttacttttgttggttgtaagttgaagatttagcattatgactttgaggtctgtggttttatttgtaaacttgcaattgctatatttgcaagggcaaatgtatttctttattaaataaagtacaataatggtgaatgtaccaaaatgacatcacttaactctatgagagatctgcattttaatctatagtttaatagttttaatatttattagatattcatatgttgatcatagatcaaacttgttgctgtttatacagataattgtagaatgctcatggaatatctttagggtaggtggaatacttctgtagttaaattgggaaaccttgttcagctggttttagatattgatggccatttggaagtaaatttccgcaggtattcataggtgcacttaacacagactttgcttaatgaaaatgtcagttctaatagtaactgattcacttctgaacagaagtgattttaggcatatttcttaacatatatcaagcaaagtcctgttaaaagatctaaatgaagaatggagacctcagtgattaaagatattttgtttctgaccttgagcagattgcttacctgttctctagactataacccaacatgtaaaaaaaatttgaagatggtgatgaggaaagtgagnnnnnnnnnnnnnnnngtattatgtttctagcacttttcccttttaaaaagtgaaaatatccttgtacatttttgaaaaatatattttcagttctgaaaaatgtagcagaagtagtgaaaatgtcatattttaaatgttgattattagataaatttaacctgcttagggtttattgtaactacacctttcagacgtgtgttttggagtagtggaattgccagccaggccctgtggcttggaaaggcatcccagaaatcctcggccagaaggtgtggcttgttaaagcattgagattcagagtattttgttttgctggtgtagataggcatgtatttatgcatttttgcatttgtaaaatcaacttttcaaataatgtaaatgtaatatactagtttacttaaaggtacttgggcagaatctaaagctgctacaatgttgattatgaaaaaatgtacatggtaaggatgaaatgcaacttacaaaccaaaggattaaaattttc

SEQ ID NO: 181088 - DNA, 1637 bp, Homo Sapiens
  misc_feature (1021)..(1045): n is a, c, g, or t
  misc_feature (1079)..(1088): n is a, c, g, or t
tttgagaaataaacatccagatgaagatgctgtggaagctgaggggcatgaggtaaaaagactcaggttgacaaaaaaggcgaagtcggagaaatagccagtcaagcgacttgcagcgaaatttcttcagttatggtagaagaaacagaagcatcacttcatctcatgataaagacaaaaaaagccatggtacccggcagcgcgttcagaagaagatgaagatgaagaggaagaagaagggattgagagaccatctgtaaaagggaggagtaaggagatcctcaaattcttgcattcattgtttttgtgaaagaattgtacatcatggaactccttgtaatgtcgacgctgggcttttctcccacctgtatgcagttgctgctgaatttcaggggatgtgatttgaactacagaacatcagaattcacgaaacttaactgtggaggtattttgaatataaaatttaagtacaacaacatttgcttatttttagagtcttttatgacatcaagagaaatggtcccagaaagaaaaaaccaagaaaaagaatctgatgatgcctcaactgtgaatgaagagacttctgaggaaaataatgaaatggaggaatctgatgtgtctcaagctgagaaagatttactacattctgaaggtagtgaaaacgaaggccctgaaagtagtggttcttctgactgccgtgaaacagaagaattagtaggatccaattccagtaaaactggagagattctttcagaatcatccatggataatgatgacgaagccacagaagtcaccgatgaaccactggaacaagactatttagaaacatttacatgcagtattttacacacagttctggttttaacactgtataaaacttttatgtaaaaaagtgcacctttagttttacaagaaaagcaggttgtaaaataaagtactttatggataattcctgaaagagttgtccatgtaagaactgtgaatatcagctcctctgggtcctgcttaccttaccgctgannnnnnnnnnnnnnnnnnnnnnnnnggtctgggcaaatcagtggtttgtatatagaagnnnnnnnnnnaatttaggactgaagtctttaaactggaaagtaattataattttgaacagttttttgagattatcacatttagtttatacatatgcaagaagctttttgtcttgtgtctttctgatagctctagcagttttcatattttggtcatagtttcaacattttaacatgtgaataatagagtttcatgctggtttccagagtgtattgttcggctacatacaatagaaccttaagttttatatatatgtatatattattctaagggggaaaatgttatatttttctgttggtataagagataaatacagtggatactttttctattggtaatgattgaattcacctctttcagaagacattttctttctcttctgagtaactgaaataaaatctggcctttgtgaaaccctggaaataccacaaccctcaactagaaacaccaataccagctcctccgcgagtttccagctccacaacctaagacatcagaggcagcattggttcctcacgtagagtccagctccgggaccctcatatttgaaccgcagccaa

SEQ ID NO: 181089 - DNA, 1292 bp, Homo Sapiens
  misc_feature (144)..(202): n is a, c, g, or t
  misc_feature (326)..(389): n is a, c, g, or t
  misc_feature (393)..(401): n is a, c, g, or t
  misc_feature (598)..(620): n is a, c, g, or t
tttttgaaattgaattgcaatatgtctgctactttggcttgggctggacagtttatctaataagcaaggcagcttcttgtgtgctatggtaataagccttcttaacaggctaagcttccctcataagaactgtggtgtttctcnnnnnnnnnnnnnnnnnnnnnnnnnnnnnnnnnnnnnnnnnnnnnnnnnnnnnnnnnnnaaatcagtatccaatgttttataggggccaaaggttaactttgcactattccctgtcagttaaaggccactgatatttttctaagttagcaaggctcacttgcttgctttcttgcctcccttgnnnnnnnnnnnnnnnnnnnnnnnnnnnnnnnnnnnnnnnnnnnnnnnnnnnnnnnnnnnnnnnnctcnnnnnnnnnccccgcatatgcagctttttgattgtacttgattttatagagactgcacagttccagcaagattgggagtcaggcatggagcaggcatctcaggctaccagaaagaattggtcacctagactttcagtcaggcatcctcgtttgcattgtcctgtaagtcaattagttgataaatagttcccccttcatcccttaannnnnnnnnnnnnnnnnnnnnnnaatataggtaagtgggactctacctaaaattttgcatcatacttatgggtaatatctttttcatatattatttatcaaagtatgaagttgagtattttgcttgtaccatttcaattctgcattatagtagttcattgtataactgaaagaaatgatttcttcataagtgacattaaatatgaacattcatccaattgaatttacaaaatctttccaaaattataagggagaaaaatcgggtttacttcaatctttaaaaatctggcacctcttagtaactttcagtatttctaaattgctctaaaattttataataaatagattagggttttgcaatagtcttaatttttaagccaaaggttttctgagaccttaggttttgtagtctaaccagcttatgtggttatttaaaagaatattctttgtgtttttaaattgctatttttaaaaaagctttttattacccattttataaaatgttatactcatatttgtctgatttttccagtattcctacatgaaattgtatgtattaaaaactcaatattagtggcaaatattaatactattaaaatggattttggtgctatattcttgtagctaaagcctagtagaattctcaagatagtgaaatacacttttcaaagttgcctgtcatttaaagaccaaata

SEQ ID NO: 181090 - DNA, 4702 bp, Homo Sapiens
  misc_feature (156)..(164): n is a, c, g, or t
ttggattaaagaagcggaagcctcgggtaaagaaggaaaacaaagtgcccaggctgaaagaggagcatggaattgagctttcatctcctaggcattcagataatccatcagaagagggagaagtgaaagatgatggcttggaaaaaagtccaatgnnnnnnnnncagaagaagaaagagaacaaggagaacaaggagaaacaaatgagttctaggaaagacaaagaaggggacaaggaaagaaagaagtcaaaagataagaaagagaagcctaaaagtggtgatgccaaatcttcgagtaaatcaaagcgatctcagggtcctgtccatattacagcaggaagtgaacctgtccccattggagaggatgaggatgatgatctggaccaggagacattcagcatatgtaaggagaggatgaggcccgtgaaaaaggcactgaaacagctcgacaaacctgacaaggggctcaacgtgcaagaacagctggaacacacccggaactgcctgctgaaaatcggagaccggatagccgagtgccttaaagcctactcagatcaggagcacatcaaactctggaggaggaacctatggatttttgtttccaagtttacagaatttgatgctcgaaaactgcataagttatacaagatggctcataagaaaaggtctcaagaagaagaggagcaaaagaagaaagacgacgtgactgggggtaagaaaccatttcgtccagaggcctcaggctccagccgggactctctgatatctcagtcccatacctcacacaaccttcaccctcagaagcctcatttgcctgcctcccatggcccacagatgcatggacacccaagagataactacaatcaccccaacaagagacacttcagtaatgcagatcgaggagactggcagagggaaagaaagttcaactatggtggtggcaacaacaatccaccatggggaagcgacaggcaccatcagtatgagcagcactggtacaaggaccaccattatggggaccggcgacatatggatgcccaccgttccggaagctatcgacccaacaacatgtccagaaagaggccttatgaccagtacagcagtgaccgagaccaccggggacacagagattattatgacaggcaccatcatgactccaagcggaggagatccgatgaatttaggcctcaaaattaccaccagcaggatttccgacgaatgtctgatcaccgccccgctatgggctaccatggccagggaccctcagaccattaccgctctttccacacagataaactgggggaatataaacagcctctacccccattgcaccctgcagtctcagatcctcgctcacccccttctcagaaatctcctcacgattccaagtcacccctggatcatcggtctcctttggagagatcactagaacagaaaaacaacccagattataactggaatgttcggaaaacataaaggacagctcgtaaaggagagagtaagagtcaccaaacacgtggatatttttggtctgatcctacagtagccggttatctagaccagtaagtggagttttggacatgctgctgctgtcaactcactggctgaaggagcacttcaaggaatgggaggcctttcactgggtccagctctgattcgggtcaccactcctgcactttggcaccccatcccattccagcctagttctggcctcccactttgacgggcacttggaggaggagctgactgtgtgtgtaccagcttcactgggatgtgtttccccagtcaaggaacaggggatcttcagagtcatgaatgttttcttgccagggtcagtgttcccaggaccttagtgcatggtcggggcaggaactggtgcatggaggctgctgggacctggtgaacagtgtgtgatttggttgatttggttcactctgacatgatggatgctgctgatggggagtggcgagttggggcaagcgggtggggacaagcataggacttgaagggggggagcaggtacacccctcaaatgtgttcttgggagaagtgatacactcggcctcattatgtgaaacctgtgggtggggttggggtggagaagtagagagagggcaacagcttccacaactgcttcatctctgccaacactaatttttcccacactgtctttgtacatttcagagctttggtctcctgagtgggcctccttttcccactgtgccagggaaggtaggtttctctggctgactgagtactgtgagtgaggcaacactgatgccagcatgggtcttacttgactggggagtaggctgagtgaggggtagggtggggtaggtggggagtagtgtggccagggaactggaatccctggtggatttctgattcctgtggtgagaaggaaagctacaggacctggagaaggggatgcagaggcaggcctgctgaccaacttgttgcaatcacaaaggtgggggtcctggtgcaggcagtgaacaggcttctaatgtggggttcagtagtgccagcaagtgggggaaactttcagtattgcgctaggtcaacacttcctgctgcatttccttccctttgcacagcttgaagaaatagagtagacagaatcacacatcatgtggtgggcagatggaaataagtacctgtggtgaacaagtttctactgtagttggagatcattagaattgaattcagtttctcttagaatataatcaggtataaacctaagttaaactttttcccaaacaaggagcatccaaagacacagtgacttgagctatagatagtaaaaatcatacgagagttgaactgagtcaggtttaggaagcaagtttggttgcatcaattaagcaggctcttttccattgactgatgctggggccttcagttttattctcagtatagattgccagtattgttaagagtatccaaaggcctttctagatggagacagaataactgacttgaacatacagtgtgcctgtaagtgtccaggctcagagctggtgaaaacccttctgttgggcgtgtgcagggttaaactcctgaagtaacttgtgaggacttcagtgcttgctggtgtcctgggcagcaccatgaatgcctttaccaagacatgccaagttggatcccccgaatgaagcagatgtggctgtggtgtgacccttgctccctgctacacagagcatcgcagggctggcctgtgtggtttccagatgagggtctgggtcccggaagcttgtgttgagagctcagtggacccaccccgcttgctgaaccctcacagttcttggggttgtccagcctggacttgtagcacacatgtcctgaagcaaagctccggtgactgcatgagccacctggccacagtcgtcccatggagggcctgccgtgacgctcagtggagagggcagggcctgtgtctccacttaggccacacagtgatgaggaaaccacagatggagcttcttgccgataatactgactctagcccatgattgccttgcccaagccaaagaggaaggttaggttggcttgtcgagcccttgagcgttgggagatggggtgggaaggaggtgagcccctgcagagagttgggtagtgtccttcaggaatgaaaggaggggcaaaggagtcaccagaggtcctgcatttccatcacggtttccacagtcatcagggcttctctcttgagttgctgataggagatgtgagttatgcccagagatgtcttatcgtgaggaaaaagaaacttccttttgttcacattcaggactctcagtgccatatgaagtagcaaaaggcagtatcggccagatcagtgttacattgattctaaaattacagtgtccccattagacaactattttaggtgctggagtatgtttgaagagtgtgctgggaaaaaggaagcatttcttcattgatttaaatcagtatgaatattatatgcctaaataaaaaatttgcacaggtaaattctctcacttgtgaatgggagaagctgccccaggaatctgtgaggatggtattccctggagtctggctttgaaagatttcattgttggtagaaataacaggttgagaaagagggagttagcatcacctaaaacctgcacgtgaacaagggttgacatgatacactatggccttagaaaagggccaggtgaaaccccaagctaatcactgcggtctttcagagccggacagacaggtgccagcagagcccggggctcactctcctttcagtcattcctcagcccttcgaagggaagcccaaacactttgcacgctgtgctgcagacattctggcctggtgtgtctgaaagttgcatcagtcctcacggtgcaaacacagttgatttaggaagtcacacaatgacactgaaatcctacagaccaaaatccacttgtcagcaagagcagcagcccaggcccagcaccagcggtcttccggctcctctgagggctgccacgttgggcgaggggagccatgccaaagggtccaggctgctttaaccatctgtgccccactcatctggggacagatggttttctttattgtaaattgtggacttttaaacctgttgactaaacagtaattaaatttatatttgtgaaaatgccactgtcctagtgatttctgaagtaaataatgttgtttcagatagaatgtattaaatttt

SEQ ID NO: 181091 - DNA, 769 bp, Homo Sapiens
aactttgtacaaaaaagttgggtatgtttgaacgagtgtgctgggaaaaaggaagcatttcttcattgatttaaatcagtatgaatattatatgcctaaataaaaaatttgcacaggtaaattctctcacttgtgaatgggagaagctgccccaggaatctgtgaggatggtattccctggagtctggctttgaaagatttcattgttggtagaaataacaggttgagaaagagggagttagcatcacctaaaacctgcacgtgaacaagggttgacatgatacactatggccttagaaaagggccaggtgaaaccccaagctaatcactgcggtctttcagagccggacagacaggtgccagcagagcccggggctcactctcctttcagtcactcctcagcccttcgaagggaagcccaaacactttgcacgctgtgctgcagacattctggcctggtgtgtctgaaagttgcatcagtcctcacggtgcaaacacagttgatttaggaagtcacacaatgacactgaaatcctacagaccaaaatccacttgtcagcaggagcagcagcccaggcccagcaccagcggtcttccggctcctctgagggctgccacgttgggcgaggggagccatgccaagggtccaggctgctttaggccatctgtgccccactcatctggggacagatggtttttctttattgtaaaattgtggacttttaaaacctgttgactaaacagtattaatttatatttgtgaaaatgc

SEQ ID NO: 181092 - DNA, 1509 bp, Homo Sapiens
  misc_feature (586)..(720): n is a, c, g, or t
ttggatttaaagacagtttgctaaaaagactgaagctctttataggaggctttagacaggaaggtaaatggctcttcacctgatgcagcaggcttactagttagggagcctgtacaggtggtcctgtcagcagcaagccatggtgaaactacctgttaggaagtttgagaagatatgagactcctttatctggctcactctgactacctgtgcttactctttctaaacacctgtctcatcatatcattcccctgttgcgcagtaacaccatgctagggtgaacataatggaattggagggaaaaagccactgagagttttaaggaagaaatgaaaggttgtggtggcgacaactgggaggaaggaggggcagcaacacagagatgaccaactgaatggaggccacaacctgggagatggtggtgctgatggatttgtggtagagtccagaaagtgaaggaaaacttaaaaggactggagtctggggtgtcattgatagaaatttagaggagttctaggtattgatagagccttagtctctaaatccctctgtcagactcttttggcagaaccatgtaaaggtgtannnnnnnnnnnnnnnnnnnnnnnnnnnnnnnnnnnnnnnnnnnnnnnnnnnnnnnnnnnnnnnnnnnnnnnnnnnnnnnnnnnnnnnnnnnnnnnnnnnnnnnnnnnnnnnnnnnnnnnnnnnnnnnnnnnnnnntattattaatgcaaatacctgaaataatatttctgtagcttaatttctatgcttagggagtataccacagcaaaatttaatagcttgccatccatgaagatcataaaaaattgcttttctaattctataattcaccagaactgttcatttttctttttaggaacctatggatttttgtttccaagtttacagaatttgatgctcgaaaactgcataagttatacaagatggctcataagaaaaggtctcaagaagaagaggtaaagtacaaattcagtcctaattcatacaaacaaataccagttccacagaaaaatctcttaatttttgtttttccatggggagatgatcacagaatcatgggttattgctggtgctaatagtcaaacaataagaccagatgggtgaaatagccaatgtattggagcctaacatggttgaaattctgacaaagagtgtttaccctgtgtttttaggtcctaaaatcatttgttcaccaggttttttcttccatttgcatttttcttctgtacatgtcagtagcttataaatgtggctcctaggaagtaatagggtggtgggcagaaaatactttttctcttcttttctggaccatctatttggtgtccttccagcttttgtatggaaggggtcctgctactcacttgtgagaggtgctcagaagttgcctctcctttggaatagggggatgggtgcagaagtgacatggaggaggctgcagaggcagtgctccttgtgtgggtgtgcccatttgcagatctgctgact

SEQ ID NO: 181093 - DNA, 455 bp, Homo Sapiens
gtgtgagccacagcatctggcccagagtgaggagaattaatgagattttttgtgtgtgttagataatattgatttaagcctttttttaaaaagtactctcaaccaaatacaaaattgaaaatgtgaggtttaatagaaatgtgttggctatttgcaatggattttcttcttgcccaagtgtttggagttctactttatgctctgtatttaaaaattagtgacctcaaggcagagttgatgacacaggctttggggccctcatgttcttgtctttagaacatatcactactaagtatcagcttatcttcagaacattacaacattcaccgtgttcatatgctttctgagaagtcaccacttgtaatttcagatcacatacacctgaaggcattttatagttcctaaagttaacatgttagatcttttttttccaccccatgagggtctcactctca

SEQ ID NO: 181094 - DNA, 2147 bp, Homo Sapiens
  misc_feature (1730)..(1738): n is a, c, g, or t
ctgtaatttcagacccggatgcagagtctacagcctgacccagctgcccgctatcgcaccgtgttggaggccctctggaggattataagaacggaggggctatggaggcccatgagggggctgaacgtcacagcaacaggcgcagggcctgcccacgccctttattttgcctgctacgaaaagttaaaaaagacattgagtgatgtaatccaccctgggggcaatagccatattgccaatggtattgagccttcctgtgctggttcccccactttcccaactctttgggctttgctgctgtcagtgctttccagtctcagcatggtttggagctgaagctttgggctgggataggccagattataagggagggacttccaaacctgatgttctcagacaacgggccgcttcaaccctgccttttcctttggggcacctcaacaaagggttacagtatcctcccttacctaccagcttgacttgttcctctcatctccctggcatcaacttctaatgccctggtaatgtggagacacactgaactacccccagtctatgtttgacagttgggtggtgtcctgctccttagggcaggattggaggcgacccagccagccacccaaggaagatactaatgaagcccctgctttttgcctcaccttttcaggatcccaactcaccagaggcagtttgtgttgagaacatgacaaagcctcatgacaaaatgaatgggggtggggccaaggaactgcatgaagaaaccagaaggttgtgtggaagtaagagaaaggatagcagcctagggctttaggaccggctggaaaccaagttgagtgtggagaggatgaggggtagagtagttcaggacctgaacgaaagatctttgtagacaaatgttaggctctgcaaatgggttctgcggcaggactgaggtgggattctgtggtgaggttctgtgagatctgaccacctggcccccgtatctccctccactggtggcaggtgatgtgctggcatccctaggcagcagtgtatctgcttcctgtctggggtgtgagctgcatttattctcagaatgatctttattgataagacttgagctggccttcctatcatggatgtggaatacattagtgaccttacaaagttggtgggaacagatactttaccttcttaaacaggagtttaggagcagtgggtccccatcttttggctagctcttaacgttacttttccccgctgtagtgtagcacagccactccccttcactgggggacctcagtgagttggtcagctctcttggccttacatgtggcagttgttttcttgtttgcaggtgcggccgggtgtgtggcaacattacttcatgatgcagccatgaaccctgcggaaggtaatgattcctcaacctatcactctgtgggcagctgcacctgtatttctttacagtttgcagaagaaagcacatcagttttggtgggaaattctgttaccttgttttaccactagagggtgctccctccatgtttttggtacctaacgaggcaccctcttggacaggaagcagattcactgggattttactaatccctggggcttccctagaaaaagatgtctccatgtggcctgtttttgggctttcctgggagtctcctttgtcgtagatttgatctgtcctgaaagtttagcagattcatttttcttcaaagaggtgaagatggattctgacnnnnnnnnncccccttatgatttgcaggaattgacacttaaatatattgcctttcttattggaatgaagctagttgggataggaatgaaaggttaaatcatagaactcagtccctgcatttctgctgggatcttggcttttcagtcggaggaaaattctccaaaaacattctccatgtgaggatgagcaaatatgaagggatagcattgttgccacgttcattttctgtctgggcaaggccatggggtggaaagagccaaagctaagctgaagctccacagagctcacaccatgttatctacttgagggagtgggaggtgtttgaagactaaagccaactctttttggctaagatcttttctttggtagaacttctgtctcctcccctctaggaggatcaccatctcacattttaaaa

SEQ ID NO: 181095 - DNA, 1466 bp, Homo Sapiens
  misc_feature (532)..(542): n is a, c, g, or t
  misc_feature (567)..(575): n is a, c, g, or t
  misc_feature (989)..(997): n is a, c, g, or t
ttggaatttgatcacggctaccttgtgagctgccctccaatctttatttttagccttctcaaggattaggattgatgttagctgtggggcacttaaagtgattgtattgtaaatcttagtttattctagcagtggcatcttgcagaatgtgtctggggttaggataaagttttagtctgtcttgggcaaagtgtagaagaacaagaagaaaggaagtaatttctgaatattaaattaagtgtatctattcccaaaatgcacttgctgagatgggtggtgtggaggcttgcttctggtcacaggaaaggggaagtcgggtcttctttatttttcaggagtttacccactgcagttgaattctgaccctttgtacatctttgcctttctcctccctccatttcactttccctcatcacaaaacaagggcaatgatgaatatttgcaagaatagaagctagtgggaaaacagaaatatatcaaattatattgaaacaaagtattttctgttggctgaggtaaggcagaaccaggnnnnnnnnnnnggttctctttttctaaaaaggcttnnnnnnnnncgttgaacctgtaaagcttttgagttttatttaagcgctgtatgcctttatttttaaaagtttgaattaatttcaatatgaaactcattttgccttgcaacggatcaaagtttagatgagaattttcggagttcagtaaagcccctctggttcctaatattctgaaagtacagtttctacaaagaaatgtaactacttttttctcagttcgttttgaaaaatctttggatttgttcatagtaaagatgatcttttccatctgttggtgcagctccttctgatctcgtacatgtgtgctatacctgcaaatctgaaggcattaacatctgtttttatacacagggcttttgttgtaacaccctgactttaaaagtaagttgtttgctaatttctggactaattatgcaatttcannnnnnnnncttgattcagccaaatgtgtgtgtgtgtgtttaaactgtgctttctaagcacagtcaggtagcaaaagtaataaaaaggatggttgaacaagttttcttgtatgttccaggatatgtttgggacttttctttgtttattatatgagttgttccctttgaaattaaagctattttgtaggttttgtgggacataatttgataagtagagttaattaaatttcttctggaagagatctaaattcttattcttagtgagagactgtagttaaaggaaggcttttagaacttgggttcaaggaagatggagatgcgtcggaagctctttggcgggggtgaggaagttcagaagtgtgcattttctttctggcatttagtcttgtccgtgtgatttggtggtgcttgggtcataagcctgattaaaattcaggacatgtaccacggcggccaaagcggaattaatttttttata

SEQ ID NO: 181096 - DNA, 963 bp, Homo Sapiens
  misc_feature (661)..(704): n is a, c, g, or t
actttgtacaaaaagttgggtacttctgtcggacacagagagtgaatatacttctgtggaccgggtgaatatacttctgtggaccgggtgaatatacttctgtggactgggtgactagggaggagccggcgtgttagcgccagcatatgcagtccctcaggacagccagcctgccgtgatcctgtctgtgtggtcgtggcagtggcctgcagcaagccatcgtggttggctggaactagacgtgtgatttgaatgcaggagttcagtcagcccctcagtggcctaaaaggaagaaggtgtcagtcacagggctggttctgggccctgccttggggggaccccagttccagggttctgggccctgccttcaggggacccgagttccagggtcctgggccctgcctttgggggacccgagttccaggtcccggcctcagcgttgcagtggccagggtcagtggctctttggccctctaggagtgagcagaccttagtgaaatagatccacagggtcctgactttgtacctggtccaagctgttggggaattgctgctgttgacccaggcaggagtctgactagagaacaaactaaggttgctgcaacaaacaaggacctcttccaagaagggctcccaggcctggcgcagtgactcatgcctnnnnnnnnnnnnnnnnnnnnnnnnnnnnnnnnnnnnnnnnnnnnttgagccactgtgcccggcccccgtgttgactttttaatatccacaacgatgaaaatcaggacatttaacattggtgcaagactgttattcacattttgcctgctgtctcaatagtgcccactacaactttttccccagtcgggatggcgtctggggcgctggttgtgtttagttgtgagatgcccctgcacgctgggggccctgaaagtgccagccactcctggggcctcccttgtggtgtctgtccctcccttcttc

SEQ ID NO: 181097 - DNA, 1016 bp, Homo Sapiens
  misc_feature (84)..(94): n is a, c, g, or t
  misc_feature (154)..(245): n is a, c, g, or t
ttggctttctccaaaaggataagaagctgcttgatgcagctgtcaccagaacttctcttagtaagggaaatatccttaatgtcnnnnnnnnnnnggtggtggtggggaatatcttgataagtcatttaggtatgaacggtgaattcttatacannnnnnnnnnnnnnnnnnnnnnnnnnnnnnnnnnnnnnnnnnnnnnnnnnnnnnnnnnnnnnnnnnnnnnnnnnnnnnnnnnnnnnnnnnnnaaaatgtgaccctatgaaaatggttggcaagaggagaggaagtgagagagatagctaaaccactctgcataaaagagaaaatgtgaatttgggaactggagaaaagcaaagggaaagaggcagagagtgctaacccagtggtgggagtctagaggaaaagtggctgacgggcattttaagaacagaagcgtttaatattcagttttaatttgcctgtctctgtctcctgaaactaataaagtcagtagacacaaaaataccttgtgtgaacagaattgtgcatgtaaacccttctttagactcacatgggacagaacacatacagccttatgctatccaggtgatccagaaacctcaaaaagtgaaattcaaaggcagagatggccaagaaaaaatgtaagccacttgcttcctcccagagtccgtgggcacatcaggagggttgtgggacgatcctcatatgagggatgtgattgaaccaacttttcctaattctcaaagtgtattgaactttccttgacatctcattggcaatatattgtcatttcattgctttaagggctcattatttactagtcatcaattgtacctgtaggggaatgcctctttttagagacaagagaccagacctccacagaggtagatcttggagattggagcagttctagaatttctaacatttccccttacggtcatcttgctaagttctctgtaacaaagcctggtagttcagaaatcaagctccaagaacgtgccatagatcaacctgtt

SEQ ID NO: 181098 - DNA, 944 bp, Homo Sapiens
ttggcggacctaggtcgcggcgacatggccaaacgtaccaagaaagtcgggatcgtcggtaaatacgggacccgctatggggcctccctccggaaaatggtgaagaaaattgaaatcagccagcacgccaagtacacttgctctttctgtggcaaaaccaagatgaagagacgagctgtggggatctggcactgtggttcctgcatgaagacagtggctggcggtgcctggacgtacaagtgagtctagttccttgtggtatttggaagtgtgtggaccacataggcccaaattccaggttgctgctggatgggctagttttaacactttctcaggactgagagaataaggatgcctttgtattttcaggattcttccgtggtggtttattttcagttattgaaagagtaaacacaaaactaccaaaatagaagtcggaaatctaattcacagactactttagaatttgatggtcactgggcacattgttgtgaacattgtcatgatactgtgcaggtccattagtggggctgaatctactgaacgttgatttgcactgcaagttttgataaaaataggtgaaggggtcagttagttcaaaactgtatttggaacttgaggccatcaggaccaccacagtttcgtctttctgaacagtattagactgctgcaggtttgtgaatctgcaactcagtatcacctgacagggcgatactacaaacactatactacaaactagcatctagacctgtgttgtccaatacactaagcacatatatggctagtgtaattaaagaattggattttaaagtttcagtcaatttaaacttaaaccgaagcagtggaaaatgttgaaatatatatatattccttgtgggggtttttattagggcagaatggaaaatgggaactagagtgctttcttggttctgataggaaagtga

SEQ ID NO: 181099 - DNA, 2024 bp, Homo Sapiens
  misc_feature (62)..(74): n is a, c, g, or t
  misc_feature (135)..(153): n is a, c, g, or t
  misc_feature (1026)..(1086): n is a, c, g, or t
  misc_feature (1421)..(1435): n is a, c, g, or t
  misc_feature (1658)..(1684): n is a, c, g, or t
  misc_feature (1689)..(1733): n is a, c, g, or t
ttggctaacccaaggtctcaccatgttaaaatgccggcggactctacggcgttttgtagatnnnnnnnnnnnnnacccactgtgaaggggtgccatactaccttaaatgctaatgctagatatgcaaaactggannnnnnnnnnnnnnnnnnnaaaagagggaggcatggtatattaaaatgattttactaagagaaaaaatatttttttaagaatgctcagaagaaattgataatctgtgtgaatatgttttagatgtttatataccttttgaagagacccagtagcccatagcacaaatcttgtggaaatccgatatgttttaatgtggctacctaggtttaaggttcacgttagtccccccattccatctagaagtccattttgaaagatttttgtaaattcttttaacactgatgtttcagcctcgtctttgtttcagttaagctcaatggcgaacatgggaaccacctttcgccttccctgggggagaaaccctcttggctgatggcttttccccggaattatcaaacagccaccgggtgactttctggcttccagatccatctgcctgagacccccgaactcctctcctcccaagcagaggcgagtgagtggcattagctcccggacccattcccggtcctagctgggcatggggctgacggagatgaccaagccttggtctgctctctagcagcttccacagacttggctcgtggccttccttatatccactgggaacaaacagcctcgcgctctataccaaacagcctcgcgctctatcccagtcgcccattagcttgattcaaacaaagccccagcaggcctttgcgtttttatccttcataaccttcatcttaatttgaacttgtagcttggactttaaggtagcatggctctattgctgtcaatttactgtttcactgcacagcaatcacagccagtgaatgttacacacatcttgctagactagtataaaaatcattgggtaattgttggttctaatgacctgaaaggtgttcnnnnnnnnnnnnnnnnnnnnnnnnnnnnnnnnnnnnnnnnnnnnnnnnnnnnnnnnnnnnnccttttcatttgggggtttttggggaaaaaatttatttttggttccaaatagaaaaacaaaacctattttgatctttagtgcaaacgagggctagggacttagcctcctccaccacctccacactgcttcattctgccattcactcactgcagcatattcaagaataaagcaatatcgtttactacattttttattgaaggtcagccatgctttctgtattatattgcatatgaaattgtttacaaaagaaacactaactcatacttctctttattggttgcaagtggcacgcaggaacagagggagagtggggggctggtgggggaggggagannnnnnnnnnnnnnncttgaatgtgcttcgcaagccaggctatcttccaaggaaggcagacagtgggagagcagagggactgactgcaggcaagcacattgaagaaagacactggcgggtttccccaccctcaccccaaagcagaaaactagcagacgtcagctcagccccgtcctgggcacagacactacacaaggagacgctggaagttaagcaatactttaatactgtaatatgnnnnnnnnnnnnnnnnnnnnnnnnnnnctacnnnnnnnnnnnnnnnnnnnnnnnnnnnnnnnnnnnnnnnnnnnnntccatccctcttgtcggggacctgcaggggggcaaccttaatccaaacacctggctatcaaataatcagaatgtattgtctcagacaggatttcagttccgggaggcaggggcatgatgggggagggggccggaggctgagagacaaaagttccagagcctctctcgagggttctctactactgtattctgtacatatgtaccatcccatgtggaatctgtggagtgtcctcttaagtagcgtgggctagccaatctgccgttcatggtgtatttgtagactccgaattcc

SEQ ID NO: 181100 - DNA, 1120 bp, Homo Sapiens
  misc_feature (146)..(160): n is a, c, g, or t
  misc_feature (387)..(409): n is a, c, g, or t
  misc_feature (414)..(458): n is a, c, g, or t
  misc_feature (885)..(931): n is a, c, g, or t
ttggattgaaggtcagccatgctttctgtattatattgcatatgaaattgtttacaaaagaaacactaactcatacttctctttattggttgcaagtggcacgcaggaacagagggagagtggggggctggtgggggaggggagannnnnnnnnnnnnnncttgaatgtgcttcgcaagccaggctatcttccaaggaaggcagacagtgggagagcagagggactgactgcaggcaagcacattgaagaaagacactggcgggtttccccaccctcaccccaaagcagaaaactagcagacgtcagctcagccccgtcctgggcacagacactacacaaggagacgctggaagttaagcaatactttaatactgtaatatgtttgnnnnnnnnnnnnnnnnnnnnnnnctacnnnnnnnnnnnnnnnnnnnnnnnnnnnnnnnnnnnnnnnnnnnnntccatccctcttgtcggggacctgcaggggggcaaccttaatccaaacacctggctatcaaataatcagaatgtattgtctcagacaggatttcagttccgggaggcaggggcatgatgggggagggggccggaggctgagagacaaaagttccagagcctccctcgaaggttctctactactgtattctgtacataatgtaccatcccatgtggaatctgtgagtgtcctcttaagtagcgtgggctagccaatctgccgttcatggtgtattgtaaactccgaattccatatgtaataggatgcaagtctaagcgtttcatgtggacataaatgtatctaaataaaactttccctagcactgtggctgacctcacccttacttttatactttagtatgaaactgatgagaactttggtagtgagnnnnnnnnnnnnnnnnnnnnnnnnnnnnnnnnnnnnnnnnnnnnnnnctcaagcatctttcaggtctttgtgtgtggctttcttaaagccctgttgtaaaaaattactatgtggatggcagtctctcacatcacagatgtggaaagtataattttatatttgtattttcaaataaataagtttgtgaaaggtttccatcctctactgtggtccagaaatcaatgtgtttgtctgac

SEQ ID NO: 181101 - DNA, 999 bp, Homo Sapiens
ttggattcagaatggattaaaatggagttgggggtggaaagtagagccattcttagtaaatataaataactgaaaagttcttctgaggagactatgtacgaagttatcattgcatctttcagtataggcagatctctccctcatataacggatgtttcttggcgcttggaatatcagataaaggtaaagtttaagaaacttctctagcgggggatttagggaacttcttaaaacctagagttaaaagctgttgcgtgtttgttgtgttattttagaccaatcaacttcataggatgtacagacctgcatatttggtgaccttaagtgtacaggtatttatagataagtcttatccaataatgaaatttataatttcattgatttaaataaacagcgtttcttgttgcgtgttttttttcctgccctagaacactgattccccatcctatccagagattagttttagttgcagcatggaacaattacaggtacagtattaggatctataaatattcctgtctttttataaatgtttacttgagagttatactcttgggaagttcaaaagaaaattaatctaaccatttgtcagcagataatgaagattggttaaggatttaatgggaaaggggcatcaaaagtagtattttaagataggcttcacttgaaattaagatgttattaatagagaattggtctgtatttgctgttcttgctgattgaaataaacttctgtagtgtttagtgtaaatttcttctattcatgatgagtttggtccataagataaacaaaattaagagcatggctttgaaaatgtctttgctttcagaaattgaattaaactgtcaaaattggattttgaaactttttaaatgactttataagggggaagtatacataacattctaaactgtttatattgcccatttaagactgggaaattcaaaactacatttattagtggtatgacaccgaattaatttcatagtttttaaaaa

SEQ ID NO: 181102 - DNA, 1368 bp, Homo Sapiens
ttggatttgttcttattattctaggtaagaaattgatagcttgttatgcttggtactcattctgaaatccctgtgtgtccaccaggcagacttcaagcaatctctacctactattatatctgccaaaactaccaattatttttcaatgtcagaagttattagagccactggcaaagctcatggttgaatatgacatttttctgcttttccctctaagaagtttttgagaatgttaatgttgaagtatgcaggctggacctaccagcaagtttaacacgttaattaggttaaaaagaatattaaaaggcaataattaaatatttcaattattttgtaattataatggtatcaaataagatgcaaaagaagttgatgcttattggtgcttaagagaattacaatactggttttatgagcatcttttctctgcaacagttaaactgcctcagagtttgtgaattgctgcaattcctggaatggaaacaggaattagggtcactggttgattggcacaggatctttccatcgtttctgctcctgacctctctctcttgcctttccttcccccagacaccctcttggtttccattcctttagttccctctgctttagaacacagattacatgttggaaagaaaaatggattaatggtaaaatttctaaaagctaaattgtacagtggggtctcacttcctagaagaaactattggtaatatttctttctaaaggtaatagtattaattgtatctggttttcttcaaaacttaactataatttccttgtcagggtgctcagtagctcttggtttgactttgggctaagggatgtgaaattttagctccttcccaccacctgtttgccctcactcccacccccagccaatattcttcataagcaaaaattatggttaagctaagctgaatgggttatattcaaagtaagtacagacggcaaataggcagacaaatacaggaatgtctttacaattagcccaccatggactgtttgagtctctgcatggtttccataattcattatgatgtatctttatgctctttcactgctcttctgtgcgttggagtttagcaattcagtgagactggggagtgtctcaagaatggaacctttgccttcaaggttgggtcatcaaaaatccctctaaaggatctaactgtaatgaactgtttttatttttgccattagtgcaagtatcaactggcagcctcaaacagctttagactatgtctcacgtctctcatagttatacttagaactgctctttcttgaagctaaaagaggtttttggagtaaagatctgcttcatgtctgctagcatggtatctgctgttcaacctagtatagagcatg

SEQ ID NO: 181103 - DNA, 894 bp, Homo Sapiens
ttggtttctgtttaaggacttaaacaatttcacactctaaatgaagtatatacaattttaatttactaatttagaaatatctgagtttatttttcaatataatatacaaacacagtgtttgttatacatgttcatgtacagtgaaaatgcaaaggcattttttagactctattccccttcatttgtctagacagttttaggttagccttagcttatacttttcttgactttcaaaatacagttttattgaacattcttattcttacccactgccagtctgcattgttttttacattaaaagtattatttatagtagactaatatgattttgaataaaatcacacttaagcaatatagataggttcctagaatttatgacgaggataaacctctcacataagaggaagcactagaaagtttatttttaaaacttgttgatccatattctataaggactaatgcatattttttatcttttgcttttcttgttggataaattattatgtccagtgatagtttaaaaagaacaagattttagtgtaagtcacctcacttgaaatgccagtaatgtggtattacacacattttatataatacctggaatctttgccctaaattattctgctggtttgtcgctatttttttcctctcctctttattatttcacaaatggtagaatttcttgatatgattcttgtaaagagtttagcttatcttgaacattctgtcttaagcaaatatttaacaagagaaaactttgtagtttaatcacccataagtgtaactttagcaaaattcaatgactatgaaaaataatttttttcttaactgttctaataatatttagttataatattatcaaaccttcagaaagttataaatcctaacagccag

SEQ ID NO: 181104 - DNA, 1739 bp, Homo Sapiens
ttgggttttaaaatgtacaattattcttgaccacagtcaccctttgtactaacaaatacgatgtcttgttttcacactagagaccctgaacgctcgcttgtctgcctaacgtcctcacaagctgcgaggggctgaggcttggggatgcagcaggactggaggccaggccacctccctgcttagctcccaagtcctcttgggggagcagtgactgacacaggcagggtacatcctgctgccagccttcccacccggggcccagaccccacctgccctcccgcccttggagggccggcctctcccaggccgctctgagtcctgcacctatggtgcgctggcgcagtgtttagcagccggacctagtgaggggaagcctggggtgcgtgttttgcacatgcgcgtggtgtgaatactccaccggggctggtttcaagttacccccagctggacaaccagtccacagaaattcccgaaactgtaccagtctgcttgtggtgtgagtggtgcctgtggcaggccctctgcagccagggtcggcgtaatggataacctgtgatgagttccattagagaaaacgtggaaaaagcagggatggatttacccttgtagaaggtaacttctacctttgtagaagcagaagctcacaaaatttgagagacctttaagaaaaataaaatgcttgctgggcgcggtggattacaggcgtgagcccctgcgcccggcctgtcacccagtctttaagaagcatatgctcatgttattgaagaagaacctacttattattgattgccttttgaaaatttgttgggaataatttacctgcaggatttacgggatagtcagaaaattctaagaatataattattttatttaccttctaaagccaaatattcttacacagaaaggtcctctgttgttctggttttactttgttgctgaggatctttccttcctgctggtctcttcctctcaggccactggccctgtgtgattccaccgtggctggccactgggaaggggcagcttggacccttggtcaggcctgacggccatcaggaggcacaaggacactgaggccccatatctgatctgacctttgggggggcacagggagaggccggtggaggaggagagcagaccaggggctccctgcagcgactcccgcggtttcccctggagtcagccaggtgtaggtcgcaggcggtaacaaacctcacactcctgttccccaagtgaaaatctttaccattgtctgtgggagcgcctgtactcgtgtgtaggagcacctgtacttctgcagtcatcgagaagtcctggatcttttgtggttacaccagcatcatgtggcaagcagaggcgacttccggaagagacaggcaggcaccgtgaggaaggtggctgtgctctcccaggtgtctcagagacagatgccttatttaaaatcagcacgacatgtgtgagatcttctgtttcctaccccaaatcctgaaaccctgcagacactggctgactgggagaggtggggtctgtaagttgtcctctagtttgctaagaaaatctaaaataatatttattatatgagttaggagagagagaatgggtccgcgtggcctcctctgcagatgtactggtctgaaatgaggttctgagtcactggccaggccagatgtgctcatgtcggtgtctggtgtctgttttgtggagaaaacagtatggtgtgttttaagctatttgtgttc

SEQ ID NO: 181105 - DNA, 1520 bp, Homo Sapiens
  misc_feature (279)..(291): n is a, c, g, or t
ttggaccatgcagaaatgttgcaaagagccctctaagtagtggggatatcagatgcaaagccactcaactaataataagctcgtactatttgaagaaaaggaagtgacaaatgtgactggaacctagtgaagggtgggagagagaagtggtatgaaatgaggataaagaggaagactggtgccaatttgttaacttaaaggttatgaatgaactttcgattttatgactttaaggcaacacagatcaaaaacaacttggtatcaagctgaatgtcaacnnnnnnnnnnnnnaaccttggacattttattctagcttaatattttaccaatgtgtaatgggttggttgattgattaacttaggaaccacacagatgttctttgccaaacatatttatttattgtggtaatgtctgaggagttttataccagctaataaagtgatttatttgaggaagaaggtgaatgagtataacatatgtgatagtttttagctgtttaaaaaacaaacttttatattttatttaaatgttattctaacattttaggagatttatacattcttgtttatgctttcttagcaagaaagttctaaattatttttgtctcgttaaattttctcaattactccatttgaacagaattttaattttcttagctaccacattagtaacatacttacattgggattctacttctgctgagcatctatctctaattaaggcattgtcaaagaaaaaagttaagtgaatgccacttttttccattaatggctgagttcccagaatgattcacattttagcctatgatatcatccttatttaagtatttagacagacaaataaacacagaaatagcagagtaaaatgaaaagggaagtagaacaattcagaagggtaataggctcatttgaattttaaagtgagtgttgtatttttgatattttgatttagaacttcactgtgattttagtgacagtttgactacaatttgaggtttcattttgtctgacaatgactatttggaaagcacctactctcattttcagagtaatgaaaatgagtaactcaaaactagttaagaagctagttttgagaagggattctgggaggaggaaggtttgaatgctttctgccttctctccccttctgattctaatttatctacctttctagagccacacagcttctggggtcagaaggcatatggggttgtgagataatttatgcttattggagtcctagtatagaggtggtgcaagattttatcttttctgcagcagttgaaagcctggataaagagcaatgaaggaaaagctcagtctgcaaaaatctgccctcctcataggtttatgtcataaaatgtaattctcagacaataatgcaatattaattagaattccaaaaggattttttaaggataattatttgaaaatagtttcaagtttactaaattttttgataaatttattggataatcaagaacaatagatgcctgagaatagctaggacaagtatgaaac

SEQ ID NO: 181106 - DNA, 1094 bp, Homo Sapiens
tgtacaaaaaagttggggatattccaccattaacaatgaatctgaaatctatgatggcaaattctagaagttcttgtatttttaaggagacagaaaacagcacttctagaataccagggtttcagaatgaagaggtcctagctttctaaggttctgcagttcattctagagttccacattcgattcctgaatccacagagtgaaggtaggagtagatgcgggctctaagagcgggaggttctagcaagccatgttcccgcaattctgagattgggaggtacattccttgattttgagattctatgagggctcgtttctacagttatgtatttcaaggagatacagtactcaggagcttgagccctgagattctaaccctgggtctagtgtctggatcccagaatgttaaggttctcaacaggcaggggtttttgcaagaggagagttctggttctcagaccatgtggattccactaccttgggttctagatttctctgctttcagggtccaggtcggggatcaacttgagactgtgtttctcttgagtgggaacgacccggccattcatctctacaaggagaacgaggggctgcatcagtttgaggaacagcccgtggaaaacctcttcccagagctgacgaacctgaccagtaggtaggagaggccccgaaagaggccactggggaccggggcactgacatcagagaaatcgggcggtgagaccttagagaaattggtcaccggggaggagctcagaaaaatcagtccacggcatgacttcagagaaattgatcagcaggggtgaccccagaaaaaacaagaggtggactcagctctcgggtggtgagaattgacctcagaggaattgggcggtggggattatccaggaggaatcaagcagcaggtcccagggctacagggaggggcggctgcccctggggaggcagagggcggggctgggcccagcaatggccgtccgtcctgtccatccacccgcccgccagcgtcctctggctggacgtccacaacttccccggcacgtcccggcgcctctcagctctgggctgtcagagtggttatgtccgtgtcgccc

SEQ ID NO: 181107 - DNA, 883 bp, Homo Sapiens
  misc_feature (215)..(229): n is a, c, g, or t
gcaaagaacaaagtcattcggaatcacaagcagtttatagtttgacatagtcttttagatcctgtgtgtaggcacaacatccaattttatgggactgagactgtacagtatgtatcatgatttttcacacatcatgaatatttaccaattcaaaatcccaaagctatatgagtattctgataaccaagaatacactacaccaactcaaactgttnnnnnnnnnnnnnnngatgtaatcctgcctttcttgggacagaaatttcatataagacaaaaatggcaacacgcctctagataaaagcattggcagagttctgatttaaatgctgcattcccttaatgctcaatttaaaatgaaacacacagcaacagaatacagtatgtttttaagagaattcattagcagatctataccattaaaatattagcaaagtgtatttccattgaattaatgtgttcttatagtacagccaagagatgcatacatcaatggctatcaaaatgtaaatatggacatatatggacacatctgcatacatctctacctgtataattccttctgcccctctgctgccaacctaatgaacaagtcctgacatacactgctcagaggtggctgaacaattccatgtccaagatgtatcctatcaattataacaaaggtatttacaaataggctaattcactagctctagtttttatcataagttgtcaccccattcgtaaagcttagatgttgcaaaataataactttgtccacaatgaacacaggcactttactaaaaacgctcttgtagacctgtggttatcatctaaaaccatcgtctagatatggagatactagcaaagagcccttcccttcacccttcctcttctcccccaa

SEQ ID NO: 181108 - DNA, 1067 bp, Homo Sapiens
  misc_feature (929)..(946): n is a, c, g, or t
actttgtacaaaaaagttgggcagggagaggggttctgtgctcctgagattagttcagatggtctaaccattgttctatatgtgcattttagttaatattgtgtattaaaggataagtcttaatgctcaaagtatgttaaaaatagatgtagtaaatcagtccctttgtgaatgtccttttgttagtttttaggaaggcctgtcctctgggagtgacctttattagtccaccccttggagctagacatcctgtacttagtcacggggatggtggaagagggagaagaggaagggtgaagggaagggctctttgctagtatctccatatctagacgatggttttagatgataaccacaggtctacaagagcgtttttagtaaagtgcctgtgttcattgtggacaaagttattattttgcaacatctaagctttacgaatggggtgacaacttatgataaaaactagagctagtgaattagcctatttgtaaatacctttgttataattgataggatacatcttggacatggaattgttaagccacctctgagcagtgtatgtcaggacttgttcattaggttggcagcagaggggcagaaggaattatacaggtagagatgtatgcagatgtgtccatatatgtccatatttacattttgatagccattgatgtatgcatctcttggctgtactataagaacacattaattcaatggaaatacactttgctaatattttaatggtatagatctgctaatgaattctcttaaaaacatactgtattctgttgctgtgtgtttcattttaaattgagcattaagggaatgcagcatttaaatcagaactctgccaatgcttttatctaaaggcgtgttgccatttttgtcttatatgaaatttctgtcccaagaaaggcaggattacatcnnnnnnnnnnnnnnnnnnagcagtttgagttggtgtagtgtattcttggttatcagaatactcatatagctttgggattttgaattggtaaatattcatgatgtgtgaaaaatcatgatacatactgtacagtctcagt

SEQ ID NO: 181109 - DNA, 1641 bp, Homo Sapiens
  misc_feature (776)..(806): n is a, c, g, or t
actttgtacaaaaaagttggggccatcactattgctggcattccacaatccatcattgagtgtgtcaaacagatctgcgtggtcatgttggagtcccccccgaagggcgtgaccatcccgtaccggcccaagccgtccagctctccggtcatctttgcaggtggtcaggcctataccattcaaggacagtatgccattccacagccagatttgaccaagctgcaccagttggcaatgcaacagtctcattttcccatgacgcatggcaacaccggattcagtgcaggtttggatgcatctgctcagactacttctcatgaactcaccattccaaacgatttgattggctgcataatcgggcgtcaaggcgccaaaatcaatgagatccgtcagatgtctggggcgcagatcaaaattgcgaacccagtggaaggatctactgataggcaggttaccatcactggatctgctgccagcattagcctggctcaatatctaatcaatgtcaggctttcctcggagacgggtggcatggggagcagctagaacaatgcagattcatccataatccctttctgctgttcaccaccacccatgatccatctgtgtagtttctgaacagtcagcgattccaggttttaaatagtttgtaaattttcagtttctacacactttatcatccactcgtgattttttaattaaagcgttttaattcctttctctgttcagctgttgatgctgagatccatatttagttttataagcttctccctggnnnnnnnnnnnnnnnnnnnnnnnnnnnnnnnggctcatgaatttttctgtttgtcatggaaatgtaagagtggaatattaatacatttcagtttaattctgtaatgtcaggaatttttcaaaaaaattaaaagatggactggagctttttctttgtgaatagaaactggatgccacagtgattcatgtgggttttattcctcttgtcttgctgttatttttgtaccttttatccctcaaaggacccttcttgggttttgaatggaagcctttattccggttaagatgttttcttctattttaccacttccatctttttttgtggccctcgatcctatttttccctgactccatgcttggttggcccttataaaacttgtgcccaaaagattgaggattaaactttccgaggacttacctgtcctaggggagtaggcaagcacttccactagggagggggtgggggaaaggaatgacacatgacatacatggcatacacattaagcagttgatcatatgtctgactgggttccagtttcttgggaatgttggtccccttgttcaggcttgcatattttaaactaaaaatttcagtctattgtttttagtaacttcatttatagtcctccataacaagttaaaaggatgtatctgctaccatttattcctataattttagaaagttggggcttgacattatactcatttattgagagtagatgcaaaaaagtggaggggcaggagaacttctccagacacctcagataaagtccggagcccaaggctttatcttaaccatgtatggtaccccattcattcttcaagaaaaccctcaacagctgggcctgcatggaatgttatatttca

SEQ ID NO: 181110 - DNA, 1619 bp, Homo Sapiens
aaaaataaaatctccacaaaggttcacaattgtgttcatctcaatgtccataaattactaaaaaagaaacaagtcacatgttcagatacttttctcaggtatgagtctattctgatgtgtgccaagctgcactttcaatatttggcactgacagtctatctaaacacaatttatcagcagaaaactgtaagaaattctataaacctttagccattcaaaaccatcatgtttcattttctctctaacatgcaattcagttattccaaagtcatttgggggttgcaaggaggtgatttaggtgactggtacaaaatgaagcttatatgaaaactggttaaggattcaaagcacactagctctgaaatattaatcttaacaccagacataaatggggaggtatgacttgcacaaaatactttcaattactttggttacactcttcatgatcttgcatgtttagctgcttgcagtgcatgcatgcatcctctttgctacgtcataaacataggtgacgtctggtcgcttctctggatctgggttgatgcacatattaactaactgtcggagttcttctgaatagtgatctgaaggaagaggtgggtagtcacactgttctatcttcttacacagtgagtataaattcattttgtcaccatagaaaggactttgtaatgcagccatctcatatagtagacagccaagagaccagatgtcagatttgaagttgtatccattttcatgtattctctctggagacatgtaataaggcgtaccaactaaagaatgtgcagctgtggtttttgagctgaaaaaccggccaagcccaagatctccaagttttaccaccccagtggctgtaatgaacacattagctggttttatatctgtgaataaatgaagggatcaggtaaaagatgatagacattttagaaattttaaaggaattaacaactacttttcgtgacagaatttaaaatttattttaatcatgaaagtttgatttatgaaccaattagtttattttgaataattctgatatatcctaatacctaggagttctcgattctctgctagacagctaatcatcaatgtagcatgatgaacatgattattaatttctatttcaaatgcattttgttttccattttcaaaaaacctgtgaaattcaaagcacaaaatacacgtgtccttttgatatcaattttaaataaaatatcttaataaaaattaacttactggtagatttgcataaaatataaaaccacgacaacactataaggcacatatttatttacttagatggctttaaaaatcttaattgcataaatgaattgtattaaaaatttttcacacttcagtatcagcggatcaattacttattgatgtaatgttaacacactctgctcaaccacttgaatgaaaagaatgctgagctaatactgaatattaaaaatctaagtggttatgatatacattgtttatttgaagaaacaaaaaactcttccttatatatatttgattgctgtcttatctttaccaacagcatcttactggttagtaagatgctcaaaagagtcaagcagaagattaatttacattcttatttaaaacctagccaa

SEQ ID NO: 181111 - DNA, 961 bp, Homo Sapiens
  misc_feature (747)..(759): n is a, c, g, or t
tttgtacaaaaaagttggctaaaacctaaaaaacagaatcctcaaaaactttgctgtatgtgttttaacattttagagaacagtatgttgaataactaaggtatgtaacttgaataggaaaaatgtccatcaaatgcaccttggaaaatcacagtaggtagaaggctgtgttaaccgtttgtgtcttattaacatccttaagttaattttgaatttttgacagttttgagggaaaagacctatggaacctaatgtgaagtatttcgtatgttaactggtgttgagttgaagatttttactgtgtataagcagatatcatttgaatgataaaaatgtcattaacctgctgtcttaagatgttcacacaaatatggagagtaattctacaatataaaaatatttattttaatactgagtttcagttaagtcataaacagtgttaaaactcttgggaaggtgtaggggttttttgtttgtcatttttaaaattgaaactgtgtcatacagtgtttcacgtctctgaaattgggattataatagcactattttgatgtagctctaccgatactatgtggtaatgctattttgttttactaacaagctctggaatatttagcagtcattttcactggcacaagagccttttgtatgttattcaatttaaacttttaaaccaaaaattttatggtccagtgtctttggcaaaaagatgctggagggaatgtaacatacaattaatatgtggtnnnnnnnnnnnnnaaaaagacacaaattgccatgttatggttctgccttgaaacagcacaatgaagtgtatcagtatattctgtgattatgaaacttatatgttgtgttgttttgtgtcttctgttgcctgtcctttgggccagatgtggccagttaaatgcagttatcatctcattaaatacagatgcagataaaatatctttagtgctgcaac

SEQ ID NO: 181112 - DNA, 2011 bp, Homo Sapiens
  misc_feature (85)..(93): n is a, c, g, or t
  misc_feature (1768)..(1781): n is a, c, g, or t
ttggtttaatattcttatctgatattgtgtaattcaattcctaaactgatagttaccttgaattttgcgaaaaggtttgggtggnnnnnnnnnaaacatgaaattgagggatctcatctgggcgaacaagaagagaaagctgtgaattgtactgtatcatgtacattcctgatttaatactttacagaacattttattcagatatcaatttgttacataaacatttcagcaatgatacaaagataactgataaaatatattacattcaatgaggttttctttacaaatgctctacttgaggtctgtgtcttaaagatggcatgacacctaagtacaagacatcaactgaatgaggattttaaaaaatggtatataagcataggacaagggctatgtttgtttgtttttcaaaagtgctttgaagataacagcctttaggtttgagttatttcacttttcataatttttaagtagcttatatataatggtggtaccataggattttcttttttcaaatgactgtcggcagaaacagtgggcactgactcaccttttgagttttagcagagaattatttatttctttacaatgcactttctaacccattgtagctatattagcattatcttttaaaaaagacatgcttttgtatttaaatattgtaggatttaagtgtctttctcaaaatagcttattcctttctgaaagaaaatgagggaaatactctgaattattaggagacttaaacccaatatttaaatatgctattttataacactgcatcagttttaggagttgcatctctcctgctggctcttttatatttgagcaagatcagtgtagaatatgtgtttagaaacttgtctgttgtctcagtttagtgaaaaggaggtgctgcatgtgcctgaattaaaaccaagaaatttttccaagccaaatgcagccttagtgatgagagatttaattctccattgtcaccttttagcttttatgattgcttagttttttctgaaggatgtctgcattgtaaaactatggactaaaacctaaaaaacagaatcctcaaaaactttgctgtatgtgttttaacattttagagaacagtatgttgaataactaaggtatgtaacttgaataggaaaaatgtccatcaaatgcaccttggaaaatcacagtaggtagaaggctgtgttaaccgtttgtgtcttattaacatccttaagttaattttgaatttttgacagttttgagggaaaagacctatggaacctaatgtgaagtatttcgtatgttaactggtgttgagttgaagatttttactgtgtataagcagatatcatttgaatgataaaaatgtcattaacctgctgtcttaagatgttcacacaaatatggagagtaattctacaatataaaaatatttattttaatactgagtttcagttaagtcataaacagtgttaaaactcttgggaaggtgtaggggttttttgtttgtcatttttaaaattgaaactgtgtcatacagtgtttcacgtctctgaaattgggattataatagcactattttgatgtagctctaccgatactatgtggtaatgctattttgttttactaacaagctctggaatatttagcagtcattttcactggcacaagagccttttgtatgttattcaatttaaacttttaaaccaaaaattttatggtccagtgtctttggcaaaaagatgctggagggaatgtaacatacaattaatatgtggtnnnnnnnnnnnnnnaaaagacacaaattgccatgttatggttctgccttgaaacagcacaatgaagtgtatcagtaatattctgtgattatgaaacttatatgttgtggtgttttgtgtcttctgttgcctgtcctttgggcagatgtggcccaattaaatgcatttatccatctcattaaatacagatgcagataaatatcctttagtgctgcaacattttaacctaactttttgtaagtttt

SEQ ID NO: 181113 - DNA, 1103 bp, Homo Sapiens
  misc_feature (500)..(725): n is a, c, g, or t
ttggctctagtgccttacagtgttccactgttttccacactagcttctgtgctgttttgaggagatgtactactcagacttttgtagtaattgtacacccacgtgtagtaagtccaggagccagatccaaagggtttacctgcagcctgtggaatgttctgggagcatctgtggggttgcattctgatgtcttactctcgtgtcacagtggtgggtgtggtaacctatacacattgttcttttatctgatttgaagcagattccatgagtaggcacctttctgttagctaataccagcatcaaaatggcaataaatcatagtttctgtgctgggatatttctcacaggaatttaataagattacattttccatttgttggaatgtgtataataatattttgagacttagctctttttgtacatcccacaaaaggaacaaacgtttggaaaagtgtgaggataaccaggagcattgatgtcttagaagcttaagtgagggnnnnnnnnnnnnnnnnnnnnnnnnnnnnnnnnnnnnnnnnnnnnnnnnnnnnnnnnnnnnnnnnnnnnnnnnnnnnnnnnnnnnnnnnnnnnnnnnnnnnnnnnnnnnnnnnnnnnnnnnnnnnnnnnnnnnnnnnnnnnnnnnnnnnnnnnnnnnnnnnnnnnnnnnnnnnnnnnnnnnnnnnnnnnnnnnnnnnnnnnnnnnnnnnnnnnnnnnnnnnnnnnnngaaggtgtttcaagacatagatttgatagacttgggcgagacactcaggaaagtaatgtagcatggagtgtgtgttgattgggcaagagagagagaaaaatgagaaaggaactaggtcctcaggaaggaggggggtggaacagagcagggatggaggcatcggcctcagcaaagggccgggagctcatctatggtagcaggaggggaagcagaatgtgggcagagccaggcagatagtagatgtgcagtttaactagaaaccttccagaatgtattagggatttggcttttatccacagagagctaaaacaaatgagtgatgtgctcagatttctggtttgaatagattcctccagctgcactggcaggaatggatgg

SEQ ID NO: 181114 - DNA, 1748 bp, Homo Sapiens
  misc_feature (648)..(683): n is a, c, g, or t
ttgggacagttcctttcctgtagaaattaaaacaaaatacaaattgaggaagctctgctacccaggctgtcatggtagagaacttgaagaagacctgtttggatggacacctggtttcaaaagtcaggtgtggagactgttaaatgggagggcctcatccataaatgatttctggcaacgtcttcttcaggtggagcttgacgtctttttaatgttacttggggagggagtgctcattaagggatgccagggccagctctggtggttcctggggaggctgcgtccttccctgcttctgcatgtcatgaggcagcaggaaggtttcccctgcacctgtctgtcctggctccctctgggtagccccctactgttctgtgcttcagcacagcctggtttgtcaagaggcacatagttggggctgggctgcatggcacaggggcttatgtgcctgctggttatttaattttcagccttaagttttctttaatattttcctgttggctatttaaaggttttggttatcttttattccttatctacaatcaagatgacaatgtaattgaattatcttatttataacacggttcgtgattcatgattcatgattacaagtagaaaatatgtcatgttcctcacctccaaataaannnnnnnnnnnnnnnnnnnnnnnnnnnnnnnnnnnngcggagagggagagagtggggaaggagagcagtgttatcatacatagagaggctaaatgtgtcccatccctcactgtcagctttataaaggagtttgactcccatccacagaagaatgttttataagactaggaaaacacgttgaaaactagggataaacagcaacaaaaatcaactaaatatgttgttactgttgctaaggattttctccttagaataatttaggatttttaaaaatttctgtttgccaaatgctgtagataaatggccagattcttcctatccctaggattcctttattattttttttcacagattttgagaacaagggggagagatagtatggaagattaagattccattaatcttatagaactgtgttgtcacccaaattcctgcttgtttgaacatggcatcttcatagattcaggattcactaccctctatagctggatcttgaaaattatctggccagataattttgcatctgcttggatgattgtagactgagatgtgagtggaggataaagtattagacttttgctgagtaactgccaaccaagaagtatttatcggacacttactaggtgcctaggattgtatcagagggaatatgaaatgtgtccctgccctacctagttttaacgacagaatatctattaaaggctacttagctgaagggtaagggtgacaggtctaggggaagctttgggaggtggtgtgctgtgacagaaaaagtggcagagtagggacgagagacctgcattctagccctgtttctgtcacttgctctgtacacttagacaacagcttgacctcttgagctttagtttcctcctctgcataatgagagggttagactactgaattgtatgggaaaaaaatacaaattcctgggtcctagccatgcctgctgaatccgactgttcagaagaggcctaggaaatctgtgagggaatccccaggggaatctcgtgaccagccaggtgtgaatctgctaactggaagatctcaaagcttccttcactttttgtgattttgtggtcatgtaacgttactgtatta

SEQ ID NO: 181115 - DNA, 1542 bp, Homo Sapiens
  misc_feature (1097)..(1105): n is a, c, g, or t
cttccctgttttaatttgctcctccttttagatgacttaaattctggtcatcgctaaagtatgagtggaaagtggggtagtgaacccagacaagactgggtgtggcccttggcttcaacagttattgcacttttctgagctgactgacataggactggtctgtcttcctaagggataactgaactagggcaggcactagatcctcatttatctttacatccttgagctctttatatctttatatactgtgtgcttggcacattaagtagacactcaatggggctgtggaaggtaggaaagaaagaaaatggggagggaatgggtggggaaaaatgcaggaaacaattttactcatctttttatccctaagtacaaagtagaaaagttaaccataatagaacctcaattaatgtttggtgacccttactgaatacatatatactacctattgcatgaagatttgggttttgtttaatttcattgaacgtttacatttaaattctgagaactgcacatttaccacaaaactatggttgtaaaaactatactgttaattatagttacagttgctgactcattaagcaaattcatagttttagaaacatagttttagtcaatgaagcaataaaatatactttagcattcttcaacattcagactaggggtaggggatgataaagagagacagcgaagttaagactcaacatgaaatgaggtagaaataaaaagaacaacactgaagtctggccatagggtggttaaaaggctctgtaattttcctaaaattaactttcaaatatatgacaaaattgtcataaataagttagtctaggtttaaagagcttttttgaaagtctgatttctgttacttaagaaaaaataaaatgtctctaatttttaaacaaagcacacataaacaagctgctttcaataaatgctcttttactatatttcaaaggaaaactatctagcactttggagcacttattaaatagtgaaaagaaaaatatttctttctagttaaaaaaggatgaagacaattcttggggagtggggggatccaagtaactgaattctgtctataacttaaagttccnnnnnnnnnagctcttattctctgtcttatttccaagtttctatttcctttacttgcttttaaatgtcagtattctccagagtgctatcctctcatccttctcttaaacatgttcattgagcaatctcatctgtaccagaaaagcacactgtttaggagtataccttccaggaccaaatgtgcttgtgtttgaatcctgaccctactacttgctaggtgtacaaccttagacaagttacttaacttttctgtacctcagtctactcatctgcaaatcaaggataaagcagtgccaaccttacagggctgttgtgaggcctcagttaatatatatcaaatgcttacaatgctgcctggcacataatatgttttctaactaagagtgttagctataagagggccatataattcacccagggcacttctaagatttaaggaagagccaa

SEQ ID NO: 181116 - DNA, 1081 bp, Homo Sapiens
ctttgtacaaaaaagttggtttttcaatatgtaaaattttcatggttattttgtatgaattatttttctgggtaagccatctgccacagaaattgacactatggtgagattaatgttaatgaaatgagcagtagagaagctactggattgctttaaaacattctttgattaaattactacatagttggtaagttcatagttttaagttacttaattgaagccctcagaagttgcaaagaatttatctgataaatctgcctttgcacaaatgtgatactgatgcatggacggctttgcggaatgacctttgatatttgtgcctagtggaaggtatggagctaaacaattaaagaactcttcattatggataggcacatattggatctctggtattttgggtagtggtattaacttgacaattctaatttattttagttagtatatgtagcaagttagtatgtttgttagtagtttattgtacttcattccagttggtaatatagttttcatcacactaaactttttatactaaatttctgtagaagcttgttgggtttgccttcaccagaaggtactttaaatacctaccatagctgatttgttataaagaaacaaaatgggtgttcttctgtttccttttgattatgtttactgtaattatttcattttggatttatacatttacaattgaataaggattataggttgataagctgtttattgtgaaaagatgtgttttgttacaaatacttgttttaaaaattaataagcccccaggaagtacagcattgactggcacaactgcccatagtgagcttcccaactaactgccttcagtggattcgggcaagtgcaaagtctttggcctattgtgtgacaaagaggtatatattaaaggaaaagaaaaatgacatgaataagaaaattccgtcaacaaggttggagtagggagttgttgaggggtttagtttgttttaaaaggtatgtgagggagtggtggggtggatttgtgtttctgactttttttctttaagcaaattccatatgttaccaaaagcacatgctgtatattttcttcccc

SEQ ID NO: 181117 - DNA, 1435 bp, Homo Sapiens
ttttcctttaatatatacctttttgtcacacaataggccaaagactttgcacttgcccgaatccactgaaggcagttagttgggaagctcactatgggcagttgtgccagtcaatgctgtacttcctgggggcttattaatttttaaaacaagtatttgtaacaaaacacatcttttcacaataaacagcttatcaacgtataatccttattcaattgtaaatgtataaatccaaaatgaaataattacagtaaacataatcaaaaggaaacagaagaacacccattttgtttctttataacaaatcagctatggtaggtatttaaagtaccttctggtgaaggcaaacccaacaagcttctacagaaatttagtataaaaagtttagtgtgatgaaaactatattaccaactggaatgaagtacaataaactactaacaaacatactaacttgctacatatactaactaaaataaattagaattgtcaagttaataccactacccaaaataccagagatccaatatgtgcctatccataatgaagagttctttaattgtttagctccataccttccactaggcacaaatatcaaaggtcattccgcaaagccgtccatgcatcagtatcacatttgtgcaaaggcagatttatcagataaattctttgcaacttctgagggcttcaattaagtaacttaaaactatgaacttaccaactatgtagtaatttaatcaaagaatgttttaaagcaatccagtagcttctctactgctcatttcattaacattaatctcaccatagtgtcaatttctgtggcagatggcttacccagaaaaataattcatacaaaataaccatgaaaattctacatattgaaaaaattttctcagctatcaccaattgagcaataaatcagtttaaatatttttaaaaggatattaagtcaaaaatactttgacatgaaccataaatttagacataactataaaaccaacttgatgggaaagtaatagttgacttttaggaaaacaatgttcaaagcaaaaactaaagatggcacaactactaaatgtaacaaaaggaaaggaccatttgagccgtgtgctattcagatgcatgcgcagatcctgaggtacagttaatgctgtttaatcattttaaaaatgttctttatattctaaaaataaaatctagttgattgtcctctcaactccttcacatctgttctgtaaagagagctaataaaactttaaaataaggactataaataatgcggagcatggagttgctcttttgataacccaaacagaatattgcctatagaaattactacaatttttttccctatggttactttttgaaactctaagatttggaaatccttatgtataatttttagtagataaagctctgggatcagacaacatgccaa

SEQ ID NO: 181118 - DNA, 1579 bp, Homo Sapiens
  misc_feature (1011)..(1147): n is a, c, g, or t
gccaactttgtacaaaaaagttggcagaaggcactgcctgcaggaagaagatgatctgatggccgtgggtgtctgggaagctcttcgtggcctcaatgccctcctttatcctcatctttcttctatgcagaacaaaaagctgcatctaataatgttcaatacttaatattctctatttattacttactgcttactcgtaatgatctagtggggaaacatgattcattcacttaaaatactgattaagccatggcaggtactgactgaagatgcaatccaaccaaagccattacattttttgagttagatgggactctctggatagttgaacctcttcactttataaaaaaggaaagagagaaaatcactgctgtatactaaatacctcacagattagatgaaaagatggttgtaagctttgggaattaaaaacaaacaaatacattttagtaaatatatatttttaaatagtctatgactgttctgttctcctaattccaacagaaagcacatgaacccttgtaacaactgcaggggctgagtggggctaatagaactggtagtactctttataagcctgtctgaggacagagtccatccatctgctacaaagacaactctgctcagggaaacccagccctgaaatgctgcacccaggtagacaccccagaatgccaactgaggcaagtcaagtcattcttcattcatgtaacaagtattaattgagtacatgctataagaaaagtaactgtcacacggactttaagcacctgtgttggcacaattactcagcatcttctctccctgcgggcagaagcaaatataatagccactagttaatttacaataagaaataactgccctagaaagtagactatgtcacacctttaggactgatcagggcattcccccatgtttgcagggaactggaaagctgcctggtgtctcaagaagcctgtttctaaaagcatcaccgccccttcccccaaccagtgacagtcaggctgtgcnnnnnnnnnnnnnnnnnnnnnnnnnnnnnnnnnnnnnnnnnnnnnnnnnnnnnnnnnnnnnnnnnnnnnnnnnnnnnnnnnnnnnnnnnnnnnnnnnnnnnnnnnnnnnnnnnnnnnnnnnnnnnnnnnnnnnnnnnctgtcttctgcagtggttgctggagataagccagtctgtgaaagtgccaaacagcaccgccttttgttaagcaacaaagaaataattagttctcactgcctcccaggtccgcacacgggagacatatccaaagcctgcaaggatgatgccaggccagatgaagtggaattttgggtcctatcttttaaaacatttaaaatcaagaaacattttttattaaaattaattattctgtttgtttttttaaagactgattgcataatctttggaagatcctggaatcaagaaaatgaccacaagtattttctcactactgttctctgcataagtcctggtcccatgagttctaagggaatggaagctgctctcaaagtgaagaatccctcaagtgccatgaacaatggaaagaaagggaccctctcaccttctttg

SEQ ID NO: 181119 - DNA, 1494 bp, Homo Sapiens
  misc_feature (549)..(624): n is a, c, g, or t
  misc_feature (1148)..(1161): n is a, c, g, or t
ttggatttccatttcagacagaagttgtcaacaccatgtgtggctacaaaactatcgacaaggaggtaatgtctttgaaatgcctttccctggaaatgttgctcttcctggtccaccctggggtgatcggaggggtttattgaggtcggggtcctggccactgagattttcccacattcctggctgtgacccagagccaggactgctgtggttttccaccccagcacagaagggctcagggaaccaagaattcccccaggctgggagatgccgcctgtcagggtttgccgagcacctactgtgggctgttccacatgaagccaccacggcgcttcctggtacccgcagcgtgctgtgtgcccagccatgctcagcaccagcttgcctctgcccctggggccacctgggacccaggagtcctagaggatggtaaccccctctgggggttgctcctgggtcagcttcctgggcaacacccctggtctaggagagaagcaggggtggtgctgagaagggacctaaaaggaatagtgacctgacatgcagagnnnnnnnnnnnnnnnnnnnnnnnnnnnnnnnnnnnnnnnnnnnnnnnnnnnnnnnnnnnnnnnnnnnnnnnnnnnntatggggctagtgggtgattctgacacatgcttgagagccatagaccagcagtggttctcagcctctcagaaccaatggccatttttataacaaacagtggtaatgtcctatttattatccccaagtgaaattcacagataacctacctacatgcccaattccaatacaattaacataatgatctgagataaagtagaaatgaaatacagcaatttacagctgtttaacatagttcatcatgtaagtgcttaggcagtggggggtgcagaagacacaatgtagtcaggtgtctgcactgatgtgaggcatccctgaggctgtagtagctacagggcagctgatactgggcattgtgttggcgactcacataccatgggcatcatttttgccactggcatggtttttaaaaacggtgaacaattcttgataaagttctgaattaaataatgtgtaatcattccttaatttacctagtagtacttctggaaaattctttgtatattaaaaccaatgcagaaatgcnnnnnnnnnnnnnncccttaaaagacagacagggtctcactgttgcctaggctggcctcaaactcctaggcttaggcactcctcccaactgagcctccatagtagctgggactgcaggcactggccaccatgcccaactctgctttgttttttatatgtacctggagtggggctattggcttggataattataaataggcttttcatgtatggaaaacatccgtgaggcttttcatgcagggacatctgagaagcacacaggcagggcagttgtttgtggagtagattaccctgagctctgcagtccctcagccgccaacctcgtttgctggggcaaccaaaagtgc

SEQ ID NO: 181120 - DNA, 1068 bp, Homo Sapiens
acaaaaaagttgggttgaagaaaccccctgggccctctgtcatggccgggttccccgtccctctgcagaggctgggaagggtccccgggctggagccacgggggcttctctgggctgtgcctccggggccaacactggctgcttggggctgcccggggactccagagggctgcacggccaccctgccctggctagagcgcaccccaccggagcccacgtgggctgggcggctggagggatggtcccccggtgacactgggagaaaggccacttggatgggggcgtttctgttttgttccgctttgtgatgtcaccaatttggaaacagcgagggtgggtggggacttttacagaatattctcaggtgtgtacccgagaggcagagagagggacgtggccggcagctctgtgcgtggccttgtcccaagcacttgcgcccgcccccgagcgccgcccccggggagcgggaagccagcactcgcactttggccaggggcgcgtggaaggtggtggcaggcaccggcctgggcagcttccaggcctggctggccacgaccacggcccgagggggagcccgccaggccacgccgcactgagccacagccccgggggccgcctcccggggccccttgaggcactgaggcaccgagactggttctccccgagagactcggaaggtggggaacgaggggactgtgtttggggaggtggctttttcgtctgctgttgactgaacactacagcgccctgtggttccgggcttcgcacagctgtcccagggatggatcgcctgtgctgccttcgcccgccgccacaccgggaccctgcacggctgcttctggcctcgacagatgacaaaagaaacagccccaaaatacgacccactccaaccagcagttcccgcctgcctgcccgccactgtcaggcctgccctggcctccttcgtccgcagggctgtctgctggcttctgggggcagaagagcggggagccccgtggatggttcatgggagaccaggtcaggcagctacattttctggtgatcagccccatggggagacggggctgg

SEQ ID NO: 181121 - DNA, 1688 bp, Homo Sapiens
ttggcttgttcatgtattaaaagttctaataacttctgaacctgccacctggagtcgatgtagctatgaggggccgtgtctcaccaccactgcccaggccaggcatggtgttgggcgccaggcctgcctcacctgtcttggggtgcccagggtaaaggcaggagtagcgctgacacctgtaagcaaactgaagtgcgatgacagtctcgaagggtctgggacgtcagccatagcatccggccccagtcagagggttctgtgagagacaagttgattgttaaagaggttgcagagcttgagcttatttaccttgtacatgtcaagagtatttcctgatctaaaaagcttcattgctttctgctgactgtaaccccagacgagggttactactagggtggaaaatttcagctcgaaactggacttcctgatgcatacaatgtggtgccttccaaagtgaaatgcctgaccaggatctggtaccctaacatcagagataggggaaatatgtctaaagtttactgaggacattcgattgacagcactggctgggctcccacgagatcattaaaggatgttatttggagattaaattatttgtttactaatcttctgaattttgacgatccactgaatgttgaagctgcagaacatcatttgtaggacaaggaggacttcttgaataaagtcgatgactacatcaagtgttaatgccagatgataaaaggagaagattgcagcccatggactgtgtgttacagtttgtctctaatgtgaaaaagcagcaagaggcattgccttctctcccctgtcccctgactctccctctcattcccctggattgtcccagtcctgtgaccatgttgtcctgacgaagaccatcttcatgactgcccgttgtagatggagaattcaacataaagacagcaagaaaacgtatttaggtttctaaagagttatctgcttgtcttatgttttaggctgttcttgcattgctataaatgcccaagactgggtgatttataaagaaaagaggtttaattggcttatggtttggcaggctgtagaagcatggcactggcatctacttggcttctggggaggcctcagggagcttttactcatggtggaaggtgaagcaggagcaggcacatcatatggcgagagtggaaacgagagcgcaagggggacagccagatctcacgagaacttactgttgtgttgaaagcaccacgtcgtgagggatccaccccgatgacccaaatacctcccaccaggcctcacctccaacactggggattacatctcaacatgatatttggaagagacatctaaactatatcaccttaacatgtttacttttttgaactcgtactgtttaggctgttggtgatactcttgagaagttgtaatgaactcaaaattgaggctggagctttcttattcttttccccaacaaaattggttttctcccgaagtgatgctcatgatgtgttcagtgtaacttgcagattgggataagaaacctgctacaaattgtgattggatacaaatgcccttatcctctgtgaatgttggccctatctacatgttgtgaagtttcccagaaatgcataagtctttcactgtagacatttttattgaaatgcatattttatttaagtatattttggaccaataaattaaatttt

SEQ ID NO: 181122 - DNA, 833 bp, Homo Sapiens
ttgggacgcaggtgaggtggcaccggactcagccgcgccctgggccctggatgttccgtgagagtcagggagcgctgtgggggtctgggatcgaggggcatgggggcagcctggggctgtggtagagggtctggctgcggtgaggtctccccgcgtgcttgggagccgcgcgacgcctgcgcagggccccctcccctaagggctggccctggggccctgccgggggagcccgagcaggtttccggctcccaggatgggatccttgagggtggctgcgccccgaggcctgtcctgccctggaggaatctggctcgccagggctctccaggaccagccagcctcgagtgggcgtgggctgcacacaggcgccgtctcgtgcctgtccctagcatgcgggctttagctgcgaaccgtgttaacgacctgtgccaggagcccccgtcccaaggttgtctgcctcccctcttgtcagtcagaggggagtagaatgtaccttttctcggcctagtggggagtcgtgggttgggaccagctgctctgggctgggtggtagctcaggacccctgcggcgctgtaggctgagagctcccaggggaacagggctgcgacgagggagtgcctcggtccagctgggtctttctggttgccagtggactatgccccactctgagggcctcactctgtgccagttgccacagaagagtggggcttcaaaggatgagagcgtgatgacctcagcctcccactgtttgacattacaggtgcaactgacatgggtgaaccccagggatccatgcggattctattgacaggggctctgggctggtagcaaa

SEQ ID NO: 181123 - DNA, 1860 bp, Homo Sapiens
  misc_feature (83)..(93): n is a, c, g, or t
  misc_feature (145)..(194): n is a, c, g, or t
ttggcaaaattgggtaattcatttctaacagtgttagatcaaggaggtggttttaaaatacataaaaatttggctctgcgttnnnnnnnnnnngacgtccttggaaaatttgactactaactttaaacccaaatgtccttgttcnnnnnnnnnnnnnnnnnnnnnnnnnnnnnnnnnnnnnnnnnnnnnnnnnncatttctcttgggattttgggtcatttttttaacaactgcatcttttttactcattcattaaccccctttccaaaaatttggtgttgggaatataatataatcaatcaatccaaaatcctagacctaacacttgttgatttctaataatgaatttggttagccatattttgactttatttcagactaacaatgttaagattttttattttgcatgttaatgctttagcatttaaaatggaaaattgtgaacatgttgtaatttcaagaggtgagtttggcattacccccaaagtgtctatcttctcagttgcagagcatctcattttctctcttaaatgctcaaataaatgcaaagctcagcacatcttttctagtcacaaaaataattcttttatttgcagtttacgtatgatcttaatttcaaaacgatttctttgtttttggcttgatttttcacaatgttgcaaatatcaggctcccagggtttaatgtggaattgaagtctgcagccaggccttgcaaattgaaggtaactggggcaaatgccattgaaaccgctagtcttatttcctttctacttttctttggcactcttactgcctgtaaggagtagaactgttagggcacactgttgctatacagtttaactcccattttcatgttttgtctttcttttcccatttctggggcttacctcctgatacctgcttactttctggaagtagtgggcaagtaagatttggctcttggtttctaatttttaaatttctgaatactgccctagtctgaacttggcctttatagattaatctttgcttcacatttttagtgttgtatttaaactattttataatttaaaaatagattctaatctgaagatacttttcaagaaatattattaactgatgtcatcctcatcccagcagctcatctgttaggaatgaagttgagatgcttctattccatgtttttgtatttgggaaggattcaaagttgaaggtttattgtcgttgggtttttcagatggtgacatgtaaactcaggatagcaaaccctaatgttcacacagtgctctgcctctgcatctcagttgggatagttgctccttttgagtgttttaatcatcgtataactaatcgtagtgccaagaagttcataatgtgttatgtagctaatgtcactgaaaaacagtcctaccattttaggtaagaccaaacagagtctctaacccaaggacttgttacacctgacaacctatagtatatttgctttttctcacaaaatgaaaccaattttgccgaaagctagctgggataataggatcatcacaagttgcagtttctataactaaaattagattgaaatctcttctgacctagaacattttacttcaggcattcagcagatttcagaaagaattaccttattttaagttagtttctttgttagtttactgtgtgtctcttattcaataaacaagcagaatttgtgtcctgccctatccatgtcttaagatgagaagttggatccactgagttagtttcattggggcgggggaaagaactgtaattaaacttgtttaatccttattttgtattgtagctattttttggtaaaagcaacttaaaatctttaaaaatattatagtgactttatagacaatgg

SEQ ID NO: 181124 - DNA, 898 bp, Homo Sapiens
  misc_feature (142)..(150): n is a, c, g, or t
  misc_feature (771)..(780): n is a, c, g, or t
ttggcatgttgcacaatattaaaagttgctgatctaaaacgccagatgttaaatgaagtatggctgaatttcattaaaacgtttctcatttggaagtggtaaatagtgataaagactccttttgtacctttttatgttcacnnnnnnnnnatatagtttaatcttaaaaccaatacgatattgtcaaacgatacaatgtgtgacaatgttgtatcgtttttactgaatacttgatacttggagaaagcttattaagtcagtgcacatcctaacacagtggtccttattttagaagacttctgtaaataaggcaaggtttatcagtgcagatcatcagaattaaagttcaagcaggcgagcaagacagtatacttaaggggttgcaaagcttgggactggaaattgttttgttcttgaaacaaaatacttctttaaggttgcttttgctgtttgactgctgtctacattcgtaaaattctattttgtgaattggtagctaaatcccttactaccctgacaccgtggtatctactgtatttcttttcaaggtgcaatttgcttcagagttccagtcagctagattaagcaagaggctccagaagaaatgtttacttgaattttgcgcttcctttcttgatagtttcctatataaaatttgtcattgaacaagagcaaatgctgaagtattaatgaggcacaaatgactgtgccccattagcaagaattcaggaatcaatacagacagtattaaattaatagcttaagtgaagnnnnnnnnnncttagtgaaaatgtattagcacgattaaatggcaaaaggacttataaaggcaagggcattaactttcagtcctgcacaaaataaaaaattcctcacgactctcacttttaccagtgga

SEQ ID NO: 181125 - DNA, 1611 bp, Homo Sapiens
ttggctagtgtccagtctggacagaatgcacagagaccagcctcacctggaatgcagccagactcgatgtccctcagcacacacagctcctggccacagactgcccatagaactgtctgcacccaaaccccatggccttttcatgcacggagacaggcctctggatgtgcagccttgccaccccctgccccaatcctccctgagagctcctgcctcagtgccctgggctggtgagggagaagcctgtctgcacctgcctaattccagctcctccaggaagcaagggcttgtttgtcagagctgcagggttggccactcggtggggaggagtcagccaggattagagagcctgcccctaatccggcctgctgggttttacaaggatcagagctgctgataatgaacctcattaagggggagcaggagcctcaatccgatttggtcttctctttgacatcttcactctgctcagatggcctgggtgctatgtggagcaggtgggatgccaaggccactcctgctatggggcagctggggctggggagggatggcagtctccctgcatgtttccctcgacctctttagctgcagcgccttgctgggctcctgggttggactccctctctgtgcccctgctccaggcacccattggctccatcctcctggttgtgctctgcaccccctgctcccttgggctggccctggctgggggcctgagagacagacaggaacccacaatcaggaggcaaccctggcctgcaagaggaagacagaggctcccagggccggtgccctgtgtgcccactgcaccaaggccgctgaataagcctgcccttcaccccctaagggctccttgcccaatgccaagtgctggggatttctgtcagcaagccctgtggctccagtgacggtatttctaaagccaaacttagttacctagaattagcgccatgttggaaacactgtcgcagcagcccgggctgcacagtgtgtagcccagcctccaggtccacggagtggtgtggacctcccacctcacagctgcctctggcagccaagcctcttttcgcccggccccagcccctctggttgataaacgggtgggcctcctcagcagcgtggctgcctttcaccttgatttccccagggctctcggcaacatcgataaaccagcctcgcccaccagctgggccctcccccacccagtctgccaggctgggagctggagcttgctgagtcttgaatgcccttctagatggcttctctagaggctctcctggcaagagagggtcccaaggggagccctgcaaagcaaaggctccttgtctggggcgggatagagaatctcgcctctgtctggtgtgttacctactgggggcacaggaacaatttcctcaaggagacagtggcatggagctttgaaagacgagtaggtgttagcaaggaaataatgaggaacgggggttacgggcagaggagaaagcacatgccaagtcagcaaagaaaagtagaattcgaaaactttttaaaaatattactaaggattttcacaatgctgcactgggctagaaactgaagctaaaacagatacgtggtccctgctgctatggg

SEQ ID NO: 181126 - DNA, 798 bp, Homo Sapiens
ctttgtacaaaaaagttggctttccgcccgctccatgagacggtggatgcctgactggaagcccgagtgggatgcggctgacgcggaagcggctctgctcgtttcttatcgccctgtactgcctattctccctctacgctgcctaccacgtcttcttcgggcgccgccgccaggcgccggccgggtccccgcggggcctcaggaagggggcggcccccgcgcgggagagacgcggccgaggtaggactgggtcggcggcttccttccggctctgcgctcctggctggggctgctgggcggctggggccgggtccccgcacccggctctcaagtccgggattacccgcagggcctgagaagcgctttgccccctacagcctctcgagccagcccttggctcggaattggagaatggtcctcattcttacccagatctcacacgccgtccccgctcccgatcccagggggtgacaggcgcgcacgcctttcaaacacgtgttaaaatccaagacgtcgtctcaaatgccagagatttgcgggaatgctcctggaaggcctcaaaatcgccgcaaggtttaagacatccgtttccatgttgaaacaaagccctctctaatcctgcagtgaccataaggcagactttacctccaaattcgggtcccctgtcctgtgctttaacttgtgttaagatcagactcggctttctctttccctttattcagaaattttgcacgatagtatctaagactggtgaacactacactctgaagtcagttttttgtgcatagggttacctgt

SEQ ID NO: 181127 - DNA, 1018 bp, Homo Sapiens
cccgctttccgaccccgcctggggtattcagaccggggcagacaagggctttctgcccctccttagcggccgcctctctaggctggagggcggcgccccatatgacacagaaggcggctagggatacgccctgtaccatgccggccagtctggattgccctaacgccaggccccgactcgctctggccagcgggcatgcggcgagtttgcccccgcagcgcagccgcccacaactcggtcttccagaggagcgaacgttcggactgcttggtagtttactagggcaaagtaccaccccaccccgagcgagcaagcggacctcaggaaaggggctccttctgtgtaaagtgatcggcaggccttgcagtggatcttcggtgtccatagttatataccaatcactattttgtctacatcatttggactgtgcagaatgagatgccaataatatatcacatacagtaaaagggctattttcacaaaaggtcaaaactgggatatataacctctttcttttgattagtcagactgacttcaaagggggcttagggttgcttattaaagaaaaatgcctccccgtgggttttcatttgagccacttataagtgggctagtttctccaacaccaattgagctggaaactagagtaattagaacacaacatattcccgacctgaacaggatactgaaataagttaaaagcctcattacttaccagccttctctcagaaccctaacaccccttgcaagggatttctaactaggagtcggtagataaaatttagaatgtgtgagcattatgtaatacacatgtaaaacattctgagatgggatccacgggcttttgggggctgtcaaaaggcccacggcacaaaaatagttaatctgtatacttgagggaagagagaaccatcactggaagtattaagctctaagctcattcaggcttattttctgggaacttgtaacaaaatgaagtttatggtcctagccagactactccagataccatacccaa

SEQ ID NO: 181128 - DNA, 1516 bp, Homo Sapiens
acaaaaaagttggcttagtgattttgtagtgaagctagtatttggcaattgttataggctaccctttggctagaatatttttagtccatatttcagttatatattgctatgtaccccaaaactcagtggcttaaaacaagtgccatttatgtatgattctgtgggttgactgggtgtcccttctgctggtcttacctgggctcactcatgtagctgtatctggctggtagaactgcaacctgggcccagctgcactcttctttctgcagtggcttttcatcccaggatttttatggcattgcagtttcaaggtgttcaagagaacaagccccagtgtacaagcccttctgaagcttctatttgtgttacatttgctgatgttccgttggccaaagcaattcacatggccaagtccaatgtcgacttggaaggggaatacataaaggcacgaatatgaaaaggcatgtgattcactgggtgccattactgtaataatttaccatagtttccaatcaatagaattatgaaagactctcctaaactttacagcactggaaaacagggcccacagactataatacaagagggagtgtattataataatggccttaatgaataacattctctatattcacacttatttgcaatataatactgccattcttcctgttttggttgggctgctataacaaaatatcataatatcattataaacaatggaaatgtttttctcacagttctggagactggaaagttcaagaccaaggtgccagcagattcagtgtttgacaaaatcctacttcctggttcatagatggtacctttgggctatgtcctcacattttggaaggcgtgaattcactctctggagtctcttttataaggcactaatctcaaagagggcatgatcttcaagaattaataaccctctcaagtctctacaatctaatgcaattaccttgggaattaatatttcaacatatctatttgatgggacacaaacactgagaacagagcactttccattgagtggtagatactatttctccaccttgaatcctagttaacattctaacttgctttaaccagtagaatgtggctgacatgatgttttggaagctctggagcctaagcctcaagatgccttgaagcctctgccttcactttcttggaacttagatgccatataaaggtgggctaatctactgaatgatgaggaaccatgtgaagagagaggtcccagacttccaaccattcccatcagggccttagacacatgcacgatgtcaacacagactctccagctccagctgactcaccagatgaatacaaccacaagagcaagcccgtgtgagaccacccagcccatcccagagatttgtgagaaatgatgttgaggtgtttggttacttagcgataggataactggtatggggggtaaatattaacctcctaattcattccttggtatggaacccatatgaagcaagcattaatttttcctcttttacaaaaa

SEQ ID NO: 181129 - DNA, 950 bp, Homo Sapiens
ttgggtaaaaatcaaaattggctttggatctttgtaatacacctgtacctgaaaaagtaaacaacattcttcaattactagccttcagcttgaaaagacatgctggagaagaaggaagggggaacccataggtgtggcgtggagccaagatgtactattcaactatgtgtttctgtttataaaaaacacataccatggaaccatggtgcttttgttcttagtttttgccgttagatcccttcaaactggaagttccttacaatatctttctcaggaaatattttgggaaatggggtaagagatggcaagtgtgagacgggctgtgtcagaggttgctacgtcatggatacagtgcagttccaagtgccataagtgtatgtacatatagttaataatgacactgttcatcaccattctaaaatactgttcttccaaccctatcttcaatgaccagtccagaaggggttaagctggattcatttgctctggcatgtgcattcccagcagggtgaagaaaggtttaaattaaagaatttattttctctctcccccttcctctttctcccagtctttgcataggagaatgttagacattcagaaattactgtttctgttttaaattgagtattgatttttttatattgactttgtattgagttctttttgaaagaataacaaaataaaatgcaggatctttgtaaagcctttgcactttcaacctctttatagcttgagttacttttgcagtgggaacaatgtaaatgacatttaaaagatttaaggtttcagaaagctgcatcccacaattgaacacaatgcatttttatttcaattcttggaactggtagctattctttttaaaaagggtaaacttcgctctaagctggtagaatgtatgttcacattatagtagacaggatttcatttgccttatatgtttatagattttt

SEQ ID NO: 181130 - DNA, 1726 bp, Homo Sapiens
  misc_feature (217)..(246): n is a, c, g, or t
ttggagaaaatctgtctttttattgtttcttgtctgtttttgcagtcttacaaaaaaaatgttgactaaggaattctgagacaggctggcttggagttagtgtatgaggtggagtcgggcagggagaaggtgcaggtggatctcaagggtgtgtgctgtgtttgttttgcagtgttttattgtccgctttggagaggagatttctcatcaaaagtcnnnnnnnnnnnnnnnnnnnnnnnnnnnnnnggacctcttcaacctgattttggcgtctcaccctccctcctcccgtaattgacatgcctgctgtcaggaactcttgaggccctcggagagcagttagggaccgcaggctgccgcggggcaggggtgcagtgggtgttaccaggcaaagcactgcgcgcttcttccccaggaggtgggcaggcagctgagagcttggaagcagaggctttgagaccctagcaggacaattgggagtcccaggattcaaggtggaagatgcgtttctggtcccttgggagaggactgtgaaccgagaggtggttactgtagtgtttgttgccttgctgcctttgcactcagtccattttctcagcactcaatgctcctgtgcggattggcactccgtctgtatgaatgcctgtgcttaaaaccaggagcggggctgtccttgccacgtgccaagactagctcagaaaagccggcaggccagaaggacccaccctgaggtgccaaggagcaggtgactctcccaaccggacccagaaccttcacggccagaaagtagagtctgcgctgtgaccttctgttgggcgcgtgtctgttggtcagaagtgaagcagcgtgcgtggggccgagtcccaccagaaggcaggtggcctccgtgagctggtgctgccccaggctccatgctgctgtgccctgaggttcccaggatgccttctcgcctctcactccgcagcacttgggcggtagccagtggccatgtgctcccaaccccaatgcgcagggcagtctgtgttcgtgggcacttcggctggaccccatcacgatggacgatgttccctttggactctagggcttcgaaggtgtgcaccttggttctcccttctcctccccagagttccccggatgccataactggctggcgtcccagaacacagttgttcacccccccaccagctggctggccgtctgcctgagcccatggatgctttctcaatcctaggctggttactgtgtaagcgttttggagtacggggccttgagcgggtgggagctgtgtgttgaagtacagagggaggttggggtgggtcagagccgagttaagagattttctttgttgctggaccccttcttgaaggtagacgtcccccacccggagagacgtcgcgctgtggcctgaagtggcgcaagcttgctttgtaaatatctgtggtcccgatgtagtgcccagaacgtttgtgcgaggcagctctgcgcccgggttccagcccgagcctcgccgggtcgcgtcttcggagtgcttgtgacagtccttgcccagtatctagtccccgtcgccccgtatctagtccccgtcgccccgtgcaggagacgtaggtaggacgtcgtgtcagctgtgcactgacggccagtctccgagctgtgcgtttgtatcgccactgtatttgtgtactttaacaatcgtgtaaataataaattcataatgacttctaccttt

SEQ ID NO: 181131 - DNA, 1378 bp, Homo Sapiens
  misc_feature (1217)..(1225): n is a, c, g, or t
actttgtacaaaaaagttggcgcataagctacccatgcctatgatttatttccttcatgaatttgtcactggatcagcagctgtggaaataaagcttgtgagccctctgctggccacagtgaggaaagtagcacaaataggatacagttgtatgtagtcattggcaacaattgcatacaattttactaccaagagaaggtatagtatggaaagtccaaatgacttccttgattggatgttaacagctgactggtgtgagacttgaggtttcatctagtccttcaaaactatatggttgcctagattctctctggaaactgactttgtcaaataaatagcagattgtagtgtctggtttggtttggacagtagtgctttctatcatattgttgtgtgcaatggtaatttgttctactggccaaagcctctttcagcagtgccttgccatcatgcttaaaagtttggctagtatatcttgctggatggagccttgaactccggcaaggattgaaccatctgacttccaaatttgccttcccctctggacctcactattaacaagcaaacctttcagggccctcttagctctcagaagctatgtatgggctttcccagattttaaagctgctgcctcgagaactactcatttctctcctggtcagcagacagaaatagccatactaatctcatagggctcaaatgcatcttcaggcagcagggaaccaagcagcgtggcacaggccttcttgactggaggaagagcttgctggcatggtgggcagtattccaggagaggccatgtccgtgttcacttcttggcacatttcagttccgttttcctcttgtttaaaactgcctctttagatgtggatgccttaatgctgtaacacatttgaaaacattggcaatacttaagttgctgccatgattacagatggaattattggctaccaaagagacgcaattgatgatgagaagcatgattcttgcttccatataaccaaagttaatcttaattgcaatttgactccgtttccttggtagggatagactttcttcagattccaagtgctctcttaaatggcaaattaagttaaagaatactactgctccattcccctcacttattctccagttaattgcttgtcagttccatttcaagaaagcagtgatgttccaggtttgattcagttttcctgtgcacactattgccaaannnnnnnnnagcaaagattctgcactggaacgtagacagttggaaacagtactacctacctagaggttatgtgttttctctttctccccgctttcactctttctttcccaattcaaaacagccaagtgagccctgttctggtattttgatcattagagaaaa

SEQ ID NO: 181132 - DNA, 170 bp, Homo Sapiens
actttgtacaaaaaagttggtacaggtgtgagccaccgcatgcagccataaaatcagtttactggactaaaccactgttaagaaagctcacagtgaaataacagacatggtgagatattatttttgatacttttatgtatggtggagattgggtcatgatgtaaaatgca

SEQ ID NO: 181133 - DNA, 1944 bp, Homo Sapiens
  misc_feature (208)..(225): n is a, c, g, or t
ttgggtttaagacatgacctattttgttgaaaaatatatgtagaacccaagcaatatctgaatctagctctccctggtgttttgacttggttccaaatacaataatgtttatattttctattagtttgtaaatacggactctggatggtgcatttgtgtcttcattccataagatattcccctcccctcaaccccaccccctctctannnnnnnnnnnnnnnnnngcaaaggtgactttctggcaacgtctttgtctctgtttggtggtgggctgctcgggctcctggacctggacttgcccccaaattttgtgtatgcagtgaaggcttcaacatctcatgaaggacactttatttctacagcagaggacacgaaaaacagataaaacaagccagtctcccattttgtacctaatcaaacaacacacatgctaagcatataaagacaagagggtggaaaatatctgaacaagaaggctctaaaggaagtcacttagaaacttaagtttaatgtgaaatgttttgcaaagatgcttaaaatgaactttgtgttaagaaaaccactgtgaaactaaattgtcctattattgttggcttacctgtgtgttcagcaatctcagccccaaataatgttgtaatttaaagaaaatggaaaattctgctctaatgaatgtaacaatggcttgctgtgaagtttacattgttgtacagaagcatgtttcgcatgtaggtaaactggtggtggtactagaaatacaatgttatttaattttaacaaattccctttattcatttctgaaattacaggacacagtttaactcataaacctttctagaccaatttatttttcactttaatgttaataacagttgtggagtatatgtgtgtgtgagcatgtgagtatgtgttgtattttaaaacaattgattttctggggcaaaattctacagtttttaatcccttctgtttaggaagttcttcctgtttggcaatataggcttaaaaatatgtttttaggacattggtacaattcagctgttggaaaattaatatattgagggttttttggtactaattctgtgcaataactaaaagagcacctcactggatatggatgttgaagatggattccctaggtgattttaatttcttccggtctgtgctgtgcacagtctacatggcaatgcggttccaccacatcggtttcgtggcttcgtttaaaactcagatggctagattagttaggttttcaaatcactaggatgtaaacagtaagcagatttctgacacacaaattatgttagagtgactgcttttttcagacagcagatatcttatagagagctttgaactgcatttatttctaaagcaaccgaaattcagtgctacaaatagaggattataacttcaggagaagaataagcagaaggagcagatgaactctcagggccatagtcttcctttgatcttgtaaaacttccattgacatctggagttcccagtctggtgagaaaatagactataaactgaatggaacaaagatccaatccaatattttggtggagacttctttaaaaccataccatacagggactctcctgtcatctgaaaaactgatgtaaggtacagaactattctttatcaaatgtttttaagtggctgttagggggctttaaaaatattacttgcttgtgtggaaatgcaaataatgttattttctttatctaaattaagaaatctcttgttattgtgctatttataatttttttctggttcttgtattttaaaaaatctaatattaatggtattgaagtttccctttctccctctacgtcttaacagtgaaattcacatggagtaatttttaaaagatatcagatacatttggctattcacgaaaattatgatttaaagccacttttaaaatacgagaaggaaaatag

SEQ ID NO: 181134 - DNA, 1836 bp, Homo Sapiens
  misc_feature (134)..(144): n is a, c, g, or t
  misc_feature (1470)..(1479): n is a, c, g, or t
ttgggagaaaaagaaaagtcagtgatataaatagatcatttcatagaaattagggtagatttttatttcaactactactggagaatttaataaaaggcattatttgaaaagtttttctaacatagatttagggnnnnnnnnnnnagagtggacacactacatttaaaagcaattattttgctattcagattttttattatctgaaaatgaaattatctgttttacttttcaaagctttgtgaaacaaacttgaagttatagggaggtaagccatctccaactctgcaggtcaaacgaaagtttgggaaatacttttgacatcccacaatacagaatgtcttaacatgagaattgaatttcatgatgtgtggttccatttaatagcggacaccaccccaatctcatgttttcctgttaccctaaaacagtggaaggaaactgggtgtttggtagacttctaaatcatggtctctgacaatttgaatctgagattctcacctccatttactaaagaatcgtgacttaattcaaattgcacagtaatcagtaaagtgaatacgtttttaaaatggaattttctcccttcagcaagcactcattaaggagtgaggctgagtattttaagatagagtgagatctgtgagtgattgaaaggtgatatttaaaaacttggatttcattccagtgtcaggtttgggttttaagttcctttggtccagggaagggtccaagcagccacagttgccctaaatctccatcattaagtcttccagcaaggttaagtgcagtatggaaggagaagggggaagaggacggtaacggccccacactccaggctgagaaagagtaattaggaggcctgaggaggggccgaggaaaggctgttggggtgtgctggggttggtacccgagcgccttcccctcacctcaaccagagaagagcatccggttgctttttaaagcttttagcctgccctagcaaggacaaagcatgttagattagagatgcttctgctgatcgcaggggttcttatttgaaaacatctatgatgggggtggggtgggaggagacaggttgtggttatgcaggaaaatcttgtcctaaaaatatatgagtttgggggtaaggggtgggatagccaagcaaaatcagtaattattttaaaatgaacatatgtatttttattaacttttagttaaatacagattttacaacgaggtcagcataagcctaaatctatatagagggctaactcaggcattgtcttgtttatttgtagactggattaaaaacaacctgtcctgttttgtcagttcccagcttcttcgtttagaataaattagaccaaaagaagaaacgtgcttgtctctgtatacccgcagaatgaagttactgttgttaaaactggattttttcattttactaggttccgaagagtccagatgcttggtagatgttcaatacgtgannnnnnnnnnaattgaatgtgttcatttaaaatcctccttaacatttctagaaagacttctttcaataaataatggaatcttagaggaaaagtggttttttaaaagctagggaactcctccactaaaagtaaccattggaaacctcgaatgagggctaaagttttaatcataagagaaaaggcagcataatgaaatgtgtacacatacatagtcagtggtccatttgaggaagccagtggcgtctgataaagaaatgttaagagtagtgaggttgaggaaggaaattgtggggatttgaaatattctctttatgttgtttctcttctgagtcatggtaaaaacaataaattatcatctctaggtggc

SEQ ID NO: 181135 - DNA, 228 bp, Homo Sapiens
agttgactaaaaagaagataaaagaataatctaatgcaaatgttaagtagctgattagaaacagcttaggagaaaataagtgatttgaaatatagatccgaaataattactcagaatatggaacagagaaggaagatggaaaaacagagaggttagacacatgcatgcttaataaaggaagaagatccaatatttattacatgggagtttaggataaaagatgataga

SEQ ID NO: 181136 - DNA, 816 bp, Homo Sapiens
tgttaaaaaatattgtgaggtaagttggtcagttaggttgggcagcttttatttcattgctaagggatttggacttgatggtgtaataaagcattaattgaacaaatatttatggagcctgtactatgtaccagatgcagactgtgctagcggttggggatacagtgatgacttggtctgcctctaggtggcagggagccattttgggttttcgaacagaaaagtgacataatgaatgctgagttcttaggaagattaatccaggagtagtctccaggatgtactggaaggagagaagctgaaagcagggaggctgctgtgtttgcagttggctgcccagtgctacctctgcagagacaatcaatgtcctgaaggtagctggtatgtctgtgtgcactgacacgagccttcctaccaagccccaggggctccatgctggagaatgcacgtagggctagggtgagcactaacttcacttcaggagagcaaggaacagtgtggctcttccatttttcagttctgtaagcacatcacccttttctcctccccttgagctgtgttctctgacagctgtttgttggtaaagccagcagcccctaaagcacgtcccagccttgtctcctctgtgctttcccccaccactgctgctgcacgcctcatttgctgggccactttagtggtggaaccattagaggctgagtgactttaaggagattgagtctgtctcgaccccgagagagagtgggatggatgggatgcatcgtctcatttagaaagtgttgcctctgactctaacacactcttctctctttcttt

SEQ ID NO: 181137 - DNA, 1633 bp, Homo Sapiens
ttgggcaagttagaggaagaaggtcttggggactacgggcgccaccgagaacccatacgaggcagccgccgacggcgggtcgccgaggcggggccagaacggcgccaaggccaaccagaacggcggcaagaactagggggacgcggggcaggtgctgtgggagttggctggacctgtgggatcgacgtctgcgccgtccaggagccgcccaggggagagagcggagactcgggaggaggatgtgcgctccgacccgggcaaggcttcccatccctcccttcctcttcactccttccctccacctgggctcggagtcaggatctgaccgcgggctctgcccaggaagaccgagttccttgagagcgacacctaagcgccggggaagacagggatcgaagagacgacagccctttgataagagggtttttagactaacttccagctgtgacgagtgcatggggcctgcgccctgagaggttgcctttccttttcctctcccagcctgggggtttgtggtgatgttaagttctgttaggaccaaggtggatctcagtaaggaggtagagtagatttgtgaacagctgtcggaggtagaatctttgcagacccagagtgggtgggtgtagacactctgccatgggtggtagctttatttgtaatcctcccagtgaaagctttgggaaatccagccctcccaaactcttgcctttcttgtaagactttctaagcgcatggctttgtcgtaagacttctcgtgggccatgtgtctcaccctaccgttcgtctcaccaatgaaccagagctgggataccagcaaaaaggacccaaaagactgtttcaccacaattgaagaggtcgtggaccatcccccaaaatgaatcccaacactggaagaccaagagggttgacgtttgctatcttgaaagctgcagcccccgtagagaagatcctagagcagaaggagcacaggctgggctgccatagcatggacccccaaaaagccactgtcatgaagaaatatcctgtgaagaaaatctttgcagggcacctgaactcccaaagccactgaggagaaggtaagggagtactttggtgagtttggggaggtgaatttctccccaggatatggtttatgctccccaccagccaccagtggatgcttttttctgttttccttggctggtggagttgtcagtggagctgctctcacctcctttcttgcctttggagggccgccttttctgagttccctttagggcctgagccaggggaaggcattggccctgagctttgcctgtgtttccagatggaggccattgaactttcagtggatccaaagtctaacaaaagacaatgtcttgttttcgtcaccccccaaagaagaggaacctgtgagaaatattctggagaaatttaacaccatcagtggaagcaaggtgaggagtctctacctccatgcgcctcccctcctgcctctggagaggtagccctttggttaatggcaacccaatagggtaaccaaccatcccattttagcattgagagcattgtgtcctgagagacccttccctggaatgtaaataatcctggtttagaaacaaagtgtggaagttggaggaaatgcacaaaaccc

SEQ ID NO: 181138 - DNA, 1014 bp, Homo Sapiens
  misc_feature (444)..(457): n is a, c, g, or t
gaaacctccctttaccaactccaccctaaggcgagcaagcaactccttttctgggcccttaacgcatccctccagcggagtacctttgattgatcatgactcagctctttacacagtcagagagctctgagggctgggcaggggtcctcaccatctcagtgcccagcacctgacgctgggcagcggctcgccaatgtccgctgggagaacgtgagggagactgggatggtttggacatttgtccccgccagatctcatgttgagtcgtaatccccagtgtcggaggtggggcctggtgggaggtggttgggtcatggggtggatatctcatgaatggtctggcaccataccctgggtgctgtcctcacgacagtgagtgagttctcctgagatctggctgttcaaaaatgtgtgtgtggcaccttcccttccaccctcttgcannnnnnnnnnnnnngcctgctcacactttgccttccgccatgagtaaaaggtccctgaggcctccccagaagcccagcagatgctggcgtcatgcttgggagcctgccaaaccgtgagccaattacacctggtttctttatgagtgacccggcctgaggcattcctttagagcaatgcaagaacagcctaacacagagaccggatcagaagagctgaggcccggcccttctctccctgggaccccgattctgacccaggtcacatggggaagatccgaaaaatgagagatgatattctggaaattttaaagccaagaggacatttctggagaatatgtaataaaactattggttcaataaaaggaaatatgcactatttatatttctatgtaagcagcctttatatacagaaagtcactatatatatgaatatgtatatacacaaacaccatatatttctgattacatacttatatatttaaatatatatgaataaaaattgtaaatagtttatattaaactcattagatgagttatatataaactaaattataattcattagatgagttc

SEQ ID NO: 181139 - DNA, 2065 bp, Homo Sapiens
  misc_feature (763)..(816): n is a, c, g, or t
ttggggaattctggttgagcacagctggaaggaataggcaattaggggaacaatatttctttagatagagtggttatctattcctgggagacagtattggaaatgagtcctgaataaagagagggtatcagttatgggaagatttggggaaaacattcctggcagtaggactagctattgcaaaggccctgaggtaagaacaaggttggcagtgtttacagactagtggggcctgaattactggaggagagtaaacaagggaaagtaatatgacagtaaggccagagagatagccaggggccagatcatgttgggcctaattgcactgggcaggcagccatgaagaactttaagcaaaagagggacgtgatctgattagaaaaagctaactcggcctcccaaagtgctgcaactacgggcgtgagccaccgtgcccggccctagttttataggctaatttttgctttcagtttgtctctggtactaaaaatattagaatgaacacccttatacatagcaacctttgtttacatatataactatttcccaaggttaaatcctataaattgtattataagtcacaggatatgaatgtttttcaggcttgtgatgcttattaacaattatccctcccagaaaacttgtaccattttaattcccttaacggtaatttaggaaatgatacatttcaccacatttggaacaacagtaaataccagcttttaaaatttctgccagtctgataagtaaagcattttatctnnnnnnnnnnnnnnnnnnnnnnnnnnnnnnnnnnnnnnnnnnnnnnnnnnnnnngtgtgtgaattgcctgttcattatctttgcccaaattcatttacttttctcatttatttgtaagagctatttgtacattagggcattagttcttctcttgtcatatatgttaaaattgcaattttcctagtgtaccatttgccttgtaattttgcttagtatagtttctggcagaatttttaaaataaaagtttgaatataaatgtagtcaaatctttctcctgtgtttgttgttcattctacgccacttatctttagaaaatcttccccatttaaagatcagaataaccaactatattttactgtaattttacactttattaaacattaagtagagtgtaggctttaagtttcttcctcatggttatgaaaattttctaatcaacattagatattttcttgtttagcacctctagctttactatcaaaattattggcatttattttaaagattccgattgattcctcacttcaggttttacagacatttcaccagaggaattgaggcttgaataccataacttcttaaccagcaataacttacagagttatctaaattctgtccaacgtttaataaatcaatggaggaacagggtaaatgaactgaaaagtctaaatatatcaactaaagtagctttgctctctgatgtaaaggatggagtaaatcaagcagcacctgcatttggatttggcagcagtcaagcagcaacatttatgtcgccaggctttccagtcaataacagcagcagtgataatgctcagaactttagttttaaaacaaactctggatttgctgctgcctcttctggaagccctgctggttttgggagttccccagcatttggagctgcagcctctaccagttcaggtatctctacttctgctccagcttttggatttgggaagcctgaagtcacatcggctgcatcattttcattcaaaagccctgcagcttccagttttggatcacctggattttcaggacttccagcttccttggcaacaggtcctgtcagagctccagtggccccagcctttggaggtggcagttctgtggctggttttggtagtccgggctcacattctcacactgctttttctaagccatcccagtgacacttttgggaaatagcagcatatccacttctctgtcagcctcaagcagcatcattgcaacagataatgtgttattcacacccagagataaactatcagtagaagaactggaacaatttcaatccaagaattt

SEQ ID NO: 181140 - DNA, 1563 bp, Homo Sapiens
  misc_feature (824)..(1126): n is a, c, g, or t
tcaggcataggggagccccaggaggttgttccctcatacagcccctcaggtcattccctccacacacttgagcatatggctgaaccaggaaggttcttggtgccagggcagctggactcaccctgggtgatggtgaggtgggtccccttgatggactgccacgacagcctacttgatctgtatgtccagctggacttggcagaagtacacagactggtcctccttccgcaggtttgagatcctgaggaagcctccctgaggaagtgaaggctcagagcaacagtgggcaccccgcacaaagtcctgggcccgtctctaacaggggatctgcaggtctttgcccgggggtggtcactggagctttggtgacccacagggctccctccataggaggctctgcccatcctctccagagtaaggtggcatcagctgaggggccgtggggacaggaaggcaggatttcaccagaggaagtgataacaatcttcttgagacagaagcaggcagggacaggcctcccttctcttgtcagtctcttccctggtcccagtaggctcctctgtgcttcccagggccagtcaggccgatccaccctccttcccttcacaggtctgaggaaacaggctccccatgctcaggaaacccctccgtctgagccaggccctatacacctcattctccttgttcaacccacagggaaactgaggcaccggggctttggactgaactggtcccacctgcaaaggtgggccgaaaagaggacaagggaccccctggctgtttgggcaaggcctcaagagggtggcccaccctgcctgaggacnnnnnnnnnnnnnnnnnnnnnnnnnnnnnnnnnnnnnnnnnnnnnnnnnnnnnnnnnnnnnnnnnnnnnnnnnnnnnnnnnnnnnnnnnnnnnnnnnnnnnnnnnnnnnnnnnnnnnnnnnnnnnnnnnnnnnnnnnnnnnnnnnnnnnnnnnnnnnnnnnnnnnnnnnnnnnnnnnnnnnnnnnnnnnnnnnnnnnnnnnnnnnnnnnnnnnnnnnnnnnnnnnnnnnnnnnnnnnnnnnnnnnnnnnnnnnnnnnnnnnnnnnnnnnnnnnnnnnnnnnnnnnnnnnnnnnnnnnnnnnnnctgaggactgactcttcgttccattcctgccttgcccgtggcccatgggacccagctagaaggtcacctgcttaccaggctgcccaaggagggggccacatagaacttttagccaacagcctctgggtagctctggagggtacatactccccaggggcctcaggcccggtaccgccacgtgcattctccttagatgcaaggtgcgtgtttatgtcactttccgggctctggacccagctgaacccccatgggagattccttttgtgtcaggatttctgctctggaatggtgtgagccctcccggatggttcatcctccctcccccaacagcagtgacagggcctggggctaagcctggggctgtggctctctctcagaggggggttttgggaggcaccggccctggaggagggcccaacttttttgtacaaagttgg

SEQ ID NO: 181141 - DNA, 1326 bp, Homo Sapiens
  misc_feature (1113)..(1161): n is a, c, g, or t
  misc_feature (1168)..(1198): n is a, c, g, or t
tccaacaacagaaaaccaaacaccatctttctgggactagatggggaaagaaacgggccactccccatgtccccagggcaggagggagaaatacattcatggagggaggcagtggcgaagccttgccctaatactgcactctgagcaatgaggtcaatgggaggagctggatgagaaacccaaaagacaaaactgttacaaaacccaaaatgggcggagacgaacccaagtaggggaccgggaataagaagtgggtgagcaatagaaggggcagcctcctctgacccaggagccgcacacttctcttcaccccaaccttacccaacggtaaaaagcgcatcatatcagacccggaaggccacctgctcctctcccatttggtcagcggaagggtcaggtgcagagctgggtggtccacatcttacgagctggctacaggttggggccccgggcggcagcccctctactccaaccctaagcccaaagccacccactccttgcctttgaggcccctcctcctgcccccttcactggagaaacagctcagccttctctctgcagcctctggagcaatcatccacccccgccgctcacaggggtgaggcagctcaggcaggggtgaggcgggggcttgtggcccaaagaatacattcacgtggcaaggcagagagctggggctttcaggttcaaacccagggtgtcccccaaaatggcagcagtgggagacgcccctcaccagagccagagtcctgctgccccaccctgccagccagagaggttggcacggcttggcccctcccgtctactcggccagcacaagatggcagccagagagctggggccgctcgtccaatttgtgcaactgtcccccaaagcagcgaagccaaggggctactttggccccaccccggacacctcagccagcctcagtgacaggagctgctcacaacaggtttggcgggtggggctcagacaggcctcctgtgcaaactgctggcccccagcttccagttaccccatggcccgccttttggggggtaagtatggccttgggggccaggcaggacaggtccacggggcctgtgtccccactgccccaaaataacagtgtgnnnnnnnnnnnnnnnnnnnnnnnnnnnnnnnnnnnnnnnnnnnnnnnnntttcttnnnnnnnnnnnnnnnnnnnnnnnnnnnnnnncctctgtggaccttccattgtcacacccactatcctcacagcaggaaggggtgtttagagtctagtttttaacaatatttttgcctctctttaatgttttcttcagtcgccaacttttttgtacaaag

SEQ ID NO: 181142 - DNA, 1546 bp, Homo Sapiens
  misc_feature (438)..(447): n is a, c, g, or t
ttgggtagcttagtaagttgaaactattaatttttctaaagaatttgatttgaattccttgagaattgtaattatccacacttcctccagctataattagcagaattaaaaatgattgtactgtacaatgagttgttgaaattgtaagccttagtaaccatctttagctttattgtagtcatgtttagaaaaaattatttttacatatgcctttatttttatgcccactttttgtggataagattctttagataaaatctaaaaattttaagtgactttctccaggtcatgaagattcaatgggtagaattgaatcagaattgaaatgttccagattcatattcttgtgtgtgtttgataaaattcatggcttccaaagtaactgaacacttcctttgggcccttggagggaaaatccatatttttactaattacacnnnnnnnnnnagacatctggcagttctttgaacttaaacatattctcatggccatagttccaaattaagcccgacgcagttgctaaaaatcttgctgcactgttgaatactaataatgcaacatttattggatgtttttgcattttgatgaccttcatgattcatttataagtctttgtaagtgcttaagtgaccccctcactagtgaaaataataaatgttctatatcatttattattatttgtgtattctctacatgatatatttttttaaggaagagtaactccacatgtcagaatgagtgatattatcctagggcaaagcgcaaatagggcagtttgtttctactctgcaaatatggcatgtataggaacaaaactcttttggagtggctggtcattgttttgccctcttttggtacctgagtacctttctggggttttgtaaatcgtgtgtcatttgtaagaatttcacgttaactctgcgttacttggtgttcacctgtggtatccttgactgaccataatgatttagtttgggtatgatgtgtctgctttgaaatgccttactggagtatgtcagatcctgctttaaagcattccatatatctgctgggacaataagttgcttctccttggaaatatgctctagattcagaagcaaaaccgattttgctttcaccattaaggttgcattttaatgcagttattgttttaaattagagaataaaatgtaaaaccaagggaggctttagaaccctttattgaatggcatggcaaacttttaaaactgcttttgctatttcactagaactatctttgataaaggatatagctaaaaaatgtcagcccaaactgtgtgtaattagggttgtttattaaaattttctctaaatgtcatacagaggcttaagatctgtgtatgctgttgggtcggagtgccagtcactgctttggaagtctgtgttctggggctgcagaaatgacaaacgtgtcatggggattaaaaccaatcaactgtgaattgtgaatttgaaactactctttcggttttattttctttagcatatgagtatagaaattctgaaaccttatttaaatttatactgc

SEQ ID NO: 181143 - DNA, 830 bp, Homo Sapiens
ttggatcaaatatattcaaatcatattcttaaactcatcgagccatttgaacaaaaattatttttgtttagcttcatgagtatctttggaaaataatttgttgaatatatatgattatgagatattttctgataaacactgaattttgaaacctgaactcactatataattgcagtgttttgaaggcctgcatccattagcattgcattatattcacactgccttttttagtgaaccaagacccatcttctggacgacagatttatcttaagatgaaaggttgtataacatgcccacaaggcataaaaatgttaatgatgcaagtaagttctaagagtttaatgaccaagcaaaactctaccaccagatgctgactgcttgttttgcagtgttcaggaaacaccattttcctggctcttaacgcttttgtattggtatggaaaagggctggcagctatagaacaggagatccatagcattttgaacagaagtatctggaatctcactgactcgtgtgttatcaaagctatatcaggcctgggtgactgaattcttgcagaaagcagtgtagtggccaccatccaaatcaccaaaatggttctatgggagaaaggaatgtcaaacttagtattcacatatgaacactaactactggaacagaaatgatagggccaagagatgctttttaaattgtcccttattctaaattaaaaggaagtgataattttgttgttaaatcatgcatatagccctgactgctatattgcttctcatttcattgtaactacttatatgttgtgcccattgactatcatctgtgaataaagaaa

SEQ ID NO: 181144 - DNA, 2077 bp, Homo Sapiens
  misc_feature (120)..(144): n is a, c, g, or t
  misc_feature (1801)..(1816): n is a, c, g, or t
ttggaaagatttattcctttgaggccaggaagctcccaggcatatatgcttctaggttaggattgtcctgactcactaaagatgccaggatattggggctgaggggagtttgaggtgttnnnnnnnnnnnnnnnnnnnnnnnnngcatttttctctcaaactgatggccaagaaatggctaggacaattttggtgctttacctatctctgcaaagactggagaatttggcataccattaattacaaccaccaatcatatccaacaaaagtaccctaaaagaaggaccagtggccactctcgaaaaaatttaagtatcagaagattaaaaagattttaggatttggaagcttgtattgtctttccccaataatcattgtttgatctccaaatagtagccttatattagcaatagacagatcattggttctccatatctgatcatatgttactactttgaatcagtatttgggaaattcaagcatttatgcagtggatataaatggaaatataaaaatatttgccaacctgtctcagtaacttatcatatctctgtgatcctcaaggaaagcacttttgcttttacttagaaagcgtttcagatttgctttatagactcctgctgtcttcagtacctgataaaactttaaccagggaagcattaaacacagtgcagcagcttttgcccaggcttctaagttcctgccggcagcatttatcaatgtaagaactaggatgcttcctgcagtggcactaccttcccctagagctggagcatgctgcttggccttaagccccagcatgatgaggcttccctcctgccaggtcagtaaaagttagagagctcagaattgggtcttgcctgggtgcaggtggcagggtttgctgaaacccctaaagagaagtcaccaagggaggcaggtaatgaatgtttccagaatcagtcggatactcatagcaatttctggctatctttcaaatgttgaatttctggatgctgagagggactttgatttgatatcattaaatccaggacagtcccaagaagtgcttggagtctcggctctgacagcccaagaagggaaataacttgtattaaggaacaactatgagccaggccctgagctgtctcttagataataaaacagatggggagtggaagagtcatttgcttcaagttatacagctaggaaatactcaagccaaatcttgaacgcagctccccctaattctgtggacaggcactttgtaccacacaccatggtccacctaaaaacagaaggataaaaagacttcaggttttcccactgtgtgctgaccatcccaatttatgaatcttcttcaaaatgacatttcacagttatagttagggctcagaaatggcattgaggtagccttatttctcccctttagcagatgctttaagtacacattgctgacttgagcccacccccaggagttaggagaacatttcctttttcatgccatcttccataaataaggtgtttcttggccttcaaagatatagaactttgcagcagtagtaaaagtgaagggtgttctgctctctactcaactttatttgaaaatgtctgcagcttcactcctgtagaaaaggaaatcttcatattttagtaaacttagccgccagtgtactctgtgaggatgtggcaattcaaagtccagtgaatctggactctcttactgattcctggttttagtgtgtgtgtcgggggagtgtgtacctatatataaaggacaagtgtgatatgtgtgtatatgtatatacatacatacatgtcnnnnnnnnnnnnnnnnatatttgagagctaaggaaaactcaaagcagccccttcattatcttgcgtactacttcaaagatttctgtcagccctaattacaagtgtcaccatatagttggggcttatgtacttgcttacaggaagagcaattctctagcaaaggtcattagctcctaagcactgagtcaaagtgacagccctgaaggaaattgcactccagccctcctccaggatgtctaataagatgggaaacttggatgcccagccattttggtga

SEQ ID NO: 181145 - DNA, 2024 bp, Homo Sapiens
  misc_feature (239)..(253): n is a, c, g, or t
ttggatctctcacacaacaactgtggcaaaactgtgaaaataacggtgagaaagcagatgggcttaaaagcatggtccccaaaacaacgttcttcaaaggtttttgtaacactggtctctgtctccaataacagtctagccgtcctactgttctgtaatatgcctttgcctttgtatggtttcatatctctttagtgatggtcaaccccacttggttttaagttacaatttaggggaannnnnnnnnnnnnnnctgcttggtgtcctagctaaaaggtttaccagtattcatagtgatatgctgaagtggaggcaattaacttggcagttgtcagttgagaatgaaagtagcatgtctgaaaacagtctgatgctttataaaaccatgtagatgactttaaaactattgcatgaaaatacatcaaggttaataagctgttatacagtagatgcatggtttcaatcctttggtgatattatctagtcaatcattgttttcacctgccaggaaaagagagaaaacagtctattggataggtgtaaagggtggggtatgcggtatcagattgattttaaggaagttttgtacatgttaatttttaattgtgcacaagtttcatatgccaacataggctgtattcagttttaaaataggcaaaatgacttgacactgataaatctggtatgtttaactgtgtcccatatgtagactgctttttgcctatgaccagtttgaacaagaattcacccaactttcaagatgccttttcaaaaggatcttgtagtcagttggtatgtacagacaattggcatggaagtggtaggatataaatcggatgacgcctggctgctgaggtgccagctggatcagctggtgcacttcttgtttcttgtaagaggtttctttaaaatgactagtttgatgtatctggtaacatataggcctgactatacattttacattatttcgctattttgtaaactgggattttagaaagcacgtttgccattttgttaaagtacattgccccttaaattttggagtagtttttaaaagtttaaaatggtaatagaggagccagaaactttttaagcattgtaaaatgttttgaattgatattgactttgtttggaagagagtagaggcagggggctttaaagaaacaaagaaatgcattgtaaaaatgtagttttagagcaaattaataatgatggtggggaaagtgttgctaatttgtttatttccctggaagaaatgggaagtgtgataagcagtttaatttttaaggagctggtctcaattttagtactttttaattatgcaaataaatcaatgtttccttaaattttgtcattgctttgtcacagttgtctagggttcatatccaaccttctgtggcaattcaattttatatagtcttttaagaggtaattgtaatgtatttctgacagtataaacaaaaagaatataaggcatagaagaattgtcctctaaaaatatcaatgatgtatcctggaatgtgaagatgtccctttatagttaaaaattgaattattttaatattgtaccattgttagaccttgaatgagtccatgttaccgtgtgtgtctgtatatctatctgtagagaaagaaaaatgacaactgaaatgttacttttaaaaatcagaataaattgggcactgtctgtgttgcaccactactgtatcttttcgaaagaattaacagtatttgcctattgtaaaggttaattctgatgacgttttcacattcaccagactttttttcctgtattatttgcatccccaaatatttaatacaagtagattctgcatggcttgggcattcagagattaatagaatgatgactcaattttaattctaaagccatgaaaagttactttgagactgaacaattctgaattatttatgatacccaatgtccatgtttctttccctactgtaaaagaattgatcagtttcttcattaaagcagcaaaaacttattaaatcttgtaaatacc

SEQ ID NO: 181146 - DNA, 1115 bp, Homo Sapiens
ttggcaaatggcttttggtcatatatatgagttctacagtagtgaagtctgagattttactacaccttccacttatgtggtcccacaccacccgcctcccctgccgcctcctgccaccccctaggccaaggtaataatcatcctgaatcctgggtttatctctcacttgctttcttttcatataattttgcaaaagaatctgatctaaatgtgtttttcagagtatatatttatattttagctgttcttagagaaaatttattattttgcatgtaatcttatggaacattctcatttaataccatggtaagattcagcccttgcccaggggatagttcatttagtttgtttactggatagagctcatcatgtgactatacctcagttagtttatcagttctcccatccatggtgactaggttgcctctcagcctctcaacaacactgtttctcagtgtccttgtagaagtgatatgtgggtgttttctccttacacagagttgaaaggtgacgacaacaacgttggcactaccaatcccccaccctccagaggggtaaccagtgttaccagtttgctgtgtttcctgctacacctcgccttattcacttccatttgtatctgaaaaacgtgttgcatggtttcttttctatagaagtggtaaaatgctattgtgtcctgtacattattgattactttttttcatttaacagtagggagatgcctgggagtacacagagaactgccctcattgttttcaacttctgcactgtatgtctgtgagtttagccattctgctgttaatggaaatttacagtattctaatcttttgatattacaaacagttctgtgcgatcatcgtcatacacaaccccttgtgcacaatgcatgagtgtttctcagggtaggtaccaagaagtgaaattcctgggtcatagggcgtgagtccgacatttttctccattctgccctgttgccctccaagtgggtgtccagctttgcatacctaagtatgagagtatctgttgtttcatatcctctacgacgctccatatatgaaacttaagtttctgctagttgccatctttgatctatcatgtatgcaatgacctactaa

SEQ ID NO: 181147 - DNA, 850 bp, Homo Sapiens
ccacatgtgacctccaagtgggaaacagccgtcacagtcggtccggcctctgtgcccgtgaccctgacccactgtgcagccctgcccggagtcttgggcaggttcacccagcacagagctgagaaggtcaagaccctccccaggttgcagcccccggagcccgccccacccaccgctcacccacctctgtgtctttcttcttcatggcctcatagtagggtgagtgctctgccaggtgacggttgggggcgcacaggtagtagatgttgcgggtgccggcccgcatgcggctggcgtattctgagaggctggttagctgcccggagggcagcgccgaggactcgtagcgcagcagctttgctatgtcctcctagaagggacggggcaggtcaccacttattccaggcccatgggctcaatgttgcccaactaactgggcgcaaaccctccgatgcccatggcctcctggcactccaggctggccctgacccgagggacggtagtggactcgggggttgtccgagagcaggccttgctctgcccatcaggccccttttgggagctctgggggcttaggaagcacctcctgccccaggtggcccaggggctctccagggagctacgcgcaccacgccctgggaggggaccccacccaacagcagagcccggcctggacccagcgtcttccctctgccctcagtgacagagtcagtctctggtgggcacacggacacgggtgaagtccacggttcccggccctcctcacagctggctatggcagagactggctttgcccagtgagtttcagtgggatttggagaagggcccttaggggaggggtttgccctcc

SEQ ID NO: 181148 - DNA, 1077 bp, Homo Sapiens
  misc_feature (293)..(852): n is a, c, g, or t
ttggccaggcgtgcctctcaaatagtgcctggccttgttctacatattttaaatgtattacttgtatggaaagttatagagcaaatatgtaccttctttgtaattttttaaaaaacaggtaaattcacatatcttattaagagttaaattctgtagttgttatagttatttttaaatatgctgtcctgattcttttatccttttttgacatctctttattgtgtaataccctaattactatagagaaaaacaacttagaagtaatatgtctgtaaaagatgagattatatagnnnnnnnnnnnnnnnnnnnnnnnnnnnnnnnnnnnnnnnnnnnnnnnnnnnnnnnnnnnnnnnnnnnnnnnnnnnnnnnnnnnnnnnnnnnnnnnnnnnnnnnnnnnnnnnnnnnnnnnnnnnnnnnnnnnnnnnnnnnnnnnnnnnnnnnnnnnnnnnnnnnnnnnnnnnnnnnnnnnnnnnnnnnnnnnnnnnnnnnnnnnnnnnnnnnnnnnnnnnnnnnnnnnnnnnnnnnnnnnnnnnnnnnnnnnnnnnnnnnnnnnnnnnnnnnnnnnnnnnnnnnnnnnnnnnnnnnnnnnnnnnnnnnnnnnnnnnnnnnnnnnnnnnnnnnnnnnnnnnnnnnnnnnnnnnnnnnnnnnnnnnnnnnnnnnnnnnnnnnnnnnnnnnnnnnnnnnnnnnnnnnnnnnnnnnnnnnnnnnnnnnnnnnnnnnnnnnnnnnnnnnnnnnnnnnnnnnnnnnnnnnnnnnnnnnnnnnnnnnnnnnnnnnnnnnnnnnnnnnnnnnnnnnnnnnnnnnnnnnnnnnnnnnnnnnnnnnnnnnnnnnnnnnnnnnnnnnnnnnntacaagggtactcttaatcctaagggtttcagagggaggaagattcatcttctgtaacttctgcagtctgaatagggatgatggtatttctgcctattacggtcttctgcattcagagtagaggagagctcagttagaaactgtcagtatggtgagaactctgatttctgacaaaaagtgatgactgaaaaattaataagtgttcgatttaagaaagcactgagt

SEQ ID NO: 181149 - DNA, 811 bp, Homo Sapiens
tgacagacttaaaccctaacttaaatgtaaatggtttgaatttagcaattaaatgacggagtggtaaaatggattaaaacacatgacccagatatataatatttacaagaaacaaatttaaaacgtaatgatatagccagtttgaaaataaaagggttaaaaatacacaaacaccattcaaagaaaagtgggaatggctatattaatatcagataagatagacttccaagcaaagaaagttctcagagacacaaaggggcattatattataataaaagtgtcagcacatcaagaagacatgccagtcttaaaaaatatatgcatcagacaatagaactgcaaaacatgcaaagcaaaatctaagaactgagaggagaaatagacaattccacaattatagttggagagttcagcatttctctctcaaaaattcatagaacacttagaaaatcagcaacaacctcatcaaccagtaggttccagttgaaatttatagaacactgtacccaacaaaagcagaatgcatattgttttcagatgccatgaaacatataccaggatagagcaaatccataatggactaaaactagaaatcagttaagaggaagataacaaaaatctccaaacacttggaatctaaacagtacagctataaataatctataggttaaagaagaagtttcaggggatttaaaaatacattgaactgaatgaaaatgaaaatacaacatatccaaatttggtgggacatagctaagcagaatttctagcactaaatgttttcactagaaaagagaaagtctcaaattaa

SEQ ID NO: 181150 - DNA, 2413 bp, Homo Sapiens
  misc_feature (47)..(70): n is a, c, g, or t
  misc_feature (1482)..(1517): n is a, c, g, or t
ttggcttccctcattgcctacaggggcaatagtttcatatcttgggnnnnnnnnnnnnnnnnnnnnnnnnatggggaggggttctttgggtgggtaatagtcagggggaaaggacagtgtctatactttttaaagatgtatataaatgtttcatgttattggttttgtacctagtcctttgcatggatatataggtacctaatgaaaatcgaggatcagtgtatgacaaatctcccatcctcccctttccttattgcctgtgtcggcaataggaagtagaatagttgtgtgttgtttacttacttgtctgttttagagagatttctatttttggtaggggaatattcttaatatgttttcatatctttatttcattttgtagtcttttgcatggctatgtagggacctaatgaaagtcgagtttcataatatgacagctcacttcttttcctacatatttcctcacttagcagtagctagtgtagttattttgtggttattttatttcattctctaggatctattccattaaggatgcaagtgtgtagatgcatatatatcatttgcttctttcttccgccattattttcctttaacacttagtcccttgcaaggggtctgactatacctaacaaaaataaagacctactaaatccctgccatctggctggaaggtgtagcagtgtattaatgtaactaatagcaacaggtgtgcagcagataagacaggagaagacactcagctatggttgagttgtgaaagctaattagatccagcatttcttatgttgattcagattgaatgaggtagtgaaaagggacctgtgcttttgtaaattctagaaaggcaagaggacaatattgaataaagctgtgtttaaacttcattgctcatatatcttttagtaactggtaaaccggcgaagctgataagccaataagagtgctgtctagaacgcatttgcaaaccgttaagagtagcttctttttgaggcctggacttctgattcatctatagaagtctattatgattccatcaattgcatagcttgtgtacctggtagaaattgtgtcttggaatgaccctttcgagttattgacatggctctgatgaatagaacatgagccccaaaactaaatccaaaaggaattttctatctttcatcccccacatgtggcaagacaagttggccctttcttacccagaggtcttttgtgtgactgcatctttctcctccgttctccattgtgtgctttccattttgtctttagtgcctatactgttaggtgttttcttcactggcattcacaaatttaagccattgctgcctcattagccttgtattttgtgtgcatatcatgtatccagacctgtatgttcgctttaagcattcttatatcacactgtctcctcatctaccatatggtaaatgttaaaactccacatttgtctgcatcaggggaaaatgcatgggcacacannnnnnnnnnnnnnnnnnnnnnnnnnnnnnnnnnnntcaggcctcttagcattgtttgttttcccatttctgatactactactccatgctgaagatttgccatattactattttggaaacattgagtgatagaactcctagaaaatttgcaaagaaatgttacatactgtatatcaaactctcagattctagtgttgaaaaagtagcctatactttgctattacttatacctgctgccatagaaaaaaataagtttattcatgacacatttacatttgatcataaataaaagaaaaaagggcacctttttggagttagtcatggtagtcattagtgatatttctgaacagttcttaatttaaaatacttcaaaggaagtaaaggtcatggcttagctgaaggaaatgctccagaaattggactgtgtaaaccatcagtacaataatacgctgtgtatgtatgtgtatataaaatgagaattatggcataattggagcatttgcattaatcaacaaactcacattgagacaaaacttagttttacagctgtcttgattaaagccaagtgttccatgttgctgtgaagaatagcctctttcaaatactttggaaagtagttacttggaaacttgtaaaggtattacatttttatatttaaacacctatagagatcttcaattccttgagtctgagcttgtgggtggaattctaaatttgtatcataatctgtcttttgtgaaacattttgaaaatatgtatatataatattgtatatgcaaattgtgttgtttcacttgtaaagggaaaaggcttatttttctttatatttctgataacttgttttgcatatgaccagcactgactgaaaggcatgtgtagctgcaaacactgttgctttttttgtgaaatgaaaataaaagtatttaaataca

SEQ ID NO: 181151 - DNA, 1027 bp, Homo Sapiens
ttgggtaattatattccgttttgtgagtggtttatttacactatatataaaggcttttaaagagtttgctgtaagtttggaactgatttgaggaaaaaagaatgagtgaacttttgagaagtcttattatgggaaatctctgtttgaagttccctgacttgttagcaaaatgaataccgtgttcatatatttttaaaatatattttaaaatactgattttctatttagataagccatcaccaaactcagaaaatgaacaaaattctgttaccctggaagtcctgcttgtgaaagtttgccacaaaaaaagaaaggtaatgtcaacaaaatgatattggtagattaaatggaataatttgcttaattggacatctttatgcatatatattgtattttaaagctgagttttaaattttgaaagcttaagaaatgtgttgatggcctaattataaaactgataacctcttttgccaactcgcatatctgtgtagtttttctagtcttttaataagtgtctgtacaaaacttttctcataggagtctggaaatggagaagctgtgttttagcatctggcataaattcagttgcttttctaccatttcaatctgttagcgtatttcttagctatttgtacccattgacattttagataagagctaagagagagttttttccacaagattatcctttgtaacactgctctcaggcaaagaaattttgttgtcagcgttattagccattcacttattagtacattgcttcaaatttttataaggtgaagttatttcaccatagaaacaagtgttaagatgtttcctggtcaaccgatcaaagccaacatatgtacctttagttgcctcaagtcctcgagtgtttcaagaggagtaggagctggtctgggtccagggtcccagtgctgatattcttccaagaccataggccataagggcctcaatcactgggagggagtagactaaggcaccatggaggcagcagtggaactttatttttgaaagtttatgtaaa

SEQ ID NO: 181152 - DNA, 894 bp, Homo Sapiens
  misc_feature (45)..(61): n is a, c, g, or t
  misc_feature (298)..(306): n is a, c, g, or t
ttggctccactccagcctgggcaacaagagcgaaactctgtctcnnnnnnnnnnnnnnnnngagagtagttaatcacatagatttgatcagatgagatgtaattgcagaaagagcacgtctcggttgtacagaaacctcctgtggtttgaacaagggtatgtcagaaaccaaatcagttacagtggtgccttaattgttagctaagcctcagttatctaagctatgttatacagagttaaagaagtcatgttaaaccagttattttttattgtactatacactatattttgctaaacnnnnnnnnnccccaacctgcaattctgggaagccaccctcattatagacatagaaatcattgtgattaactgtaccctgcttttagcaaaccaaactgaaaatgttctgtaagtcaaatttttgattgcccatagtgctcttggtaccatttcccatggacaggtaaagacatttctcttgtcattgttgtcattcttattttatcattaccaaggatgctggaggcttgtgatttaaagttgaccccattcagcagaggatttagaacaaaggattataaattagaagtgctaacatgtttttctctgttaatgtatctgtggtctactcatttatctcttctaatttctcctactgagtcttggctaacggcttataccatgtaatactaaattttaactccagagtccatacaaacggctattgctgccattttacatgaataattcctcttttgtcaccaatctttgcaggtataaagaagcgactaaacggagaccccgaagtttactggagaaactgcgttgggtgaccgtagctaccattataactgggacagtaagaaatactcagcagatcattacacacctttccct

SEQ ID NO: 181153 - DNA, 1093 bp, Homo Sapiens
ttctgtggtaaatgttagtctattctacaattgaaaatgcctcattttaccttttctctaaactgacaaatgcaagtagcccagtaactgtaggtctagaattttcgttcactgaccagaaggactaataggcgtctatgtgctcagaaccaccagtcccgcaccaactctcctttcagtgagcactgtcagccacatcctgtagtcactggtcagctacatggaaagtgtgactgaggggcttacggatggcttctggtaaagattgtccaagtcatattccgtcatacaaccaactccaaggaactctaactcactttataattttgatttaccagctattccttgggtttacaatttgttctgcagataatttttttataatctggacttgacctatatagttcgcctgaagcaatcaaatgaagtcacctcaactccactcagggtggtacaccaaggtgcagccttgggttaccctcatttatcttaagatttaacgagataagtcagctcattctcatagaccttcctgagcctttttccccttccattttgtagtagaagtttgtttaacttgaattctattttggattttgtgggtttggcatgaaacacaatgaaaacccataattctaccctgtcccgaacttcaattcctttgctgctcaccttcccataagcaggtaaccgatgtctttcatttaggaagccttggcgtgaacacaggacaagggtgacacactgaatctgctaagggtcctgcagccctcctcagctttgaggttttagcaccataaggagaaaggagaaattggtgggaggtgagacagcagcccacacaactggaaactttcaaaggcacttaatggatataaaactctgcaaatgaaacatttaaaaattaagtttctcaactcctttatacatggctcatttggttttgaaagctaaactggagaacagaggctagcgatatttctagtacttcggtgcatctaacttaggctgtcttgttcaacttatttgtaaaaatgaacattcttgaagtatatagaaacaatagcaaaacatctttgtaaaagttttccaa

SEQ ID NO: 181154 - DNA, 925 bp, Homo Sapiens
tcgttgcaacaaattgatgagcaatgctttttcattatagcaaactttgtacaaaaaagttggcataaatgcaatggatggcatttcatatgcctagctctatctactttctgattatgtttttgtttttcagattaagaaaactgattattttattttagcctatatcgacaatcatttcttgctttttctgtgaggaaagaatgataactctggaattgatgatggaaaaaatactccttttttggtgttaacttctcccctaatttattttcttgcttcttccctaaatactaccacaccacataacatttcaccccaaattcttaaattttttaacctttatgatccatttaggagtgtatctgtttttatgaatttattcataatcttgtctccattaaaagacaccattgctcatttgcttaatcctcttgaatatcaaagcctctagtcaaagctcttgtgtcattcagctcactttcacttgaatattctataatagaaaacttttttaaagcaaggtgacctgaactaccatttgttccaaataaagttcattattggtttttaagtaacatcttttgacttataccaaggcactaaacatttcagaatggtttagtttttaaagcactttgccaaaggtttagagtattatcttctattaaacattgattcttctgttcagtgtcttgtagcatatgagtacctagggtgtactcattttctatagaaattggtgttccctaactcactattttctatttctctacaatgagttcttttcactactctcagccagcctgcatgtaatagctctcctccttcctacaatctgcccttctagtttcgcagcctcaatagatttcgtctttcttcatgccctatcttcccaattactgagacatttaaaaaagcaata

SEQ ID NO: 181155 - DNA, 1145 bp, Homo Sapiens
  misc_feature (137)..(197): n is a, c, g, or t
  misc_feature (663)..(681): n is a, c, g, or t
atttttaactcgtattaggggtgtatgaaccagtttaaaaacgaggttttatttactcgtagagatgaatgccaatcacaaccaatgatcccttggcctacttagttaaaaccagttcatacatcccttagggtttnnnnnnnnnnnnnnnnnnnnnnnnnnnnnnnnnnnnnnnnnnnnnnnnnnnnnnnnnnnnngggtttcttgtgttttttctttgcgactctccacactaaacttgcaatattgtggggagaagctgtgactaaactctaccctgcggtgagatgtaccactaatcagctcccagcgacgtgtgtagctggggctgccgctcgcaataatcactattgatttaaagctttacttagccttgatctgtaccctcgtagtcaataaggtcttgccacattttattagtgaggtggagaaacgtattatttgtttgttgtttttgcccttcccccaccccccaatattaaactgtgaaatttgtgatttgtttaaactctgggtgaatcatagcttagtttgcatgtccagctaatttgtttctatacattttgtttgattctctttctccttctctcagggcttttacaaaaaaatatatatatatggatcttctgaaaagttttttgaggtgcaagttttttctcttgnnnnnnnnnnnnnnnnnnnctcattgattaatggacatgatgctgaaattcaatcactacatgaaacacctggctgtgaaaacaaaacaacccaaagggctgtgttccaagcagcgctggggaagctacgtaacagtcggatgccagttttggaagattcaccatgcgttctgaccctctgttcgtctctttcctctcctctttcttcaagaaggaaattgatcctagtgatttcagcccatgcattaaacaggaaacaataataaatttgtagaattcatatttttctaaagggaacttaaaaaactgctgctacatgttatgtacaaaactggtttatgccacatgaacagagaatcacaagtttggttttggtactttttgttcctctttgtattcagttgtatagaacttcaaaattcagaaatgagaagaaagctgttctgtatcaaaccatttaagcataaatgttatattttaaaa

SEQ ID NO: 181156 - DNA, 1006 bp, Homo Sapiens
  misc_feature (131)..(143): n is a, c, g, or t
ttggctgatattttcgtgactcatagaaggtgtccatggtatagagtttatgcctacatctctatctttattttgggcacacatgagcttttgttaattatttctttgtacttgttagaatctgtttttgnnnnnnnnnnnnncttttgctttgatttgtggtggattcaccttcttaaaataataaatttagaggatattaggaatgacattcaaaacaaatatagtgagaggtgattttttaaaaatttttgttcctggtttccaaattatgtttactttgatttgattatatgttggtatctcccaaatataggttaacttagctatttaaatggtatcttttgacatttaaaaagaattaagtacctgtcaaatcttgcattgaggttgcagttgaataaaataaaagcttaggatgtcaaaaaataatatagagaaatattataagattttatgattattcttgacgtttttgatgcaaaaggaaaatatgctgaatagttcttccaaaaaatattatttccctcaatattttatttgtagccatgtaatttaaagagaacagaaaataactgcaatcaaaagtatggtttaatatcaatcaaagtggcacaacagaattgataagatctttataacaatcaattggctgatattaaaatattgattttaattgatcttttcaattaaaatctttagggcctgtaactcataaaatcaacatccaccacaatatatggtcattattggtttgtaagcataaatcaccattgactcctacctggagagacatgtctatttctaaaaatccagtagtttctttgcattctcagtagtacacgttgtatatatatatatgtaacaaatttggtagttttcagtatgtgtgatgtcctatgggggttatttatcttgctggtccataggaggggtacactaccccacgaatcaagacatctgagttctagttctagttctagctctgccgctgaagagccacctt

SEQ ID NO: 181157 - DNA, 1636 bp, Homo Sapiens
  misc_feature (866)..(912): n is a, c, g, or t
  misc_feature (1420)..(1432): n is a, c, g, or t
ttgggtccacactttcattttgcactgggttcccaaacaggtcctgggtaggaaggatggctgaggataaaacaggagttgctttggcctggctgaacatttgaaccaatgatcagagtttcattttatgattgtgttactctgaacagatttgctatttttttccagctacatttagagttcctcatgtatatatcacccctctttttccagtccatctaacctctccttttttttgtgcctagaatcagttctccttgccttcaaaatccctgataagtgtccatttctttttgtatcctttgatgtagaagccacaagaatggctttagcagcttattttaatcttatgaattattcattcaggattttttaaatgattcagatgctttcaatctgttaacagtatttataaaacatgtttcagtgatacaacataggtgaactaaaccaaagatgcaaatgccttggaggaaaagaaattgtattatagagaatcctgagatatatccttttgggttgtttaatttaaagcctatcacaaaacaaagagaattgtcgcactttaattccaacctcctgcagtacttcacaacccttagcataagattctgaaatttgtaataggtggtacctagtttgatgcagggttttgcagcagttgtgcgaatgcctctgcgcaacggcctttcagtcagactaaatgagaaaatccaaactgtcctatcaaaactgacccacaataactgtactctgaggcgaaacagagcaaatgtgggtttcctgttttcattgtaaaacattccaggttctcagattgaagagctacattcagctgatagttgacatctgttccctcacacgtnnnnnnnnnnnnnnnnnnnnnnnnnnnnnnnnnnnnnnnnnnnnnnncggaatcttcggttgaatcatcctggctgtcctggtgatgcttcttatgtgcagctaggctggagaaccactacagggctgacacctggaatgggagcttgtaacttttacaaaataatagatgtttatcatcttttgcaatttttacttttaagtctatactaaaatgagccaaagaagtcttaacaatgatgtatggcacaattggttggttgaggctatcattccatgattacaaataggtggttatgtggggtggttttgcacttgtggcaattggactgcaatttggccttaaaatgacacaattcctcgttctcagatggagaggaattgccttgaaatttgcatgtaccagactaagtgccagtatatatatgactgatattttcgtgactcatagaaggtgtccatggtatagagtttatgcctacatctctatctttattttgggcacacatgagcttttgttaattatttctttgtacttgttagaatctgtttttgnnnnnnnnnnnnncttttgctttgatttgtggtggattcaccttcttaaaataataaatttagaggatattaggaatgacattcaaaacaaatatagtgagaggtgattttttaaaatttttgttcctgggtttccaaattatgtttactttgatttgattatatgttgggtatctcccaaatataggttaacttagctatttaaatggtatctttt

SEQ ID NO: 181158 - DNA, 866 bp, Homo Sapiens
  misc_feature (455)..(466): n is a, c, g, or t
aattggatgcactgacctggcccaggaaatgaagagattctcttttgatgctattaccaatgttatcataaagtgacagtcacctgtaacaaaaaggtggcaccagacatgatcactgatgttttatttgcacatcaatatttttatttttgtattctggctcagctgcttctctgagtggagttaaggaatgagccacaaagatttttgtagtaggtatattggcattgcattttatattcctctatatttaattttgaaaacctaaaagaaggattgtgcatcttgagagaaagttgagcaaattgtgatctagcggaatgttaatttgtgctgcttcttgtgcacgatagcagcagtagtatctctcttggaaataaacatcccatattatgatgtctatgaatataggtttccttttcttccttccctccctccttcccccacctttctcnnnnnnnnnnnnctctctcagcttctcttttcctccttccctcttcccttcctctttctttactttttttgaaatcacttattgtaaataagttgtaatccaaacctcatgtatcaatggggaattttcaaatataaatattaccaatgcattttctggttgttgtctgatttttgattgaagtataatgagaatgacatgtctgtttgcttttggttgagggactttcctttagcttcataaatcctttggtattttagtattttcattgtttttacaggagaggggcagcaaaagttcattttccctgttagtattgctgtggttcatgatccggttttaatttagctgggtgtgtgtttttttaaacagccatcctcttggtggagtagaggtaaaaatgaaacatttt

SEQ ID NO: 181159 - DNA, 882 bp, Homo Sapiens
ttggcaccgcacccggcgtttcctaggttattattgtagaacaaagattattataatattagaataaagagtaaagctacaaactaatgattaacgatattcatatataatcatatctataatctatttctagtataactattcttattctgtatatttatgatactggaacagcttgtgcccttggtgtcttgccttggcccctgggtggcttgctgcccacacctgccccagcctccacatttgaagccttttgtcagtttcacagtaaaagggatgtactcatccttgtgattccctttggctgcatcgtgctgactttagagctcccagcctgcttctcccagagctggcaggcaaggcgcgtgttttcctgctgggtgaggttggtgaggcagttttgtggccaggtcgcttgggacagccccatgcctggcacgctctagctgaatgttcacgtggccggcacagcagtgcagggaaaggcgatggcagctcagtgctggagcaggggacgccggggttatgggggggcatgggcctctgctgactctgtctccccaggcagctgcattcagcctcagcggaggacacgcctgtggtgcagttggcagccgagaccccaacagcagagagcaaggagagagccttgaactctgccagcacctcgcttcccacaagctgtccaggcagtgagccagtgcccacccatcagcaggggcagcctgccttggagctgaaagaggagagcttcagagaccccgctgaggttctaggcacgggcgcggaggtggattacctggagcagtttggaacttcctcgtttaaggagtcggccttgaggaagcaatcctttatacctcaagttcgaccccttcctga

SEQ ID NO: 181160 - DNA, 2127 bp, Homo Sapiens
  misc_feature (334)..(408): n is a, c, g, or t
cagaaggccacatacccggggagaatcgcaggcagcaggggccaggccctttccacagcactgcctctcacccttctcccgaccaacccccaagggcatgcctctggcttcatgaaccttcgggggaaattagctttctagtttgggggcggttccctctgactggagacaggacagaatgctttcacacccaggaacggccgtgcagcctggcttagaaacaagggacgaagtggatcctgaggctcattccctggggactccaagaatggggcaggcccagctgcgcagccagtcctggctccactgacttaggctgcacccctgcacatannnnnnnnnnnnnnnnnnnnnnnnnnnnnnnnnnnnnnnnnnnnnnnnnnnnnnnnnnnnnnnnnnnnnnnnnnngcattttcccaggggacctctcctccttcctctgaggcaaagtggcctgcaggggcccctgcagagcatacagggaggtgcttccttccctctgcccagcgagcaaagggtggagccttggcacccccagcaaccccctccaagggtggagccttggcacccccagcccccaccccgcaagggaaaggggaagctgcacgaggagcaagatttcattccccagagggcacagcttgggcagattcccatcatctaggggctgtgccccacatctatttctgccaaacaagaagcagacgagggggctcaggggggcgggcctcacaggaacggaagcaccaccccacctctattccctgtggcctccaaaagagctgggcaacctctgccagccactaccccttagcccaaggggagtcctcattccagagccagcatcttcatcttgtcctgatgccctgcccacccccgccgagcttcacactgggctgctatggaaaactgaaaggtcagagggtggaggtcctctccctcctggacaaggaaacctccccctgcctggcacttcggctggtcaggaacagtggctgctcatggagctgccctcccaccttcagaccctcctcctcccccgcaggggtgggctggggccctccctccctctgtacttgatccatgacttgtgagttctgagtcctcagggccgagacttgagtcagaaccttctggagcagtacgcatttcccctctgcacctggtgaggacaccaggctcctcgcttcctccccagatctctgagtgctcacccgaccccccaaccctggcgggaccttccagggctggcaagcatcgagcctgaccacgttgcctcttgggtgccagcacgcccacatcaaaggtgtcccctcttcccagaggccctgagcaacatcgggcgacgctgtcagcagacattagcagcagagctgcaccacgcatcaacttttaagtatgcgcacacacgtacgccagccaataacattaagtgtcattttaaaaaatgggttaaataagcagcattgctgaggatggccgtgcagggctgattatcccctatttgcacgttctggcggtgggaaggctagaagtctaatgactgaattatcgccctaatgcctctcgctggctgggaataatcccggggcaacagctgccgcggggtttttggctggtttcctctaattgcatccagattaagggagttgtggaggggcggggcttctccatcccccgcggagcagcgtctcctccgccaagccctgaacacccaggtcatggcttccgaggtcctggctggtccgagaggtgcagacctcactggggtccgggccagcccatggggagcgtgaggtgcgagcagtgcacggtgggggtggcacttggtgcagagatgcagctgattggtccgggtcaggtcttggggagcagcaggggtgagaagctgtagggccaggagactcagaaggaatgccttctactaggaccttcccaagtgaggggagccctggacctgtctatcctcttcctccctcccaaacacagcggttcaaaggcacgaggtatctagtgaaatgctaggaccagggacgctattcccctggagcaggcgggtggggaaggagtgctccaaagcaggcattattaggacacagactctccagagtcccagttgtttgtaca

SEQ ID NO: 181161 - DNA, 1278 bp, Homo Sapiens
ttggctcagttctccctctgtcaggtgtcctgcaggagcctggaaactcagagagaagaatgagcaggactccccatccccctcgcttcccgcctcctgaccccaccagctgctggctggggcctgtttttattacaggcaggtgagtctggcccaggattccaggcggggcctggactgagggaggaggcaggaagaaactcacaaagagttggcagatcacggatggagggcagcatctcccaacagcctgggcggccgctgagacccagagaacccaaggactcccctgggctcatccagcagcctctgcttcccaggagagaggtgctgaagtccacgaagaggtggtgacttccaagagtgactccgtcggaggaaaatgactccccagtcgctgctgcagacgacactgttcctgctgagtctgctcttcctggtccaaggtgcccacggcaggggccacagggaagactttcgcttctgcagccagcggaaccagacacacaggagcagcctccactacaaacccacaccagacctgcgcatctccatcgagaactccgaagaggccctcacagtccatgcccctttccctgcagcccaccctgcttcccgatccttccctgaccccaggggcctctaccacttctgcctctactggaaccgacatgctgggagattacatcttctctatggcaagcgtgacttcttgctgagtgacaaagcctctagcctcctctgcttccagcaccaggaggagagcctggctcagggccccccgctgttagccacttctgtcacctcctggtggagccctcagaacatcagcctgcccagtgccgccagcttcaccttctccttccacagtaaggcaacttccaggcggagggaacaactgggcagtggtctagaggcagggaaggcaaaatgcaaagtggactgggctcacaatatcagatcatgaagactgggctttgctcataggcactggggagccagtgaaggtgtctgaggaggggaggagtgtaatccaagtgctaggattacaggcatgaaccactgcgctcggccccactgtcccttgatggttactttgtgggcaggcaggggtgaggatggaagggcaagggcccgtcctgaggctgcagagaagtcttggtgaacgaggatgaggtctgaatagggtgagagagcagagactggaaagggactgaagatcaagagcctcaggaagaattcttcctcagcatcagtgtagactgtttatttcctttc

SEQ ID NO: 181162 - DNA, 1169 bp, Homo Sapiens
  misc_feature (105)..(119): n is a, c, g, or t
ttgggaatttaaaaggtgaaaatgtaactaatgtatgtgatatagttccctgagaagtgcattaatctctctttgttcagtctttgtgggaagtgatggaaaacnnnnnnnnnnnnnnngccaaaagatactcgaacttagaaactaggcagttactttcacataaactctttgaggtataggtagtgttatccctaacgttacaaattaggaaactaagacagagatgttaagcagtttgccatagatcacagaacctagtaaatggatgagccaagtttagaatctggacttttctctcaggcaagttgcagattttatatattgaaatgaattagaatgttttagaaagaatgatatttgagagtcaggaaacttcagcagatatatccaaaaggtggcattttgtgtaatatccatttgatggaggagctagagccctctagcagttctggtagccaaatactgggataataatagcatttacttatgcattaacccatttatgcctagtgttccattattggaacgctaagcatgtgggagtgatttatatcctactgctcaaggtcattgccaaggtctgattacaaaaattcaaaaaattgcaacctcaggtataaatgggttaaaagtaactacatataaatattgttttctaaagttaatttttgatggaaatatttcttctactttgcatttaatctagtacagtagaaaactgtatgttttgtagtcagaccatgtaatccaagtgttgttgcctattggctgtgttaatctctctgaatttcactgatttatctgtaaagcagggataataaggcccatcattgggttcttataaggaaaaaagcagcaacacagtaaccagctctctgcctgttatagatgacactcagcaagtttcagctattattatcattcccaaaatgtcctaaatcctgccagtttatgtaacaaaaatttcatcagaatgagtcttcgtagcatagcgttttgataacaaaaaacattatctgtaaatatgaaattaaactataagaataaaaatacttaaaaattttagtctctttactgtcagtattcaggttttttgaatatatgtaagattgttatttatttgtaattttcattctgtttctcttggtttggattctcatcctatg

SEQ ID NO: 181163 - DNA, 1107 bp, Homo Sapiens
aaaagggaacaatgttgctttcaaaacaagacatgctaggctgaaactgatttatggaaaagactgcttgttagcaagtatatttggtcttgagggggatacagattatagaatatgctgacatttgggcttcagaggaagaattttcaaatctaatggaaatagttgaggtgttcaggaatgctgtttcttggagttggaagcttaggttttgaaatgttgaaaccaaaaagacaaaaattaaaacatagaccttaggtcgtcattcacacccggttctcaagaatcaagtggagcacttcaaagaccttggcttgtctgtcccatcctgccactttctcatcttttcatgcttttgaagacaccatttacagctctgactcagccctattttgtgtaaagtaatatattgattattcagaaatagacaatacattttttaattacccaaggactgactgttttgtgcattttactgttggttgtcttcagtagagaatagtaatagggcagagaaaagtatatattttgcctcagtcagtcccaccaccacaatggactattgggatattttctaaaaaaccaatcaatttgcccatgattacctcacaaataattagtgctacctggggtactctcaaatatacagcttttgaaactgtagatgaaaaaagctctactcagagtttttgtcaagactgtgcctgggttgaatatcagtcaattgcctacacttctaaacaataagtgccaatgtctcaattttctcaccctgaatgatagaagctagctttatcaaatgccaaggttagaaagcctggaaataaaacttaagcacagacattcaagtttttgaaaagcataagcctaaattcagataaatcacactgatatattgtactatgcatagaaagttgtaggtggcgttcagggaagactttgattttaataaagcaatatttagtattgaagacaaacactttttattttcagatttctgccaagtaaaacagaaattgccaataaaataatcagtattttgtaaatggcaggcaagcttctggctgtcgaaaacatctgagtcatttattcagtagacatatgtcc

SEQ ID NO: 181164 - DNA, 809 bp, Homo Sapiens
  misc_feature (103)..(144): n is a, c, g, or t
  misc_feature (393)..(473): n is a, c, g, or t
  misc_feature (528)..(551): n is a, c, g, or t
  misc_feature (606)..(630): n is a, c, g, or t
ttagatatattcttaagaaagtgtacaattgcatcaccaaaagctgtttaatttggattgtgtagaataaaagaaaactacataagtctttgttcttttgatnnnnnnnnnnnnnnnnnnnnnnnnnnnnnnnnnnnnnnnnnncagtattcaaaactaacaaatgtcaccttggactatttacagtaagacgcctttttgacaggagaatcttgttctcagcttgttcttttcctcacattttacttacagggattctcactcccccatctgatccctattcataacttcttccattcctgtctcacatgaaacagccatcttccatgctctctcactcatctttgagtctctctctgacactcctttttcctactcttaaattattaatannnnnnnnnnnnnnnnnnnnnnnnnnnnnnnnnnnnnnnnnnnnnnnnnnnnnnnnnnnnnnnnnnnnnnnnnnnnnnnnnaagacattgaccttttcctcaagaaattcagactttgggttgaattaaaaaacgnnnnnnnnnnnnnnnnnnnnnnnngagatggagtttttagctctttttgcccaggctggagtgcaagactctgtctccnnnnnnnnnnnnnnnnnnnnnnnnngcctttcttgatgctgttccccatttctccactaaaacgcctgcttttcttaactccacaccgaaccaacctgaaatattttggcccagaatgccaacaagaattgaagaaaagatgctttacaaaaataacaatataaaagcaaattatattatcccttttatttccatttttacatt

SEQ ID NO: 181165 - DNA, 880 bp, Homo Sapiens
caactttgtacaaaaaagttggcattttagcaggacaccgtcaatcgtaagtgtacccagaggagatttataaggacaaagcctgaagccaggtcacatggggaagagttagctacaaaactggccacttaatctctggaggggggcgttggtggggtgtgtctgtgtgtgtctcagggggctggagatgcctgcgtgggaggagtgcacctctgaccaggtggcagagtggaaggactgagggctctcagctgagctgtgcacatggcgggcacaggaccggctggctgtgagtgggtgtggcctgtggcctgtgaagggtgggaggagggctgtggagctggggattctgggaagggaatgtcggcccagctgggaggttgtaccagatgacctcagcggcctcttcagtcctgaaaaaaacctcagcatctcctctgtcgttttgggccgtgacaggacgcagccatctccctgtgcacgctgagatcctgcaatgggccctcaaatcaggggctggcatcacccagcctggtcagccagggccactctttcatccttctcagttcttctcagccagcctcgccctgggctgacgaggctccgtcagctccccttgcccgtccttagggaatgcagctggaagatctcaaacagcagctccagcaggccgaggaggccctggtggccaaacaggaggtgatcgataagctgaaggaggaggccgagcagcacaagattgtgatggagaccgttcccggtgctgaaggcccaggcggatatctacaaggcggactttccaggctgagaggcaggcccgggagaagctggccgagaagaaggagctcctgcaggagcagctggagcagctgcagaggga

SEQ ID NO: 181166 - DNA, 2363 bp, Homo Sapiens
  misc_feature (1565)..(1854): n is a, c, g, or t
aactcgtttaagtccttcagctgagtagctgccatgacttcttctttagaaaggttctcattaaaaacatctcgatcagaatctgcacttttcgtatcttctggttctcgttggtaaactcaaaggaggaaagtaaaaagtgagtcaacgaattaaagttttcatctggtaaaaattttatgaacaatagaatttctaatgaagtacttaagaaatgtaagaattcacatcagaatccttatttcaggaatcacttcccatacaggatgtgtcaggcaattaaattatttttacattgtctaatatgaaaaggatccacataacatactgaacacattgatttcaaatggaatttaatttctttggttagaaattttcttgggcaaacatttaacaagaataattgtttcatttgtggtagctctcgacttatgccttctagtaaggcctaacatgccacctgtttgttgctcagttcattatttagattgtttggatttgaattccagttctgcgactttggggatgtgaattcatttcttctcttccctcactcatatatgatgataacagtacataccttgcaatgaaggtagttgtgaagattaaacgaatagatattaagtccttggagaacagtgcctaatacatagagggtactatatacatattaacagttgttattactactatgagcaggaccccatgctaggtagaataaggattcacaaaaatgaatctgaaatggatccttaattttttttcacagtcccaactgacctagaatctaaaccctgaagcataggagaaagaatgcaaattttcagtgaagttgtagaaatctcagatccttggggtctaggaagaattgagaaaaacctttcagttgttaaaactctggacttctcaaggcctgtttctttaagtagaaatgctctctcctaagcaacctctatctgatgtaacttaattatgggaacgtaaagctagtgcctccatccctatcttgcctaatgtcattccttgatctgcttggatagattccaaataaacaaccaagttaggatgctatcaccttaacatcctattctccagttttcaaaggaatggcatgtctgttgtactatttgtttatatgaatttttttaaagttatgacttagctgatatatggatttgtaaaatcatacttttatttcatgatgttggatctgaaaaattatgatttagctcatatatggatttgtaaaattatacttttatttcatgttggatctgaaaaatgggacacaaaattcatatatatgcataccattttagttttgcttaagaatatgtactagtaagactcaaagaaaattcgtaacaatgctagctgtataaagctacagtgaatgacttattttgtttctctattttttcaaactttataatgaatatatatactttgatcaacacacaagtaaacttggaaaagaaaaaatataagttttttgaataaagtggatggaaaattagtgtatgtgttttgagtgtatatcaagaaatatccttttttgcctgttnnnnnnnnnnnnnnnnnnnnnnnnnnnnnnnnnnnnnnnnnnnnnnnnnnnnnnnnnnnnnnnnnnnnnnnnnnnnnnnnnnnnnnnnnnnnnnnnnnnnnnnnnnnnnnnnnnnnnnnnnnnnnnnnnnnnnnnnnnnnnnnnnnnnnnnnnnnnnnnnnnnnnnnnnnnnnnnnnnnnnnnnnnnnnnnnnnnnnnnnnnnnnnnnnnnnnnnnnnnnnnnnnnnnnnnnnnnnnnnnnnnnnnnnnnnnnnnnnnnnnnnnnnnnnnnnnnnnnnnnnnnnnnnnnnaagaattatcttttatgggtaatttttacttcctaacaaagttaaattaaaggtaaaacgattaatttttttccttcatatactaataaatttttagtaataattttgaaaggtgtaaatgaaattctcatcttaaaagaatttacccatttagatggaaggttggttggggtagggaaactgctatttcatacatttatcaaatgctgttaaccttaatagcattacatcagtttacaatgttttggaggaatgaatgaatatactgtaatgctatagtcatttcctaactttctggatttaacagtgaagaagacatagtgcctgtatttatggattttatcttcagaagaagagcacagcgtcagaggccaaaaaaataaattattgatgttcacacaaaaagtgtgacacatcatatgacaggggaagcataagagaaacatagcaggcacatctaactcagacttgatgttaaaaagggcttccaggctgggtgcggtggctca

SEQ ID NO: 181167 - DNA, 1529 bp, Homo Sapiens
  misc_feature (49)..(71): n is a, c, g, or t
  misc_feature (939)..(997): n is a, c, g, or t
ttggcgatcgactccaataaatgtggttttattataactgagagacaannnnnnnnnnnnnnnnnnnnnnnggttattgttgcccagaataagataattaccattttaaaattaaataatgcactttaaatatatcatctttttgtactacactgttttattctaatagaaaagtcaccatttttaaaataaacacaatccttaaggaagaagaatgtgattacagttctttagtaatcttgacatcaagttaataacaattaattgtcagattttgattttaaataatcatgaaacattttaaaaatacttataaacttttaattttctaaaaatagatttatcagttacaagcctgtttaaaactatagtgggtttttcaccactgataaaagcattcacaggatagtatttttgtagcattcaaaaaaagcacatatctagtggtagctttacatgtatgtggctcagcttatttctaaacaaaattttgagtgtgcgttttgccgaaagtcttcactcaccattaggatgaatcctttgtttttaaacttgctaaacaattttcctctatcttaaatgctaaagtcaagttgcttttgacttaattcacacaagtttctggatgtataacatttgtccacctagtaattagtcttatacataaaatttcccttagctttaatttggctcctatcagtggggagttttggaattgaatcataactttacattatcgcccttccttcaaaataatgtcattaaccatatgaatgctgaagaactgcatatttgcagagcaattacttctgtgaaagagaaataatttttaaatagaaaattaagcaatgtttttagttttttgttttgacaatttgaggttgaattagtagttttaaatgcatgatttcccctttgtaaagatttaaactgtgatgnnnnnnnnnnnnnnnnnnnnnnnnnnnnnnnnnnnnnnnnnnnnnnnnnnnnnnnnnnnagtaggtttgtttgaaagctatgagaaaataattatagtcaccttgagatagattattttattgttcatgtactctgaaatagggcattatagagccacaaaaatctgtcttgttctataactatatatttatttacattctagcagttatatgaacgtaatttgagctgggaatgctaaaggtgtaatttagtgtgtgctttgtaccaagagccaatatccttttgcttttcccaattgttatttgccagctgtgtatggatggggactggtgaaatgaggaatcaaaagcagcttataaataacctgagtcatttttgcccgacaccataatcaatgtccaaaattgtgtttggagtctaataaaatatcacatgattttaggacccagcttcagataaagacttcctgtgagttcagtcaataaaatgactgtactaaaaaattactcacatatgtttatttttggtaaaatattggaaaataattgttacagaaaatgggaacggcatctcaccgtgtaccccatttg

SEQ ID NO: 181168 - DNA, 1292 bp, Homo Sapiens
  misc_feature (343)..(376): n is a, c, g, or t
ttggacttaattcacacaagtttctggatgtataacatttgtccacctagtaattagtcttatacataaaatttcccttagctttaatttggctcctatcagtggggagttttggaattgaatcataactttacattatcgcccttccttcaaaataatgtcattaaccatatgaatgctgaagaactgcatatttgcagagcaattacttctgtgaaagagaaataatttttaaatagaaaattaagcaatgtttttagttttttgttttgacaatttgaggttgaattagtagttttaaatgcatgatttcccctttgtaaagatttaaactgtgatgcannnnnnnnnnnnnnnnnnnnnnnnnnnnnnnnnncactatggagagatttcattttaagtaggtttgtttgaaagctatgagaaaataattatagtcaccttgagatagattattttattgttcatgtactctgaaatagggcattatagagccacaaaagtctgtcttgttctataactatatatttatttacattctagcagttatatgaacgtaatttgagctgggaatgctaaaggtgtaatttagtgtgtgctttgtaccaagagccaatatccttttgcttttcccaattgttatttgccagctgtgtatggatggggactggtgaaatgaggaatcaaaagcagcttataaataacctgagtcatttttgcccgacaccataatcaatgtccaaaattgtgtttggagtctaataaaatatcacatgattttaggacccagcttcagataaagacttcctgtgagttcagtcaataaaatgactgtactaaaaaattactcacatatgtttatttttggtaaaatattggaaaataattgttacagaaaatgggaagggcatctcaccgtgtaccccattttgcaatattttggaaagagtagtactccattcacttaaggctttggcaacataatttcttcattgattgatagtgtacaggcatatcaatctcttgttttggagggaaaaaagatatataaaggcagaattatctatttcatgaattgtgaactagtttgaagtgtggtccaaagggatgttgcctcattaaaggtcagatttaataaaaaatgcatctggtgtgtgtaccagaaaaacacaggagttggatggattttttattaaatcaggccttaaacttgttaaatagttttgcatttttataaattatagtcatggttataacatttcagtagcaccataaaagtgcttggtttagga

SEQ ID NO: 181169 - DNA, 830 bp, Homo Sapiens
aggcttatagtagtactgttcttctgaactactgccttaagatgattagtttaggtacaacacaattgggttttttcccaagctatggaatgtactctctcaatttgtagtttgttttacagatagggataaaagtgtaagagacagcagcactgaattatttgatattataatcagtttcccaaagtattttttgacaatctatgtgtatgatttaatatgctcccatattttatgcataagggaaaagagagatacattattttatattatctttggagttagacaaccctagatctgacttgtcattctgccactcactaacagggtgacttatttcaactatttaagcctcagtttctttatcagtaaaatggcacttaaaacacccacacccagaaggtttacagtcagtacaagaaaatacatgtaaattacttagtagatagtaaatataaaataaatagttattagtagtacaatgatccacattttaaaattcctaaagtaccagtctatttatttactcaataaccctccttttcaaacactctgataactctccactgcccaaggtgtgccttgttaccgtattcaaggggctccaatatatccttccaaccttaaattccaacagtgccccaaccccatgactactgtccctggagatctatactttcctacctctatgcctttgctaccacaattctatctatttgaatggctgttcttcttccaaggcccaattcaagttcttccaagatgtcttctcatctttcaatgttaattaactttcttctccttgtgcccccataacacctcctctccaa

SEQ ID NO: 181170 - DNA, 1090 bp, Homo Sapiens
ccatagaccacctttcaactctcaaaattaattttgggagaattatgtttgtgctcttagacacatttaattcttgaaaaagcattgtgtttgtgagcaagggctgggcatctggatagtaagtgttcagcagcactgattcattggcattatttgtgaactgcagattttgaaagcaatgggaaaaagtaagaataaaagagaaaatgaacatttaacatttcactgagttaaagatctctcagtctatcagtaagaaccagcaacaccttattatctcgaccatcaaaatacatttcatgcagtgtttgcattgcaccgttcaaaagcatcattttcaacaccagcgaacattcacagatgcactgtcattgagagaagcttcaaataggcaaaactcgtgagtgggatttactatgcataaatacccatttccaagccagttacccctttgcatatttttctgagggggcatccataaatataataaaaaacagaagctcatacttacatcctattccttgttactttccaagctgagagtttcatcttgcattagtcaccatatgatctctatcataatggtgggggtcaatgaatagattagctttatgggaatttacagttcttccatgcatctaaaatttggtaagtctggtaaccactgacctactgtttaaaatctcccccactcaacttaaatctatacaaatataaaatgtaaattttaatctcagctctaaagaaaaggtattcctaagatcaagttaaataactgcccccagaaatacactacagtgtatgttatcctgctgccccctgaatctaatttaagtctgaccttgatgtttatgttgaaatctaaaaataaaattagcttctattcatattaaagtgagatgactgcagaatagtcagtaactgaaaaaactaagcacaacatgtcaaggaccactttaatatggtattggtcttctgtttcttttttctatctaaatatcaattaaacctataaaaaacatttaaaattatattctaatttaaggttgattttttttgtctctttgctttggattctgtaaaaagccaa

SEQ ID NO: 181171 - DNA, 886 bp, Homo Sapiens
gaagagggagagatgcctgggtatggccagctcgagtatcccggtctgagggcaggatggcccggccctgcctcatagcacggatcagctggggacccatgcgctcctcttgccctttccaggtgggatatgcgagacagatccaagtgctcggtcacaaatgcaatggcaacgtaggcgggatggctgtgaaggaaggctggggaggggcaaggccggctttctggaggtgtgcaggaagagcgaactggggacaggtgggggctggattcactggacaatacatgccaacacttggacctatgacacggaggcccgggggccaggccagcctcaattcagagccacaaacggcctggacgagttactgaaggcatcctcagcagagacatcgggggtgggggctgcaggcaggcaatgcactggggctttcaagatgagagaaagggtctctgcccccggccagttgacagaaggtgaagactggccccagcgtttcctgaagaagtaaacgggagagactctggttccagaagcacaacttgttagctgtgagagaaaggaccttgccttagccttctccataaccagaggcccaaaggaaaggaaggctgccgcctacatcagagggtgtgaaacaaaggctccccaaagtgggaatgttctcagccacccgctgtccaaatgtggtgccctggcagaacgatggcttcagcagaggacgtcagagaaggctctgggtctggaccacaggaggcagatccctgagcagcgggagaggctggacagcaggagcagcgccagggcgccgagagatgccatcgccgccatcgcctcttctctgcctagaggaaaagaaaacgagctcccatgaacacgaggccaa

SEQ ID NO: 181172 - DNA, 896 bp, Homo Sapiens
  misc_feature (79)..(89): n is a, c, g, or t
ttggagaaaaactagttaagactgatttctcatcttttattccttctcctcttgctaaaaagaagagattacacatttnnnnnnnnnnnggtcagaggataattatcacaaaaaggtttatgtgaaagagttggaggagagaccctgtggtgcatggatgttacatgggatgcattatccactctaaagttttaggagggtaaggctgaggtgcagattccctccattaaacagggccagccttccacttctcccacctcctccactcaccaccaccaccaccaagagatgcatttaaaattattgctgacgactagtgtttcttccatatggcttaaagatgggtgggggaagttcagggaaaatctgaaagtttattatttcttcccccactcaccggaatgtgtcagcagtatgcctgctttaaatatgagtaactaatactaagatttatgatcttaaatacactttaaattcaccctaagtataattcagtggggctttgccttactatttttttgactcagagcttacttctcttacaccattgtggtgtcaagtattacagagagtcccttatcaattttgactagttctctagattatttgacttcagtttctctgccttcaggtaagtttgacatcagttcctttcacaagcgttttctagcctgaaggtcagcactggtgtatttttcagaaattgatgcttcagatgaatgctaagcacaaagcagaagaagttgaagatgaaacagtagagcttgatgtgtcagatgaagagatggctagaaggtaaccgtgctgcgcagcagccttctaatctggacctagcattcattggctctcccaggaatgctcctcttaccccacagtccacggcagctttcaaggga

SEQ ID NO: 181173 - DNA, 2027 bp, Homo Sapiens
  misc_feature (215)..(232): n is a, c, g, or t
  misc_feature (247)..(267): n is a, c, g, or t
  misc_feature (290)..(298): n is a, c, g, or t
  misc_feature (1835)..(1855): n is a, c, g, or t
ttggattcacctcccggcactcagaatataagtgagatcaacttgagtccaatggaaatcagcacattccgaatccagttgaggtgaacctgactttcacatttggattgagaatcattggcttttatacctttcttggtttgacgtgcaataaagaagcacattattttagcttctggctactgtgagaacatgaattctgtgattctgtgggnnnnnnnnnnnnnnnnnnaccagtacagtaagnnnnnnnnnnnnnnnnnnnnngccatgctatcaatcaagattcnnnnnnnnnaaactttctcccatgaactaccaccatcagtatgaattgatgcaacaaatgaagaaatatttaaagacagcctctcaacagattgtatctcaggttaaatgctaactaattatgtctgtgttgggggttgcaaagagattcttaaaagtatctgtgtgttgatcatcagttttacaaaaacacctatttggctgaaatggaataaaatgtttgtgggtaaaagctaatggccaaaatggttgcaatcattcatactagttagaaaaattatgtgttgaaataagtggaaaagtgcaatccatccacccttatgattaacgtagatgatttttatacctttttctgatgtacctcttgaccttctccttcccttcctaccctttctaagtatttccagaaatacctgattttgaatcattcaacagtagaaaaagaggcatattttcattacttgacaatgtgggatgggtgcaatttattccatcttcactaaaatagaagcaattccataggtaccataaacctattttaggtaccacaaggtgtctttttacacagctcatttgaatacaggtgttctgagaaggggtttctattttaaaattaccatatcaaaataaatgtgccttatttttttataagtcttgttaaatcagtgtccatattactgtttggggaagggggaatgttgtggggtctgggagagggtgggtactttctatgacacataaattgtgtaatttttgcctgacaatgctggccacattctgatctgtttcattaaatttgtggtgatgttactctaaacattttgactatttgaatgtactgagatgtcagaaaacaaaacaaggaaggaaaatattgttaattaaaatgtgctgctgccaaggaaactgcaacttgaagcaaggattttgtaaaatgcaaaatccagctactgtttccatttcacagtagttaactatattaaagagagaatgctttaaaattgatcttgttttgaaacccacttttatgtagctcatcatggtttatcttactaaggaatatgtttgttcattcagttctcaacttttgtatgtgctaaccttaaagtgaagttctgagcccatgtgccattacagtgcttttaataaaatttatttgggattattgtttccttaacattaaaataatagcgacatttagactattcaattttagcatagaaaggagtctttgagtatgtacagttttgaaaattctctttgagataattgatttcatattctgtggctttcaacctccatttacctcttgtcattccaacatctttatagagaaataaaaacccaatttctctttcaccatttagtttgattatcatctggattttcactcaagatgcagctcctaagattattgttatgttaaattcataaactccttcacctttaataattaaggaaacaataccagtgttgataaagatattacaaggggtaatttcatgcaataaacatgtaccgtaagttttcttccacatattttgggnnnnnnnnnnnnnnnnnnnnnggacttcctttttgtggacatctacagatgttagggttgccagaagcaaatcccaggaatgagatcagtattttcattgcatcttaaatgtataaccttcctgtgggagttcagtttgtctgtggttaagtgggtgtgcttaatcattctcgaaattgtgatcagatgaaat

SEQ ID NO: 181174 - DNA, 1413 bp, Homo Sapiens
  misc_feature (654)..(663): n is a, c, g, or t
  misc_feature (836)..(856): n is a, c, g, or t
gagatcttatattacatattccccaaaaagatataaaatcttccaagagaaaatatcaaaacctgttgattccaaggtgaacaaaatgatcaaaatgaaagcaaacattttcttccagacaaaggaatatcaaaacacttcggcacaagtacaacaaaggcatgggaagatcatgataatgttttacatcacattttacagcattttattttaatcagtatttgtagaaaacaaggatgctgagttcttgaacactgcagtcacaaactcaaactaaaatttccaaaaaaaggaaagaaaacactgaactacttggtcaactgaacatctgtaataataaatgtaacgaaacctaaccaaataaatatgccactgagatcacaactgaagtgtatggtttttagtgtgtgccagagacattaaattatttaatcagtttttgactacaacccaaagcaaagcatcctctctgtttccctgatgatttattctaaaagtaaccttaaaaagcagaaacttgctggttaaagagaatttctgctttacctgtgaactgctggtagcaacacaagctgaataaaaccccagactgacatgggacagatccatcgcaaacaaccagaagtggcaaaaccactgttattgcatcaagannnnnnnnnnatttcatctgatcacaatttcgagaatgattaagcacacccacttaaccacagacaaactgaactcccacaggaaggttatacatttaagatgcaatgaaaatactgatctcattcctgggatttgcttctggcaaccctaacatctgtagatgtccacaaaaaggaagtccnnnnnnnnnnnnnnnnnnnnncccaaaatatgtggaagaaaacttacggtacatgtttattgcatgaaattaccccttgtaatatctttatcaacactggtattgtttccttaattattaaaggtgaaggagtttatgaatttaacataacaataatcttaggagctgcatcttgagtgaaaatccagatgataatcaaactaaatggtgaaagagaaattgggtttttatttctctataaagatgttggaatgacaagaggtaaatggaggttgaaagccacagaatatgaaatcaattatctcaaagagaattttcaaaactgtacatactcaaagactcctttctatgctaaaattgaatagtctaaatgtcgctattattttaatgttaaggaaacaataatcccaaataaattttattaaaagcactgtaatggcacatgggctcagaacttcactttaaggttagcacatacaaaagttgagaactgaatgaacaaacatattccttagtaagataaaccatgatgagctacataaaagtgggtttcaaaacaagatcaattttaaagccaa

SEQ ID NO: 181175 - DNA, 888 bp, Homo Sapiens
ttggcactcagcctgagccagacactgaccacatgctttacatgtaccttctctgagcccctggatggcagcttcctctactccccatgacttactctgcaaacagggcggatatgcactgcctgggagtggtagctggtgtggaacaagcgatctgccttcagcagcacagagaggcctgcctggaggagatggaaagagataagagaagccctgtatggagcacttggcatggggcgcaggttctctatacaccccccgcccccggctgccaggctctgcggcctcaccttggaactacagggcaagagcttcttccagggggtgaggttttcggtgcagaccacctcccgcggcagcacagcatagcgcagaaagtagtggctgtaagcaacttgaggacaaggaccagtctgggtcatctatgtacttcccctgacaccatggaaagcgcctcatgtatcagagctgaaatgagctcactgatcttccttgaatgtgctgggctgggcaaaacaatgcatactaccctgtgtatactctgggaataaagctctacccccatggaatcgctgcctactggaagtgctgtccccaagagcagtggcaggatgacaacactctcccagccacattccctccatggcctgcaacagggcccaaggtgtgcactcactcagtgacagtgtcttggaaccagacccacagctctgcacctgatggggcctgcaggaagggtggcccccagtatcgggtcctccaaaagccttgtgtgaatgacaggtgcagctcccgtagagaatacttggagatcagctgccccagggctttgggaaagagcctgtaatgggacactggggaaacgggagcacgtgagtgacgatcccc

SEQ ID NO: 181176 - DNA, 1378 bp, Homo Sapiens
  misc_feature (912)..(943): n is a, c, g, or t
  misc_feature (1048)..(1056): n is a, c, g, or t
ttgggtgatttttaaatgcttttgtaagttaattcttaacacaaaagagacattgtaatgaggcacaccactaaagtgagcatgcccaattaaaaccagtgtaatataggataagaaaatctgatttttcaaaaaagatactctacataaagaatccttcatataaaaagttctttcttgtagtacatttaaagttttaattcactcatgtataactgagagttcctttgagccctttttaggcagggaggcatgtctgtcatctagcgtgtggcccagtaagtgattattacattggaatcagtttttcagtcttttaaaataaattctgtgccataagaataaaagataaagagaaaaattaatgttaactatttttagcttattataactatgtcaacaagtgtttattaatacctattatgggaaagtcactgtggttggcattgaaaattacatcatctttaaagcagtatttgtccccagatggactcatcactagcaaagactaggttcattggaaggcatagggtgagagaatgggaagatgaagtggaggcgggttgttaaagtgctgtcagtgagtgattttgtctacttgaataatggtccatgtttgggggcatattgtgtttcataagaagtgaaaggtatttgcaaagtaagctacaaatgacccataaatctgttaacaacagtccttaatatgcaaagatgaaaaacaagcattactgctacccaaagggaactggtgcttggtgatgtgcagatggggctgttggttaagagagctattacaggttttctctcttaggtttcataggaggtagttactgagatgagattgttttatctttttgaatacagatctcttgtcttgagttagttctgaggatgggagtaataaaggannnnnnnnnnnnnnnnnnnnnnnnnnnnnnnnggctccttagtaatactcctctgacatttatttctattattcttcaaagaaaggaaaccaactgaaatgtttgctttaacaaacattttaataagttctctgggnnnnnnnnnccccttttaaaaaaattagcatataccatagcaataaaagaactaatgttaactattgtatgctacaacttaagtgatttttctaaagaagcacaatgtcattgaaagtattattgaaaaggatcatagtcacattgaatttgtgaaggccaaagaaattgaagggagtgatattttcattttatgatattcacatatttagtaaattttgtgtacaagaataccaggcagagtgttttacccatggaaacaggtttcagattactttatttttactgttagagtctcagtttagaaatgctaacacttaaatcagtttttt

SEQ ID NO: 181177 - DNA, 797 bp, Homo Sapiens
ttggctgggagtcattctgctatttctcagctccctcagagatggggaggctggggagtagagaaggggctgcctctccttagaaattggccataggagagtaatgaccagctgaggattgtacaccgggctggatcctgtgtggccatcttgagctggatgagctatttctggagcaagagactcagtttcttcctcctggtgagccagtgagccctgtgaaagtgttcccttcgttggaacttagtgctaagcaggaggccctcagagtgtccagtgtgtgcccacctgtgggatccaggccttggcttcccaagttttccagaaggttcctttcaagtggttatctggcccagctcacgggcccgcccatccccttgtgtccctgcagacgactaagctaccggagagccgcgggcaccctgccgagcccccagagcctcaggaagcccccctgtgagtagattgtcagggatggcactccagggagggcccggggttagggcgagggaggattcaggctgggaagaagtaggcagtgggctggagggggcatcaggggtcttgtctgagctcatggactccagaggaaggagggggtgggaagtaggaggtggggggcagctagtccctggagaggagcttgtatatttggagtccatagatgatgctggggggtatgttaacagctttcccaaaatgtgcagatgtgtgtgtgttcacacgcgtgtgcatgtgcgtgtgaggatccacagctttcgttagattctcaaggggctctctgaccttgaaaatgg

SEQ ID NO: 181178 - DNA, 263 bp, Homo Sapiens
aaaacagtgaagatgaaggcctgtatgatgatccacttccatttaatcaatagtaaatatattttctttagcttactttaatatggtatatgatatgcataacatacagaatatgttattgactttatgttattggtaaggcttctggtcaacagtaggctatctgtagttgagttttagggaagccaaaagttatacatagattttcaactgcatggggattggcgcctctaatcctcacattgttcaagggtcaattgtat

SEQ ID NO: 181179 - DNA, 2555 bp, Homo Sapiens
  misc_feature (53)..(70): n is a, c, g, or t
ttgggtttaaattgatagcagatatcacgacagatttaacctctgccatgtgnnnnnnnnnnnnnnnnnnagcagtgctgactaagccgaagttttgtaaggtacataaaatccaatttatatgtaaacaagcaataatttaagttgagaacttatgtgttttaattgtataatttttgtgaggtatacatattgtggaattgactcaaaaatgaggtacttcagtattaaattagatatcttcatagcaatgtctcctaaaggtgttttgtaaaggatatcaatgccttgattagacctaatttgtagacttaagactttttattttctaaaccttgtgattctgcttataagtcatttatctaatctatatgatatgcagccgctgtaggaaccaattcttgatttttatatgtttatattctttcttaatgaaccttagaaagactacatgttactaagcaggccacttttatggttgtttttcttgcccactctggtaggggaaaaatcttttattaataggtgtcagtttcagacaactccaataccaagaaactgatgaccttttttgagctatttctccttaacccctaatacctttcttacctaaatttcagaatgatatctttttgatgtctaaaaagcaaagcattttataatatctcattagccaggctttttaggaacagagaagtttttccttgaaatttgattgtttgtttatttgtggcagggtgaaaaatgtacaaactacccctatttatacttatatctctctctatatgtacgcattatggaaatataggaagagatatagcccaaagatagatggtaagtagacagtctgaaaatgttgctccatactaaagaacctttctggaaatttgcatttcgctacttttttccacttgagaggggtctcaatacagggaggtggccaaggaacaacacttctcagtggccaccagttcatatatcccctcaaaaggctctacttttctccaccaaaccattgggttgcccaactgtgatggaaaaaacaagcagatgttggcccagaactccaggacctccccgtgggctgaggctcatgtggcatacaattcagtgtgaccagttttaatgttcagaaatatgtgaattagaatgacttttaacttcacacagcacaaaagagaaatggagtttaaactggatttgttttgttttgagtttcaagtcccttttcactacaacaccgtccaaaactatctacctatctcttcttttttatccatctgcccgctgtattttaatgtcaatcctaattcagacaaatccgcaacttcatgatactggtaatttataataattcgtgatcattgctgttttgaaggaaaagagatgataaattctcttacggtttcaatcaggtaatggattttgttttacatctagttaggagaagaaaagtaagtgaaggaatcctctgatcatattgatcactatagaagcaaaagccaaatcagttcccttcattatcagtatttctcatgctgtacacaataaatttgttagactgagtacttggtttttgtttaatagaacaaataatcagtgtttcacttatattactaaatgtgaaaaacataatgtgaaaagtatacatacattaacttggttgtaaaactcattttaagtgttcatgtaatgtggtaagtttaaaaagtgaagtgagctgttttactacaatgaattcgtttgactcaaagattaaaatgcccctccccctatgtgtatctcttatggcctgtaataattgaaagcaatgtttttgcagtttatataatgcaatttttaatctgtgttcaaaaatggagttcatatgggcttaacacatgaaatgggtggcacagatccacttgcagaacccaaagatacacaatcagttttgaaatgcaacttaagccattaattgttggtgtgaatttaaaattttctagtgtttgtatggtggtatgctgcctaagagcaaagcatcctctgcacaaaagaaaattactgtagtggcttcgattttaattagaattttctccctggtgtttctttatagactaaagcaaaatcttttaagtttcttactacaggtaaaagctatgtgcaagaacctcaaaatgctaaaatctagcataatgccttagatctgtttttaagtcttgtatattcctacatagctgtccgatgtattatatttgtatagtgaattgtgtacaatttttgaataagtgcatcatcacttaacctttatgttgtttgaatagtgatgatgatacatttcttcagacatttaactgtcatttttttcctttgtcatttgtgagttttatttgtacagttcctcatgaagttgcatctgagatgtgtgtatatgaaaagattatacaagggtaaaattaagcaatatattaactatggttcttcaggagaaagcttacagtgtttcaggttgtgatttattttcaaaatggagttgactctgaacatcactttgttcacctgcattgatgtttgta

SEQ ID NO: 181180 - DNA, 1008 bp, Homo Sapiens
  misc_feature (861)..(893): n is a, c, g, or t
ttggttcattttagaaatcatattacttgggattggtaccctttctattacaacaggagccctagctactcaaatagacttactttccagtagaaaaatatatttttacaatccacatagaatctcatttgaacaactagagcaatgtccagagtcctcacttcttacttaaaataaaactacagatacagtaagatcaaggatcataccgtaagaacaaaggcaaaagttaggtagtaaaggggaagagaagaacgttttattaatttttttaactaaagaaagccaccataattgaatgtcaactttagctgtgacttttctggcagctagaataaaagtaagatcattgtctgatagaactgaatgtctcagtttattagaacaacaaaatactgtaatctttctcaaaacctacatggaacaaactggaacaagtatttcatgaaaaccaaatgaaaaataagtaaataaatgatttcatcaccactgtcaccaaaaacaaatgaattttttggataggaaaacatggctaagttggtaattgactgagacattggcctggtgtgttatctgtggttgtattttattaaacttatatttacagaaatggaaaaaaactaacttttcatacagtttggtgtattcatagcaaaatatgaatagaaatcacctctggaatcttgatgaacaaggcctttagtggttcattggtgtagaatgaatatcaatttagagaaataggtctataagtcaggaagtgatgcagaaatgtcataaggcttattcataatcacaacatttttcagatattttccacgttaaatctgaaattttaatttcttagataaaaatctgttnnnnnnnnnnnnnnnnnnnnnnnnnnnnnnnnngtaaaatttctatttcatttctctctttaagggttgagattttcctaagtgtgagatgtctgcctctttcttaataaaaggaggatctacatgtttcaaaaatacttttattccc

SEQ ID NO: 181181 - DNA, 1889 bp, Homo Sapiens
  misc_feature (602)..(643): n is a, c, g, or t
  misc_feature (1575)..(1583): n is a, c, g, or t
acaaaaaagttggctctctttttcttttctatggagcaaaacaaagctgattccccttttttcttcccccgctaattcatacctccctcctgatgtttttcccaggttacaatggcctttatcctagttccattcttggtcaagtttttctctcaaatgatacagtcaggacacatcgttcgatttaagccatcatcagcttaatttaagtttgtagtttttgctgaaggattatatgtattaatacttacggttttaaatgtgttgctttggatacacacatagtttcttttttaatagaatatactgtcttgtctcactttggactgggacagtggatgcccatctaaaagttaagtgtcatttcttttagatgtttaccttcagccatagcttgattgctcagagaaatatgcagaaggcaggatcaaagacacacaggagtcctttcttttgaaatgccacgtgccattgtctttcctcccttctttgcttctttttcttaccctctctttcaattgcagatgccaaaaaagatgccaacagacactacattaccctaatggctgctacccagaacctttttataggttgttcttaannnnnnnnnnnnnnnnnnnnnnnnnnnnnnnnnnnnnnnnnncttagtgtttgggccacgattttaaaatgacttttattatgggtatgtgttgccaaagctggctttttgtcaaataaaatgaatacgaacttaaaaaataaaagctggtatcttaaaatgtaagagagtaagactgtgaagcctaaaatgactggctgagaatgaaccagaaatgccatttgccaaacagttgtaactagaaatttgattctcacagtccattcttttctttgtccttaagatgacattgttagtgttcacgtcccatgttcagtgtccaaaccggcaatgtaaaaagtatcctgtgtggcttaacaggaaatctgtttatgtctctttatttgaaaccagttttactctcagtggttctttaagttcaatgaagtctgccaggaacattggttggtagtattattccgacacctttaatttccaaaatctgaagttcctgctagtttaccaccttcatgatcttcttgaactggtaactgattaggttgaacttatggaagatttgtggacttaactcaaaagtaacctctcagtgttctatagaacatgtatttgtgtaactgaacctaccaggagaaatgtttggaattctatatgtgcaatttttcaacaaatgcaaaaaaaatacagcacatgtattgacaagcttctgtcaagcagcttgagttgaaatttgatttaagaaaataaatcatgattgttcaaagctgctgggacgttagaattaggccatgatactggtctcattttaactacagtggtatttggcactagtgtaaacttccatataaatcactcttttggaacaacaaagggggagggagaaaaatcacggcctgttaaatgagtaccaaagccgcccaacagtaatgagatgttctcatccttgattctcccagcctcaaacaacacagcttacnnnnnnnnncccttgctcagaaagtacctgtaatttaacaaacagactgcctgtaggtatagtgcaattacaaatgctctaatcattgtacatacatctctcttgatattgcagcatccatactggctttgtaatcattaattttttggcagattgaatgtgctgtattgatatgtatctatgtaattgtattgtatgtctatagctaattcacgttttgaataatgttattttatttacttttttaagagaggagaatgtaaatttgtcagtttatttctgactagggatatttttctttccatttagaaagaa

SEQ ID NO: 181182 - DNA, 755 bp, Homo Sapiens
ttggggtgggaaggaggggccccaataactcccctttttgtttctcccccttccctcctgaggtcggggctttcccttcctgagcagccacctcccgccctctgcttacagaggtaggccagaacatgcctgcccatgctctgggctcgctctcatctcttggtcctttcgggtatatttttctctctccacttcctctccgacttctcccaacagtgcgggcaaggctggtcaggccctgaccggccagagaaagaaccctcagggtcccaccaggccagccaccacgctggccctccagggtggatggaaggccaggtcctgggaatggacttgacttgaggacacatggcacctggtttaggaggggactggccagtttgggcaggggggtgcagggcactaaccactattcctatctgtctgtccctcttcctcgagaatcctgttgctctgggcaagagtgatttttaccgggggcatcagcatgactgttcaagatgatatgggcacccaggatgttgggcagggtggtatatgtattcttgtgcccaggagggctgggggcaatgtcagtttgggagagttcgtgcacgtgtgtgggtgcgtgggtgtagggtggggggcggatgggtgggagaggattctttgtttatgactgatactgcattcatctatctaggtgaatttaagttatgtgtgccatgcattatgctagttgctggggttacagaaagcaagggacagacatggtt

SEQ ID NO: 181183 - DNA, 1593 bp, Homo Sapiens
  misc_feature (1464)..(1481): n is a, c, g, or t
ttttataacacacatattcagtaatgcttttcttataattcctggatttcaatgcctcaccaattattttaaatacaaatgtggggggatctgtgtatctcaaggagttcttactcatgcaaactactgagtttttaatgtaagttcttataaaattttcattttattctttaaactttggtagcctaaattttttttatgaccaacatttgaggctgtaatgggacaaataaaaacatgagatgttgaaaattaaacttgtaggtggcctgattttaaatgcgatcactgcctcctataataacatttccagtatcaattttagatttgtatggatagtgtgagatacactggctgaacacatgcagtgatgatgaatcaatggagtatatgctggaccataaaatggactcttggtaccgagtgcacctatgtctaatcatgtgtgcatgtgaggaggtgctggctgactgcatcagcggaacccaggtataacggcaatcttttgttttaggtatagtagacggaaatataaaataatggaaagtttttgctgatttaaacaaaaatatttactcttttcattagcaaaacattatttaaaatatatctatttctcccctctgaacatttaactaggaacactgggcaatttttgaaggtttagtgctgattgtttaatacaataaatatggctgtggagagcacacagcagcagtagcttacatacgtccacggataagaaatttactctcatctggttagtgtccagtccaccaaaggaaaggtttggcattcgtgtgcttttttttcgtgtaggaatcaattctgcttgattttcattcttggaagaaaaaataatcagctgatatcctcaaattttatgacatgatgcaaaggagcaaggggacaaagatgacctatggtcaaaaagctggactgggatcaggtctccaggcagatcttccttcttgcgaggtgagtctacaaagggctgcactagaagccaggagtgaggcattggggacacgggggtgggttgctcccactcgggcaagcatctcctgctctgctgcagccacaaccccgactcactaccctacagaaccatggaagccagttcacagggaaacagggaaaagtgaagcacatgacgaagagatggcccaggccacaggtcaccgtttgaagctgcctcctgagctactgtcctctgttgagataatatgcggaggatccgtacactgtgttcttcacagcagaattcttccttgttgctcttgaaaagtttttgcgaggtcgtgaccttccaaacaattttatcagaagtagtctgatgcctgctctttctaacaaaccaatcatggcaaaaatttcaggctccctcccctgaattttgaaactacctaaaagcagaatgttttcccctggcaaatggttacttctttgaaaagcagacaatcnnnnnnnnnnnnnnnnnnaaatccaactaagccctttagaaagtactccagactacatgaggaggaagtgcaggagaactgacttcctattgtgccttgcataaaacattttgctaaaattaaaagccaa

SEQ ID NO: 181184 - DNA, 663 bp, Homo Sapiens
aaaacaaacagacaaaaaaacctgtggattgaagggtaaaggatggagtatttaaaaagtactgtgacagaacaaagtactgtaagtactagagttgagtgtggatggaaacacagaacctgtaaatcaagtgtttcatttacgtgctcaactcctactgaattttagcaattaaaacatgaaaactgaaatattggttaacaaatgaaaatagaatttaaagacctgaacttcttttatgatctttaatgattatttgttctaatctttgacttggaaacccaaattattttcagtctaacgtacttgaaatttaactattaaaaaagttggaggaactcaaactttgaagttagggctccctttctccagataaagcacattgcctggtttattgtaaggcacttagaacatgtaaccaaaaacactcaatttaggaataggaatgattgttttacagctaagtgcgctctcagagtcttttgttttacacccctctcaagtttacctttagatatttttcttgttgtttaatattttgtgacagatttggcaacttttaaaaagttgtttgaattgaatagtgcataaaattaatagatgtttttcagaaaatccattattaagagtagaggaatgaggagaaatattcgttctaaagag

SEQ ID NO: 181185 - DNA, 892 bp, Homo Sapiens
ttggggaaagactgaataggagtggataagtaggcttacctgtaatttttttcctaagctttatatattaccattctgttttaaagaagaaagagtagggggaaggaaagaaatgccacctggggacacaaccttggctcccagcccagccttatttattgagatgggccgagcataccagcagcagagggttgggtatgtgagtgagggaggctgggccagcccccatcctgtgcctgtcaacttcacaaggcagctggtgagcgtcgtctaacaatggccctgggaggtcatttcttgttcctgctttcctcctgtggaaacaaatttaagaaacgcaagacctgcttgtgccctgtagatagagggcagtgtgtctgagggtcagagaaggcgctagccactgtcgggttctgtgcagagtgcactggacacactgaccgagggaaggggcccctgcagggctgccggcagccagtgacggtaactggggacattctaaaggcagggtactcctgaggtgcttgggttgtttttttcctggttataccagagggtgtggatggctgtgtttcccgctgtgtgtatagcgtcatgccctatgcattcccacagactcctgcatagccttcctgcgtagacactttcatggccttggaagtgctctgaggagagtgcttttccccgttgcgccggttggtggatgttctagttgcacatctgcttttgcaccctgcagatccctgcacaatgggcacctccttgagaagcacccccagaagtggagctcctggggccctgaggggtgggcggttgggaccaaggagatgcttctcactccagctcagccatgtggccctctctcaacccaggcaaagaggccatgctgcga

SEQ ID NO: 181186 - DNA, 819 bp, Homo Sapiens
ttggcggagtccggtccctccaatcaggaaggtcggaatctctgatgtcatcgttcatgccaacctggcaaccagtttgaaaaaaaacacatgtaactgccaggctgatctcttgtcctggagatcctgggtgaatggtatctcctgccactgtcccaacctcagaccattgtccaaaagcatcttcagggactccacatccctctattccctgtcccagcagaggctgtgtcctctccactcaaagcctgaagcatgttggggtctcttcgtctctgtacatgcccatttcagagtccagtctggtgggagagggaacagagtgggaaagaaaactagggtaagcagaaacgatgaaaccttataagagtgagagtatcatgtacaagagtgagattatcatgtacaagagtgagattatcacgtacaagagatcccaggaatactgacttgatgaaaaagtcacatcagagcactcagtttggcagagcttttctgccgaatgtttactcacattcactgtccgagattctatactgggggtacacacgtcctctgccctaaggcaattttgagtccaagagacattttgaggcctaaaaatcataggaaactgcccctgagctcacacatatttccaatggtgtccccagtttcagggaatccatggattacctaagccagcccctccagttcggctaagaaactctagtctatatatcaagttttgtatcatatgtattgctctgaactcagaaatttcccttccatttatggattctatgaataaaatatcacatgtacaaaaagactaagtca

SEQ ID NO: 181187 - DNA, 1879 bp, Homo Sapiens
ttccgggtcatccgcagaaattctcatagatggcaactctgtctactctccgagccagtggcgagaagttacacagggagtccaccccggtgtggtgcctgttggggacagactgaatgttgaaacttgacagtcagaaaaataactcttgatgctgctgtttcggaagagttggttgagcgcatcctcaatattccttttgttcctctggtaattggtggtgcctggctgggctttgtcctgggaatatggtaggttggtgatggtgaaattcaggtagaagtgctgggtgctggagctgcttgttggttgataaactgatgactccatttctgtcacatggatgtccaccaactggtaggtggagcccagccaatggaatgaggcattcagggtcttatctagaaagacttgctccaccaggctggggtccaaattggaggagaacaatgccttgacagtgaccaacacggagtccatcgtcaagttggtgaccaggcagaagcggaatgtgtcatgtagttgactgcctttgtagagtgtggtgaccttgtcctggatgtccctcagcagggtgatgtactctgaggatgtggggtctggattactgaggttccagttgacaatgtggaaatttatctggtactcgccccggattgataaattctggggtgcatagccattgatgaagaggctatccctgtccaggacatagaagcccagttgggtgacaccatgggtcagctgactcagctcccagtaaagctgctgtatgtccagcccggggcccacagggtcagggtggtaggtgcaggtggtgtccacaccagtggctgccccatccttctcaggcctgagggagatcagttggcaacccaagtagaaggggcccatgctgctcttctggaacaagggtctgagcaggtgctgaaggaccccctcggtggagttgaatgtagctgagcccttgcccatatctggtgaatactggagattggagatggtgaagttgagtgtgagggtcttcaggtggtaccccatggctgttgtggcttctgacagaggaggcaggaatgtggtggctggcttgggagttgtaggaggctcatctggaccaggttcattgtaaccgttaaggtagaggctgtctttgtccagagagtaggggcccagccgggtgatgccatgggtctgctggctcagctcatggaacacctgcttgataggcagacctgggccgctgaggggctgcaggtaggtgcagaggaggtccacccgtgtctcagcaccgttcttcacagaccttagtgcgatgaccctgcagcctgtgtaccgtgcacccaggctgctcctctggaacaaaggactgagcaggtgctgcatgacgttgtctgtgatgttgaacttgagggagccgggttggcccatgtccgccatgtagcgcaggttgttgatggtgaagttcagtgtgaatggctcctcgctgaccaccccggtgctggtggtgggtacagagctccgatgggtgaaaccattgacatagagactgtccctgtccagtgtgtaggggcccagctcagtgatgctgtgggtcagctggctcagctccaaatacagctgctctctgtccagcccagggcctgtggggtcagggcggtgggtgcagatggcatccactccggtggcttccccatctttctctggcctgagcaaggtcagcctgcagccagagtacagagggccaacactggtgttcttgaacaagggccttagcaggccctgaaggaccctctctgtagtgttgaacttcctggagccaggccacatgttctcctcataccgcaggttagtgatggtgaagttgagccaacttttttgt

SEQ ID NO: 181188 - DNA, 1459 bp, Homo Sapiens
  misc_feature (146)..(159): n is a, c, g, or t
  misc_feature (998)..(1047): n is a, c, g, or t
ttggctttaccttctgcatttgacactcctcctgttactacatagattccggtccccagaagcaattttacactggtactagagcttaccagccccatttagtaatttttaatggctagatgaggtttaacaagaatatgagaagnnnnnnnnnnnnnntatattcatgaatgataggcgatgcccattctttctctcaagctaatgaagtcctatggcgttctaaccacaaccctcggacagactcctcctattcctccatggcattgtaaccacaacccttggacagactcctcctattcctccatggcattgtaaccacaaccctcggacagactcctcctattcctccatggcattgtaaccacaaccctcggacagactcgtcctactcctccatggcattgtaaccacaaccctcggacagactcctcctactcctccatggcattgtaaccacaaccctcggacagactcctcctattcctccatggcattgtaaccacaaccctcggacagactcctcctattcctccatggcattgtaaccacaaccctcggacagactcctcctattcctccatggcattgtaaccacaaccctcggacagactcctattcctccatggcattgtaaccacaaccctcggacagactcctcctattcctccatggcattgtaaccacaaccctcggacagactccttctgttcctcctttcctcgtccttccctgcttttcgtccattcagcatatagctattcagtactccattgaagaaattatgctaagtgagcaaagcaacataattactaagaattaattctgattatttggcactagagccaacagcaaccccagcacagaggaaagtcgcttttttttcaaatgcataaatttaaagtatgtatttgcatgcagttttaaatgggaggtatttgtcattgtgaaaagctgggaatctcaaacatagtcaacttaactaaaaagaagctaannnnnnnnnnnnnnnnnnnnnnnnnnnnnnnnnnnnnnnnnnnnnnnnnnaatctgaaactttctgaatgctgacctgatactacaagtagaaaattccacatacaagtacttaacacaaactttgtttcatgcacaaactactaaaaatattgtataaaattaccttcaggcagtgtgtgtagttatatatgaaacatgaatttcatgtttagacttgggtccatgcccaagatacctcattaggtatctgtaaatatccgaaatccaaaaaaaagtctgaaatctgaaacacttctggtcccaagcatttcagtaagtgatgctcaacctgcgtaatggtctgcgggccagtgctcattttctgcctatgttgtacatactttaaattgtgtaatttaaaagtcaaagcaaagagtctatttttaaagaaacttacaataatctaaacatatacttctta

SEQ ID NO: 181189 - DNA, 1620 bp, Homo Sapiens
  misc_feature (764)..(813): n is a, c, g, or t
ttggctctctttctcacatcctagagacggtctttaatacgcattaaccctgtgctgccacatctggctcctgccctcattgcctccaatccggactcttcctctcacatcacccccaccacccccaacttgggctcacaacttctcttcactttttccatttccccagttctctgccttccgtctttccctctgtcctcatccttagcccctctgccctgctttgtgtcccacctctccccctccacttcctctcctcccaccctcagtctcacccccgggctgtctcactctctggagcctctccttcctgttctctgtccccagtgctccctaccctcacctcaagacgaccatggccaccatcccagactggaagctacagctgctagcccggcgccggcaggaggaggcgtccgttcgaggccgagagaaagcagaacgggagcgcctgtcccagatgccagcctggaaacgagggctcctggagcgccgccgggccaagcttgggctgtcccctggggagcctagccctgtgctagggactgtagaggctggacctccagacccggatgagtctgcggtccttctggaggccatcgggccagtgcaccagaaccgattcatccggcaggagcggcagcagcagcagcagcaacaacaacggagtgaagagctgctagcagagagaaagcctgggcctctggaggcccgggagcggagacccagccctggggagatgcgggatcagagccccaagggannnnnnnnnnnnnnnnnnnnnnnnnnnnnnnnnnnnnnnnnnnnnnnnnngctggggatagggggagcccaagagttgagcctgaggcctctggaggctcgggactggaggcaaagcccaggagaggtgggagacaggagctcccgactgtcagaggcatggaaatggaggctgagtcctggagaaactccagagcggagtctgagactagcagagtctcgagagcaaagccccaggagaaaagaggtggaaagtagactgagcccaggggaatctgcctaccagaagttgggcctgacagaggcccataaatggagacctgactccagagagtctcaggaacagagtttggtacaactggaggcaacagagtggaggctgaggtcaggagaagaaagacaagactactcggaagaatgtgggagaaaagaagagtggccagttccaggggtagctccaaaagagactgcagagctgtccgagaccctgacaagggaggcccaaggcaacagttccgcaggagtggaggcagcagagcagaggcctgtggaagatggcgagaggggcatgaagccaacagaagggtggaaatggaccctgaactccgggaaggctcgagaatggacacccagggacatagaggctcaaactcagaaaccagaacctccagagtcagcagagaagcttctggaatctcccggtgtggaggctggagaaggggaggctgagaaggaggaggcgggggctcagggcaggcctctgagagctctgcagaactgctgctctgtgctctcctctctctccaccagaggacgctgggactggaggcctgagacagcacgaagaggaagcagtgg

SEQ ID NO: 181190 - DNA, 983 bp, Homo Sapiens
ttatctaggggactctttctccacccaaaacccaggacacttggcccacaactacatcaccaccccagggttccaggacacttggcccacgactacatcaccaccccagggttccaggacacttggcccatgactacatcaccaccccagggttctttactatagttttcttgttcttccttcaattacgtgtgacattcccaactccaagattcttccagtccttctctcccccttcatctaaagcaggctgtcatgagtttctgtcagctgcaatcaagagtcatgactcttacagtgggtaggattactcccttttttgttgtcattaaggaaacctgtaagaggaaaaacaaacacactttatgtggagagacagggaaagttgttctattcagtctggaatctagtccctcagctggtggtccaccttcggattcactggtcttgggagtaagacggtgccttgtagtgaaagaagtgaggaattctggtgcctcctgagggtggaactgaggagaggagacgtgagcgaggatgctggaaaggaggaagcagccggaatgtgtagggcctttgtggccatgccaaggcgcctcagggaatatctgagcgtcttaaataggtcagagggcaattctgaaaacaaactccttctacctgctgtgtaggcaatgagttgtcattgttagatagaggataaaatgaacccaattagattattgccatcattccagtgattgaagatgttgatctgtaatagggtaatggccatacactttcgagaggaaaaatgttcaaatttaggggataattagaaatctgcacttacagcccttggtgacacttttcctatgagccaaacggagagggggagagagagagaaggtggacagtcaccgacatatgaggcagtggaagaggaacaggcatggataggaagagaattgtgggacacactgggttcgagatgcctgtgccaa

SEQ ID NO: 181191 - DNA, 1370 bp, Homo Sapiens
  misc_feature (114)..(136): n is a, c, g, or t
  misc_feature (241)..(303): n is a, c, g, or t
ttggcgcatgtattgttctttcttttgtttttcttctgagttctcaactgcggagagcacctgaaccccctttcctttttgaccgcaggctgcactttgggccccagccagccnnnnnnnnnnnnnnnnnnnnnnngtggttcttccctggagcgactctggggagtcctggatatcccgcctgccccttcccctcagccccatgcttgttccaacagtctccacagcaaaatgtgatgcnnnnnnnnnnnnnnnnnnnnnnnnnnnnnnnnnnnnnnnnnnnnnnnnnnnnnnnnnnnnnnncctttcctactaagattatgcccagaaaaaagttttgcatgtttcctgctgtttcttcacaccttcgtatatatcaccttcacctctctgttttctatagtttgtgcaaaaactgatcgatttaaaagggtttcaaagaagctgttttaaattgttgtagggttgattatttttttcaagattgtattgtttaattttgaagtggcaactttctcctctattgcccttagagcgtttgcctgtgcacttagactgtcacttcgtgtggcctccaggtcttaccggggcttccgggaggctggctgctttgctcagagagggtgggaagggggcctggagagacacgagaagcagaggtagagcctagaaggtggcagcaggtgggtaagaggcttatttagcacattaggggcagtgagcacctggaggaaggagggcgctcccaatcacccgtaggaggccatctgcacaccaagcggcaattcacctgctggcgcttttcctaggtgacaagcacaatactacagtcttcacactgtttacagccctgggcaccagccacccggcactggctcttcatcacagctctgctcttgcttagctagtggggtgggggaaagggcagggatttgtttttttaattgggtggagagccaaacagctactgtccctgggtgccaagcaagccagttttttggttccctgagggaaactgaccctcctctcttgtggcaccatccagcctcagggtcttggagacttgagtaagaatgtgagtggagggggagaggtgaggagaggagcacagggtggatctgtggagggaagaggttacagggggaggagctgatgatagatcccacccagacttaagctgctggtgggtgggtgagctgggaagtaggactgtccagggaagggtggagagatgtagctaggggctggggagggggaggtggaagcgctattgagcatcctccacacccaggttgatgaaggaagggatcccagcaagggtttctgctctggggctggcaggttgcctggtattatgctcaaggccgctc

SEQ ID NO: 181192 - DNA, 1154 bp, Homo Sapiens
  misc_feature (823)..(837): n is a, c, g, or t
  misc_feature (920)..(930): n is a, c, g, or t
aacttgaatcaaatttaattggcattaaaagtttttatttagtatttgatccacaatctatacaagttatttacaaggcatgaaaatggaaaacagcacaaaatacaattgaggtataagctcagagcacagtatgtcatgtttcaataaatataattcaaaatttgtaaactaggtgaccagatacatgagtcttatttttagtaaaaccatataaaatatttatttcacgtgaggtagaggacagttttctgtgtcatgtaatgcaaccaaccacagcaactttaaccataaaactgtacatcattggcaaaattttaactttaattatggtcaatgtagccaattatttgtttcaacagttgcagaacagatatttcatttactgccttcacagattagaaattcaaaagtaatttaagactactatgttggcttaaaattatcaggataaacaaatacttctaacaggatagtaaaaacaagtaaaattttatttctcataaactaattcctcaaaagatgtcctacatttagcaactgttttctaggacatgtttactagaactactttaagtatgctgtgctttcttttcaagtgaggtatctatattgaggaaaaaaatcttataaattccttttacattaaactaatttaatacactattttgttttctgggctgaatttttaaatttttttcttacatttgatcactttctaattcaaaaattgtagcactacataggacatttaattctattactaaataggctccaaattacattatacagtttagaaaccatttcaatgaatggatttacnnnnnnnnnnnnnnnctgtccttttaaatgaaatgcaatataaaatactaatacacttttcttccaaaagtggaaatgcttaagtaccctatactagnnnnnnnnnnnttaggctgtttattcaattccacaatgtataatacagcagttttatgtcccttattgctgacagcttcgataaaaactattaacaagtagttccaagcacagaaatagatgtacagtatgagcacgatttttctttatattaatttttaatgtcctatcatgtggattaaatgcataaagggcaaataaaaatgaggaatcttccataagtaatcaaaacccaa

SEQ ID NO: 181193 - DNA, 1936 bp, Homo Sapiens
  misc_feature (159)..(173): n is a, c, g, or t
  misc_feature (256)..(265): n is a, c, g, or t
tattttgttttctgggctgaatttttaaatttttttcttacatttgatcactttctaattcaaaaattgtagcactacataggacatttatttctattactaaataggctccaaattacattatacagtttagaaaccatttcaatgaatggatttacnnnnnnnnnnnnnnnctgtccttttaaatgaaatgcaatataaaatactaatacacttttcttccaaaagtggaaatgcttaagtaccctatactagnnnnnnnnnnttaggctgtttattcaattccacaatgtataatacagcagttttatgtcccttattgctgacagcttcgataaaaactattaacaagtagttccaagcacagaaatagatgtacagtatgagcacgatttttctttatattaatttttaatgtcctatcatgtggattaaatgcataaagggcaaataaaaatgaggaatcttccctaagtaatcaaaacatatgtcttattgagaagaaaattttagaagctgattaaaatccttcagcactagctttgcaattaattctggagaaataccttgacacatcttatagtatttgagtttccttataactttaccttccttcaaacagaagctacctatgtgcaaataaactggttgttctgtcaggacttctaaaagatatggataaccggcaaatatatactttatttcacctactttaatagctgctttacaattcgctatgtacaaatgattttatatcttaactggtaatatattaaatatgttataaaattagttcaagaagcataaaacaccctaactctcatgaacacagaaattcaagcaaaagaatatgcttaaacaaaaactaaagcacacagcaaacgtaaattgttggtcaaatcttttcatagtgttataagttacatttgtgaaatttagggtagttgaagagcttcctcaataacagcaagaggttttacatttattacctttatagagtaggtacacttttctcataaagtttagctacagaaactatcgccacccaaattaaacatcacccaagctaatattctttcttccttctaaagatgagctagcaaaactttttataggttgtccctttaatgcagctttttagaataaacatttttacattttttcttaaaagaattattttttgaagtctgaggaaaaatccgcttgcctagtgaatttggcacacaaagagtaacaacaaatcaaactttaagctagcaaccaacacacaaaataagcatgcaaagaatagaataagttttatatggataaggtattttagccaactccacttataaggtattacaaaatctctatattgttttgaagctatgtgttgcagtttaaagttacttttaacaataatacgtatatttacaattgacttaaaaaactattttcaaggaagttagaaacctatggcacaccaacgcatcttctggaaaatgaagacgatacaatgtcatgtggcaagttttcaatatatgaaggactagaaaaaatatttctttactcaattctgaattacaagttcataataatttaatggtgtttaagcactgcttaaaattttccaataacatatttcaaggattaagcaatttattttagaagttttgggttacacaaattatcattttctaggtaacataaagcagaaaggttccaagtgaattagaaatataaatgaaattataggtgtttgagtttgtcttccaaaaagctgagctgtgacacaaataattcaaaattaaaataaaactatatcataaatatctgatttttccttctccagatctaaatagattgtattgggagaatatgtcattttaaatatttgtttctaaaaattagccgggagtggtggtgggtgcctgtagtcccagctactcgccaa

SEQ ID NO: 181194 - DNA, 782 bp, Homo Sapiens
  misc_feature (328)..(425): n is a, c, g, or t
cagcctattacccccatttaaagatgaggaaattgaggcacagagaggttaagtaatttgcctaactgcatacagctagtagatggaagagcagggactaaatcctgaatgtgagggccctagacctgggaggcttaatcatcacatctacttcatggtggcaggacagttgatggtgcaggggctgagggagcaggagtgggtgctggggtgaaccagtgttcctgaagaagggatcccgaggcaaggattgagaggtctgcccctgcagagatagagagtcattcatggtgcctgggtgagaacacaagtatgccaacaagaagannnnnnnnnnnnnnnnnnnnnnnnnnnnnnnnnnnnnnnnnnnnnnnnnnnnnnnnnnnnnnnnnnnnnnnnnnnnnnnnnnnnnnnnnnnnnnnnnntgttctgggtgttgaatgggtgcgaatctcaaactctcagtgattctccagcagaagggcatggtgggagtggaagagccctggggtccatggggatgggactgcggagccttgtctgtcctccctgcctggcttggaggagaatgaatcccttcctcacactgctgtctggtctcctggcatcgggcaaaggttgatgggagtcagactgtccttctctgaaaatataagttgggaggggccttgggtggggagagggatgagttacctgtactcactgcccatctctctgccataactctctgtatggcccctccagtttgagacccttcaggcccaggctgggaagcatgggga

SEQ ID NO: 181195 - DNA, 1368 bp, Homo Sapiens
  misc_feature (1133)..(1157): n is a, c, g, or t
tgtacaaaaaagttgggttcaagacagatgaatgtggaaagcataaaaactcaatggaactgactgagatttaccacagggaaggcccaaacttggggccaaaagcctacccaagtgattgaccagtggccccctaatgggacctgagctgttggaagaagagaactgttccttggtcttcaccatccttgtgagagaagggcagtttcctgcattggaacctggagcaagcgctctatctttcacacaaattccctcacctgagattgaggtgctcttgttactgggtgtctgtgtgctgtaattctggttttggatatgttctgtaaagattttgacaaatgaaaatgtgtttttctctgttaaaacttgtcagagtactagaagttgtatctctgtaggtgcaggtccatttctgcccacaggtagggtgtttttctttgattaagagattgacacttctgttgcctaggacctcccaactcaaccatttctaggtgaaggcagaaaaatccacattagttactcctcttcagacatttcagctgagataacaaatcttttggaattttttcacccatagaaagagtggtagatatttgaatttagcaggtggagtttcatagtaaaaacagcttttgactcagctttgatttatcctcatttgatttggccagaaagtaggtaatatgcattgattggcttctgattccaattcagtatagcaaggtgctaggttttttcctttccccacctgtctcttagcctggggaattaaatgagaagccttagaatgggtggcccttgtgacctgaaacacttcccacataagctacttaacaagattgtcatggagctgcagattccattgcccaccaaagactagaacacacacatatccatacaccaaaggaaagacaattctgaaatgctgtttctctggtggttccctctctggctgctgcctcacagtatgggaacctgtactctgcagaggtgacaggccagatttgcattatctcacaaccttagctcttggtgctaactgtcctacagtgaagtgcctggggggttgtcctatcccataagccacttggatgctgacagcagccaccatcagaatgacccacgcnnnnnnnnnnnnnnnnnnnnnnnnngtcccctcacaacccagtgacacctttctgctttcctctagactggaacattgattagggagtgcctcagacatgacattcttgtgctgtccttggattaatctggcagccaggagggagcagactatgtaaacagagataaaaattaattttccatattgagggaaaacaaataacagacagagaaggaagccttcaccaagattttctt

SEQ ID NO: 181196 - DNA, 1683 bp, Homo Sapiens
ggggtgaagtcaaagggaaagtcaggggatgggagtcagtctgggccatccgaatgtggagtagttctgggtcaagctctaccatgaaggccacctctttacatatccttttcctgccccttggtaatggccccttgattcctcagggcagcctcagctgctgtacctgaacacttttatgagggcagatggatcctggggtaacaggggtggtacgagggctggggccccctcagtttgtgtaaacctgagttccgatcacacgcatgatttccttctgtatcttggggtcctgagtattaatgttggcatcgcccacctgaccatcctcatatacaaagaagaatcttgtgcagacatggtcggacacagggcacacccagatgttcccatgcttctggaggtccttagatgtaatcacttcacaaagtgctatacagtttagattccgactctgcaggaaccgtgactgaatggatcgggtctgggggatggtattcatcctgttgtatctctggaccagctcatccttggagggcatcctgtgctgtccttttcccattcctgtcacagaacaatacacccacttcatttatcaaaaatttacgaaagtgcctactatgtcccagcactgagctagatgctcatcaaaacagcagagaataaaacaaagaagattattttcccccacagaatttagtctgctggaaattacaagcaagaacaagtaattaacaacacagcatggtaaggggttgtgatgcagattatagagcatggtgtgagcctagaggagggcaactagcctagcctaagagtttaaagaagtcatgtggtgacagctagactgagaactgcaggattaggaagagttaattaaataaacagcggggaagtgtctgggaagaagtaataggatacagaaggcctgaaggaaagataaggtagtgtgtgttagttgcatagagaatagtgaattgcagaggagtggtgagaaatgatgtagaagaggcaagctaggatcagatcaagccggctttgcaggccatgttaaggcaactaaagtctatcctcagaacattagggaaccactgcagggttctaagataggggagcagcacatgaaatcagccaggaatgaggggcccaggagagtgggacatcaataccttggtgtcaagtgcctggatgagtaaaatgaatggaaaggaagcaagcagaacaagtcagatttgctctagtctcaaagttacattaaaaatctgaccagtcattcaagagaaaagcatcagcagttaagtgatgaataattttgtacaggaaatcacaatggcaactaacttgaagaatcctacttcaaacagtcttcccaggcttgagaaagaagtgcccattccttctagtttccacattatctaaatccataaactctctaccttccttacccgtttataacatttatagactcaacttggacttttcttatttagatatgaaaatgtgcttgtgtgctcccactcctcactctttttggtttgaggataggacgttaagtctctgtactcagctttatcataggcccaatcttaccacagttagggataaaaatgtctacccatgtgtggacacacgtgcctgtgtgtgtccttccagggagagagatgccaacttttttgtacaaag

SEQ ID NO: 181197 - DNA, 1813 bp, Homo Sapiens
ttggcttgaacaagaaaaactccctctgaaatacctttttctccttgtgatagcaacagaaaccaagcagcaacagcccttggaaagaggctaaatttttcttgacttctgcagcaacaaagaccgtgaaaagttggcacttctggcctaacgctgccgtcatcctacccctcaccccagggcaacccaggctggacatttagtgcctccctctttattcctctgtgatcatccagatcagcacttgactgtttattttcaaatctcacgaacctcaccccaagatcttcacattctggatctcagctgctcttgaaggacagtgacttgttaccaccgcaacagcagagcctgccatccccaacagatcaccagttgtccctgacatcgtgccctaccttgtctccctttgtggtctcctaaatgcccatctcgttggccttggttcggctagtggtatggaggggtgctgcctagcactgacctgagagtgtgtgtgacccactgacccaatggtgagaactgactgcccacctctccaactgattgttcaaagggtagaggagacaaagtgcagatctcaccctttcttggtattttcccttctacccttttggaagatagagtggctatttgaagttaaaggaaagggaaggggcacagaaacagtattacttggtgtgtttgtgtagtgggttttcttggggagggagaggagagttaagtactttaaaggatagaaagaaaataatgagacaagagagtttaggtgtgcttgggaactgtcttaggtaatgatcctggaagaggccagcttgtactggaacccagatatgcttaggagtcaaccttgacattgaagtcatttgcatttctttcctactggctaccagagcctctcagtcatcatactgagacttcagaaggccaaaattccctagatgttttcctctgtcccactaagagctagtttatggatatgatcatatcaggaagagactgagactctcacaaagggtgacatgaaaggtgtaaagggatcagggcttcagttattctatatttcccaatctttgtgggaatcttcctcaccatatcatcccacgcctttccatgggataatagggacctaacaaagcatgatatccttatttctcaccactaggacatcaaaggccagttctggaatgatgacgactcggagggagataatgaatcagaggaatttctctatggcgttcaggtgaggttacatctcccaagacccctgtgttggatggtctagatatgtgctgctttttggatacatcaggagtgaaagaggttctggagcacagatgagatgaggttataatgttgatgtggtctgagcatggtcttgtcagagctgatcccgtgcccttgctctttctttggagtcatacctgttccagagtaaactacatcctctgtatgtggagactacccatatcttaattagacataattatttattttctgacttttataacactagccagtgggggtagtttcattcattagggtcacatcttaaaagattactctgccagcgtttgcttaatgccatcactacccagggcacagtcctgagcagaagtacccagactctcagaatgctcttcacttagaaccaatcttaggaaacctgtaactcttcagcctgttctgagttgtcatagaaggtatcctggtcaaggtctgagagaaaagctggagatttaaggaagtgaactccaagcaaaagcctacatttggtctgctgaacctttttaaagtcatgatgagatggaga

SEQ ID NO: 181198 - DNA, 1392 bp, Homo Sapiens
ttgggtgctgacatggcggcgatcaaggtcagccactcctgcagccagtctccactaactgcaccacagctgccaccctggaaggtctgagtgctgccaaccttctcatcggcatcctgctgtatggagaccaggccaggaagacagaggaagcagcaacagacggcaaggggcagtgacaggcggcccttggctcgctcttggggccaggagggcgctgctcgccacgcaatgccccactccagcctgccacggccacgagagccgctgaggcagcagtccctgcgcacacctctggaggccacagccgccccctgcacagcccggcaggctgctggtccggctgcagccacatgcgaagcttcaaaaagtcaagtgtggtctaagcaacacacaacacaggacagcgatccacaacacagcctggaacatgtctactgggcttcacctgggactgctcacagcaggcggctaacaaagcagagatcgcttaacaggaggagccggccgaggcggaggtccacgtgctcaccgcacccccgggtcgctgctccgcccacagccagcgggcactccacgcgaggggccacggagtttacactcagggtgtggactaagccactttaaagtaaaatctgtcaagaacacgggaggggctctgacggaccacccatgacgtgacagagaggcccttgtggtcagtatctctgcttggttcatcccaactacaacctggcctggaggaatctttggggaaaatgcaaaccactctgcaaggccatgagaatgcagccgccctgtcctgtgagccgtgtgccagcagccaccacagccggctcgccctgaggcactctgtgcctccatcctacaccaaacacacgcagacacctgatgaccctctgtagccagatcaaagccaagacggccgcatgcacaagagccccgaggcctggccagctgcagacagcgccacccaatgtgaggcgtgcacaagggccatgtgcagctcccagcacagccgtatggagacagggcaggcagcgcccagcagggaagggccacggctgccacggactgcccagcccctggtcccttcctgccaccaagacactgaggagcagccaccaccagagccctgcaacctggattctcaatctcaaacacagcgactctaagagcagtaagactgttttcagcccaagcggcgacctgcacccaccaccacgccggcctgcctctcctaagtcctttcccaacacgtaacaggaaacagaactcacgtgcaacatgaatacaaagaactgaaaaacaccagaactctattacagtcttcaaaatggggggccaaaaggccattcctcaaaggctctctaacctccatctgggacccaa

SEQ ID NO: 181199 - DNA, 1039 bp, Homo Sapiens
  misc_feature (471)..(484): n is a, c, g, or t
  misc_feature (536)..(879): n is a, c, g, or t
ttgggtcattgaatgtcaagtactgatgataaaattgaggcctagagaagttaattgacttgctgaaggtcacagtaacatttggactcattttgaattgccttgaagacaggaagaagagaaatagatggtaggatttttattaggcaaaattaggaaaggttgactggatagaaataaagcagctctttaaaaatattgtagattgaagagcaggatttgtgacactcatatctgattaggttaaaaattaaatcaaggattagttaaaataaactgctaaagttaaatatcaagacaaataactatatatcatgttggtaatataaccacaggtggaacacattatccttgtaaccctctgcgatacatggtaaaaattaaaataactgcgaagaaatcccaaactttattacatttgttgtttgaactttattatatttgttgacagtggtattagtgtaattttgnnnnnnnnnnnnnngttgtgtatattttaggactgagcaaatgaataacatgttgaagtattacannnnnnnnnnnnnnnnnnnnnnnnnnnnnnnnnnnnnnnnnnnnnnnnnnnnnnnnnnnnnnnnnnnnnnnnnnnnnnnnnnnnnnnnnnnnnnnnnnnnnnnnnnnnnnnnnnnnnnnnnnnnnnnnnnnnnnnnnnnnnnnnnnnnnnnnnnnnnnnnnnnnnnnnnnnnnnnnnnnnnnnnnnnnnnnnnnnnnnnnnnnnnnnnnnnnnnnnnnnnnnnnnnnnnnnnnnnnnnnnnnnnnnnnnnnnnnnnnnnnnnnnnnnnnnnnnnnnnnnnnnnnnnnnnnnnnnnnnnnnnnnnnnnnnnnnnnnnnnnnnnnnnnnnnnnnnnnnnnnnnnnnaattttcttttaaattggggtaggaaaagtttttatttacagaataatgctaactactacttgtagaaggaattacataagtgaaaaaaaattggttttccatccaccgtagaagtaatagatataagccggaaacatcaatcatcaatggaattaaact

SEQ ID NO: 181200 - DNA, 1518 bp, Homo Sapiens
  misc_feature (320)..(404): n is a, c, g, or t
  misc_feature (505)..(558): n is a, c, g, or t
aaaacttgaggtgtatcccaaaccatgggagcgttgaagaagcttttgagatctgggtgccatgtttggaacacactgatgtgacaggttgcctggaccacaaaccctggctaggaaatgggcaagagcaagacccaggcatcgggggagagccaggtgccatggtgctgaggctctaagcaagggaacgcaacgtcatcctaaggaacgggtcctgtatgtaaggctcaggggccagtgcacacctgaattgacaccgcacaggattcaggtctgcctttaagaacataatgcagggttgggggcagtggctggtgctnnnnnnnnnnnnnnnnnnnnnnnnnnnnnnnnnnnnnnnnnnnnnnnnnnnnnnnnnnnnnnnnnnnnnnnnnnnnnnnnnnnnnatctacaaaaaattctaaaattgcctgggtgtggtgggatgtgccttagtcctagctactgaagaggctgaggtaggacactggagcccaggagctcaagnnnnnnnnnnnnnnnnnnnnnnnnnnnnnnnnnnnnnnnnnnnnnnnnnnnnnnaaatcctgtctctttaaaaaacaaaaagtatcatttggatttaaaagactttcccagggtccagtgaactagcacaatgccacagccttgtaagttggtcatagtttgatgaactgaaatgtttattgagcatctaagaacataggaatccccaggccttattatttttaatagtttggcccacatacggacaaaactgacttctaccttcctaacagaaatcttccatttctacttatgaagaaaatagcttatagcctgtggagtcacttaggcatattttctaaggccaaattgctgccatcatgtagaagagggggagcccagtagtgctaccgatgaagtcttgctcatacaaatagcggctgacttgactgcaaaacccagggcccacccctaaaataaagccttacatttgtgtattctgccattctggagatgagacttctaaacggcttttgctggctttggaaacactaaaaaagtattctggaaaaagtgtgatcctcagcctggatctcatcttcctagctgcaacattagcttcccttcgatttcaccacagcttcagaatgactgcctaatggatttcaggctgctcctgtgacaccttacagaggatgctgttcactcctgaattacggttttctgtttgaaaacacgaaatatgcgagttatagactggggataaatgtggagagggtcctgaagtcaaggagaagattttaccaaaactagagcacttcaatggagaagtaggcggagtgtggtggtgttctggtaaacatgtaacaatcagttctccaaaaaagggatgaggagcattgatttgtaagcctttcccaatttcactggtataaatacttccacggtgcctggtttcaagccaacaacctgagttggaaggagaggcgcaggagcacagtgctacatagtatttccaccttacagataagccaa

SEQ ID NO: 181201 - DNA, 930 bp, Homo Sapiens
ttggttgaaaagtgatagagcattgttctgaaatcagaaagagagtaataattaattccaagaaaatcagtgtgaagtcaggtataaaaggaatgtaatgtgttcacctttaattgtttcaagttaatagtcaagcttcctgcatgtgtaattttatgtaacagtgagattcctaagaaaatgtgaaccaaagaattgaaacatacttattttttgtagttgctttgaattacggaatttataagcaggatctcccaagcctggatgagaaacctcggatagtggtttttgttgatatgggacattcagcttttcaagtgtctgcttgtgcttttaacaagggaaaattgaaggtaaagtcatacattggaactcagtgtccaaaacacgttaagtgttgtgactttaagctactgagcctctttactaggctttttcttcttggtaatgaagagttttattttaggtaaagatgttaacaggaaacggttgctaaggttgagctccataaagatgatgtaattgtcttagcatactcttaagtgttcttgtttaggaaagaaaaggctttttacagttattttctatgtagtcatttaaaagtcaaaaatatcttagagatttattcctgactgatttggatttcatgttataatttaaatatagtcttgagtctcttagtctttcattgtttgagtagtaatatttaagattctagttacaaatgtgattgaaaataaccagactatttgttgtttcaaccaaattagtactgggaacagcttttgatcctttcttaggaggaaaaaacttcgatgaaaagttagtggaacatttttgtgcagaatttaaaactaagtacaagttggatgcaaaatccaaaatacgagcactcctacgtctgtatcaggaatgtgaaaaactgaaaaa

SEQ ID NO: 181202 - DNA, 711 bp, Homo Sapiens
  misc_feature (516)..(524): n is a, c, g, or t
acaaaaaagttggctggctactaattttttggaattgaaggtttaaaattatattttcctttgggtaatctcttctgtgggtaacacatgcttaattctttctttgttcttttttttcgtgtcaatgtttttagacataattttaaaacaaagcatatgtatcttttatttttattacaggaaacttaaaatgtggaaattaaagtcttataaattccccttgtatccattatcctgtttaaacaattaacaatattctatttctttttcataaaataaaggatattttattcagagaagtttaataatattctcttgttttcccttaggtggtgctttgtaaatttcactccgtgtttctgtctcagaaagggcaggtttatacctgtggtcatggtcctggagggcgattaggacatggagatgaacagacatgcttggtaattgaaatgtcattacactatttaggtaactttagaaaaatgctgataagctgaaagatttaattaactaaannnnnnnnncaactgtaaggacgaaataatacatcaattgataatagattttaaaaaatctgtttcctgatatatcatgtttaaattaaggatttacatacaatgcaaaaggattaaaaaaagtaatactttgcttatagcaaatactgagtcaggagcgttacataagctttaaaatgtttctagagttgaaata

SEQ ID NO: 181203 - DNA, 1290 bp, Homo Sapiens
  misc_feature (469)..(595): n is a, c, g, or t
ttggctcctatatgctgaatgcaaataggagtctagaataagatacttccagatttggggggttgtatcttattctagactcctatatgctgaatgcaaatatcaaaagcggtaaagtttcactggcttcttcaacctgaattgaacagaagaattacatatttgattgtaattcatataggccaactgtgttatttggcatggctcttcactaaagcaccaagcactgatttgaagtatgttgcattttttggaattaaaaaaagttttcatgaaaaaataaatacataattgaaaagccaacatgattgctgttcactacacccttttggcagtattctatgaaaataatccaagtctgtatgtaagagctttcagaaaatgatacatagctaagtctccaaaaaatgctaataagcaatgaccacaattaaatagaatgcatgaaacaggaagcttaagagaccannnnnnnnnnnnnnnnnnnnnnnnnnnnnnnnnnnnnnnnnnnnnnnnnnnnnnnnnnnnnnnnnnnnnnnnnnnnnnnnnnnnnnnnnnnnnnnnnnnnnnnnnnnnnnnnnnnnnnnnnnnnnnngtttggaaatcaggaggacaaagcagagatggagagggtcaactgattttaggtagccaaggcaggcaaaggtaaacaaaaagagcaagaaaaaagcaagaacaattctggggcactaatggtgccccacctgcttttctttaggttaacaatggaagcagtcctgtgcttacaggtaacagaagcagtgagctagggagagacagttatatatgtacatttgtttattgattatatatgtcttacagtacaatcatattgtttatattataaaacatgtagaatttttcaaaggctaagacaaatataaattgtagttttactatttatttaataattcagcagtggctgaattattaacacagttctggagagctggagctgaaggtatattctcatagaaatgaccatgatgcttataggattgtaatatggtcatttagttgtttaacacatgcatttgtgtaatattttatgtgttgttttacacagcatttcaaaaggtttgaactacctaaccattatggcaccaggaaacctctggcatatgagaaataactttctctttggttcaagatgttggatgactcgattttcagcagaaaacatcttcaaatcagtttcatttagctttttggtgtgaagtgtcataatacagacagtgagcctttgaaaaatgaggacctactgaaaaa

SEQ ID NO: 181204 - DNA, 851 bp, Homo Sapiens
tgccttgacccacccctatacttttttttaacgaaatctgtttctttcagctctgatggtagatacaagtagttactatttctgaatgggttttactgtaaagaattatgcaaattgagccaccgcgcccggccatatctcagttttctaatctgtaaaatgagtaggttagaccagctaatcactctggtaccttccaacttgaaaaaagttttttccccattctttggtaaattttagatgtggcctgaacattctcctggaagtcagaggtcaaattatctttccattttcttttattttagtaagaatttcgcaaatgacaagtgataacaaaggcagcaggatttttcatttctctgtaaataatgtataaaatatgtgaacagaactatatctttcatctaaggccagttcaatttattaaaaataaaactaatgccttttaaaattgatcagacctttgatacttgaactaaattttgcattagagactttttaaaaattgttcgcttttgctgaataaattgcaaatagagaagcttcattgacagtcagtccctctctgcttaatgcagttatgggtcctttcgtttatggcaaatgacttacctgacaagagttaattttgcctccattgtatcaagtttgaatattttccaagaaatctgatttatttggcagactctgagagagagaacagattaagtgccgttttaaaactctgtattttcatttataataataaaatatttgccaaaatacagctgttttgtaaaattatctgcaccctcatccaagctttatatttaatagccttaatcacattttatgaagaatgttaaagaaaa

SEQ ID NO: 181205 - DNA, 1497 bp, Homo Sapiens
  misc_feature (106)..(120): n is a, c, g, or t
  misc_feature (191)..(200): n is a, c, g, or t
ttggatttcgtttccacagaggagagacacttgcagagtgccagctaggttagatcttttgccgcttctttcatttgattaatttgggtttttaaagggctgtttnnnnnnnnnnnnnnnggccgggaaactttaaaagtaggcattactgtagtactgcatttcttagaacattttaaactagaactcannnnnnnnnncacagtatatttacttgaagaagcactataataatcattgagaagtattttgagtctgaaatttaatttaattttccgtttcaaattgctttatttcagggaaataattttccagttgttttgctatattctgcaaataaaaaccgtgtttccttttttcacttaaactttggtaggaaacaaactaaagcagacaaacatttcttgttatgtttgttgctttctttaatccaatggataaaaaagtaaaaccctgtaaacattattttatttttttatgcaataccatgctgtaaatatggttcatcaaataaggatgtacctatgattgaatctttaattctgcacagttagagtttatatataaacgtgtcttgacaatcaaggacttttatgtgagtcttcctttatgatgtttattaatgttatgcattccatttgttttgaagtgagtaccaatgtgctaatttgtattgtctgaaagtatgtaatgtttttacagcttgtttttaagaatctgtaaatatgtacaaacaaatcacagtactgctttatgttagaaggcatatgatgttgtactgtatgtaagcaataatacatagcagtgctaactttacaagtagcatcaggaaagttctaaaaacatttcagagttattaattatccttatttcatttaataatgattatctttaatcagtttttataagcaaattccattgttcctcctattggaacgtaacactgtttacacagcataattgaagttgcaggggagacaggctaaatctgacttcatctgtactcactttcactaagcattgaatggccttaccactcttctgcaagatggaggaagaccgcaaaacttagtgcccatcacactgaaggaagggatgtggttttttttcctgcttctgtactgctacctaactttgtgatttgctttggattttaatatttgtttctgttttagattcaagcccgtaagttttgaggtgacttcagctccattgtgaaatagatagttctcttcatatttcataactacatttcaataattctaaactttctacattgatttttagatacttatttttcaagcttggtttctcagctgatcagatgaatttattcaacttcaatacaaagaaagacaaacctattatagtttcaagtgagtagatattatactgtacaggacagctatttgaacacacacatcactgctttagaaataaaaccgccaatttataaatgtatatgacctacattttataggaaaaaatgtttttaaa

SEQ ID NO: 181206 - DNA, 1024 bp, Homo Sapiens
cctataaaagccaactttgtacaaaaaagttggcgaagttgcaggggagacaggctaaatctgacttcatctgtactcactttcactaagcattgaatggccttaccactcttctgcaagatggaggaagaccgcaaaacttagtgcccatcacactgaaggaagggatgtggttttttttcctgcttctgtactgctacctaactttgtgatttgctttggattttaatatttgtttctgttttagattcaagcccgtaagttttgaggtgacttcagctccattgtgaaatagatagttctcttcatatttcataactacatttcaataattctaaactttctacattgatttttagatacttatttttcaagcttggtttctcagctgatcagatgaatttattcaacttcaatacaaagaaagacaaacctattatagtttcaagtgagtagatattatactgtacaggacagctatttgaacacacacatcactgctttagaaataaaaccgccaatttataaatgtatatgacctacattttataggaaaaaatgtttttaaatgctagtcatttatataatgtgctttgaaggatttgctagtccacttctgtcactttttagtacactggtatcttttatatgtaatgtatgctttttattattgtagcaaagcatttcagtagaaagaattttgcaacaatatgggggaaatttttcattgttggatttgaattatactggattttatctgtgtagtcttacttgtctttattttaatgctgtctgaagggaacttggtatccaaataaagcagtaacctcattttacttcaagggcatactgtgtagtgctgaatttaatctgaaaatctgatgatttgaaaagaaaaacaagtttataaacattgtacagaagaaattaaatgtgtgtgatggaaatcctgatggtggagcacgttgaattttctgatatatagtgttattttcctgggatcccctatgccctccttgtattt

SEQ ID NO: 181207 - DNA, 1624 bp, Homo Sapiens
  misc_feature (236)..(335): n is a, c, g, or t
  misc_feature (392)..(401): n is a, c, g, or t
  misc_feature (931)..(939): n is a, c, g, or t
  misc_feature (973)..(1049): n is a, c, g, or t
  misc_feature (1055)..(1500): n is a, c, g, or t
taaataaataagttctgaggaatctgtacaagaaaaatctcacagaactaataactgagctcagtaaagtgacaagatacaaaaaaaaccatgaataattcattatatttctgtgtgtctacagatgaacatgtactgaaatatatactgatattaaaactgtatcatttataattgttaaaaactgaaataatcaagtgtaaatctaacaaaacatgtttaagagttagatgctnnnnnnnnnnnnnnnnnnnnnnnnnnnnnnnnnnnnnnnnnnnnnnnnnnnnnnnnnnnnnnnnnnnnnnnnnnnnnnnnnnnnnnnnnnnnnnnnnnnnttctcttcaaattgatatacagatttaagcaattcctgtcaaaattccagcaaggcnnnnnnnnnngtacatgtaaacaagagtattctaaagtttgtatggaaatgcaaagaaagtagagctaaaataattttggataagaagaataaaatgggagaaatcagtttagctgacttcctgacttactatattacagtcattaagatggtgtggtcttggtggatggacaggcctgtagatcaatgggacagagtagaaaacccacaaatggactcctacagatatgcacaactgattttttataaaaatgcaaaaattattcaatggtgtaggatagtcttttcaaacaattgttgctcaatcagttgtacatcccttagccagaaaaagaaccctgacctaagtcttgcatcctataaaaaatgtacttaaaataataattcatagacacatgtaaaatataaaactattaaacttgtagaaaaaacataggagatctttgggatttagggctagggaaagcattcttacacttgaccccaaaagcactatttgtaaaaggaaaaatagataaattggacttcatcagaattaannnnnnnnnctctacaaaagaccctgttaagaggattaaatannnnnnnnnnnnnnnnnnnnnnnnnnnnnnnnnnnnnnnnnnnnnnnnnnnnnnnnnnnnnnnnnnnnnnnnnnnnnttcaannnnnnnnnnnnnnnnnnnnnnnnnnnnnnnnnnnnnnnnnnnnnnnnnnnnnnnnnnnnnnnnnnnnnnnnnnnnnnnnnnnnnnnnnnnnnnnnnnnnnnnnnnnnnnnnnnnnnnnnnnnnnnnnnnnnnnnnnnnnnnnnnnnnnnnnnnnnnnnnnnnnnnnnnnnnnnnnnnnnnnnnnnnnnnnnnnnnnnnnnnnnnnnnnnnnnnnnnnnnnnnnnnnnnnnnnnnnnnnnnnnnnnnnnnnnnnnnnnnnnnnnnnnnnnnnnnnnnnnnnnnnnnnnnnnnnnnnnnnnnnnnnnnnnnnnnnnnnnnnnnnnnnnnnnnnnnnnnnnnnnnnnnnnnnnnnnnnnnnnnnnnnnnnnnnnnnnnnnnnnnnnnnnnnnnnnnnnnnnnnnnnnnnnnnnnnnnnnnnnnnnnnnnnnnnnnnnnnnnnnnnnnnaatagaagccaaactctctgtgggcttctcacagtgtacccattgccagagtaaactgcagccttgaaccattgctcagcctccttacccatgagctatgaacactgaagcaggttgcacagtg

SEQ ID NO: 181208 - DNA, 1457 bp, Homo Sapiens
tacctaacacaaatacttaaatgcatacaactatttttataacttttaacttttacacttagttgtccatttctccaaaatatgaagtcctctgcggaagtgactccagaccttcagagccgtggtgaactttgtgaattactggtaatgaacaccatcatcttgtctgttttaccagcacatgatcatataattgaaaactgttttgaacaggaatgtctcatcataaataagttaataaattctacaaacatctactaaacatctgttatgttctaggtacagattggggaaatcacaataaaccagtcgggcacaatacctagcttcatgaaatgtatagtcaatctcttctacttcaaggcccagactctcttagactttgttgattagcatccaggctaaatggatcctctctggatcttcatgtggagggcaataaggctggatttgctacttggcctttttaggggttgagaagatgttactttaacaaaagcaagtgcccaacaaaatcataaacccaggtaataggctgaccactttaagctgagaaatcctacctagttctctgggatataagccactactaatttaatgcacacatataccaccttattttgaggctgtgtgttaggtatgttatgtttgtcatccccccacccccaacacacacaaaaaccaacttgctattcacgtgattcattttctatatgaattgaaaaatggcactaaagaaaaaagtttggggatatagaaatagcttattttttaaggaagaaacataacctttctaagtactggatgtgtaatattaaaaatgtagttaaccaaggacagaggctgcacctaatgacttttggaggaaccttcttgctcaagacactatgattctcgttacctggatagtatcacccatggattgtatcatatatgaaccactgaggaacacacattcctgcagatgtttgcagattattaattgctttatatttggagcacccctcccttcaatcagcataaatatttgagggtgggctgtgtttagaagatgtttagtctccaatgattacaacatgatgcaccactctcctatacaaattttgatttaagaaaagattttatttttcaaaggaaaccacaagtgaaagcaatcttgaagattcaatagcagttggtcctatagtgccaggtaagaactttgaagtagcacgtgggattatatgtatttgtaaatatatttgtatacagggcagttgcaaaaaaaagagtatttataattgtccaaagagcttccaaagaggagcagcattgcaacagtgtcgtgtatgagcaaaagtcaagattcttgtggcttctccagagtgcaggcaggaccaaactgatagtaggcaacgtgtctcaggtacaagcaaaccagtccttagaagcaccaatcagtaaacttctttcctgag

SEQ ID NO: 181209 - DNA, 1559 bp, Homo Sapiens
  misc_feature (399)..(412): n is a, c, g, or t
ttggcctgaagttaatcttacaaggccaaatctttctgtgtgttccataaagatactttaagccagcatatcaactataagatgctgacacatacaagtattaaatttacattatttatttgtaagatttttctaaacagcttgtgttaaagacccttgagttttttgagcacatgttccatatctacatgttttgttttaaaatggttctaaggttttgtggtcaaatgaagatactttttaaagtcaataaaaaggtataaaacaatacactgtcaatatggatagcacagaaagatattaagaaagaagtttaaaacacttagaatttccattctaaagatgacattttgctctcagtccagacttctgtgcttatatttaatatttatgtatggnnnnnnnnnnnnnntttaaagtgtgatcgtactccacttactgttatttaacctactctgctcacttaaaaatgtattcgttattccaggtcaaagaaatggcagatgtccttaacccattaatcactgcagtatttctagaggttagtaattgtttttaagtctctgactccaaaggtattacgtataattaactcttctgaagccttttgcttttggcttttttattttattcaccatattggtagtttagccatattgatgtagatatgacagaaatagtgtatatttgatgtgtattccttccttattaattagaaagcatacagttgaagctgcagggtactggaagaagcagtagattgtcattacttagtactaatccttgacagcttaatggacggttcacagtaatgaaacaccttctgaataccagctggtaaacatgaagggctgaaaattataaacaggtaagcactgcttcctaatttaggactaaagtttatgcagaggtttgttacaaaacaaaacatgttgtcatttccttgccaggaaatcatgctttgttttgtcagaaaggtagtgtttacattatcctcatcattccattagatttgagaaggtagatggtttaagtcaatggaaaagaggatcctgtgactgattatattacctccctatgtgatgttttctggattccatgttttaagaactctaccttgtaaactaactgtgcagacaacatagactttttgatgatttgtttaaaacatgtttatgtaagtctggggggagaaaatatatttgatagttaagttttagatgttaattgaaaaaatgttttaactaccaaactcttacttctctagttttaaattcttttgacattaccatcaaggaaatgattttaattctttaattacacagttttaatcaagtagtcagggaaactattttgatcattgtaataatttttaaaaatataagtttgtgatttagtaaacggcagagtggtgcagtagaaaagactttgtaaaccaggagccccgtgttgccctggatcttccttgatttgttgtgtgactctgacaaacttcgttattttcatgtgcaacataagagatttaactagacgatatctgagtcccttttgtgtgggaa

SEQ ID NO: 181210 - DNA, 1480 bp, Homo Sapiens
  misc_feature (224)..(279): n is a, c, g, or t
  misc_feature (1220)..(1283): n is a, c, g, or t
ttggcagcaactgaatatattgctcatacattagctttcctttcataacctgctataagttctctgatccatgaggaagagaaaaagagtatctgacaggtaagattgctttttaaagttgttttaaatgcattacatgactgagaaaagaaaaatgcacattttattgttgcagtttaaaatttcattttggtgaaactaaacgtgaaacaaaagggataaannnnnnnnnnnnnnnnnnnnnnnnnnnnnnnnnnnnnnnnnnnnnnnnnnnnnnnnagaaaccgtgtggtacactggtaatcttgtcagggtacaaacttggtctgactttgttatttggtttatttgtgaaccatgtacttgctcttcctcccagaaacatagcttgtaggcaaggttaatccagtgttggcgatccatgtcctagcacagcatctgtaagttaatgcacaatcgttccttccaaggatggatttatcattgtaaatatattttcattgtcttacaggcataatgggcataagtatgttgcttttaaatattttaaattaaactattacagttacatatattttgcttgaagtgagtgattttcaaactttttgtatttggtgggctgtccatcttgtaatggtgggagtaaatgtttccatagatgataaggcagttcttggctgaattcagcttgtatttcttttggagggtgggcaaatcagagggcagagattatttagttgcattataggtattcttctataccacttgccctttgaaaccctcaacttgaggtaatgtgcagtctggggttttaattagtattaataatcttgtggatttacagaaatctataatgcacagagttgagttttaaccaatgatcgtattcataagaaaatatttcgaaccaccacattcttcatggtcattttagttagtacatagtcattgagtggccagccacacctgacacaatctcccagcatccaagattggagattcctggtctgtgtagagtatatggttttgcacgaaatctttctagtcttgtgattgcttcagtttaatttgtcacataaaaccacaagtatttaatattaatgtatcagtggtttggtgtttttgttcccagtactgggctttgcgccgggaaaaatctgaatactggagctacagagttaactctaaaagtgcttttattggtttctagaaactggaannnnnnnnnnnnnnnnnnnnnnnnnnnnnnnnnnnnnnnnnnnnnnnnnnnnnnnnnnnnnnnngggagcgtgaaagggaacgagaaaggcgagaacgggaacgagaaagggaaagagaacgtgaacgagaaaaggagaaagaacgggagcgggaacgagaacgggatacggactgtgaccggacaaaagagagagactgagatcgggatcgagagagagatcgtgatcgggatagagaaaggagctcagatcgtaatagg

SEQ ID NO: 181211 - DNA, 853 bp, Homo Sapiens
  misc_feature (665)..(707): n is a, c, g, or t
aacttcaggaaacatttagtatggactagattcactcactttttcatttacttagaaccaaacttttgaaatgagttctgaaacaaatggttatttatataactgaatataaggagcacagtgaaataagcaagaattaaaaattgaggaattctacaggaaaaattagtattggaacagctaaaatattctgtaagtatctatttcagaaataaacaaatttctttataagtgtatgccattgaggtaagttttatatagtctagcctcattttacaatataaatttttatattcattggaactgtttcagaaatgagatttttccccctttaatagctgttagtttctgtcctctttctatcatatcttatttcatccctttgtaatttcaatgtattcagttttgactttgcccgtattctacttcgatatagactggcacagcaactgaatatattgctcatacattagctttcctttcataacctgctataagttctctgatccatgaggaagagaaaaagagtatctgacaggtaagattgctttttaaagttgttttaaatgcattacatgactgagaaaagaaaaatgcacattttattgttgcagtttaaaatttcattttggtgaaactaaacgtgaaacaaaagggataaatgnnnnnnnnnnnnnnnnnnnnnnnnnnnnnnnnnnnnnnnnnnnctgagtttgtgtagaaaccgtgtggtacactggtaatcttgtcagggtacaaacttgggtctgactttgttatttggtttatttgtgaaccatgtactttgctcttcttcccagaaacatagcttgtaggcaaggttaatccagtg

SEQ ID NO: 181212 - DNA, 966 bp, Homo Sapiens
ggggtgtaataatcataaaacaggaagcaagaaggcagaaagagtgaggaggttagaggcttacttgactgagccaggcgatctttagcactgtaacactgaatctgctctatccgactgcacagtgaagtcactttgatgtgtaactgctccaggtcattacctgagcaatccacctacaaagaagcagagaagccaattaatccaaggggagttcctatcactccaatcccacctatagactctacacaaaaccttgaaacaacagtgaggtgagggaggggaaaatccaagatgatgacacagggccaagccaccaccatctagtggaggacaaggcactaattatgcagtaatagccaagaggaaggtaacacagttacctagccttggactaggaaaagtcttgagatcccgaactatacagcaagctttaataacacagcaccaaaaatcaagataaattgggttcagagagatggtatgacttctaaagagcacacaaggaagtaaaaaatgcagccagaaccaacatttaatttaggtcccctgactccaagtttatagccttttctaaaacaccaaaaaagctgtgtgcagggggcaggaggatcaaaagcaagacaggttatttgctctcatgaaactgatagaaaataaataagaaaacacaaaacagtaataaatcctgaaaaatcacaagccatgtagataatttaaacaggtggatgtggcagagagaaactggatagctacttgagactggaggaccaagagaggcttctttaaggaggtcatatttaaattgagacctgaataacaaggagagagctcagctttccaggcaaagagaagacagctaaaacccccaaaggtgggaattcaaaggagatttacatggtgacatgtagggtaaggagaagaagcagaacaagataatactagagagtttttatgtaacatagg

SEQ ID NO: 181213 - DNA, 1417 bp, Homo Sapiens
ttggcttgtctccaaaatgagaataataaaatttaggtcaggattactatataaactaagataatacagtgattctcaaagttgttcagactgtatagtaaggagaaagtctggttgcactttgaagagcttgaagatttgaaagattcccaaaaaagcattttaaagtttacatttaagggaccttggacctcaaccctctcaagtttacaagtctgaaactttagacatcaaaagtttgagcagtttttccaaggcaacattgatagttagattcagggccaggctgtaagtctagaatttagatatcctgatcccccagataccgctcttctggttatacacagaccagctataatttgctaaacataaaatattgcagtgtattagccagctgtggctccagagtctgtgccctttaccaccgtgcccaactgtttcacatgctgtgtttggtagtttttcctagtgctctccttaataatggtggtgtttagcaaattgtattacataaataaatatttatttcatggattgagttatgttgcatattaaattactttccttcccattgtcaataatgacttctttatgtcttaggctgtattataaattcaaacacaggaatgttattcttgcctttttccatcagaattacctaaagttttattagactttccccctacttgcaaatctgcctggaggttctggtctttaggaagtagcacttagcaagttctggataagcactccagaatttgggatgagttatccttgttgtttgtccagctctatcttggaccccagtgctgctaattagattcatgccttgttctttagggcataagttcctctcttggctatttttcctagtatgctgagaactaggattccctttcagtgacagagtcctgccctggaaccccaatcaagagcctaaagtttaactactctctgagatattagcctgatgccagcagcctgcctggatctctaaatattacccattctgggagttgttagtggtctctgctttcctgcagtgtcactcctgcttcctcattgggcctgctagccacagctacttggatgtacccgaacctgttgccttgccctacctctgtgggctggttcagttctgcattcccattccagtgtccactgccttctcgctatccctcccatctgtgcgccaccaccagcttatccccagccctgctaacatgacaaactattgtgcatttgagtgcccactatacaatgtgtgaatataaccgtgcttttaagcattgactttaatgtctgggatgatccgtctagagtccatggaaccctcctgtgttttttcatccctttcttagtaatcttggaaatccacttatgaaattctttttctaacatttctttgctgaacggc

SEQ ID NO: 181214 - DNA, 851 bp, Homo Sapiens
  misc_feature (718)..(731): n is a, c, g, or t
  misc_feature (782)..(794): n is a, c, g, or t
tgagccactgcgcctggctgagtacaatattaatgtagacaaaccatgaagtttattatttcatataagaacattacaggtttgttttttcttgcatgtctgtccacctaatgtttaagtagttctggtagctcttcctattctttattctatttgattccatttctgtgattcttttattaccactgatgttttgtgatagttaactatgataaatttaactgatcatgatttatcttctagagtatttaaataatgtatgagtgaccacccaattccaacattaaaagtgtaatctgggcccataatttatagtgaaattgtatcaaaacatagggaaactgtattactgtccattttgaaaatatgaaacttgagtattgaaaatattcaaacatggaatggcagtattctaatttcagttagttggttcatgttaatttcttacctgttagatgtttaaactgcagtgacctttacttgtatctactctgtggtggaaatgttaaaccatgatagcttttgctaccaactcaaccacttaacttttagagcagttttggggagagtttatgcttcatctgagtttagaagtaatgtcagaaaatgttaagcatgtctgtattaagaaaatataaggtttctaattgtcttattaatatggtaattcaagtgaattagaaatatttaactgcaatcttgaattataaagttgagnnnnnnnnnnnnnngtatcaagatctcaacttgatgtaaagtaaatgagcagttacctggcggannnnnnnnnnnnnaaataactgatttaatccataatcccataacaaacatagcttcacctcagtattttc

SEQ ID NO: 181215 - DNA, 1611 bp, Homo Sapiens
  misc_feature (117)..(130): n is a, c, g, or t
  misc_feature (848)..(1099): n is a, c, g, or t
  misc_feature (1110)..(1124): n is a, c, g, or t
  misc_feature (1140)..(1154): n is a, c, g, or t
gaaaatactgaggtgaagctatgtttgttatgggattatggattaaatcagttatttaaaaaaaatcccgccaggtaactgctcatttactttacatcaagttgagatcttgatacnnnnnnnnnnnnnnctcaactttataattcaagattgcagttaaatatttctaattcacttgaattaccatattaataagacaattagaaaccttatattttcttaatacagacatgcttaacattttctgacattacttctaaactcagatgaagcataaactctccccaaaactgctctaaaagttaagtggttgagttggtagcaaaagctatcatggtttaacatttccaccacagagtagatacaagtaaaggtcactgcagtttaaacatctaacaggtaagaaattaacatgaaccaactaactgaaattagaatactgccattccatgtttgaatattttcaatactcaagtttcatattttcaaaatggacagtaatacagtttccctatgttttgatacaatttcactataaattatgggcccagattacacttttaatgttggaattgggtggtcactcatacattatttaaatactctagaagataaatcatgatcagttaaatttatcatagttaactatcacaaaacatcagtggtaataaaagaatcacagaaatggaatcaaatagaataaagaataggaagagctaccagaactacttaaacattaggtggacagacatgcaagaaaaaacaaacctgtaatgttcttatatgaaataataaacttcatggtttgtctacattaatattgtactcagccaggcgcagtggctcannnnnnnnnnnnnnnnnnnnnnnnnnnnnnnnnnnnnnnnnnnnnnnnnnnnnnnnnnnnnnnnnnnnnnnnnnnnnnnnnnnnnnnnnnnnnnnnnnnnnnnnnnnnnnnnnnnnnnnnnnnnnnnnnnnnnnnnnnnnnnnnnnnnnnnnnnnnnnnnnnnnnnnnnnnnnnnnnnnnnnnnnnnnnnnnnnnnnnnnnnnnnnnnnnnnnnnnnnnnnnnnnnnnnnnnnnnnnnnnnnnnnnnnnnnnactctgtctcnnnnnnnnnnnnnnntctatctatctatatnnnnnnnnnnnnnnncacacagagtactcaagatgatgacagtcccttttcccagtgtttgtgagagactgtaatatacagtactgggcaggcacttcagtgacaacataaaaattacagtggatagaaaatgtggaaaattaccagctacaaattatcaataacaaaatctgttcttttggccagactactagagaggatatatgtatatttatgaaacaagtttttaaaacctaaacttactattatgaagattcttttaagcagagtttctgctaaatgaagcatcatagattattattacactgtaagagatctttgctgacctgcccaatagtgatctatatacaggaaagctgtgttatctggaacttttatcaactggaattttagaaaacccaatgcgaatcttgactccactagaccactgtacatcaaaagacctaatcacaaagcagaatactggacccaa

SEQ ID NO: 181216 - DNA, 1276 bp, Homo Sapiens
  misc_feature (58)..(90): n is a, c, g, or t
  misc_feature (1008)..(1016): n is a, c, g, or t
ttggatcaatttgtttacttatagttatctggggttgtattgcaaagaatagggttannnnnnnnnnnnnnnnnnnnnnnnnnnnnnnnnaaactcccacgcattgtccatttagaatcttagaaagcttcttaccctcgctgtcagttggaggatgaataataaacattgtataatgttcttattctcggtttcttgtaagtgggaagtcttttgagatcagccttcatatcatacccttattttgtctctctagcatcttcaggaacctgagtttgctttttacatagatctgattttttcctttatttggtttaacattttcaagcatagatcagcttcatgtatttgttttataattttgcatcttaaagctagtaactaatattgctgtggtcttattggtgaaaacaaaatataaaatgataagaagacattaaatattttactttctatttcttaccctattgggaagaatttttaaaagttgtaaaattgacttaaagttaaaatggttctgaatttggtgttccatgtcaactgttcccagttttaattttaactttgcaaaaataatgttgtgaaattccctttaagtaactaacacctagaaatagagtatcaccaaaaacaaatgtatttaggaatcccagttacaataaaaactgaaacagcatggctaagcatcttaaggataattaagaaattagcttatttgtatgctgaacaatggaatcgaactttaatttagcatagtcttattaatttggaaaattgtaaaacatctcaagagagaagttattaatattggtttattaatctttctagagaagaagtgtagttatacattcattcagtgcaatcattttataacagtagttaatatttcatttataatagttcttaatatacatttgctttcaaatattctgaaatgaaattatattcatgctatacctacagtgtatgtaaactaaagagatcactacatatttgtttaattatttnnnnnnnnntttaagtaaaccctgttgtcattagctattaagaacattgattaagtccctggacttggataaacatatatccttgaacatatataatgaagaaatacagtggctctttattaaaaataatagttggataatataaactgaactatttatgcatttttatatacttataaatccttccaaatagttttaatttctatccttttacatataaataacttaataagtgtgctggaaaaacacagatgttcacagcaccactg

SEQ ID NO: 181217 - DNA, 837 bp, Homo Sapiens
ctgtgtgtttgggagtgggtttgctagtgattgtggtggggtgtgtctggatgtccatcagtacctttgtcccaggatcaggctgccaactctattgccaacgcctgggtgtcacagttgccgtgatagtctcacacacgcagttgtgttcatctcgttcgttttcacgtagacaacgagagcgaaaccacagagaaaagaaacatcccgtgcatcacggcctgatgatggattcctgtttcctgcaaaatggggagtctccaatatagcctgtttgaaaactggaaaggagagcaccgacacgatgctggtcttccacgcattcctggaagtttctggggccccacagagctcgcgaaacagtcaacatggtcacgctttcggggggcagaaacttgagcaacaggcacctttacagagggcaaagaaacgtggaatccagaatcacgcttcagttggcctgagtgtgactcctgtgtggatgggactatccgcctcgagctctgttgcagggctcaacgtggggatatgtcatctgtgaaccatgtggatgaaaaacagacaactacctgggtctcggctcattgctctctggggaattcgctcattccttcggaaacggaattggtctgaattgctccgggacgaagtaacccaggctggtgatccagagggccgctgagcgccccgccggccaacggggctgtgggcccagcactcagcctgtactgggcacccaacattttcccggagttctgggtcctgttggttctggaggcataagaccgtttttgtctctgccttccgttctctgcttcttgctccttttgtcccttg

SEQ ID NO: 181218 - DNA, 1827 bp, Homo Sapiens
actttgtacaaaaaagttgggtaaagttcgcctgggtgcagtatgtcagcatcctgcttatcttcctctgggtgtttgaaagaatcaagatcttcgtgtttcagaatcaggtggtgaccaccattcctgtgacagtgacgccccggggagacttgtgtaaggagcacttatcctagaaaggccatttctgaagactcagcaggaccgtggctgcctcattgtcatcttctgggaacatcttaggaccttttgaaagagcccagcggacacctgcgggcttgtgtgcttttccctcagagacaacggttctttccggttttgctctacacagttccgtatcttcagagctcctgcagaattgtcagggactagtttgtggaaaggtctgagagttcctggaggctataattagctttttgggttttccttctttgccttagcgttgaatttcaggagaaaattgcagtcagttcagacatcttggaaagagtcccatctctggtcaagcagagacttttcctctgttgaactgaggaacacactgtgcatttctaccttctgttgtgagccactcttactcttttcagggctctcttgtgacaaacatgccaatcactagcactttgcacccctgggcttctccatttcccattcacagctttgatttccagagctgaggcctttaactggagacctggaggggcagggcccaagggcaagggccgcattagcacaggcaatcagggagggccgctgaaggacacttggaccgtccacctgccccagcccaacagtcagtcatctgtcatcagctcagctgagcagccctggatctttgccgtactgtgactgggctctttgccctatttttccctctgtctgtgccccctggatggcaggctgaagtcagaggggctgtttcattctcagccccctcagcagcactgggggaagaaagcattgtcacaacaggttctttctggccctcacccaacagcctgggcacttggccctcctcctccttgacagccctcccccttcctgcaaaggacaggggcgacaggggttggtgttgggattggctcccgctgcctgacaaccacaagtttatttggaaggctagcgggaagcccagcggctggcgtttcccttgactaaggaacagggtgcccatcagagtggggcgggcagctttgggaaggacacaagaagcagtaagagtgtaaagaggatgctggcctgggcaggtcagtccagcctggccactagcagaatgctaagcagtccagtggattaccctcgtggctaagcaagtgtctgcaggagcagagatggctggaaggggcctctgcacatggaagatggcttgttcagcccattcacctcctgaggatgtgggcagtctcctccaagaacacatggagctgcttcctgatcccaagcaggtcattgccactggaaggacatggccccggtgatccatgcttcatgcccacccagaaacacacccctcagtgtgtgcctcagtttactttggagatcagttgtcgtttttagtgctcctttaggcttactaaaacagttttggaaacaaagctattttgaagtattcaaagcagaggaattccctaacactgacccccttgtctttttttaatattcagcctgttttatatgcctaaatttttttcttaagatctaaacgaaaaatagtttcttgtttaattcacataatgcaatgagatatggaaagatgacaagatacgttataaacattggttgcattttattaaattattctaatgcaaatcttgtataaagaaaccc

SEQ ID NO: 181219 - DNA, 1714 bp, Homo Sapiens
  misc_feature (1631)..(1639): n is a, c, g, or t
ttaaaatcaccaccgtatcacccttagtaaaaacgagggtttccccaattacatgctgaagagagccagccaccaccccacctaaagacatccatgcagctccagagcctgcctccgagaccaccccttcgccacggcagtctcgattccaagaactgattatctgacactagtgaaccagcactaaaggctgtaggatgtgactacatcacagttccagaaggaaggggaccatggccaagagaagccctaaatgacagaagctcattaaaaccaagtcccccaaacctcctgaaacatcgttagcaaggagctactgctttcctttcttaaacatgttttgggcatgaccacactctggaagtggtgaactgttacacatttggtgtgtgtgtacataacatcaaaaactactgtgtgaaacttgagaatgtctgattaaagatttcaatgtatatctaaaaactaactcaaatcgttgaccagcactttcccagtatcataacaatgcggctgaccctcttctgccttcactttacaccccatcatagcacattatttgtgcacaactagtgaggtctgtgcggctcatcatccccataaccaagtcggtctgtgttgagtcatatcattctgtgctggttttagaagtcaccataggaaacatgaagtcacatcctggtcaaaaaactgtccatttctcaaaaacagagaaaaactgagatacgaggcagcaactagcgacacttacaggaagggaaagaacaatgacaacacccgcccagccccacccccaaaaagctgctgttgtgaattaaggcttcaaaagaggacccacactgtagctgataaaactcaagccaggaggatgttgaaagccaatctgcactatcacttgttccagtgacctcctatgttcagctgccaggaccgattccatacagtgattgtaggttgaggactgaggacgcccctttgctctcgctccattttgatttgctttttccactgaagacacgccggccagcgtttccaaaaacagcttggccatggctttgcactctattcacaactgatcaaaactcaatggtcttctcagctttctcaaccgttttattctgaatattccttcctcactaaagcctctctcagccctactagtaaatgtgaaagtctgaggcaattatagaaacatcagccccatcgcatgccgaggggataaaagccactaaggaaacaggtttcctgcttctcctcagcaatttgtacctttcttaatcttcccataatttacctccctaggaagtttcctataaaattctgccatattattacattttaccaactgtatccatgcagtgaagcagaaagggcaaaaacatctgctttggctgagaatttgaaggtgctgctgctctgctaccaacccaaataaattcacatttggcttgaaaccaagttcatctttatttaaaggattgacaatcccattttaaacaattctttgatttacaaagagggaggtagactcgttagcctcccaaccttagcttaaatcgtgatgttgccaggttcctggtggttcagctgaatcctagacagtttcccttctcttcataaagctgagaagnnnnnnnnnttatctccatctaggcccacgggaattttgtgcatagacagtttgaattggtctgaaaagtgtgactagctccaa

SEQ ID NO: 181220 - DNA, 844 bp, Homo Sapiens
tttgtacaaaaaagttgggtaacgaaaccattgtctttattgccttgacatgatgataggctgcagagagacttagttacacaaagtcttaaaatattccttgattgtgctgtgtcaaagcatcagaatgggacaaagctgattctggagaaaggatgtacttgctgcccttcagagcctgagctccacccatgctggataagtcagaatgctggcactggaagggcccttaatggacagctcgtccaactccctcatcttacagatggagaaactgaggtccggagaaactgaggcccagataggagcaagacttgcatgcctagatccttcttgtgtgcctcttcctactgcaagctgagacccaggtccctggtttggctgtcgtggctgcttgtaaagtgaaggtgcttctgtgactgaatgactccaacaaatgtccaaatccctaatcctttcctcaccaaagaagatggcccttggggacagcagcacttgctgagcaggagcatgagtcaggtagatggacttctcttctaccacaaacagacccactacagccccggaagcactcccttggtgggctggctgcgcccctacatggtgtcagatgtccttggtgtagctgtgccggctggcccgctgaccaccaagccagactatgctgggcaccagctccagcagattatggagcacaagaagagccagaaggaaggcatgaaggagaaactcacacacaaggcctctgagaatgggcactatgaattggagcacctgtctactcccaagttgaagggttcttcccatagcccagaccaccctggatgcctcatggagaataaaa

SEQ ID NO: 181221 - DNA, 893 bp, Homo Sapiens
actttgtacaaaaaagttggcccactctcggccgacacccctcatggccaaccgttacaccatggatctgactgccatctacgaggtgagtccccgccgcacggcatccccggtacctgcatgcctgagtccgagtccccacctctctagcgccgcaaactccagcccgggacgcttgcctcccttctccaactggggctccctagcgccgcgccctccagcctggggcccctgcctcccgctcagaccagcttggtgatttggaggtgaaaatggaacccgcgacacccggctcttcgctcaaacatgggtggggcggcccatgcaagtggaaagtcggagaacttttctcagaccgaggctgcctggaggcggaagtggcccccatacctggctcacccctagtcgttgctgagggcgtggttttgcgcggaggcgtctctggggctgaagtctcagggtggggggatccgacttctgtctctccagtccctgaccgtagagacagagaaccctaaaaccgaagcaatccggacttccaggtcaactttgcccggtttctccagttgtgaaactggagatcccgacgcgtgggtcatatccggggaggacaagagacccaaaattgggaaacagtggtgcgccctgacttcggggtccccctcttggtccagccggggaagccgggattcctgggtccctcgggataaggcctcggtggtgggtaaactcagaacctccaactctgggttcctggcatccggaacccaggggtttctgcgggcgggtggggctcaggcggggagcccacaaaccggcctggcaagctctagttccctgcagctggggtggggcgtcgccctgcattttcaagtgccttaaccgacccattt

SEQ ID NO: 181222 - DNA, 1429 bp, Homo Sapiens
ttggtgccatgtgaagaccagatcatcctcctcaaaggctgctgcatggagatcatgtcccttcgcgctgctgtgcgctatgacccagaaagtgagactttaaccttgaatggggaaatggcagtgacacggggccagctgaaaaatgggggtcttggggtggtgtcagacgccatctttgacctgggcatgtctctgtcttctttcaacctggatgacactgaagtagccctccttcaggccgtcctgctgatgtcttcagatcgcccggggcttgcctgtgttgagagaatagaaaagtaccaagatagtttcctgctggcctttgaacactatatcaattaccgaaaacaccacgtgacacacttttggccaaaactcctgatgaaggtgacagatctgcggatgataggagcctgccatgccagccgcttcctgcacatgaaggtggaatgccccacagaactcttcccccctttgttcttggaagtgttcgaggattagactgactggattcattctcataattcctacagcactactgggtgtcatttcattccattgcctagctcttttttgtttgtttctttgtgttgggagggattatttgggagggaaaagggaagtagtccttggcatagacatggatgaaattgccccttgaatgcgggtacttgaaactattgcatttcgttctccggtcctgtgatgtgaatgctctgaaggttttatggttgtggaggtggggtgggggacaatcattaactcaccagcaccaagcatcaccagctcccacccgtccctggtccaagacttgagtcagcaaaatggcgccacaggacactaaagaagccttaaaaccaagataatacgaccacctccacccaatcctgatgttcgcagggctgaagttaacagagcacagaccacctttagttagatgtggctttcagccttttagggaaagactcgaacaaattttcatctattcaagagcatgctgtttgcagcactctttatggtctcctaggagcataacttggaatgtacaggaatatttgtgtcctaaaaaaatcagctgcccttccaatatcatttttataacgttatggtttaattcaagttatacaaaggtgtgactcaaggatgtgcaggtattgactgatggaggccaacaaggaaaatattttttttcagtgagcccagagaaattagaaatcttcaccaatgtcagtgactgcatggtttccaaaaattcacatagtattacctcacagtaggaaggcttctttcccatttacgctcagagaacacttttacagaaatcaaacctatttacagggtggcaccccttttctgtggcatctgatctgtcatctcccaagctcctgaagttctttatccaggttgtatctttgctgagctgaca

SEQ ID NO: 181223 - DNA, 1160 bp, Homo Sapiens
ttggcgttgtaatgcctctgtactaactagggtagacctttttcacatatttcctcttacaatcctcccagtaaacctgtgaagtatagatactgtcagtatccccactctaaagaaaatactagggctcagagaagttaagtttcttccctgcagacacacagctaagtaagtgtcaggatttaagcatatggttctctttatctaaaaccagtgtgctttgctctactccctagttaggttgtgacaagtatattgtttatttccttctgaattcctgcatgaaatggccccaaccgaacacaatattcttaatattatagtcatcgtgataaaagtcaagagtgaaggtcctgagatcaacctagtgtctgattgttcaaatatgtatttgtctgttacttctgtatgcctcagaagaacaaagaggcagatcgtgaccagggttgactgtagtccaaggttagccttgctgccctctcagctctctgctcaggcttcattttctattgctttcggtagccactgtttctaccaggacattcacagtctggaagcagcatatggggaagaccccaagcctggaggcagaaggcagtgatttggatcccagctgaattgctgacaagcttctggctcaagagggccactgaatctctggcctgttattttctacctccttccacctcctttttaaaatgaaggtgccatgatcaaataagatataaaaacatattgtaaatattcccctttgccaatcagtccttcacttagacctccttagtcagttccctggtaaattattcctctcaaatcaaaattcttaactttatcttccttatatgaggttgcactattgtagagaactctcacagatgaactaattcatgctaatatattaatggaaacgatactcttccttcctccaaaaaactgtgtaatcacttatatattaaaggaagacattatgaaagtaagtgatttaaataaaggaatagtctttgatcaattaaaccttgaccaaaaaatgattttaggacagaggaatcctcttaatgcccttcaaatcaccctcttcagttgactacagcctgaatggcgatcatatttagctctctacttaaatgtgttacttttccattttattaaaaaggaatgtt

SEQ ID NO: 181224 - DNA, 2610 bp, Homo Sapiens
ttggctttcctacacctgacagcagcccactgtcataaagcaagtaacaagccgaaggtctgtgtgggaggttgatttgggaacactggatgtacttaatgtggaaagaaccaggaaaactccatccagatgccatggagataccaagggtggccacgacgccaggggacccaggaagaacttcgtctccttcactcacctggtccccttcttgttgggcactgtgtatgggcggagaaaatccagcttgttcttgctgatgacgcagaggtcaatgttgcttccggagcccaggtcgttgaagatgccagctgcgatggcttcgctcaccagattcttggcttcctcctcctgagaaacagaacggcggcaataatgtccccggccaaactagggcctgctctgacatccgcaatgtacgtccactagcagtgcgcaagacctcccgcgagacaggtgttgtttttaatgcccatctcacagatgaggaaaagatctcaaagtaccttgattatttacccaaagttcccgacccaggcctttaaaactttttatgcatgcaccgcctcttgaccacatcagacaatcaccacaaaacgatgggctgacagttactagagggttagtaacttatctttaaaagggccaggtagtaaatattttaggctttgtggccaaaagtctctaccacacctactcaactctgtcacgctagcacaaaacagccacacacaaatacattaaaaaatgggtataactgtgttccaataaaactctattagcaacagggcagtgggccagatgtgggcccactgactgcagtttactaactatcccctgatcaagaatgtccaacaatagctgaaagttacttgagaaagtcagcactgtaggaggaagaaactaacaccaaaacacaagccggtagttctggggaaatgctggcagaccaagggcgggacctcttgcccagaataatctctctctcctactaaggaacctataggttcactgaagtaatccattactttgaatcactctctcctttgccccacctttaaacacaaatccccatccctaatagttactggtgaacagatggactcatccctttcttatccgagaagccccatcacatgctatgtcctatcacatgctataccagaagctagggctgcagaggtggatgacgcccccagatccctgccccctaggggcttaagagtctagcaggggcacctgacccaagtaagtacaatgcagggtaaggctggctaaagagcacgtgaaaaggagctgggaacacagctggtcagcagagcttcagggagggctgaaggacaggctgcacacgaggcactcagaaaacagcagtgaaacagaaggcaggcagcaacggcagtggtactggacctggggaacaccaagttcaagctctatatacaacgaggacaaaaaagaaccaggctccctgaaagcagggaatctaacctgtgctacggcgccttcccagtccacgagggcgtgagagtacatacacatgcaagtgcactccagcgctcacccaagcaacacccttggagaaacacggactccaggcccaaatccagcctgagaccctcaaagggcagatccgctaacctcaagttttcagaagatctgaacccactgggggctcctgctcctctgcctgccccatgccagactaggattccagtgacataagcgccctctacagactcagaaggacagagaaggttctgctggaagtgggctcctcagcaaaccagcagataggggttcctttgatatttataccccaggttttttcactctcacgtgacatctatgtggggccaatgaagccaattcttcttttgtacatatgcagtcctgtaagaatgcattcaaacgggatccgctaattaggaattttctcctggaattctcaacagtctatggggccagaagctttccacaaaccagtgaaggtggcagcaaagaaagcctcttagacgaggagctggcagcagctgctatctagatagacagcaaaaaccaaccactaattcagcaaacacaacctcatacctaaccgcttccctttaaatggccttcggtgtgtgcgcacatgggcacgtgcggggagaaccatacttattcccctgttcccggcctaccacctctgctcccccttctcttctctaccatttaactgtctcctctgctttgtttcttatcactgctgctggtgtctagagccagccagcagtacctggcagacatcgcgaccctgcgggcagcgcttaggactgcacatttacatttcccaaatgatctgggtagatggggacaggtgaagacttggggaaacggaaatatacgaatgacatgagacatgcatatctagtgtcaatccattcgactgggcacaggacagcagactgctgacagtgctatgtaagattatgagtgatcctccctctattttgcaaacagtctgtaagtaactgataaaactttaaaatatgcaaattttacattatatagtttgatttactcatcaaattatcatgtatgctgtatttaaatatgaattaaaggcttttt

SEQ ID NO: 181225 - DNA, 1123 bp, Homo Sapiens
ctttgtacaaaaaagttggatcactgctgctgctgtctagagccagccagcagtacctggcagacatcgcgaccctgcgggcagcgcttaggactgcacatttacatttcccaaatgatctgggtagatggggacaggtgaagacttggggaaacggaaatatacgaatgacatgagacatgcatatctagtgtcaatccattcgactgggcacaggacagcagactgctgacagtgctatgtaagattatgagtgatcctccctctattttgcaaacagtctgtaagtaactgataaaactttaaaatatgcaaattttaaaattatatagtttgatttactcatcaaattatcatgtatgctgttatttaagtatgaataaaggcttttttaaattgggaaaatacatcttttaaattcctttcctcccccaccaattctagggaagatcattccttaaggaagaaaatctcaagtttctcacttttttccccccagtcccactccatgtctcatatacacatggctgaagatgttaggagatggaatgaaacttagatttatggagcacctatatgctcactaaaacaatcaatcaatcaacatctaccagcactctaacgtgccaagccctgagttgggcactttgatgatcatcatgttcacccctgcccccaaccatcttttgatgttggtatggtcagaaactctggctgacggtcaatgacttacacaaggtcacacagcaggtaaacaaaaaatagcaaaacaggcccatcaggccccagagccacaaggccgcagcaccacaccaactcgcaagtgaccttccttgggccgggggctcctcagctagtccctgactcaaggctgtgtcattcacgccccaccaccaaagagccttaagacctgggtaaatttaagaggaggaggatggtgtttgccggtttctctctgggccaaccagcagctcctctgatggtcactcccattgggggttggagggcagtgtttcccaaaatacccaagactaccacttcaagggccttcttcattctcaaccaagttagggcaacatctctacaatgcaacaccagatcaatattaagatctaagccaact

SEQ ID NO: 181226 - DNA, 1656 bp, Homo Sapiens
  misc_feature (397)..(407): n is a, c, g, or t
  misc_feature (766)..(781): n is a, c, g, or t
ttggctgataagtatagaaactctgatatttaccagccataagcatagaaactctgatatttaccagcatgttctagaaccagcacagaacatgggagtcaccaaaggactctatgcttatggctgataagtagacatttttaaaaatcataaaaactgtattttctatatagttcagctaagtttatgaaaaagatgcagactcagtatttggagcattgctatcgctccatgatgtgtttaaaaattatttttaaattgacaaaattttatatctacatatatatatatcttgtaacacatgatgtttgaaatgcttaattctagccaattaaaaatgctttacctcaatagttatttttattgtgagaaaggtcaacatggtcttggcactttnnnnnnnnnnncaatatattctcaataactgtattcactctgcactacaataggtctcttgaactaattcctcctagctaacaggcattgtttatcatttaacagataattctctaagcccccttctcctaaaacttcagcatctcttaaccttctttctagtctctacttttatgagatcaacttgtttagattccacgtgagtgagaccatgaggtattcatctttctgtgttctgctccattggtctatttatctgtttttaatgccagtattggactgtttcagttactgtagctttgcagtatatttgactgtcaagtagtgcagtgcttccaaccttcagagtcttttactgtactatatgaannnnnnnnnnnnnnnngtgaaaaattttattgatattttgatagacattatgttaaatatatacatcattttgtgtaacatagactttttagcaatattaatttggccaatttatgaataagggataacttttcatttatttatgtttaattttatacctcagttttctttagcttttaatgtagagatctttaacatttttgaataattttatttggaagtaaactttctgtaactattgcaggtgtcaattgttttctttatttctttttcagatagtttgttgttagtgtatagaaatgctactgacccttatatcttgattttgtatcctgcaactttagtgaatttattctaagtatttttaaagttttctatttataagactatgatatctgcaaacagggacaattattttctttctttccaatttggttgtctttggttttgttttctaatttctctggcctggaaattcagtagcatgttaaataagagtgatgaagttagatatatttgccttactataactcttagaaaaaaggcttacaacttttgaaggtttagcatgatgtcagatgtccatttgtcatatatggcctttattggcttgaggtatgtatgttctatatgtaatttgttttgagattttgtcataaagtaatgttgaattttctaaaattctttttctgcattcacttaaaagttataattggttctgagatccttcatctttctcagaatctaagaggatgcatctgtacctagaggaggacacaaggcatcatatgttacattctcgtgacatataatgtctactgcttataatgtctactgtgagtttctgactccccaaatgaaattgaaggcccaaaaactttcaaactgctt

SEQ ID NO: 181227 - DNA, 1205 bp, Homo Sapiens
  misc_feature (277)..(289): n is a, c, g, or t
tgaaacagtccaatactggcattaaaaacagataaatagaccaatggagcagaacacagaaagatgaatacctcatggtctcactcacgtggaatctaaacaagttgatctcataaaagtagagactagaaagaaggttaagagatgctgaagttttaggagaagggggcttagagaattatctgttaaatgataaacaatgcctgttagctaggaggaattagttcaagagacctattgtagtgcagagtgaatacagttattgagaatatattgnnnnnnnnnnnnnaagtgccaagaccatgttgacctttctcacaataaaaataactattgaggtaaagcatttttaattggctagaattaagcatttcaaacatcatgtgttacaagatatatatatatgtagatataaaattttgtcaatttaaaaataatttttaaacacatcatggagcgatagcaatgctccaaatactgagtctgcatctttttcataaacttagctgaactatatagaaaatacagtttttatgatttttaaaaatgtctacttatcagccataagcatagaaactctgatatttaccagcatgttctagaaccagcacagaacatgggagtcaccaaaggactctatggctttcactttaagtttgggacacctggagtttctggtgctgatgctgatcatatggacgacattaaagaagcaggtggtgctaacagtcccatctctggccatggtgtgaacacagaaatcaggtttgcatccaaaatcaccaaggaaatatttcaatccaaaagctctctagatctctgagttttttaatacagaaaatgactaaggaattggcttgttatgtgattatttatataaactctgcaatgtaagctgcaccatttaaataaaacatattgtgatatgagtaagaaacttcccaagattccagtatcaatggggaagaaaagattattccaaaatttaaatccacagaagcatttagaaatttaaattaaatttgaaaaattaaatataaatgtaaacataaatgtaaatgtttattattgtctaatatattacataaacactaaaaactaaaagattctacatgtacacataaattgtgctatatgtaatttataaaaaactaaatttaaacttttttgcttgccattaagtgtccttaagatttctaagccaa

SEQ ID NO: 181228 - DNA, 945 bp, Homo Sapiens
ttggggaagatattcacctaaccctcaacaaaccatgatgtaatgaagcacgaatcacaccattttgtctctttcctaattcaaataggtccctggcattagttcatgccgagactagaaaactgaaccctagtactgttttttaaaacagttttaacagaaaattaaactgtatgtttgaaatcataagtaaaagtttgttgcttgcataagagtagcctcttgattctcatagtggtaattttgtgtcatatcatttagatgttgaaccatttcatttgtgcatgtgtatatgtgcccaaattcatcctctttgtttagaatctgcttacaaataaaactaatagaatctgaatacatttatcatatattcttccagggtttttcttaactgactatagagagtggctgtaagttctggggcaaagcttgattgtattttcagtgatgtatagttacattgtttcatgttaaaatcatcgtgcatggaaagtgaaatgtgcgtatgattttaaattattgtaatatgtactatacccttcccctaaacttctttcattgatgatacacagaattcctctatttttgcttgaaaatagtcctttagattggagtagccttttcttagatccctctatggttccatgagatgaggtgatacctgcaaagcacttttaaagatatttttttaggctaatgtccaagatacagcattgaggaggcagctatgtctaatgagggctctcttgtttgctagagatgagagaaatgtatactaatcattttaatttgtacttaaaatacattttactaatcatattgattttaaatatgacaaattcttctagtagatactaatctttcttgtttatcatattgtcctagagaagcctaggaaaaatgggttccacctagtctgtttgtataacaccttcccccgtcccc

SEQ ID NO: 181229 - DNA, 886 bp, Homo Sapiens
agtgtgagccatcgcgcccggcctgcaaacttttttgtaggtatttctggtaaacaaatccttaggttatctttgctgtggttgtggtttggctttagtcatgatttcaaagtagaaatagctaggcattatttttttgaaatatatgacctatatgtagtcaagaatccactgaacagagggaagcaaaccttttggaaactggcttttgggcagacagtaaacgtccagtttgatgctggaagcatgaacagcttcatcaggtaggtactcctcaactctgatgagtttgtcctttcagcctaagggggtggaagggagttgtttgagaatagcaaatacgcatgttgattgcgagtgtgtggagacaaaggcagttcccaccacagttaggtcctggccattgtttcctcgcctgcgatgctccttgtacatcctcaccctcctctcccgcctctgccttctgctgggtcaaaggtggccttttctctccagccttgaattgttccctgttggcttcccaagggcccatctgctggtacagtccacacttccacagccaagacccgagagggctttcactgccccaagcctctctcctgtgaccttgggattctgtcttggcagaatcctttgtcagcggctcttactctgtccttcctgtttggccacagctctttcaatcaatgggtattctagaaccgcaggatgtcagagctggaagggacgcgataccggtttacacaaggggaaactcctcgaggctctgggagggacggagggttttggtgacagagcgagagctaaaattgaggattcctgaatccagatcttgcctcccatcagccatctttctcccaataaatttttgttttgtgcaaggcaa

SEQ ID NO: 181230 - DNA, 2429 bp, Homo Sapiens
  misc_feature (243)..(402): n is a, c, g, or t
  misc_feature (518)..(556): n is a, c, g, or t
  misc_feature (572)..(640): n is a, c, g, or t
gaaccaccaggcccagccaaccagcatttcttaaggtgaaaatacatggtgttaatttatattttgagtgagacccagtccagctgctataactgcttggacacttggcagaggacagagtactgcaaaagtgtctaagggagacagcattttgccttgggtgctgtagatgtacaagagaggttccaggagggggtgataggcagaattttggtccccatcaccttccctgcccagtgttannnnnnnnnnnnnnnnnnnnnnnnnnnnnnnnnnnnnnnnnnnnnnnnnnnnnnnnnnnnnnnnnnnnnnnnnnnnnnnnnnnnnnnnnnnnnnnnnnnnnnnnnnnnnnnnnnnnnnnnnnnnnnnnnnnnnnnnnnnnnnnnnnnnnnnnnnnnnnnncccaaggtgctattgctgacttgaagatagaggggccatgtggaaatcaagagaaggaagtgaatccttccagtgagcttggaagagagcaccttgaggcacagatgagaagcttnnnnnnnnnnnnnnnnnnnnnnnnnnnnnnnnnnnnnnncgagcatataaatttnnnnnnnnnnnnnnnnnnnnnnnnnnnnnnnnnnnnnnnnnnnnnnnnnnnnnnnnnnnnnnnnnnnnnggctttaggcccctgagggtagagatttatggcttgtgttacaagtagagagcagtggagagttgggctttgtaattctttcaagggtgattgtagttctggagtcctatctacctgggttcagatctttgttggccagtccctggctgtgtgacttcactgctttaagcctctgtcttcatccttaaagtggcgatgatagtacctacctcactctgatctctgaatgagaacacatgtaagacacttagcacagttcctggtgctcaaagagttccaacacctgaaagcaccatggccctgtttgtttttcagtcaagatttctaaaagccgttattaccagaggttcagtgagaacatgggcagggtaaactcaaaatggagaacataaaaactgggactcccagaccagtcacttagaagactgctgcaggaagtaccaaggtcgttaagaatcagtaataataataagtaatgtgtgaatccattagaatgttgagaagtagacctttgacatttcagaaaaatgtatatctcagacacagccatatgtattgttatccctgagttggaagagcatcacagggcatagtttcacaaaagcttcaaaaaatatactaattgctggtaatatgtgaactaacagaaaaaaatagccatgttaaaataggagtgcctgacaattagctctattcatcttgtctcctagctgtaagcaccctagattcaaattatgcacctagaaaactaaattactatgtatgttataggcctttgaaatggatacatgaaaattagtgaaatcagaatgaacgtttcgcctgccaaagatatgtatttttataagtgatacaagggccccatgagctccatggccacatctgtacaaaacaggccctcctttcaggaactggtctcgagagagcaaaggggtcaactccctaaatggcagctgagacagtcctccctggtggcatggccctgtttcctgttgatatggtgatagttggagagtcaaatttttaccagaatttgtgaatatcatctctggttaatgattacacaaaaccttttaaaattttaaaaaattatttctaattctataaataaactctgcagttgtacagccactgtacagctaacatctcaacactggaaatgaggctggtttcttccagtttggctcagattcttcagggaagcccagttaagacaaacagctctctatactcaatccttactttgctgagaagatacaggcctgcccactcgctcccacctgctcttcatgaggagtcctttattcctgcatgtttcctgttctttgggacctttaggagctaacctccacagatgctgatagtctgtagagtcaggaataccatgtaacatgttgaagtagactaaagattagttctttggcaatagcccagtctggacttactatgtacttttgaaaatacaactgcttatttgtaaactctgtaattaggaccttttgctatttgagttatattcctttctaacttcaaacgtctgcattcatgtataatagccattttatgcacagatgaggtgattcccacacttcttttcgcagatgtttcattatctggatgagtgtattacataataaatttgaataatggtagtcttccaatgacaaaagcaagctagttgatttgtcaattttgagtttaaatgttttgactgctatcagcaaaaaaatcaagaatagcatactaatattaatggaaatgcaaagtattttaattggcatgatttttc

SEQ ID NO: 181231 - DNA, 1280 bp, Homo Sapiens
  misc_feature (398)..(442): n is a, c, g, or t
ctccagcagcccaggcgcccagctgtgagtgccccagccccgcgttcctcgcctcgcctcccacatggacagcgtgccctgctctggtcacacaggccagtcagcttgctttcacacagctgccgttggagaggatgggaaggggacctgaaaatagaacagatgtgagctctattagggaaaggggcggctcgtggctagtccaggcccactttggacagctctaggacagccttcgtctccttctctgcatgtagcccacgaccttagcctgtacaccaggaaagagccttctggtgcctaacaccttccccgtagcctgcttctccttctagatagccagcggcctcctggaacatcatgtgttcccttttacatgttctcccctggcaaccacnnnnnnnnnnnnnnnnnnnnnnnnnnnnnnnnnnnnnnnnnnnnntatgcgggaagcagtctgtccatccactgtcaacaggcagtgtcaccagcctgccccgcggtccacatggtctggttggaggccttctctggacagagctcacgctcgacttagaggactggggagagtgtgctggagaatgaaggggccctgctcctgaaccacaccagcgcttctcaaacttgagtgtgctagaggtcacctgggaaatggcgacaaaactgaggctttaaaagatgacaacaggcacacgacctcagagtagcagctcaagggaaactctgtgcagaggaaaccgcccagcacgcagcggcgggcagaaatggcacggggcgtggagagatgtgggtgtgtgggcggccatgggtcatgtgtcttttcttgctaacatcctttgtgctcctgaacaatgtggcctgttttccccatctaggggcttggctcaggcccagttcacacaaagccctgaaggaactcatccaccatcccagaggcagccacagctgggcacagatgtagaaggtacgagtcatcatggtgtggattcccaggaaacccatcacttcccgagcctgagagtctggagaggggaagtgggggtctacatgaggcactatgtgactcaccacgagacaaatagaataagagggagaggacaagccgaggaaagaagaggaagaagggaaagaacagaaccatctatttagcaaagagacaccactctttgggacaaagattctgggaaggaagagatgctggaacttgctgtgtgacctcagggatgtcaaagaccctctctgggcttcagttttcccatttgtaaggtgagggcccccaa

SEQ ID NO: 181232 - DNA, 620 bp, Homo Sapiens
ttggtgcctctcgtgggttagttgtaaatggaacacaactctagcatgacattgcgacttaaaagagcatatccagtacttcgatgatcattctgaaaatatatttcctcttcaaagtttttacctgtcagtgaggcatttaaattggggcattctcttgtttctgaagtctgataaaatcttgaccttagaatatttattggtaatatttattcattcacaaaattagttcttagcatatcctatatgtcaggcattagtctagagctggggctagaaaaatgaataagattgggttcctgaccccagcccaggctcacactgtagtaaagggaaacagacatgaacactaggtgacatggagtgttaggggcgctatggtagaagtctgcagagagtgcaatgggcgtccaaatgaggaagtgatcacttgcacaagagtgggaggcttggctggaaaggcttctctgaataggatgacatttgatctgtgttttgaagggcatcgttggcaaggtaagtaatccaattaaaggaggttgcctcagctaaagcacagtatgctcaaaggtgcggatcatttgaaaatttgagttcaggtgcagtaggggtaaggtaag

SEQ ID NO: 181233 - DNA, 1389 bp, Homo Sapiens
taaataaaagcaatatttaacaactggtacctatttatagttcctatttcagattttttatctctgtagtgaaagtgtaatataagtaatgttatttaaatgtggagaaagtttattggagctgaagtacattgattaccaccttcttttattccatgctaggttcaatatgttttagtagcttttcgaatttaaaatgatcatgaggcacaacttacctcatttcaaaacaaaaaaagcctccaaggtaaagaggatttgctgctaaggtatctaagcatctctctcctggtggcagcctaaacacagtctttgaacttgagggagtctgtacttcattttagtgagactgtgctgctgtgagcatggctacccaacagggctccaagaacaatttctatctgaaaaccacaataacaaacttgttggctttttacgaaatatatatttaaatgtgacatatggtttgacatttaactttttaagctttatattaggaaaaatatcatcagtcatcctttgtgatgacagccagcaggctagtgaacgtctgttcagacccacaagatcttgcttgctgtagcatcgggctgtcattaagaaggagagtatttctacatctaattaaaaataaaaaagatgatactgaagtgtaactcataaaccaagtgtttaattaaattttcttttcctctagcttatgcaggttttgcagtagggaaaagaaatactcggaaaaggagggaacttgtttggaattcctttgccagcagaatgaataaggtcataatcctatagtgcaaaatattcatagcactagctgcaaagttatttaattacgagtctaagtgcactggagggtacttggtttttaggcaggttagaagtgtttcattcagtacagcatgttaaagttagggttacattaataatatttagcattctgtatgtgtttacattttgtattttggaatgtatgtcatcttcatatatagtgaccaggatgttatgattaaagatatccttatctttttcaaagtgaaattgaatagattaatatgtaaatcactgttgaccatccttttgggttcctatcatgagtcaaagtatctctcccactctagtccaagtgcaggcaaagtaatcagagaaataaacaccttctcaaggaacaggcctcacagactaaaacctacacaatggcagaaattgcactgtggtgttaaatgacattccagttaagttgggtacaaatacatacagatgtgggaataaatgatttctaggtgttaaagtagggtgggtgtgaggtgcagattggcccacctgctgatatttacaaggtcttcgtgctttgtttgctttggcaatataatttaatttttgtcc

SEQ ID NO: 181234 - DNA, 1259 bp, Homo Sapiens
ttggggtgtgaacagcacactaggtctgggagcatagggtgacaccgagtcactggggaagagatgtgactagagaaattggccttcatgccattcaggaaaaaattggactttatctcatagactgcatgtgtgggttgggggcaaaaggaggtggggagctttgaggctttaaagtaaggaaataatgtcaaactcacactatcttttccatggcagtggaggaggcaaaagttggagtagtgagtgggcaaggctggatacacttgcagaggtctgcgtaggagtagaggaggcccagatagtatggtggtgataggaatagagaggagagatggattcgagagcttcctgagataacaaggtatgaggggggatcaggaagagggagtgggtgggaggctcctttgggatgacctgtaagattttggcttagatgactgaggaagcagcagatgcagatgaagcagcccttgctggcctgttgagttcagggagcttcctgaagagtgaaaagaaggtcagtagacactgaggttgatgactctagacctagaggcaagagtctgggccatgatgagcctctgactggcgttaatatggagctgggaggtgaaaaccacagtgccttggagtgctctcggaaggcacatctgtctttcagaggaaagactctcactgaggccagaagcttgaaaagcgcccatttgggataagcgggagaataggggcagcagagaacgtctacagaaagggcgctcttggggagcgagctacatactgattccataaaatttgaatggcacacattcttggctaaaaaggaaactgtcttggtaagctctagtttgttcagtattgttttggcattttcagataacgaaatgcagggactgttaacattagtattgtacctctgtttattttccatttttatccccagtgacggaatagcgtattcttaattgtacccttgagatgaaatgaaataatacattaaaaaatacattgaatttccaatatatgtttataatacaagttttgttctttgaagatcttacttttctgttacttggatattttactttttattcatcattgaactgaaaaactagtagccatgttgtagaacagtgacatacacttgaataattgttcttatggctggatgcgtcactcttcctaactgcttcttactatttcatcctccttttaataggggttgacccaggtcttgggccttgggcctgttcattatc

SEQ ID NO: 181235 - DNA, 804 bp, Homo Sapiens
  misc_feature (649)..(660): n is a, c, g, or t
ttggcaggagtgcacagtgaactaggcaactagattaagaggtctaaatatgaaataccagttgaggctgaggacctcttcgtcttcctttaaatgtcttttgcctagggagtgtttaccatttgtgaggcagctttgtctgctcttacactgtacatcctattactccattgggaagtaggttcactttcctctggccttttgcctaagttaggctttgctgaatcaaccctacttttccttttagaaaaggttgttacaggagatttactggctgttcttttcccatcaaaaatcagtgaatgtttgctgagtataaatgctgcttccttaaaccacttgtcgctttaggatcaactttacctgtaccttttctcctttcctcccttgccacctcaggtgcaaatctgaactcagtgtctgcttcttccattttctcgtctctctcccctcttcccccattatccatatgacattattttacttcaaatgacagcatcaatcttaaaaagatatacattaaaactaaggagtttttttaaagaaagcctgaataagttcctttccctggtaactttgaaaagcagtcagagttgctatatagatatatgtggctcctttaaaatgctttgtgtatgtgtggtgtttnnnnnnnnnnnntcttaccagttaactttgcagtgtctaggtttgagtgtcataaatccacgtgttcctgttgcaacaaatacccaaaaattgtgtgtgcacttcctaataccagtcttcacccatggaggaacagtgctttttagagatgctttc

SEQ ID NO: 181236 - DNA, 1625 bp, Homo Sapiens
  misc_feature (614)..(624): n is a, c, g, or t
  misc_feature (1520)..(1534): n is a, c, g, or t
ttggcattctataggaataagggcttcacagatagagctcattttttaaaaatccaatttgtacattagactaaacgtgaaattatctcttattgtaatggtggaaaggtggttattcccaaaagctcaatctcaaagaaatgtgtttaaatgaaaaaaagtaaataattgcattttttaatgaccgtgggtctgtgaaaaaaataggaaatattttaaagagtatgttctttcattatcctctgttattacttgtctacatttttattctgccaagaaggccgtggcaccgcgagctgtagacagagccgcggtctttctcgattgagtggctttggtggccatgccaccgcgctcttggggcagccgccttgccgctagtggccgtggccaccctgtgtctgcccgattgatgctgccgtagccagctttcctgatgcacagtgatacaaataatgccactaagggaaagagaacagaaacgtaatgggcgctgagctgggaaaaccagggagaagactgatttattagagatttcagaaataaaattcacattcattatgatatctcattagtgaaaatttccattaggggattgtaaataatttaaagcnnnnnnnnnnncagtgctatttaattatttcaatatcctctcatcaaatgtatttaaataacaaaagctcaaccaaaaagaaagaaatatgtaattctttcagagtaaaaatcacacccatgacctggccactgagggcttgatcaattcactttgaatttggcattaaataccattaaggtatattaactgattttaaaataagatatattcgtgaccatgtttttaactttcaaaaatgtagctgccagtgtgtgattttatttcagttgtacaaaatatctaaacctatagcaatgtgattaataaaaacttaaacatattttccagtaccttaattctgtgataggaaaattttaatctgagtattttaatttcataatctctaaaatagtttaatgatttgtcattgtgttgctgtcgtttaccccagctgatctcaaaagtgatatttaaggagattattttggtctgcaacaacttgataggactattttagggcctttttaaagctctattaaaactaacttacaacgattcaaaactgttttaaactatttcaaaatgattttagagccttttgaaaactcttttaaacactttttaaactctattaaaactaataagataacttgaaataattttcatgtcaaatacattaactgtttaatgtttaaatgccagatgaaaaatgtaaagctatcaagaattcacccagataggagtatcttcatagcatgtttttccctgcttattttccagtgatcacattattttgctaccatggttattttatacaattatctgaaaaaaattagttatgaagattaaaagagaagaaaatattaaacataagagattcagtctttcatgttgaactgcttggttaacagtgaagttagttttnnnnnnnnnnnnnnnctatttctgttatcagctgacttctctctatctgttgacttctcccagcaaaagattcttattttacattttaactactgctctcccaccc

SEQ ID NO: 181237 - DNA, 1697 bp, Homo Sapiens
  misc_feature (348)..(356): n is a, c, g, or t
  misc_feature (1277)..(1319): n is a, c, g, or t
ttggtgaaagttgtgagagtatattgtataccgtaagagaatcaactcttcatcatggatgggattgtgaaggctgaactataaaattcagcattgacagcatcctcaattaataattcttggtgacagaataatacagctgggctgttttttaaaatataaacaataccatttttaattattacattaaaaattgtaaatatatctatgtgccatggcctgggaagcctgctttcttttttcataaaaattatttttactgtatgaaaagatcatggggtttagctcaaaatatctgtggtcctgataaaattggattggtaactctacctcagaaggaaaatgggnnnnnnnnntagatgagtcacaattcaatacttcaagctcagaaactgtgcagatcactgaattttagatttataaagtcagagttggcatgccttgtttttaatgatatggaagaccttaagaaaaaaacttggctgaagtttaatcgttggtccagccatttgaaaaaggcaatagtttgaggaggttcccgaattcggcatttgaaattcattttgttctctcttcttcattattagtgcatttggtgtgtgtatacttgcacacaattctgtttgtgtacacactgcttgcttagccctagtcaagaggcatcttttataaaaggtgtaaagaaatatcaaggttctaaaattcggaagagtttagaatttattagagtttcccaagttgggatgttagtctttaaataaacttcatgcacctattccacttaaggttttgcacctcctttttattagtgcagtgccatttcttctgcttgattttaggtatgttaatattccagccttgctagttagcataaagtgacaggtgtgagccatgaggaaattttctgacttaatttgtacacaactacatataagagttttagtggaggaaaaaaattagtcccttgtgcgtatacagtagttaggtaaatgatttttctaccaacagtatactccattcctcatgtaggtaagtacagaaaaggtttttaaatgtatttttttagccagttaaagtctatgaatctatctgcaaccttatttaatctgtcactataataattttgtggttatgctaagaaccatgtatacttttaggtattcttatttttgtcaatttttctaggttggcaaggaggcagaaaaccttcattgtttcatattaaaatataattagactaaacttaattctagtatgaatttccaaaatcattatcnnnnnnnnnnnnnnnnnnnnnnnnnnnnnnnnnnnnnnnnnnnaaaagtcccttgttcaatttaacttatgttcctaagagaggttggagaacttggccttcatctgatttcaaaaatgttttgagtttcaaatgaagttaatggtttcagtgtgattcagtcctcagacctaattgggttgaataaaatctaaaagaatatacccttttggagcataacattttaataccttggggaatgtggcactaccaaaagaagactactaacacgtcagatgttcacctgggaagctttatcaagaaattcgaaccacccttttgggccccatttaaatgtagcaagtttatttctctatattttgtcattcagtgaattgaagtcctgtggtatactgcattcattagaggaaaaacgttttta

SEQ ID NO: 181238 - DNA, 2534 bp, Homo Sapiens
ttgggttaatttttttaagctcaatagaaaatattcttggcatttttcttgctgaatactagggattttaataaaatgtttatatttccacagcacaaccagtgtctctgaagaagatgtctcaagtagatattctcgaacagatagaagtgggttccctagatataacagggatgcaaatgtttcaggtactctggtttcaagtagcacactggaaaagaaaattgaagatcttgaaaaggaagtagtaagagaaagacaagaaaacctaagacttgtgagactgatgcaagataaagaggaaatgattggaaaactcaaagaagaaattgatttattaaatagagacctagatgacatagaagatgaaaatgaacagctaaagcaggaaaataaaactcttttgaaagttgtgggtcagctgaccaggtagaggattcaagactcaatgtggaaaaaatattttaaactactgattgaatgttaatggtcaatgctagcacaatattcctatgctgcaatacattaaaataactaagcaagtatatttatttctagcaaacagatgtttgttttcaaaatacttctttttcattattggttttaaaaaagcattatccttttatctcacaaataagtaatatctttcagttattaaatgatagataatgcctttttggttttgtgtggtattcaactaatacatggtttaaagtcacagccgtttgaatatattttatcttggtagtacattttctcccttacgaatatacatagtctttgtttacatgagttcaaatacttttgggatgttaccttcacatgtcctattactgatgtgtgcaaccttttatgtgttgatgactcactcataaaggtttttgtctactgtcatttgttctttccacttattctaagcatttagagtaatagagtcatacttttttataacagcaaccttttaaaaggaaagctcttataaagtcactgtcatgttttagttgactaaatataaatttaagagaatacttgaattgtgctatagtaaataaaaatttactattttgtgtttgaatattgaaaaattgaatcactttaactcctgaaaaacatacaattgtaatttcaatgtaaaatttcttatgtaggtactacctttttttatcgttccaaggtttgctagtgaacacaggatattttaaaagttttttattcttcgggcctggaaagtgtacaaagtcagtgtaggagaaaaaaatccatatttttatattagcatgcacactaaaaaccaaaatattattcatacttaaaacattcatacaaaacaatatgtaagcagaaatagtactaaaatactttgcctaatttctaagttgaagaataacactgggacacagttttttcatatgagagaatattccgctatttcaaatttaagggattttcttcctaacattgaaattttaaaaacagagttacttctaaataattatacagattttttcttctattaaatattattatttagaattgtttttgtattacatattcatgttaagaaccccgtcttcccttaaaatacattaaaattatgacatttttgctttgtgattgaatttcaaatagcagtatggtatccttttatctagttaatatatgaaagtggcttgaatatagtcaaatccattttaggtactctactgactttttccttcacttgccaagcccttttattgttcactgttagaaaaatagagaagtgagacagctgggggaaaatgtggagtaaatgataatcaaatgttgaattctaaaagtctctacatttacctaggttggctttctcccccagttcagaagtttccagcttggccaatcatcagaatcacttgaggaacttagaaagaactccctggctgtagctcctatgtaggtttaggttgagactctggattccacaatttttaaaggttaccatctgaggtttctgatcatagtctacttttgaagcagctgctgctgtttctttattccattgaacaccctggaattgacataattttatctatcagcatttctccccttttagtttatttaataattaacccggtctccagggcagttttcatatgaccatgtgtatattcactgctcacgaaaaagtttaatgttagattaccaaatttaatatagttacagaattactgcataagggcttcccttcttggagactcttacccagcatgggaacagtgatctgcccacatgacagggtggtatgccaggcatagttaactgcttttggttgtgaggtactcatcttcctttagttacccttagttatgtggcacacatgtccttattgcctagttcgtcatccacactttggatcttgtgaaaatgctgttagtatccaaccttaaaatatattagtatatgggtttttattaaaagaattactttgaattttctatttaattcatatgtaaataaaggaacatttcatttcacttaaaaaaattatatcagtt

SEQ ID NO: 181239 - DNA, 1790 bp, Homo Sapiens
  misc_feature (218)..(227): n is a, c, g, or t
tttttccttttttgtatgtaacagaacacatttcagattgtatttaatttaaatatttgtatataagagcaaatgtctgaatgtggcctgaatcaagtttaaatattgttggctcatactgattatggtgcctaagagagctatatatatacacatgtaaagtccattgtttttattgtcctgagttgtcttaaacctgcaaaatatacactacccannnnnnnnnnccattggtttcagacttggttcaattaagattggttggggatttttctcttttccttattaaccatgttctggtatcagaatggtgttccttctccatcagaggctgggaaacgtattataattagtttttctcccacataccttcaccaagagcagtgaagaataactgaaggctggaccatgcatccttaaaagtattgcatgagcatctccacctcagtatggaagagggatggacaaccccctattcatacctctgagttcctgatggcattagtcatataggtaagtcatctaataatctttcttaagactctgcaatggaaaaactggttgtataaagtcttctctgccctctccatttgtatcagcaatggggaatgctgcaaaacatcatcttgctcatgtgatggtgatggcaaagatatcacaaggagttggtaataagatttaattttccagtagcctgcatgaattgttccccacataaaactgtacagttagtgactgaattgtatacttaagtcccagtattttacattagtgagactgaaattagaggtaaatttctttaacaagtgtaaggcttacctatttataaagaattattctgttagtgtttaagaaaaacagatctagagacaatccagtaggctgcattgtaaacattatgattataaatctcttagtactgccattattattgacagttttgtaaagacttgtaaaaagtccagtttctcaggaatatgaaaattatcttcagaaacctggttggggcctttctccaattcctccagccagctgaaatactgccaagctcacttcatgtgcaaggtgatctgcactttcctgcaaattacattaaaagagattagatgagaaagacatagcatgtgtctaacatgggcaagaccatgttacttggaactctggggaagagaggggtgattcttgattttgtttcactaacaaattctaatgaaaaccttttttcatctttcagtaacaaattccaaagcccttaaataaacggaaaacagaccaaattcttctaaataaggtaagtttttaatcaattcagattataaaaatagctatcattccacaactgaaaaaattcaataaaactttaatccacaattggcctaacagtaagtaagtactaatgcctctgttgccatctcctcatccatcatggatattcattagactctgagatggcttaagcttatgcaggaaagctgccaaatgtctcctcctgattccctattcagcgcactcactgtactttgccctggctttgcacacactttaaggagtatgtgaagaggccaaataataaaaatccagaccacaagtcttgacccctgtcagggaaacaggcacagagtaaggctgtcatttaaaggaaatattttgaaaaacaaatcaagagtccagaatgctatcagttgacttagaaatgaactacaaagctggttgttttcatgtcacaagagtatatttttaaaagaagagaaaaggatcagctaccttatagccaacttttttgtacaaag

SEQ ID NO: 181240 - DNA, 584 bp, Homo Sapiens
  misc_feature (268)..(281): n is a, c, g, or t
ttgggcattatattatagattatatagctcacacatctttgtacataaatctttgttcaaatattatttcctaaggatagacttcatgaagtggaaatactaaatcaaaagtgaaaaacattttctaaggttcttaacatatacattgccaaattgctattcaggatcataccaatttataatcccaaaataatatgaaaattcctgttttatagcactcatatttacaataaattttaaaaatcactgttaacctaatagtccttcnnnnnnnnnnnnnnttgaaattacattattttaatgactctattagtgagggtcattcttcccatgtttcttgttagccatgaccctataagaaataaactgcactgcaaaatgataaacatgacatcaatcattacatgggaaggcactatataaagaataataccttaggttaaggccacataaatatttatcaggtgccttttctgcggaggactctgaagggatactaaactgcatttagctgcatgcaactgaaactacttttacctacattgtctcttataaacattataactactctttgagaaagtgtt

SEQ ID NO: 181241 - DNA, 290 bp, Homo Sapiens
aacactttctcaaagagtagttataatgtttataagagacaatgtaggtaaaagtagtttcagttgcatgcagctaaatgcagtttagtatcccttcagagtcctccgcagaaaaggcacctgataaatatttatgtggccttaacctaaggtattattctttatatagtgccttcccatgtaatgattgatatcatgtttatcattttgcagtgcagtttatttcttatagggtcatggctaacaagaaacatgggaagaatgacccaacttttttgtacaaagttggc

SEQ ID NO: 181242 - DNA, 1306 bp, Homo Sapiens
  misc_feature (82)..(103): n is a, c, g, or t
  misc_feature (237)..(361): n is a, c, g, or t
ttgggatgcctgcaaaatttgaaggaatgcaattctgatttgccatttatcagggaaaactgaaagcatttttcttataacnnnnnnnnnnnnnnnnnnnnnnggaggggggaggcagggtcttgctctgtccctcaggctggagcttagctcagtgcagcctccaactcctgggctcaagcaatcctcccactttagcctcctgagtagctgggactacaggcgtgtgccagcgcnnnnnnnnnnnnnnnnnnnnnnnnnnnnnnnnnnnnnnnnnnnnnnnnnnnnnnnnnnnnnnnnnnnnnnnnnnnnnnnnnnnnnnnnnnnnnnnnnnnnnnnnnnnnnnnnnnnnnnnnnnnnntcagccactgctctcggccctcttacaccattttgtttgattgtctagtccctgtttctttttctttctaatccttattcatttaagcaaaaccatacattatcttttccagtcctttcttgtattcttactgtttttttaaaataactttttgccttaatagctcattgtcactaataacttctgtgttctcccaggcagtgttataacagaagggcaatgaaaacattggacatgaccatgagtgcttcctttccttaactctaggtttgtagtctgttttaaattaggattagttcctgcattctgaaatacattggcctagaacattttatcccaggcatttttgaatagaaaacagttgcgtgcttttattgaagattgttaaaataatcaccatagtaacttgatatgttagtatttttctttttccttttagtatgtttcaagtgcagtaatcgtacttgtctatccagtttctatgtatgatacgagttgcttacacgatgcatggctaacttgttaatttagttttctccttagagactttgagacccttaagagacaagattgagaaagagccatgtggcttggctctagaaacgtcattatcattaggaccatcagattttagattaagctgctattgaattaataaaatcccaatgaagcagagttatagggatagatttatagctggcagagtggtatcaaaggagaaaaacagtgaaaaagccaatttcactggttcgttcaatccagcttgttgctaatattagttacccttgttttaatgacagagagtggctggaatctgtagctaggggaggggcaacactgttagatgtgaggaaaggaagtgccaaaaatgcctggacagatggcttgtcccaaggccaggacacacactttaaaatccaacattcacctaagcaagtaattctt

SEQ ID NO: 181243 - DNA, 1239 bp, Homo Sapiens
ttggatagaattctggcctgaggctccccaagtcttattaccttgtatgaaaaatccccatattagcctcacttaatctcaatagaagcctgctgtttaccctcagggaacaagtagttttcaaaattgagctcctccaaggtcattggccaatgctgtgtgcaggcattggtcatctttgtaaactcatggcattatttcctcatatgcattatgatactaagaaattcaaccccaacctgtatgaaaagcacagcccagggccctaattgaggctagcatgaatgcctttgaggggccagggggccataggaggcccatgcaatttaactgaagctcaggtgccacgttggatttttattcttattaggccgcaacctttctgaatgagtttagggcaggggctgctgatccggctgtggattcagggagctctaaaatgaatctctaccgttcctttaaaggtctttctggttcctcccagtgttgtcattgctgaggtcgatctcgtagttgttcagttgtgctctttttgctgtcttgtgagtcttagccagtgatccagctgcccaaggacagggcctccagagggcctagcgccctcctggtaccaagcgtgtgctcctggcctgtgtgacagtgtctttcccgaagcagtgaaatgagaaattctgcaagtggccacccggaagatcagtctgtagctcttgggcctggatttctactatgttagtgagtgtaggaatatactgtgtctttaatggatgaaaattcaatgtatgctgtgaatttgttggtttgaaacattgaaatttttcattagacaatgtttacatacctcacctgaagaacctttgagagtgtatatataaaattttaaaatatattaagttgctttaaaacaatatgtatagctataaaagttggagttattttaactttgaatatgtaccaagtctcttaaatattgaaatcttgtagacttcttgtgcttctgtgttttgctttcctatcaggccatgtaggaaactgtgttcttgttattggtagaggggccctcactgaaatccaagcttggaaggatgtcctgtgttgtttcagattctcttgtttggttttgaaggatgcggtgtggagccagaggatgtgtgggaggggtttctctaacactgacttctattccatgagctttttcaaggcgcttattttatggcagcgtattaaaacttctttgatatt

SEQ ID NO: 181244 - DNA, 1084 bp, Homo Sapiens
tgcgggaacggcactgcagatagattgcttaagcctggctgtggcataatgatatttactctggtcccacagaatctggaggaatgcgaactctgtttaccgagagcctctctccaaacagaaacccagtgcccctgcacattcctttggctcctccagtctaattgtcccacaggacaccgtaataactagttggaaggcaaacagtgttaactgatgtgatgtgctgctgtccagggcactgtggccaggccgccgctccacctatccccagccactcaaactgcaggtctgcctggtgcggaagctgcaactgtccttgtctaagaccaggtgagcccatgcaacctttcagaccccatgaagggtgactgacagtgactcctgccagccctcgggagggaaaggcgagaagctgcttctagagaggcaaagtgcagggactaaatctaatctcactccccgaaaggacaggctgccatgccctgtagcccaggaagcttctctctgtgcaagggtcaagcacctgaagatgataaagagatcaggcagtgaggtcacaaaagcagctcctggagacactgggggatatggagagctggctttataaacacacatgacatgtattcaaaatcccctgctactaggtgacacaaaaatgttttaagtagatccaataaaaataaagttcattcttcaaaaaataaattgctagggaaaaaacaatcacaaggtgtagtccttaattggacttcaagtcaaataatcgaaaaaattaattttaaggcaagtggaattgtgaacaccatttaggtatttgatgatactaagacattcttggtaatttttgtttcaggagtgacactggtgctgttttggttaagtacacattttgggggaagacagcaggatatgcacgttatttagaaatacggacacgtgtgcacatcagaagaaacaagccaagagtggctgcctgggggaagggagggcaggaaatggccgcagtattgttttactctctacatttgcacacactattcaaataaaatgaaaagtaattaaaataactaggaaaagccaa

SEQ ID NO: 181245 - DNA, 2224 bp, Homo Sapiens
  misc_feature (1226)..(1234): n is a, c, g, or t
  misc_feature (1668)..(1698): n is a, c, g, or t
  misc_feature (1839)..(1847): n is a, c, g, or t
ccaactttgtacaaaaaagttggcattgttgccttctaacaagctctctgggacttttaaagttttattactattattgctaatgtatgattatggtcagagactttcaacccaccccttcctgcctacccctggcttttcctcacaaagaatgtctagacaaacagcagcttagtctcctgacacctcttgtggggtgcatgttcctgctccaggtatgctgttcagtggccccttggggtttgcatgccagtgaagcgttaccatagaagagccagccgtttgtgttcgcttggtaggtgtaagtaatagcagcccttagccacggagtctttatgtggtttattcctgcaaggttgttttaaactgaaatagaactgctagtgtgattggttgatcagcaaaacagctgctctcattttgttttggaggaaccctggtggtttgacagccaggagaaaggccatatgtgaaaccagtctcttgtggagattggaaatcctccctgatatttgggcagagcctaaacgtgcatgcttgtcactcaaacaccagaagtttgaatcagaggtctgagtgacctcttttgtggctgttcttgatggtttccaggcctcgttatgcatggtttgcttgatgcccattttttgtgccttgtgctgttggatggtaacgaccactcaccatgtaaacacagtacctcagttttctgtccacagctgcagtcgctctgtccctcgtgcttcactgtgggcagccagggacaagcttctgaaagcagtgtgatacccaagtcataggtgcttctcgtatgtgaacaggtgtcattctacagatctgttatgtgttttcctgttgactcttaagagtccctgcatgtaaatctcaaagctgagcctggctcccagagtccagactgacattacagcgcaagagtttgcaagtgtgtccagcatgcaccaactgtgcagaacttggctcggtaactttgcgtggaaaaataaagtacattttgaagtatcttgagggttgggtcaattgagacatttctagcattacttaatgacttgcattgtggtttttctgcaagcaactttaatgactttttttataccacatggtctcccagtttctagatgaatgcaacatgatgatggtgatgatgacgatgagtttaatcattgttcatttattgcctttagggctgagggaaagggaaggtttgnnnnnnnnnctccccattttcccccattctgtctttcttttggtgacttacaccacatgtaatgacgctatgactaattctgctcccaagcccttgtatcttgggcttcattttaggctcatgtgtcagatctgcatgcattgcttgcatttttctggtatctgaatgttggttccttgttccaggaattcaacattaatttccaaaagtatcatgggacttgtgacaatacaagacatgaatctatgtataaaatttatcggcctttctcatttacctgctctagtattattgtattgtgtgtgcgtgcgtgtgtgatgtcaggctgccacgtaaaacttcagagaaaaatcttaaaagcagaccatccttttttgcatgctctattctaagtagaatgttcaatgtaactgactaaaattgcatgttaaagatatttaggnnnnnnnnnnnnnnnnnnnnnnnnnnnnnnncagtttcctgtatatttgcttactgtgccgttttagtggttttaggataaaaatgcactggtgaagcaaatgtagtgccaacagaaggtgattttccagttgtaaatgtcatgcagcatttgaagggactgtgttttcttnnnnnnnnntcacagttacttctaaaccagatttcatttcttttattgttttatgtgccaaaccacgaagtgcattgggcttcaatctctgaacactgtagacccattagaagactgttccgattgttacaaattgtagtgcctgaaaacactcttaagctgattgtcttaacaaaatgaaagttctccaaagacaaaacagaacaattattataacaaaataattatggttgaaatgtctgtggttccttggaaatgctgcgctctttgtgtttttccatcattagtgcagttggaatgaatgtgtataggtcagaggtcttcgtgttcacattttaaaattaggtaaatgacctcatcttttcagcttgaattcatttttaatt

SEQ ID NO: 181246 - DNA, 1432 bp, Homo Sapiens
  misc_feature (159)..(170): n is a, c, g, or t
  misc_feature (318)..(326): n is a, c, g, or t
cccactggcagtctttgtggattaggatgggggtgacataattttcttgagtttaacaggagtgctttacccaagtcagtcatggatatgatatcactgctctttatttaaaagtaaactttgggcacaggaaccatatgggaacattcagcttgtttnnnnnnnnnnnntcagaagttcagagcaccttttcaatctggagcccttaaaccataagtccaaatatgaattatttgtgaacagttaatgacccatattagaattttacaatctggtgaacaatctgggtaaaaggctacctttaattctaagcttcannnnnnnnngggggggggttacattttaatcataaattcttttttgcaaagcccaggttcttgttccacacagtgtaatgtaggtgtattttggacagcacatatggtccattgtgtacaagtcagtaatctggatttcagtacatggatttaaaaggcaacaatccatcactggtttgtgtgtttttggttaagtttctggaagaatacaatgcttttatattggaagtataagttttgagtggcattgttgccttctaacaagctctctgggacttttaaagttttattactattattgctaatgtatgattatggtcagagactttcaacccaccccttcctgcctacccctggcttttcctcacaaagaatgtctagacaaacagcagcttagtctcctgacacctcttgtggggtgcatgttcctgctccaggtatgctgttcatgtggattcattccattcagtggccccttggggtttgcatgccagtgaagcgttaccatagaagagccagccgtttgtgttcgcttggtaggtgtaagtaatagcagcccttagccacggagtctttatgtggtttattcctgcaaggttgttttaaactgaaatagaactgctagtgtgattggttgatcagcaaaacagctgctctcattttgttttggaggaaccctggtggtttgacagccaggagaaaggccatatgtgaaaccagtctcttgtggagattggaaatcctccctgatatttgggcagagcctaaacgtgcatgcttgtcactcaaacaccagaagtttgaatcagaggtctgagtgacctcttttgtggctgttcttgatggtttccaggcctcgttatgcatggtttgctttgatgctcattttttgtgccttgtgctgttggatggtaacgaccactcaccatgtaaacacagtacctcaattttctgtccacagctgcagtcgctctgtccctcgtgcttcactgtgggcagccagggacaagcttctgaaagcaatgtgataccccagtcatatgtgcttctcgtatgtgaacaggtgtcattctacagatctgttatgtgtttcctggttgactcttaaaatcccc

SEQ ID NO: 181247 - DNA, 1322 bp, Homo Sapiens
  misc_feature (838)..(882): n is a, c, g, or t
  misc_feature (1246)..(1266): n is a, c, g, or t
ttggagaaacatcaagtgaattttttctaagagcacgtatctagtaaatggcagagcagagatttgaactcagagacctttgagtttagggcccaggctttgcttaacttccgtgtaaaactgccttttaggtgacatattaaacttgaatttcaatgttatgatctttcaaagagctaacagcactttcacattttaatttattttcgtagtatcaagctgagtagctaagtggaatgaattcataatgtcaaatgaatcttgaatgatcctatgaccaaacttccatatatatccaatatcaacagtactgtctctaaattcctgctaaatttgtaggtagtatgccttgcagattgaacagggagtgtttcttatacaacttgcacagttgattgcacagtcaccattttcctaaatagctcctaagtgtaatcagatggtctaaaacaatatgtaggattttagtttaaaaagtgtggctgttttacatgtatacatacacacacactcacacccacagatgtgtttccctgtttcccacagtgcctaacacaaccctaggtacaaaagaagtgccttataaatgcttgacagattggacttctctctagagaaatgtgaaggaagagaactcaattccagaagaataattatggtatgctgaagcaaagacccagttcactgatttttgtttaagagtcccggggcagccaggccatcccacaggggctgtgaaggcagtgtggggcggtggcctcagccaggggatggaccttcacttaccagctgcagggtcttcagtaagttattagctatccttgaatttcatacatannnnnnnnnnnnnnnnnnnnnnnnnnnnnnnnnnnnnnnnnnnnnttctcaaagttaaattattattttcattgtcatcattattattttaggtagggcaccagagaaacagaaaccattttattgaaaacttccaaatttggaatcaacagattctggttcagatctcacatttgatgtttaacaactatgtgcctggggcaagcctctccagtttcctcattggccaaatgagatgatagtgcctaccttgcaggcaacattaaatatggtgactgtcaggagcttggtatgtagcagatgctcaacaaatgttaactctgattatcattttctgcttaccaaagctggtaaattactttcctagaaccttagcttcatttctgtggcaccctctaggcctatggannnnnnnnnnnnnnnnnnnnngaagtaacacatccctttgagaatgcaatgaaagctacagcaatatcaccagaaaa

SEQ ID NO: 181248 - DNA, 1154 bp, Homo Sapiens
tgtacaaagaagcagtaacagaatcatgcagcgcagtatttcatggtgacagttttatgtggttgtgtgatgttgcagagtcttgtaggtgatatctacccttttcttttgaatcaaaacacggggttttactggaggagggaagtttcagaaacaacctagtctaacacaaaattaagctcctaaatagttatcccattctgtctactacaaaactaattgcttacaggaagtagaagtacacatatctaatatttatatcctgtttgagtagtggtttctaattttagatttctaacccctttttacattatctttttgcattgaaattatactgaaacattcatattattatgaatgcaagctgaattaaatagaccaagattctcggtttctcccttcatgttgtcatctactagagaatgaacagcttaaaataagtgcatcagttcctcatccaaagggaagctgaatattccaattcaagatcactttgcgtgcttactggaaataccatttttgaacgtacttggcaacttaaagtgcccaattaaaagctctgttgaaagaggaagtctgtggatgtgcaattagtccttaggattcagagcatttcctttatgtgtggaaggccataatatgaaatcactggtcacaatagctttatgccaggtgcttagactagaaggcattttcaggatggattatttctgtactcttgctcctaaaatggtttacctaaagaggctcccaagtccataaaaatactggtgatgtcaagaaattttggaggtggcctttcacaaattttaggcagtcaataaatataactagccatgtacgtgataggcaatacacaagacttgcttatattcctagactttctattttatctgattgacagtgttcctcttcccacctttttattcatttatttatttttaaaagatgaggattgggtaccagaaaaattagccagtattgtgtgcttttccttactaaaaaaatgaggcctcgctgagtagggcagatgagctgtatattctgagaatattttatagtgtttatgatagagagaccaaaaacagtaagcacttaatagcttttccttatttacaagtcagattcatctaaggatatttttcttttatttt

SEQ ID NO: 181249 - DNA, 586 bp, Homo Sapiens
gggtaaatgactcgggcacttacccaggctctaattctagcaggactcttcctgttttcttatcgctcagctggtggaaatgacaccagcttgagccaacctcaccaggtgtcatgagcaggagcatccaggggaccatgtaaataagtgctgtcccaatggatgtcatgattgtcccttaccgtgacctctcctcgcagcaccagccctgcatctaccagtaacctcccacctttgggcacctctcagaactcagaacctctctgtgagcagccctcctttctgccttcctctttcctttctccttattaaatcactcttttctcagtcttttgtgctggaaactcaagtcatatctagcttttctctctccatggcctcccctttcctgctccaagtctggctgcttctttcctttcatggccctcatttcctgggccgtcacctctaggcaggagtccctccctcccgtgtgaccattgtcaaggccttgaccgtcttctgcctctggagtttcctgccccacctcaccaatgtggccagagagatctcccaaagtgcagctctgacctcatgcccctaattc

SEQ ID NO: 181250 - DNA, 1789 bp, Homo Sapiens
  misc_feature (586)..(594): n is a, c, g, or t
  misc_feature (1041)..(1050): n is a, c, g, or t
aaattagaaagagtaaccaaacaggtatcgatatcttttaaaaactgacctttcatatttacatttttgaagtcccgaaatcctcccttcatctattaaaaatattaaattctggtaaacacgtttatagaataattgactattatttaccaacagtgtgcaaaactcacaaaggaaatccgtcttttgaaagacacaaaagatgaaacaatggaagaacaagacatcaaacttcgtgaaatgaaacagtttcacaaagttattgatgaaatgttagttgatatcatagaagaaaatactgagatccgtattatccttcaaacatactttcaacaggtaatacagcaccttctattaaatatttcttaaaaacttcatgaaaataaaaactttcatgacattcatcatgaagtgaaagctaattaaaaatatttatcttctaaaaaacagtaggtagtactaatgattgctattgaatattcctccagagtgggttagaactacctacagctagcacaaaaggcagtcgtcagagctctagatctccttcacatacttcactatcagcaaggtaagcggagggttnnnnnnnnntctgcttaactctcacagctgtacactaagtgattccagccacttctacatcaccgcagctgttaggcaggcccatgcactcactgccagtgttcttttcactgtcagacatctcactagtcagcatcatatagattagatgcagaaacagccagcagaacaagaatttgcttctgacttctgctggtgtcactatttccagtatagcccaagtgctctgtgactatgagctatttcagtaggataaaacagaaataaatttgggggctacatctagcatttgggggtgaacccccaagttgggggaatttttttaaaaacatgtaagggcagcttagatgtacagacatatagaatatgatttttgtgattcaaaccacactgtggtattttacataatcaggatttgactttatgaagctttattttgctaaaaaggaaaccccnnnnnnnnnncttctgcagttgttacccagaattctatcaccagatgcttaagcaaacattcttgtgctttgctgacaaaaatttattaataatgatcctgattttagaattcacaatctcctgcattcagcagctacttattaaattactattccttagtccaggtaaaaatttcatgaagaggcccctaaaaaaagtgtttcatttaagtataaaaaactgtttctatataactgaacatccctgtactttcataaaatatatatttaaaacttttttcagaattatatagctagctgtttttcaaatgaccccaccactttatccatcaatatgcttctctcttctcttcagcttaaattacaaaaggtatcattttaattatttttgccagcaccaaatcctcttggccctatttcctctgttttggaaactttcaatgcttaatgattccaactctaaaaaactgattatagttcaaagcatttttaccatgtaggaacatacttattaaactacttttctactggtttgaaactcatctatgttcatctttcctttcctgtttaaattgtttgatatctattgatggtcatttaaaaacttaacactattaatatgtacttttttgatgtctttacttatggaattatggtaccttttgccaataatgagagggtctatactaaaatataaactttgcattgaatttataattctggtttttcttctaggtcatctaggccaa

SEQ ID NO: 181251 - DNA, 1980 bp, Homo Sapiens
  misc_feature (1257)..(1294): n is a, c, g, or t
  misc_feature (1368)..(1415): n is a, c, g, or t
aattgatgagcaatgctttcttaaaagggccaactttgtacaaaaaagttgggttttttagaattataaatatttttaattagctttcacttcatgatgaatgtcatgaaagtttttattttcatgaagtttttaagaaatatttaatagaaggtgctgtattacctgttgaaagtatgtttgaaggataatacggatctcagtattttcttctatgatatcaactaacatttcatcaataactttgtgaaactgtttcatttcacgaagtttgatgtcttgttcttccattgtttcatcttttgtgtctttcaaaagacggatttcctttgtgagttttgcacactgttggtaaataatagtcaattattctataaacgtgtttaccagaatttaatatttttaatagatgaaggaggatttgggacttcaaaaatgtaaatatgaaaggtcagtttttaaaagatatcgatacctgtttggtcactctttctaattttggcttctgctcctccgtttctttacttagttgaaatgaataagcctgcttctctgataacttttctttaacattatttgccaaatgttctataacatctaatgtattttccatgctctgtagaaaaaatattaacatgtattttttagaatcagaaattgacttttataacttgtcatttatcaagtattcatttaattttaattcatttatttttgtacataatatacattatttctgttgatgtacctcttaatgacatctcggtcaatgatggactgtatatatgatggtggtcccataggattataatggagctgaaaaattcctgttacctagcgacattgtaatgtggcacaatacattagtcatgagtttgtggtgatggctggtgtaaacaaacctgcattgccagtcatataaaagtctagcacatacaattatgtacagtgcataatacttgatagtgataataaaagatattactgatttatgtatttactatacaatatacttttattattttacagtgtactcctatttatttaaaaagttaactataaaacagcctcaggcaggtccttcaggagatattccagaagagggcattgttatcatagatgacagctccattcatgttactgaccctgaagaccttcaagtgggacaagatatggaggtggaagacagtggtattgatgatcctgaccacgggtaggcttaggtttatgtgtgtgtatgtgtcttagtttttaacnnnnnnnnnnnnnnnnnnnnnnnnnnnnnnnnnnnnnntgcttagagaataaggatataaagaatatttttgtgcagttgaacaatgagtgcttaagctaaatgtcatcacnnnnnnnnnnnnnnnnnnnnnnnnnnnnnnnnnnnnnnnnnnnnnnnngctctaggaagctaaggtcaatttattattggagaaataaaattatttttatgaatttactgtagcctaggtgtacattatttatcatgtctacagtagtgttcagcaattaggccttcacattctctcaccactcactcactcagtcactcacccagagcagcttccagtcccgcaagctccatttatggtaagtgccctgtacaggtgtaccatttttttaatccattataccatatttttattgtaccttttctatgtttagatttgtttagatacacaagtaccactgtgttacagttgcctatagtactcagtacagtaacacactttacaagcttatagcctaggaacaataggctataccatctaggtttgtgtaagtacactcttatgatgttcacacagtgacaaaatcgcccaaggatgcattcatcagaacacattcccattgttatccatgcatgactgtataatggttttatggattaaattttttatgtaattcaactggaaagtatttttatgttattttggaaaaaataaaacaatgacaattgaaatc

SEQ ID NO: 181252 - DNA, 1718 bp, Homo Sapiens
  misc_feature (300)..(309): n is a, c, g, or t
gttggtttgcattttgctgatggctaatgacaggcatctttacctgtgatttttgaccattcgtatatcttctttgaagaaatggctgttcaagtgctttgcccactgtttaattgggttgtctttttgttgttgaaagcagtcttttgattatgaaattaatttatgtattcttctctagggggcttatttggaaatatatacttggtaatataaaaatttatttcggaatataaaataaaggactggacttcattactttttaagtaaacttttattggatgcttccttttaatgtannnnnnnnnngtagaaatgaaattgttttaattttatagcttagcctgatgcctgattccatgcttgcactgactctctgtctgcactaacaaattatcagatttattcctttccaaaatatcattgattttttttcagatcatagaatattcctctcccaacttttttgttgacagctttactgaggtgtaatttacatgccataaaatacacccattctaactgtacgtagttcagtgatttttagtcaacttaacagcattgtaccacagttaacacaatgcaatattatagcatttctatcattctgaaaagttttcctcagaccttttggaagtcattttctgttcgcgccccttggtgaacactgatgctttctgttactcttgatttgccttttctgagtatttcacataaatggaatcataatgtatagtcttttgtgactagcttctctcactgaacgtgtttttgtggttcatctgtgttgtcgcatgtatctgtagttctattttttattactgagtagtatttcattctgtggataataccacattgtgtttattcattcactagttgatggggatttggatcatttctagtttttgactattatgcataatgaacattcaagtacaagtctttgtgaggacatcctctttcaactttttattttgaaaaatttaaaccccacagaaagattgaagtaagtagtatagcaaacacctatttactcttcacctagattgactattaacatttgcctgctgttctttgcctttttctataaatataccttttccagaaccatttgtagatattatactttatctcttatgtatttcagcatgaatttcctaagaatgagaacattcacatacataaccacgattttatcacacttaagaaaattagcagtaatctcatgtcagctactttatagtccatattgaaacttgtcccaaaaatgtcttctgtagttcccaccccgccgtttctaatgtaacatccccaaatgatttatgaatcgcagttggtttgatatttctcttagtctgtcttaatctagaatggttccccttctttttgtttgtcctgtcagtgaggtttggaagaatacaagccttccacattttagatctgtctcattgtttttaatgatttgttttaggttaaacattttgacaaggattcttaattttaaggtgaagttgtgtacattttagcacaccagtgataaagtgaaaaagtgagttatagcacagatctaaaaatactttaaatgctttattttaatgtaaaacgtaaatgtacattgccattactgtgaacataatgtcaagttctccccttgtgtagaaaaatttgatcacatgtgccatgctggtgcgctgcacccactaacgtgtcatctagca

SEQ ID NO: 181253 - DNA, 1061 bp, Homo Sapiens
  misc_feature (485)..(765): n is a, c, g, or t
gcagtttgggaaaccagcaggaggaactcaggagtggatgactttaggggtaaaaggtatagaagaagcatgaacgaatgtgtgaatttgttgaaagaaaatgatgtctttgaatttccacaagaatgttgcaatttcatttttaaatttcgtaacaaaggaccaggcttagctaatagtataactaacatttaggcctgtgaatactcccaagctatgaggggacccttcagtcaaatattcactgagcatgtgagggccaggccctgggagcttacttttcaaaagtgtaccataaaccagctgccaagcgagaagctcccctgctcctgcctgacatccccgcttgtaatgctggcctgggtcctgcctgtccactggtcactcgagtcaccattctccagctccccacagaccagcctgggcccacctccttgccctactgccttaggctactccaacctagtagtaacagtttttggggnnnnnnnnnnnnnnnnnnnnnnnnnnnnnnnnnnnnnnnnnnnnnnnnnnnnnnnnnnnnnnnnnnnnnnnnnnnnnnnnnnnnnnnnnnnnnnnnnnnnnnnnnnnnnnnnnnnnnnnnnnnnnnnnnnnnnnnnnnnnnnnnnnnnnnnnnnnnnnnnnnnnnnnnnnnnnnnnnnnnnnnnnnnnnnnnnnnnnnnnnnnnnnnnnnnnnnnnnnnnnnnnnnnnnnnnnnnnnnnnnnnnnnnnnnnnnnnnnnnnnnnnnnnnnnnnnnnnnnnnnaggcagtaacatttctgtactaattggaaatgactagaaaatcacctttcaggcaatgtttcttcttgctttcctctaaaaaggaaatatttctttcctatcccaacatttatatcccagcccagccttggggatcctgggtgaataggaataggacttgcctgccagtgggtggagcactccaggtgagcctctggcacaggcctggccaaacacagcctttactaagttaagcagctacagtttagtaccagaaaagaaattcaccttttaaatagcagaaaatccctggccaa

SEQ ID NO: 181254 - DNA, 1298 bp, Homo Sapiens
  misc_feature (1094)..(1110): n is a, c, g, or t
  misc_feature (1135)..(1146): n is a, c, g, or t
atcttggatgtaacagacatggaagacgactcaagtagggaaaaagggaaatcctgactctgattatgtcaaaagacagttaactactcatgtgggtttagaacgagcaagggtgaggtttgattctctaacatccaagtgcaggctagatatttacccatctgccctatggaagtcctttccaccaacatccagttcctaagtttaaagtgcaaatctactgaaaaatagtttactatccctcttcccctatgttaaatttgctagatcataatttggttggctgggtctcctctaaactgcccaatatgggaaattaactagaatccagttaatgacttctccaaatatcaagtaaaaagttttatcagtttatcttaggtcagagaaaggtaagactcagtctagttcttcctttcagttttcttcctttacagatttataaaatgcaggaatagagatacagatatggtatttctaaaagttccatgattttaaaacatgacccttgatttttggaagttcacccattttatggtttacaaaaagaaaacaatatgacacatgttagagcacagataaagaaatatggtcaagttagcttgtcagaagaagcaccaactctgctacactgaatcttgcttttatatttcatgatttacagacacattaaacagccccaaataaataaaatctgtgccaaaggaatgaatttctagtaaagggtaacatgcaatttagcagttttcttcctttaccaacacttacagagtataaggtcttagtgaattgatggtctgactgtagtcagagagacataatctattcatgactgatgctttgacacttcctcctaatgcttttaagtgaatgattaactccaacctttctgggccctgtgcttttccatttagccctgagaaaaacccaggtagaagattccaactctctttacacatcaccaattctcagaataagtcaacagtcaagattcatttcttattcttccttattctgcttcagaccactggtaaaaggtgtcaaaagaagtgtttattcaagttcaaattcctctttccacaaaagaaccacannnnnnnnnnnnnnnnngagacggagacttactctgtctccnnnnnnnnnnnngttatatatttatcgtatgattcattttatatgaaatgtccagaacaggaaaattcatagagacagaaagtagattagtggttaccaagggctacacggggtaaaaagggagtgactgctaatgggtacatggatttttgggagggtgccaa

SEQ ID NO: 181255 - DNA, 1372 bp, Homo Sapiens
  misc_feature (390)..(430): n is a, c, g, or t
  misc_feature (924)..(950): n is a, c, g, or t
tcacttggctttataattgggccataagattaaataatcttagtaagattatttattagatgtggcaagatggctttttcagaaagatgagtagaggagctgtctcatcgccatggcccaacataacttgggtgtgcaggcaccaatgcctcaggctgtaagtttctctgtgcttgatcaagtggccaaggggctgtgcgatacgcatcaatcccactgggaaaaaaagtctccagagcagtaacaccattatcaatcaccaaatcaatcaccaaaaaggtgatgctgaacacaaaatgaagccagctcaccttctttcttcttttgctttaagaaatttttcctcaagacgagcaatttcatcacaaatagcagcattttcctttaagnnnnnnnnnnnnnnnnnnnnnnnnnnnnnnnnnnnnnnnnncacattattatgctgggaagaggatccatatttcaaaccaaaaaagcttgtattactgagaagaaggagctattcgaccgtgtgacaaactataaataaatccatagataaaggtagtcaggttctactatggacagggtatagctatgtaatttattatccaatccgggacatctttgagtgaaaagggggtactattaatgcttatgccagaacaatacggtgaaccaggactgtcctgggcaagccaagattaatggtcaccctaattagtatagcctttggcaaagaaaaaggcatactgcttaaatccttatatgcttaaattaaatactataaatatgaaaactgtctattcccaagtgcctcaactcttgaaaaacttacaaagccagtctaacccaaatagagaaaaactggacagaacaaaatcaaatttagtgtgtaaaattcttaaacttcacaatctacttatacgaattcaagtattatcnnnnnnnnnnnnnnnnnnnnnnnnnnngtaaatgatgactcaatctatctcccaagcaccaatcctgaagggaatgctgaatctgaatgcccccataggtggaacttcaaactctcaatgttcaaaacaacatcgctttttcttcacaaaatcttcattatgtatttgatggaaccaatatccttgaaataacataaattccaagctttaggtacctttgacgtataggggataaaagaaagggaacagtcaatcagatgctaagttctcttagttttacttttcttgtttctctccagtgcaaatagcaagcaatacacatagcaagtgctgaataagtgcttttggaatgtgtattctaatttctgaacctttccttatgcttccaaaaatgctgagagacgttcaagcttttggtagagagaagagatgaactgttgacttgccaa

SEQ ID NO: 181256 - DNA, 1252 bp, Homo Sapiens
ttggctatcccctacaacctcgtgccttagtattaatagggtacagcaggaaaaactcacttagtttccattttgttcttggagaagaaaaatttggagacatttccaaaatggcatgtacatcataattcttattgccaacatttataagaaactttgactgtagtgattatcaagatacatgcttggaatatttattccctctttccccacctttcaaaataaggatttagagcaggagttggcagggccaaatccagcctgcagcctattttggaaataaagttattgggatgctgccatccccattcactcacatactgtgcatgactgctttcatgcttccatgacagagctgagtggttgcaacagagaccgaatggcctgcaaagcctaaaatatttactttctggacccttacaggaagtttgccaacccctgatttagaaagtgaaaacctaaatggggaagtcttacatactttaacgtatcttagcaagcactgttatgttaatgtatatggacagcacttaaaatatatcaataaacaattatgatcagtaaacatttatttagagcctattgtggcccagagagtgtcctgtgctcagaggctataaataccaataacaccccatctctcccctcatggaactcagtctcaggggagaggaatatgtaaatgataagtgcaatgcaatgtgacataaataatatcaagaagaagagaatcagaaaaaaaaggagaggggactgattaattctgtcagaagtagagaaaggcttaacaagataagtgatatgtattaaattgtaggaaatgttagataaacagctttctttagtattttttgagttagaaagcaagtttttagcttggggtcagaatatttttagagaaaaagtttaaaatgtgcctaaatctgaaattctggatttaaaaaagtgaaaatctgcatgttcctctaatacctaatgacgaattctaattgcagaaggatgccaataactaaaaccacaaaatgaaccctatgtataccggtgaccttctttactcagaattaattaacacaagcacttgtttcttgcagagcactttgctgtaatttagaacaaattaagggaaaaaatcattcaagtgctgttttcttcacaccatgaagtaagcatgatggaccaaagttaactaatttaaaatattatcatccatttcttgtaattatgaatagcaataccatcttttttcttcaaa

SEQ ID NO: 181257 - DNA, 872 bp, Homo Sapiens
actttgtacaaaaaagttgggtaagaagaaacagtatacctcaaaggattaaggagttgatggatgagatagattttgctcttagccaaacactttgcattcagtatgtagcattttgctttgtggaagataattttcaaggatgaatgagtgcagctaaaatagttatttttctgtgtgagcacagtttgaaattcttgatgaaaagagtcagacactggtaagatatttgaatagatttattctgagccaaatatcagtgactggtggcccgtgatgtagcccttaggagatcctgagaacctgtgcccaaggtggttcgggtacagcttggttgtatacattttagggagacacaagacatcagtcaacacatgcaagatgtacattgcttccatctggaaaggcaggacaatggaagcagagggtcttccaagtcatcaatggattcaaagattttctgattgaaagagttattcaggttgaaagagttattatcaatacaaaggaatatctaagttatgataaggggttgtggggaccaaggttttatcatgcagttgaacctcccaggcttcagagagaatagattgtaaatgtttcttatcagatttaaagagtctgttctatcagtaattccgaaaaggaggagggcagaatgaggcatgcctggcttcccttacccatcatgacctgaagtagttttgcaggttaattttggaatgcccttggctgagaggaggggtccattcagatggttcggggccttagacatttatttttggtttacaaacatctctatgcatattttgtcattttttacttagaatctgcagaagagaaaatgaaacaattttgaccttttagttcat

SEQ ID NO: 181258 - DNA, 1096 bp, Homo Sapiens
ttggcccagaccagacggctgaggcctctcacgtcagccgctatggaggcagccccagagacccggtactgaccctgagagccttcgcagggcccctgagtccagccaaggcagaagattttcgcaagctctggaaaactccacctcgagagaaagcaggcttccttcaccacgtcaagaagtcggacccggaaagaggctttgagagagtgggaagggagctagctcatgagctggggtatccctgggttgaatactgggaatttctgggctgttttgttgatctgtcttcccaggaaggcctgcaaagactagaagaatatctcacacagcaggaaataggcaaaaaggctcaacaagaaacaggagaacgggaagcctcctgccgagataaagccaccacgtctggcagcaattccatttccgtgagggcgtttctagatgaagatgacatgagcttggaagaaataaaaaatcggcaaaatgcagctcgaaataacagcccgcccacagtcggtgcttttggacatacgaggtgcagcgccttccccttggagcaggaggcagacctcatagaagccgccgagccgggaggtccacacagcagcagaaatgggctctgccatcctctgaatcacagcaggaccctggcgggcaagagaccaaaggccccccatggggaggaagcccatctgccacctgtctcggatttgactgttgagtttgataaactgaatttgcaaaatataggacgtagcgtttccaagacaccagatgaaagtacaaaaactaaagatcagatcctgacttcaagaatcaatgcagtagaaagagacttgttagagccttctcccgcagaccaactcgggaatggccacaggaggacagaaagtgaaatgtcagccaggatcgctaaaatgtccttgagtctcagcagccccaggcacgaggatcagctcgaggtcaccagggaaccggccaggcggctcttcctttttggagaggagccatcaaaactcgatcaggatgttttggccgctcttgaatgtgcaggacgtcgacccccatcagttcccggccgttgcacagatgggaa

SEQ ID NO: 181259 - DNA, 264 bp, Homo Sapiens
ttgcccgggggcttctgccggggtggggtccgagccgggcgaccgcccggctgcgccgccgtcggggccgtaacccggcccgccgtccctcccgccccagccagcctctggccgccggagcccgcggggcgtggagcgcgaggagccccgcggccccgatcgagcgtccggggcggcccccggcagccagcgcgacgttccaatatcgaacctcagtggcggcgctcggaagcggaactctgccggggccgcgccggctacatt

SEQ ID NO: 181260 - DNA, 1714 bp, Homo Sapiens
  misc_feature (1089)..(1102): n is a, c, g, or t
ttggttttaaatctcaagtttgtgtggtcagagtggcacatctctaggtacctaatagagaacaaaccaaatgtgtcttccacacagcagcccttaaatattctttaaatagctgtttgttttttttgtttctgtaggtacctgtgtctccaggtttttaaccatttctcatatgattacatggctttaaatcctcttgccattccaattctgctcctgtgaacttacttggtcctatttatcagcattcatttctaggtgtggaactggcaaaacccttatggtgcagttgctgggtctctgaattaagaatattttgaaaggaaattcgaaaatattattacctgagaagttctcctgctaaaaacatcattgacaagaccttcaggaaaatgaacttttgctttctcctactaataatgtgtacattcacttagctcatggaaatctgaagtccttataatctgattttcactatattagatttgtgtaggggctacagatctgaagggaattatccatgaataaatgagaagttgaagcctgcaaggcttctttcttgcatacaggcataaggaacagagcagtaaaatatcctaagtaagattatttctatttctatgaaagagtgattgagatagtcaatagtggagcatcttgcaggcacccctgaatgcaaaaatcatgtaaggtaatagcctctgccatctagaatttataatccagctataaggcacctggcgtgaatttatgagaagtttaaatatcaataaagaaacagtaaaatgatcagcactgcatgaatctcacagctcagcaccaaagaatagagcacaaaaataaagttattttttttaaaagctgctacaatatacaaatattacatcttgattataattttattcttatttccctggggctgtcttatgatgatgtatccttattatcctctaagtgcatattcaccttagacacagtagcacagaagacagtatgaagatgaatgaatatggctgtcttccagtaaaactcaatggccactgtcatttgaatttcatataattttcatgcatcttgaaatattattannnnnnnnnnnnnnagctacttaacaaatgtaaaatgtgtgactcctaggcaataaaaaagaggcctgagggccacagtttgccaactcctagcttatagcaccaggaaattctgaagcgaaattttttgctgttgtctggcagcatccaaagtccagcattcccattcacaaatagtctttcagagaagcaaggttcagttgtacttttactattgttactatgctgtttagttctaacataatggaaaatagctaatcacgttagaaggaaaggtaatgagatctttactaatttggctttagagactgtccgagataataacaaatgattaaaagtatatttaggtgagatgtcaaaagagatcaaaacagaagattcattttggttattttcagaaatcaatgaaacaaaaataatcaaaacttgttttttaaatgactttggtgaaaatctgaatttttccttagaaggaattgatacttaatatttttgtgtgtgagcccaaaagtatgttttctgttcactcaatatagaagtaccacctgagtcataagcttagggaacttaaaagatctgactttggggaaacagataggcccacgatcggtgtttagtggattttt

SEQ ID NO: 181261 - DNA, 1708 bp, Homo Sapiens
  misc_feature (937)..(1212): n is a, c, g, or t
  misc_feature (1217)..(1251): n is a, c, g, or t
ttggttaatggctcacgtcttttagctttgttctttgtcataatctgcactcctggccagactgaccaaacctgggctgcaaaggaaagagatttgaattgatcaccaatgtatgaaaaatacagaacccatgtctggctcctaaactcctggtaataattcccgccatcgtagcaagtgtcccatgcattcagataaagcagtcataatttatggtgtattttaccgaattggtccagcatattggtcctacaaggctcagccaagaaatgtatctggtgccttaaactacagatttctggtgactcttaaaactggtttacaaagattgagaaaacaattagattgaagagttttgcttcaagtagacctgcattcatagctagagtgcatgagattttcagcactgtagaatttcacacaggcacaagcataacaccagtactttagcagccgccaacagttgcatctattaaacgttttgagaaatgacattgacttatgcacatttaagcaatcaacaatgttttagaagtccaggtaacatataaaatatattcagacctagttttactttccatattgttgctccaaagtaaggtaaataggagttttagttgtactggcctgtaagattttttaaattacacagtgcatgacaacaactaaagccaactcagtccttctcttggcattgtgagttgaggacctttagccaactgttagctcatctgactatctgtctagaccaagggtcggcaaagttttcagtaaagacccacagagtacatatttttggagtttgtgttgtctgtaccaacagacagacatggtgtctgtcccaactacccaactctgccattgtagcactaaagcagccatagacaagatgtaaacagaagagcatggctgtgttccagtaaaactttatttacannnnnnnnnnnnnnnnnnnnnnnnnnnnnnnnnnnnnnnnnnnnnnnnnnnnnnnnnnnnnnnnnnnnnnnnnnnnnnnnnnnnnnnnnnnnnnnnnnnnnnnnnnnnnnnnnnnnnnnnnnnnnnnnnnnnnnnnnnnnnnnnnnnnnnnnnnnnnnnnnnnnnnnnnnnnnnnnnnnnnnnnnnnnnnnnnnnnnnnnnnnnnnnnnnnnnnnnnnnnnnnnnnnnnnnnnnnnnnnnnnnnnnnnnnnnnnnnnnnnnnnnnnnnnnnnnnnngtctnnnnnnnnnnnnnnnnnnnnnnnnnnnnnnnnnnngtgggccagtctgtgagctatagttcccaacacctggtctagactcttctgcccttgctctgcagcttctttcctgttgattgggcattcagggaaggagtttaaaaagtgacactcatggctcatgacaaatgagatactttgggagtgtggaaacatggcttgatatttgccttcaaatatttttgcttatataagttctaaatggaagtgataagttcattcttagggtccaagttgaaaggcagtggttcttttgtgaacaccactaactacattcgaaaagcctctccaattccacattccaagtctataacagctttggaaatgagtaacaatgacctctcatgtagtaaattaaagcaaaggcctttgccatatgattgttttttggcttaaatgtttgcttgccctgtaactgtaatactttggttaccagaatcacttgaaaacaaat

SEQ ID NO: 181262 - DNA, 508 bp, Homo Sapiens
ttggcaaaatgctacatacagaaccaaaccagccacttcacaagagcaatgcagggataaaactattggataaggaaggcagatgcacttccaagaaaatcagaacccagcaagaagtggccagtgcaccccaaaccacactggtgtccacctcattggcagcagccagccaggacacagctcaaaaacgcaggagctaccagccacccagtccacggccctcgtctcccagaggctgagtacctccccaggctgcaggctctgggcagctgagccaggagcagctcagggctggcactgagaggctactggtgacagtaaacccgtctcaaaggctgggcctggctacagaccagcagcagttgacgctgaggcaggttccagtggtagccctggtgcctgggctctctcttaatgcaggcctggaagtggcgacacaaaagccagcttccttggctaagatgcccttaaaaacattggggctgattttgtgcgtctacagaaagcc

SEQ ID NO: 181263 - DNA, 1703 bp, Homo Sapiens
ttgggtatgtgcagcctgaaactggctccttaaaaggaaagccgggtcagtcatcttgaaaaaatgacatgtaaaagtaaatcgataattgttttgagagacggtacatgttttaaaggttggccttaagcttcagtaacattgtcattttgtgaccttttggtgtcacacctgtaccctaacctgacaggaattaactactgtttttttgtggggcagaaagcaaaacctggtgttgtgacttttatcctaatggttcttaggcaaggttagtgagaagaaacacaaacccagatgcatgcattgtgcattattttgtagacaagctactttttcttctgtccctttaacaaatttgcagcaattaccctccctttggggtctagagtgaaagctaatttgtgggtagatgagattgcagaagaatggatgtccatggctgtgaacactgcacactgcacatccatctccagtgctcacactgtgcagctaccactccctggctgcgtgccatgctgtcgggttgcagatttgcacacataaattcctcaggaagagtttgcatgagcatcacctcgcaatattctgtactgaccaaacaagggatttgaacgtttttcagcacaaaaggataacttccgagtggtggtctgtacgcatactagcaaaggtaatggtgatctagcaaacaaaattggtttctgcagttagaagtgagcaggagcacttgtattatagtatttaaataatcctggttaatctctttttaagccgagtaacccctccagattttgcctttttattattgaggctggctttattttcttctactttttttcccgttttatagcagttaattatttttgtgattattatgcaagaagcattgcccttgagttaaactgttattgtttcataagcagctattaaaataactgagcattgttttatgaacatacactaatctgagatactgaaaagctttgcaactaaaaagcaaaacaacctacattagtcatctagccattgtttggatgttttgagttgattttttatggtgcctcttttagcttggaatattacgtttactttaatccaagtctaggccttttaaagggtccttaaaattaaagttcagaatgtgaatccctttgacatctattacaggtttataggacctttttggttgtgattactgttttcaatacgattgtataaatgaagttaactttgtcagaagttaaaatggaggtcataggagttcctggagaaatggctctcctgtttctttcattaccccactgaagttcaccccagtttctggccacaagaatatgagaaaggaaccctgttgttttccaagggaaatcattcctctctgtccccactgttgattaactaaagtcctggacaccttccttcctccactggccaagacccaccttgacccaccttgaacctcttttcagagccgagtggcatgaatatgtgtactgtttctgcttctgttgatggagtggctgtgggagaattaaaggaaatgctaatttgagcttcattcataggggaacctactatatattgcatccctgctggttggaaattatcttcatctctggactgcattgtttagaaaaatgttaatggcttacaattctgagaactttattgtgtggctctggggttaagaattctgtggtttg

SEQ ID NO: 181264 - DNA, 1282 bp, Homo Sapiens
  misc_feature (970)..(983): n is a, c, g, or t
ttggtttgtttataatgttatcggctctattctctaaactggcatctgctctagattcataaatacaaaaatgaatactgaattttgagtctatcctagtcttcacaactttgacgtaattaaatccaactttcacagtgaagtgcctttttcctagaagtggtttgtagacttcctttataatatttcagtggaatagatgtctcaaaaatccttatgcatgaaatgaatgtctgagatacgtctgtgacttatctaccattgaaggaaagctatatctatttgagagcagatgccattttgtacatgtatgaaattggttttccagaggcctgttttggggctttcccaggagaaagatgaaactgaaagcatatgaataatttcacttaataatttttacctaatctccacttttttcataggttactacctatacaatgtatgtaatttgtttcccctagcttactgataaacctaatattcaatgaacttccatttgtattcaaatttgtgtcataccagaaagctctacatttgcagatgttcaaatattgtaaaactttggtgcattgttatttaatagctgtgatcagtgattttcaaacctcaaatatagtatattaacaaattacattttcactgtatatcatggtatcttaatgatgtatataattgccttcaatccccttctcaccccaccctctacagcttcccccacagcaataggggcttgattatttcagttgagtaaagcatggtgctaatggaccagggtcacagtttcaaaacttgaacaatccagttagcatcacagagaaagaaattcttctgcatttgctcattgcaccagtaactccagctagtaattttgctaggtagctgcagttagccctgcaaggaaagaagaggtcagttagcacaaaccctttaccatgactggaaaactcagtatcacgtatttaaacannnnnnnnnnnnnnagccatgtagaaactctaaattaagccaatattctcatttgagaatgaggatgtctcagctgagaaacgttttaaattctctttattcataatgttctttgaaggggttaaaacaagatgttgataaatctaagctgatgagtttgctcaaaacagggaagttgaaattgttgagacaggaatggaaaatatatttatttgatacctatgaggatttggaggcttggcattttaatttgcagataataccctggtaattctcatgaaaatagacttggataactttgataaagactaat

SEQ ID NO: 181265 - DNA, 1568 bp, Homo Sapiens
ttggcactatttgacttaagtcttcaattattatatagtatcttcttttgaagcaagagaagtactgttttattgtaagtacaatatttccaaagattgagaaaaccttcattaaaatgttctcaccatctggcacttccccccctctttgttatgtataggtttcccaggcagctgcagacttgaaacagttctgtctgcagaatgctcaacatgaccctctgctgactggagtatcttcaagtacaaatcccttcagaccccagaaagtctgttcctttttgtagtaaaatgaatctttcaaaggtaagtttccttaaatttaaaacaaaaacccacactgtaggaataactagtcttctctttctttgcagcacttaaaagatcatcccatgccctttcctttggccctccatttccagtatttttctgttttgcaaggaaagtgaggattcatgaaacttgctgacttagtagccatgaaggctaatcgtttctattttaccataaagaaggttaagtagaggatttaataaccataaagagggtataggagagttactacaaaatcccactgccgtaacaagccatgtgttactttttagagcattggcctaatggagtccccaagtactagttttgtttttgtgtacctggcaaatatttagacagtttttaaaaaatctgcaatgtttatggggataacttaaagtactaccaactgatttggattaactcttgatgttattgctctaactgaacccagctgtagagcagtatagcaaagattgggaattggaaatgcaagagaaagtcagatgtaattgagtaagccagtgtggtagaggcgtttggactgaggtagaacagactttatattttgttctcatttgttagattaaagataaaacatgaaggaaatgcagtatataagttcttggtggcaaacagacagtggactgaatttcagagaattaaaaactaaagaccctgttggctttattaaagcatgcttcagtacattaatttgtgccttccagatcaaatgtcatgtgtacaaaatgtatgttaatctaagagatgtgaccaaaaacgttttggatcatttaaaatgtaactgaagggtgctgccttttataaattcttagtactttagttagggaatgtactcattagtattgacctatgagaagcaaacttaaactaatagtacttttttaaaaaagattttgtatatggcacacaccccttactaactttctgacttctccaaagtccaggaagctgcttcctaaaataccttgttacatagttgtgccctccttaattaagcttcctagacctgggagtgtccaggaagtctgtataagtacatgtttccagtaaatacaatgattggttaagatgtttaagttttttgaaataccagggggaaaaaaagccctttgaaaacaggtgtcatgtgcacaaaatgcacatgaagaagtaattcactttcatatttaacagtttattataatatcctttgtttctggtactattcatttaattcttcatggtagtttttg

SEQ ID NO: 181266 - DNA, 1275 bp, Homo Sapiens
  misc_feature (272)..(504): n is a, c, g, or t
  misc_feature (748)..(818): n is a, c, g, or t
  misc_feature (820)..(955): n is a, c, g, or t
ttggccaagaggaggaagaggtggagaccagacggaacctccacaagtccatcatggttacagctggcttccccgcagcaccgaagacccacagcatgggccctgctgcccccgacccagctcagctgccacgcctcaccttgccaggcactggaaagaaagtttattgagtacctactgggccttcagagtgacaggaagctcaagttgacagtggcttcagcaagatggagctttatttttctgttttttgtggtgttgtcgtcgttgtnnnnnnnnnnnnnnnnnnnnnnnnnnnnnnnnnnnnnnnnnnnnnnnnnnnnnnnnnnnnnnnnnnnnnnnnnnnnnnnnnnnnnnnnnnnnnnnnnnnnnnnnnnnnnnnnnnnnnnnnnnnnnnnnnnnnnnnnnnnnnnnnnnnnnnnnnnnnnnnnnnnnnnnnnnnnnnnnnnnnnnnnnnnnnnnnnnnnnnnnnnnnnnnnnnnnnnnnnnnnnnnnnnnnnnnnntaactggaaggaagttgagctcagatctggtcttttccaaaggtccattatagtcgtgactacctgtatatatagacatagaggagacagggatgagaaactgatgataatgataacagtatttattagtcacttactgcattctaggcactattcgaaacagtgtacatggatttattcgaattttcaaggtttcctgagagattgtatgcagacttaagatctgtcttgtttagtgttatannnnnnnnnnnnnnnnnnnnnnnnnnnnnnnnnnnnnnnnnnnnnnnnnnnnnnnnnnnnnnnnnnnnnnncnnnnnnnnnnnnnnnnnnnnnnnnnnnnnnnnnnnnnnnnnnnnnnnnnnnnnnnnnnnnnnnnnnnnnnnnnnnnnnnnnnnnnnnnnnnnnnnnnnnnnnnnnnnnnnnnnnnnnnnnnnnnnnnnnnnnnnnngatgcttggaataggacctgtatgcagtaggtactcaatatgtatatgagtaatagtgaggacttactaggtatcaggcattgtattaatcctcacagtgacccacatgagatattaggatcattatctccatttccaaaataagcaaacagcagtgggggttcaatgatttaagccaagctcacacagctaggaaatattcaaactgagattcgaacccaggcagtcgggcactagtatttgcatccttaaccattgtcctgccttgctatttgctccttgatgcaaaacccctgttttttgcttgttaaatcacatgg

SEQ ID NO: 181267 - DNA, 1688 bp, Homo Sapiens
  misc_feature (389)..(402): n is a, c, g, or t
ttttttaatgtttaaaactggaacagctgggcaaatctctaaacagaggcaatacatttgctttataaacacttttctggatgtttgctcctttgatagataagcttccatagacgcaatagcagcacccttctaggcttaccctcagacactaagtggagggcagtagtccctgggagagacgatcagccaaggatatgacagctgtaatggttcggccacaaagttgatgcacactgcccaggcagttcctgactcacaactgcttggataaaacaggatagcataacctttctgaaatggcagcaaatgaaacttttttccccctctaaacaaaagatgtaggaaaacgccaagacctctttgaaaatagaatgatggaaaagaannnnnnnnnnnnnnctgtccatggctttcctgaagttcagagaccactgtctgtgtggggctgctgtggctcacagccagttcccccccatgagtgtgtgctaaatgcttttgcagagtcaaagacgtcaggtcctactctcatgcttctgctgatattctctctcatgtcaagctatgaatgttgtcagcaaagtggcccagcgtgataggcacacctacgtggagctgggaaccagcatacctggggtgggcgatgcctgaaaacaccggcccaggaaatcacgctgcattaactccaaaaggggagttgcatgaagcaggatcctctctgtactggcgctgtgtcccagcctgacttttgccctaacggtgggatgggtcagtctgactcagctcagaagcctggggctaaatggcatttttgaaggattacaggtttattaccttcaagtacaaacagcaaccctgctgacagggacaggaggaagcagagcaaagtcatggaggttggagaagtctagaagtgctttggtaagtgacttgtgatgaatacattcattgtctgaatgcaaacattatagctaaggtgtatctgaagccatttttgttggccttcaatgctatttgtcttgtatttgctatcgtatgtgttagaaaactatttcttatagctaacatcaaggtaaacttcagtccagcggatgtgaattacagcaaaatcccagtgaatgcggtttcacagtacttccaagtggcacaaagtaatttcagaactccactaatcattaacagcgttgcaaaaaagaataggcttttctgatttgttttttgggcaatagaacactttctggcattctaggtacttcaatatgtgtccttcaatcaccctgaagtgaaagcagtcctggcaacttaatatttgcctccagatgggtctctagtcagttcatgctgaaacacagctctgccacccacaacttggagctgaccagcccccagggaacatggaagaggacaggacacacctgttctagaaaaccaggtcctcagtaaacactgctgggaatgaaagcctaaaattatacagtactccattcctgtgaacgggccaaaggatgacgggcaacacaggggaaacctgttttcacatttggtcatctcctcacatgtcgtgtgagctggaggagagccgtgtaacacgagggcttgctttgcccctggaaagctgcccctagcatagtatctccaggcaaagatgccatgctcactgcaaactatggaatgaggtcagaacccaa

SEQ ID NO: 181268 - DNA, 1138 bp, Homo Sapiens
ttggctccctcctgccctccatcattctcctgtctcaatgcatagtacagttcttagatatatactccctttccccaaaaaaatccctaatcagaaggactgtgatggttatagaggcctactgctggtgatctggcttagctgaggtcagttttcccagtggataatgctgatcctttcccttccttctctcccaccaaagagtctgtcctcagtcagtttctctgcccctgcactaagctatccttttactacatattctgttccaccgtcttggttcccagcttctgaaagacaaaactgatgtcttctctggtcctccaaatatttttttccctaactttaaattggctcacatagttactttgtctttgcaacaccatcttctagctttctttctgagcaggtttagtgttatcctccgttttttgtggaacctaattctttttggacctaattactttctcaacctatttgttcttctgttgtgcctcttgggtgaatcttttataaaaacaatatgtaattgtagcttatggttataactgaacacttaaaatttgccagatctgaggctaaatgctttatattgataactctttgatcctcttcatcaccttatgaggtaggtatattttcctattttacgaactaggaaactaaggcttggacaattttgacctgtccaaactagtaaagggcaaagccagtgaaaccagatctttcagagtccagagcctaagatctggcttgtcagcttgaatgtgtgtaaagctggcatctggaatcttgtgggtccatatggtgtctgccatcttatttcctccagaataggtggccacgggatatttaaacatacccagaggctgacatacaaatacttttcatctggtgggggtctcttgttttggggaggaatgcgtgcgatgtgcattgtgttcaggctttgtatccttgtgcccacctcccccccaacccaggccccttcatggctgtgctctttgccaaactcgagaacatgctgcagaactccgtctatgtcaacttcctgctgacggggctggtggcccagctggcctgtcacccccagcccctgctccgctctttcctgctcaacaccaacatggtcttccagccc

SEQ ID NO: 181269 - DNA, 1551 bp, Homo Sapiens
  misc_feature (458)..(470): n is a, c, g, or t
  misc_feature (496)..(728): n is a, c, g, or t
  misc_feature (794)..(877): n is a, c, g, or t
ctttgtacaaaaaagttgggacacatctaaaatgcagttaggaaactagagaaagagaaaacatggagaattatctggaactaataagacagtaaagtacagatttaagaagttcagtgaatcccaagcagtgtaaattaaaaaactacattgagatacatcatagtgaatatgcaaaacatcaataataaaaagaaaaaccttaaaggcagctttaacagtatactgaatgaccaatatactcagcagccacagaacctctattcttttaaagcatccatgggacatttatagaaattgactatgcactggactataagcatatgcaataaaatttcaaatgactgaaaccatatgagtatattcttttgccacaacacaattaggctagaaatgaacaacaaaaagataacaggaaaatctctatatatcagaaattaagagatgcacttatttannnnnnnnnnnnngtgatggagtctcactctatcacccnnnnnnnnnnnnnnnnnnnnnnnnnnnnnnnnnnnnnnnnnnnnnnnnnnnnnnnnnnnnnnnnnnnnnnnnnnnnnnnnnnnnnnnnnnnnnnnnnnnnnnnnnnnnnnnnnnnnnnnnnnnnnnnnnnnnnnnnnnnnnnnnnnnnnnnnnnnnnnnnnnnnnnnnnnnnnnnnnnnnnnnnnnnnnnnnnnnnnnnnnnnnnnnnnnnnnnnnnnnnnnnnnnnnnnnnnagatacacttctaagtaatctatatgtcaagtaagacaaaatgaaattagaaaatatttttaagtnnnnnnnnnnnnnnnnnnnnnnnnnnnnnnnnnnnnnnnnnnnnnnnnnnnnnnnnnnnnnnnnnnnnnnnnnnnnnnnnnnnnttatggtagaaaagaaggaagtctgtacattatgtagctatgcacccatctaaagaagttaggaaaatgacatcaagtagaacatcaaaagaaagaaggaaaggataacttaaaacagaaatgaatgaaataaaaccagaatagaagagacgatctacaaatccaaaagttggtttgttgaaaatactagtagagctgacatacttgtggtgagactgatggaaataatgcagttacaactaaccaatatcataattggaaaggaaatcactataggtgctgtaaaaattaaaaagataatagaatattatgaacaattttctgccaatattattgaaagtttagataaaatggaaaattcatttaaaaatataatttgacagtattatgttatgtgaatactataatgataatcctgtaatcattaaatgaaccagtagtttaaaatttttccatatagagaaggtcagggccagatgtgttcaatggttggttctactagacattcaaaaaaataataattcaagtctacacaaactttcctgagattagaaaaaataaagaagagtccccccacctgtttcttactttatgagaccacacctaaagatagaagactgctttgcaaccaagaaatccttcatgaacacctctttaatcacaagtcctcaact

SEQ ID NO: 181270 - DNA, 1336 bp, Homo Sapiens
  misc_feature (634)..(677): n is a, c, g, or t
tggtttttctagataaaatatctgctgttagaagaaaggtcaggtagtttggtttaaactttaatgatttctcttttttcaataaaggtccattttagcttcctatctcctgaaggaaaagctcaacatcttgggcaagttggggtgcctgctaagctgtgcaggctccgtcgtgctgattatccactccccaaagtctgagagtgtgacgactcaggctgagctggaggaaaagctgaccaatccaggtaattcctttctagcagcactgccaagaaagtttgcagtaggagtgccaacttttttaaccacgtcttcaaattggatgcttcctggcagggcagaggaaccgtgtgtccaccctgatctgttactgtagatctgtgttctctgggaacgtgcatcagtgggctgtgctcgcaggctagccctctgccctcaccctcccgcctgatcctcaggccctgcggggagcctccgtggcctggtattccttcgggttctcttctggggccttgtgcatgggcgccttcccttcccacagtggctccccttgggccaccctcccaagtctgactgccacccgcccctccccacatacctttcctggtgtaccctgcccactctatctcannnnnnnnnnnnnnnnnnnnnnnnnnnnnnnnnnnnnnnnnnnntgagccaccgcgtctggcctcagccaaggtttttaagtaacatatttcagcattggctctacagcgttgcaggttggtcacataagcattagctgggtctgaaatattagtaagcattttattattccagcaaagattcacatgaattaactatgtatcagaaggcatgacaactgcagtgtgcttgctggacaaaaaattaccattgcagtaaattctcatgctcccagtctaaacggattatcagctagggatctgagaagaaatcccatgttccttttgagacaaataacccgctcccgctgctgggtcactgtagccttagctttgttgtctgtttactacagaatggtgcatccaaatccctgttttctcttgtagttttaaaaaagtctatatcttttaatgatgcatagtaaaaaaatttccacacgaatgatgtgatatctagaatttgtttcagaattatctgggggcagattattctggccacatgtgcatggtggttctagttgagctgggtgagaagtttgtggagggttattatatgattctctatgttggtatttgatattcttggtagtagagtttttaaattgccattttccaccagcagttcctgggctagatttcctatgatcattttaaatgttctgaaa

SEQ ID NO: 181271 - DNA, 896 bp, Homo Sapiens
cttactcctttactatggatactcttttaattattgcccttcataattattggcccagttgaaacaactgttatagattcaaaaatcctcagagtggtaaagtactacacttggcatcttcccttgagccgatgtatctatgtagctaaaatgatgagattagagtggagctttctcaccctggtttgaggtgctgcagaaatggtctgcttttctagtgccttgaaaaaggatgagaagagaggtgcattccagaagacaaaaggtgtgtagtatcaggataaggggctttaaatatcagatccagagaacactgcacatgtagaaatgggcttggcctgggtcagggcattgagattggttacataatcttttcaaggattggtgaatgagttggagtatgtgtagaaacctacaaagatgacagtttaatctcatgtcataatttttagacaaataatgtattttaaaactgggtgcagttcctaaagctgttctaaaagtcaatgcaactgaatttggaatgtaagcataggacaacagatgggaaataagtacatgacctctgtgggataaagtgagagttatcaaagaatgtcagtgtttaactaggaacaagcttgttttggagaattactagatattatggaaaatttttttcttttctacatttggttaactatagctgaactatagcagatcatatgacttggcaaaaatagaaaacttgataaaaatcttctacgccccacaatgtcaacatgaacaaacttttgaaaagtaaaagtagaccgtgttttctcagtatgtgttatcaaatatatgttgaacataaaatttttgccccctcagccaggttgtatattttcctttagtttatctctttaataattttt

SEQ ID NO: 181272 - DNA, 834 bp, Homo Sapiens
  misc_feature (93)..(114): n is a, c, g, or t
  misc_feature (124)..(175): n is a, c, g, or t
ttggctactggcctcaagcaatcttctggcctccgcttcccgaagtggtgggattacaggcatgagccattgtgcctggccccttcagaatcnnnnnnnnnnnnnnnnnnnnnngaggcggagnnnnnnnnnnnnnnnnnnnnnnnnnnnnnnnnnnnnnnnnnnnnnnnnnnnncagctgtcacctcccgcaggacccaaatcctctctctgagcaccgtcatccaccacatggctgggcctggctcccaggaccagtccagtcctctagtgccttatctgaggctgcagccgccagtctccaccccaaggagacagcccctgctcctagatgcccttggcctccgcagtgcagcccccaggtgtcctgactgaagcacaggccatagccccatttccccggtgcctgcagggctaacctccacgggagcccaggagctctggccggcaggtccatggcacagggcatcggaagactgcaaaactgctggacttaccctgggctgcagtccattgtcagcccctgggttgaatcaagatagtacttgcagctagatggatgcttttagccaggggacattgtgaggggaagattcctccacccagtctggcctgtggtgtctgtctcctccctgagaccacagcttctccaatagcagactcatgggcgccaccaagtggaagcacctggagcggcctctgccatccagtggggaagccaggccccgagacggaggtgggggcagcacgtgccctccacagccaccgctttcccgcctcagcagcccaggcctcctggcccagccttgcctggaaagtgctctcccctcaccc

SEQ ID NO: 181273 - DNA, 1479 bp, Homo Sapiens
  misc_feature (63)..(72): n is a, c, g, or t
  misc_feature (714)..(1018): n is a, c, g, or t
ggctattttttaaccactgtggaatacactggaaatcttcagggaaaaacacatttaaacacnnnnnnnnnnaaggaaagaattggtatttattatgttctgtttttctaaataacctgtggacaagggaagccccactgatttactccctctcttccccactccctgtgaggctgggctgaggcacggatccctgggccacagagcaagtctccaaatcagacagctgcctcagcccctgggatgtgtgatttcagctcctgtcacctcatgcaagggcgtggagaccagtagaggtgtggaggccaggcagagagaggagcctgctctgcggggggcccagctcatgggcactgccccttcagctagcctgcctccgtcccctgagtccaacagtgggagccctagctgggaagttctgatccccaaagccacagcaggggactgatggctatagcagaatgaggtcgggtcaggaccctcaaacaccatctgggaacaccaagcaccctgaatcgagactgcaggagccctgcggggtgagactgtgtcagagatacactgctggccacaagtgtcccctctcagtcccaccttttcgggctgtcccatgtctatctcaggggcccgttacctctctgcagcagtcccccatcccagccacaccagggtctgtccggccaaccctcttccccagggaaaggagaaaagagnnnnnnnnnnnnnnnnnnnnnnnnnnnnnnnnnnnnnnnnnnnnnnnnnnnnnnnnnnnnnnnnnnnnnnnnnnnnnnnnnnnnnnnnnnnnnnnnnnnnnnnnnnnnnnnnnnnnnnnnnnnnnnnnnnnnnnnnnnnnnnnnnnnnnnnnnnnnnnnnnnnnnnnnnnnnnnnnnnnnnnnnnnnnnnnnnnnnnnnnnnnnnnnnnnnnnnnnnnnnnnnnnnnnnnnnnnnnnnnnnnnnnnnnnnnnnnnnnnnnnnnnnnnnnnnnnnnnnnnnnnnnnnnnnnnnnnnnnnnnnnnnngagaaacagctgtcacctcccgcaggacccaaatcctctctctgagcaccgtcatccaccacatggctgggcctggctcccaggaccagtccagtcctctagtgccttatctgaggctgcagccgccagtctccaccccaaggagacagcccctgctcctagatgcccttggcctccgcagtgcagcccccaggtgtcctgactgaagcacaggccatagccccatttccccggtgcctgcagggctaacctccacgggagcccaggagctctggccggcagtccatggcacagggcatcggaagactgcaaaactgctggacttaccctgggctgcagtccattgtcggcccctgggttgaatcaagatagtacttgcagctagatggatgcttttagccaggggacattgtgaggggaagattcctccacccagtctgggcctgtggtgtctgtctcct

SEQ ID NO: 181274 - DNA, 1493 bp, Homo Sapiens
ttttccctggggaagagggtggcccggacagacccttgtgtggctgggatggggaatgctgcagagaggtaacgggcccctgagatagacatgggacagcccgaaaaggtgggactgagaggggacactgtggccagcagtgtatctctgacacagtctcaccccgcagggctcctgcagtctcgattcagggtgcttggtgttcccagatggtgtttgagggtcctgacccgacctcattctgctatagccatcagtcccctgctgtggctttggggatcagaacttcccagctagggctcccactgttggactcaggggacggaggcaggctagctgaaggggcagtgcccatgagctgggccccccgcagagcaggctcctctctctgcctggcctccacacctctactggtctccacgcccttgcatgaggtgacaggagctgaaatcacacatcccaggggctgaggcagctgtctgatttggagacttgctctgtggcccagggatccgtgcctcagcccagcctcacagggagtggggaagagagggagtaaatcagtggggcttcccttgtccacaggttatttagaaaaacagaacataataaatataccaattctttccttaaaaaaagaagtgtttaaatgtgtttttccctgaagatttccagtgtattccacagtgtttaaaaaatagtttccccaaaaatatatcttgaaagcatttgacacagtggtatttgtggcgtatctggcgcttgtcagtgtggggcccaggcctgatgagccaccagcccagcacccgaatgcctgctgaaggtggcgcacacgtgtgcctgggatgtccggctcttcacaggggatcagactgcgggtcacgttgagccaacaccatgggctcggttccggctgaaaacccgccagtgtgaggaagcagggccccgggtggccaagcgggctgagcaatgccctggaggctggatgggggtctcgtcctcagccccttcccctcctccgtcttggctctctccgcttcgtccttaccagacttcgcacttgtgaggcgggttcatgggtgagccaggtgggcagcggaagtgttctgagaactccttggaattggagagggagccgatgacccggaagcgagaggggctgtggggatcggtgatgaggccttcgtgggagctctcaggtgtgcggacggagcaccagacctgtgcaaagcccaggaagaagagctggttattggtgaggcccagggtggggagcgagtgctcagccccgttcttcttcacccagttctggtaagcctgggaggagagaaaaccaaagctcaggggttcccatggcaggtggtgaaggaggggactggtatggaggtctcagggagctcccccgtgttggggcaaggactagtttctggggatctgggcctgggctcagcctaggggagccctcttcttgatgtgcactcgtttagccccaa

SEQ ID NO: 181275 - DNA, 1557 bp, Homo Sapiens
ttggcaaatctaaagagattgtaccagtttataatcataccaccagtatataagagtacctattctacaatagtttctttcttcataactaatttatacccaaaaaagatctgattttgttttgttttataagaaagactaaaatacttgtctgctatttggcaatttataaatccccactgtccagattgaaagtgctatcaacactcctaattcattagtagttcgagggtttctctaaaagagacagacttgggcaaagttggaaatcaacctgcattttcatacagccgcttaagacatttaagtttgactccatctacttagaacaattcaaaatgtgaatcttgcaactccagtggtcgttatgatcatttagtattgcccacaggggaagcagaattacaacccaggatggaacaaccttttggtcatttctgttcccattagtattgttagttttgttatgctgagcacactacaaagttgcatctcttgtataagtacaacacaatttattaaatattgtatacatagaaccaagaatcgataggatgcagggctgcttgattgtaccagaaacaaaacatgatgagaatacattgaaacactggatttacttaagaaaaacctaagtttttcaaatctaatttatttaagaaaacgtattttcttaataagtgtaacacagttcttacaaggtatggtaataagcagaaagtagaattttgaatattaatgtcaaagtatgttttctgccattttgatggagttgatactttttcttgtaagttcttcctgtagtgaaagagagaaagtgaggtgtcattgccgaaaggacacactaataacctcttggtagtttattgcaggtaaaatcattttttaattaagctgacaacgtggtaaaactgcagcattaaattgtaattatgtttaaatggaagtctttctgtagagtgttaaaggatgataaacgtttgaggttcaaataactcgactgtcttatcaaacaccatgtctataagtaataagtttctgggagaattgtgaattggattttgttttatttcaagtggatgcttttgtgcccatatttaagctgccgttgcttacaagacctgtactgcccttccccacctgccttttccatcataccctatgctcacagacaaatctcagcaagaggcaggagttgcttcactaatcaaaaccttacattaaaatagttttacctagatctaagttctagtcccaaatcaaaaagcaatctgtggagttttcagtataatttcgtactgacagctttccaaatagtaacgtaaacggttcacgtacttggtgaactgaagaaatagaatggaggccattagcactgtaagttgttagtttgcctgtttaccaaaaatatgttgagtttcggggcacataccttaaaattgccctgtttcactgtgtaagaggaactggcttgactacttcacccttggtgaaaacaaacaagccctaaaagaacagcacagctgaagtggatatcacagaaataaacagacagca

SEQ ID NO: 181276 - DNA, 1040 bp, Homo Sapiens
gaagctgaaattgcgatggttttcctccatagtcaagttgaaaaattataattgatccatggcaagttggggacagtgtatattgtaaacctaccttttggctgctacagtgtgaagaccagggatcttgaagagccttctgtcaaaccagggtgtcaggcctgtacttggtgtcaccacagacaactccacctggcccacagctggggtcacagtgttataaaggtcacagtcttgaccttttccttttgccttttccttgtatgaagtgggttctcttcttggatggaggataccgttcaatgcttgtagtttgaagattctcatgtttattttcttcttatgctatcgtttcacttgtattacctgtgagttttggcaggtttcgggggtgtctgaagagcttctgctgtctgtttatttctgtgatatccacttcagctgttgctgcctcttttagggcctgtttgttttcaccaagggtgaagtagtcaagccagttcctcttacacagtgaaacagggcaattttaaggtatgtgccccgaaactcaacatatttttggtaaacaggcaaactaacaacttacagtgctaatggcctccattctatttcttcagttcaccaagtacgtgaaccgtttacgttactatttggaaagctgtcagtacgaaattatactgaaaactccacagattgctttttgatttgggactagaacttagatctaggtaaaactattttaatgtaaggttttgattagtgaagcaactcctgcctcttgctgagatttgtctgtgagcatagggtatgatggaaaaggcaggtggggaagggcagtacaggtcttgtaagcaacggcagcttaaatatgggcacaaaagcatccacttgaaataaaacaaaatccaattcacaattctcccagaaacttattacttatagacatggtgtttgataagacagtcgagttatttgaacctcaaacgtttatcatcctttaacactctacagaaagccaacttttttgtacaaagttg

SEQ ID NO: 181277 - DNA, 820 bp, Homo Sapiens
ttgggttctaactcttttagaattgatctacattggtatccaagaagattaaataaataaataagttagaattgttctatggcctattttattagtaactaatctttagcctttgagggtagatttgactttagaatagccaaaaataatttaataccaaatcttgggagtttatcggtagccaaactgcctcatacagttgggagtagaaaaccaacaacagaaagccattttcacttactcactgtgactagatagatatctaagagttccaaaaatcttttgtgactttgcaattccatttccctagagtaagcatagagcctctcaaactcaatgctaagtgaaccacagttatttgaatgtgtaagttcttgggtgttctttaaacttcatttacattactttatagtcttatctaagcgtatttggactcctcagctaaattgcaccttgtgtgcaaaaaaattgtcttgtatttcttttgcaaatcctcctacccaccccctaatccccacccttcatccctaaccaccaccacctagacaaagccataaaaaaggtgatttaaaatcctcattttaaaattgattactgtcacaggtcaggtttcccagcaaccaaactctgagatggagactagtgtgcaggactttcgttagagaaagctcttgagaatcaacacttgaaagggatgggaaaggaagccgattgaacagagggagaagttgggcaacaacgcctcagctgatttcatagggagctctgaagctggaatggccaggttattattttccatcccgatagactagtcggtggg

SEQ ID NO: 181278 - DNA, 1443 bp, Homo Sapiens
  misc_feature (416)..(425): n is a, c, g, or t
  misc_feature (906)..(1157): n is a, c, g, or t
tggttatctttattttaaaatatctaaatgtcattatttatattcaaaatagcaatttttattagttatgatttgtttgaaaataaaatgatctggtaaattttcttcacttttaacctattcagtcaaaatatagaaaaagctagatttgccagcagaaaattgtaacaactttttaatgagataaaaatgtataacaatatcactattattgtacagagaaaaaagtgaacatgaaaaggaatttaaaaagacagaatatgactatcatatacatacatgaactgacaaagagactaaaatctcctactggagattatagcaaaagcttctaaaaataccaaaaacaaaagcaaaacaattatttttaagaaataaactatacagagaattcttctggttaagacaatgtatgnnnnnnnnnntcttcgtgagagctattattaaccaagtcatcataaccaaaactttaaatccacaattctggaatattaaaaagtttcattttgaacatatctaatggaaggcaacttttgaacagaaaatttctagttaaagttgactgaaacttagggaagaattgacctgtagccatggtcacaagacgccacccagagccagttcaaaatctagtcaatcgatcaatgaccactggccttgctcaccaaccaatatcaatgtgagcagcttgcttctgaaagacagccaagcagcaacagctgctccatcagaatagacattgcctgacaaatacagttactataggaagcaaaaaattccaactctgtctttttatgtcaaataccaaaggtccacaatcccttggaaagaatttgtcagtccattacatttaccaccctaattttttttaaataaaatactagtggccagacgtggtggcttatnnnnnnnnnnnnnnnnnnnnnnnnnnnnnnnnnnnnnnnnnnnnnnnnnnnnnnnnnnnnnnnnnnnnnnnnnnnnnnnnnnnnnnnnnnnnnnnnnnnnnnnnnnnnnnnnnnnnnnnnnnnnnnnnnnnnnnnnnnnnnnnnnnnnnnnnnnnnnnnnnnnnnnnnnnnnnnnnnnnnnnnnnnnnnnnnnnnnnnnnnnnnnnnnnnnnnnnnnnnnnnnnnnnnnnnnnnnnnnnnnnnnnnnnnnnnagactctgtctctaaatacataaaataccagtaaagtttgcaattcctctgactcattttaccataattgcaattatcatgattaccagtaaaagaatagtgaataaccacaatattggacttttctccctaagtgaaaaaatattaatataaagaacgtagccaattataaaaagccaaaagaagttaaaaatacatacaattaccaggcaaaattgttaaaatgcaccttatcgaacattttttaagtgagaatcaatcaaacaatatacccaggataaactcc

SEQ ID NO: 181279 - DNA, 1679 bp, Homo Sapiens
  misc_feature (1333)..(1368): n is a, c, g, or t
ttgggtttggtggtttacttacggagtggggatagtgtgagacctaattccctgtgcaaatgtctcttattccagaaatgtgcattttgtcatctataagcaagaaatatgggcatagcagctcttggtttaaagtttgccataacctgttcatgtttgttttaagctcaggtaaagataacctcctctttctatgactccagtttccattcaggttatagtattattcaatagttgattttctttttaagctgggcaataaattgatgtttccagatggtaacatgggagagggcatataggataaagatgagcaaattctaccctaaaaatgttctagtagttcacaggaagaagatgaggtttaataactttcaaggtaattctagattgacattttgaggggaaaatgggctcttgttctagttgaagtgagcagagaaggctataaattaatatgtaacttacagcattccagaggttaaaaataactgatgcagatgtacttcttcagtgtgattcttcagatcaaacttttacttttggcatagttaatttcagaaaaatgtgctgtatgtgtgtgtgtatgagggttggtcttgctgatccttcagttagctctaaattctggcaactccttgtaattccaatgtatttgatacatgaacaatcatgttgaatgcatttgtgatctgggagacttcctcgtcttccagggaaggaaggatgtgcagcccctgaaggcatgaaactcccagtgtgtacggagccagtggaatatgggatacccataccttaccaggcgctggttccttctgctcacaataacatctgcccaaagagggagtgggaagaacgcttagctctttcactagtatggatttgagttcatggtcactatttttacccacctgcctttgttaaaaatcactttgagtagaatagcactggaggaacatatttagcacctaatattaatatttagtagtccattgataaatttgccagcatatgttctagcctctggggggaaaccaggaccacttttgtctgtggcttaaacagttcagttgctatatctgttgggtatgccgggggtggatgagtgtggcattccgtgaagaggaaggtggtaagtaaggtttcccttctactgccttcttaagttgcaggagggagcttttctcctcccctctggttgggagcactgaggacagtgaggagggcttttaccttgttaatcctttccttatttagctagctttcctttttgtctagggcttcctcttgagaccctcttccatccattgggcctttgaaaggactaatcagnnnnnnnnnnnnnnnnnnnnnnnnnnnnnnnnnnnntcgcatactcatgcacattttccttcatttccagatcctttatttcagagcagcccattttcctctggattcattgatgaatacaagtacccacacctttggccagtaatgtcagttacctgctgcaggttctgtgtatgaggccttcatgaacggttaccttctccatacactagggaagcatttgtcagactctgcagactgggttctagagaggcagagtctttaagagtattcatttcttctggaaggtggagctttacccaaagtggaagttagccttgctcaaagatgtgttttgtggtagtggt

SEQ ID NO: 181280 - DNA, 950 bp, Homo Sapiens
gttattccttggtccccaggtcctggggcagggcagggacttggggctctcctctcaggccctggaggctcggagggaggcacttctgctgaggccctgcttataggaaagctcagtatcctggcacctccatgtgtgtaaggacgtcagggtgaattataacccatggtgattaaggaagggccgagcctttctcttgcagagcgattgctcttctgctggcctcgtctagcacaaatcaggtgccctagcacaggccacactcctggagttaatgaagccactttaatcatttatatgccacttaagttgatgggggacagggcaggggtgggaaggaggggttgtctgtctgtgaaaactgagtgtggcttttcttgttgaactgatcattcctgctcttcctgcaaataagtcctgcatacggaccctggaactaaaaatggaaaatcagagcatgccccctcccaattttgtatagctttagtgggctctaaagttgcccgtttttagtgtgaaggaaaaaacgttgatttgcagatatcgtgagaatgaaacctcaacaaagatgtttggttcagtgcttcaaagttgggggacactttttccatgttgaacaaatgccaacttctccggttgcttacagcaaatccttctggaacaatcggggctgaaattgagttgcctttgttaggcgattgggccccattcattcttactcgtgcatcaggtcctggtctgtgtcaggcccaggggacacaggtggtcccagctcagaggcccagtgtccactgcagcccctcccacagcctgcccacccctactgcagggaaaaatgcccagggaggagatggtccaactcctgatcagttttgtgtccgatggagcacgccttgctgagtgaagacactggaactagctgggtcctggggtgacttggaggctttggg

SEQ ID NO: 181281 - DNA, 1703 bp, Homo Sapiens
  misc_feature (98)..(106): n is a, c, g, or t
  misc_feature (1583)..(1591): n is a, c, g, or t
ttggcagaggtgagggcagtagtaaaaatctctaaaattttaatttacagccaaaattcttcatgtgtaaatttgtattgattcagatgcagaaatgnnnnnnnnncacctttgttttataaatatcaaagtacatgcttaaagccaagtttttatctagtttattctagtacttagcttgcctggaatagctaataaattattcatgtatgtgcttttgaaaatccagagccctatttttacacacttgtgtgaagttggcaaacattttgaaaaatggaaaaaagtttctaataattgggaacaattacattaattaatattttgtaaaatattgaagcttttagccctatgtcaatttgtagattaaaataaattaattataggaaaggaagataacagtgagaaaccaaacattacaaaaggtggtttagctctccttgaaaaatatactaagttggtatactataacacttggctatatgtaggcaatgtcactactgggcaaatacacttactgtgttctagaggcagccctttcttatgcagaaaatacaatacgcactgcatgagaagcttgagagtggattctaatccaggtctgtcgaccttggatatcatgcatgtgggaaggtgggtgtggtgagaaaagttttaaggcaagagtagatggccatgttcaactttacaaaatttcttggaaaactggcagtattttgaactgcatcttctttggtaccggaacctgcagaaacagtgtgagaaattaagtcctggttcactgcgcagtagcaaagatggtcaaggccatggaaaaagcagaaatttaccaagaaagctgatacccatgtatagttcccactcatctcaaatacatctgctatctttttaagctaagtcctagacatatcggggataacatgggggttgattagtgaccacagttatcagaagcagagaaatgtaattccatattttatttgaaacttattccatattttaattggatattgagtgattgggttatcaaacacccacaaactttaattttgttaaatttatatggctttgaaatagaagtataagttgctaccattttttgataacattgaaagatagtattttaccatctttaatcatcttggaaaatacaagtcctgtgaacaaccactctttcacctagcagcatgaggccaaaagtaaaggctttaaattataacatatgggattcttagtagtatgtttttttcttgaaactcagtggctctatctaaccttactatctcctcactctttctctaagactaaactctaggctcttaaaaatctgcccacaccaatcttagaagctctgaaaagaatttgtctttaaatatcttttaatagtaacatgtattttatggaccaaattgacattttcgactattttttccaaaaaagtcaggtgaatttcagcacactgagttgggaatttcttatcccagaagaccaaccaatttcatatttatttaagattgattccatactccgttttcaaggagaatccctgcagtctccttaaaggtagaacaaatactttctannnnnnnnncaccattgtgggattggactttaagaggtgactctaaaaaacagagaacaaatatgtctcagttgtattaagcacggacccatattatcatattcacttaaaaaaatgattt

SEQ ID NO: 181282 - DNA, 563 bp, Homo Sapiens
cctttgtacaaaaaagttggcattgtgggacccgagaaaattaagaggtgactctaaaaaaacagagaacaaatatgtctcagttgtattaagcacggacccatattatcatattcacttaaaaaaatgatttcctgtgcaccttttggcaacttctcttttcaatgtagggaaaaacttagtcaccctgaaaacccacaaaataaataaaacttgtagatgtgggcagaaggtttgggggtggacattgtatgtgtttaaattaaaccctgtatcactgagaagctgttgtatgggtcagagaaaatgaatgcttagaagctgttcacatcttcaagagcagaagcaaaccacatgtctcagctatattattatttattttttatgcataaagtgaatcatttcttctgtattaatttccaaagggttttaccctctatttaaatgctttgaaaaacagtgcattgacaatgggttgatatttttctttaaaagaaaaatataattatgaaagccaagataatctgaagcctgttttattttaaaactttttatgttctgtg

SEQ ID NO: 181283 - DNA, 844 bp, Homo Sapiens
  misc_feature (91)..(143): n is a, c, g, or t
  misc_feature (424)..(437): n is a, c, g, or t
  misc_feature (449)..(511): n is a, c, g, or t
  misc_feature (577)..(696): n is a, c, g, or t
ttggcaaaggatttgagatgtgtaactggcatgattctgcttttgaaggatctatagtatcattttagttaagtgggtcaaacagaatcannnnnnnnnnnnnnnnnnnnnnnnnnnnnnnnnnnnnnnnnnnnnnnnnnnnnaggttaattcgaacacaggaaaggatctatttgttgtttcttttgtctggtctcctgagttgttaattaggtgaaaaaagatctgcaatggccccctccctttcctaatctggcttttacatttattttgtgccttaaagattaactacaaagataaacatggccaaaaataaataaataaatatggccatatgtccgttgttgcttagtcttcccttgcagccttttacccttgatttctccttcatctctaccaaatatagcacaactcctcaagtaannnnnnnnnnnnnnagatggagtttnnnnnnnnnnnnnnnnnnnnnnnnnnnnnnnnnnnnnnnnnnnnnnnnnnnnnnnnnnnnnnntgggttcaagcaattcttctgtctcagccccagagtagctgggattacaggcacctgtcaccatgnnnnnnnnnnnnnnnnnnnnnnnnnnnnnnnnnnnnnnnnnnnnnnnnnnnnnnnnnnnnnnnnnnnnnnnnnnnnnnnnnnnnnnnnnnnnnnnnnnnnnnnnnnnnnnnnnnnnnnnnttgtgagccactgtatccagcctactcaagtgatttttaaaccattgtgtgtgtatgtacatggatgtgtatgtacacacacccaccggtgcatgcataatctcatcttaaccgggcatggtggcgacaatcacatttaactccaaaa

SEQ ID NO: 181284 - DNA, 1273 bp, Homo Sapiens
  misc_feature (152)..(198): n is a, c, g, or t
agttggcataatacgtcttataaagtgagtgtacattgttgcattaatcttcatttgtagcattcatttaagttagtaattaacatctaagtacctagaagttgaattgcttacatgtgtcttacccacgttttcaatgggatcaacatgcnnnnnnnnnnnnnnnnnnnnnnnnnnnnnnnnnnnnnnnnnnnnnnngtgtggcatcccagtagctgatttactgtgctgttggcactattaatggactttttaatttgtgtggcatgttttcacaagaatattctcatctaacttagcctttattggaagataattctgttaaccaccagggtctcctttctgagtttcatgttcttctattttgtattttttatataaaagatataaaatatcttttattttgtattgaatgagctgttgtgctttgcatggttttaggaatgagagaaggggcctatttctgattttctcagctctccttgtttcatttcattctacctgtctccatgtttaatcaccagcataatatatgtgctactattaaggtttattatactagtcttttgtgtgttgtttgtttattatatcctttaatagaactgtcctggttttttgttttcgtttttcctctagactcagctagaactagcagcacaaaccatggacatattttttggtctctgcttttattttcttaaaataagcacacactctttttctgaaatatttaacatctattggcttttactgtaatgtgagaaagtgttgaaaacttttgtcttcctgccagatgtgctagtgtttgccattcaagttgagaacttgcttctgattcaaaaggcagttgctacaaagggttaactgatttaacattagatttaagaatgttttacctaatctttttgcaagactttctgtgtaatgtctttttgggttgagaggtcaactcttaagagccaggtatgactgtcaggtcaaattaataatatttgttttgagaaagtttttagttttacatttcctattgttagctttagttgctctattctgtgttatcatttgtgccacttaaaattgttgggttggttcttagggataaaagctagctagccttcataactacttgaagtcaaagttgagtagtaaatgacactggcctgactaaaaacaggcatatttgtgtaatttctggatagagcaaaaagatgtccagagttgcttacctttaatcctaaaattgtaatgatgatgacatgaaatttagtgaaac

SEQ ID NO: 181285 - DNA, 797 bp, Homo Sapiens
aaaagtggtccgactagcatcaaaagtagcagtcactccacattctttctcccgcttctgcttgcgctctaaacaggctgcaaaagcacagttactgcatggctcaacctttcacccttagttttttcatccacaactctgagtccatctgctgagacccacagaactgctttaactgctttctttccagtcttttaagagaaaccaaaaaggggagggggagatacacatatataatattaaaaaaatgtcatcttccacagaaaacactgactctgccttccaaaagtcacaagtacagatggagtccaagttcaggagtggtgcccaaacccagatactcaaaccaaactgcagaaacattcaggaaaaaacaagccaaagccattattttagaaacacaacgcaaaacaataagataaaattaagtaaaagggaagtaacagatggaataaaaaccaagatatcacattccataaagggcaaagaattcataactagattcttcacccatttaaaaaaatcaaccaagaaaaccagagtcagataattattaaatacataaggagttacaccacaagtagcgtccacaagtgtatttagagcaggaagtaacatgtctaaattgagatgttgaccattctactatcctatgacccccagtatgttatagcaggacccttggtcacctaaaattttcacgttaaaaacacagtaagtcttcattattctattaacagtctttaaaaagccattatttgttctctcagagttaacacagacatttttcctaataa

SEQ ID NO: 181286 - DNA, 1365 bp, Homo Sapiens
  misc_feature (91)..(121): n is a, c, g, or t
  misc_feature (1059)..(1070): n is a, c, g, or t
  misc_feature (1136)..(1147): n is a, c, g, or t
ttggattattttaagtgaaagggatgccctaaaggtagcaggcaggcagacagatttgctttaattaggagttcccacccttatgagtaannnnnnnnnnnnnnnnnnnnnnnnnnnnnnnaatcttgagcttaaaaaatcctcagagttacaaaaccaaaattttgaaaagtcagaatttggagaaaggagtccactgaccatataaagagagtaatagccacctaaaaatgactcgattggtgtgtaggtaaataattcttttaccagaaatgtgtgtgactgaaatttgatcagggatctcaaagatatgctggtaaattgtatagcaatgtaattattttaatcaggtatttgagtatttcttaagatacagtttattcccagagagtttgctttaacatgcattttttaaatcatttgttctagagttctgtatcccatatatgcacttttggtttgtagcagtaactgttcagtaaaaattaaggactatgttacaaaccatatatgtcttatgcttacactagtatgcaagaagtgagtaggtgcttttaaaatcagaattctttggtcagttattggtgtgtggtggtgtttttactgactttttcagagaggtgtagcaggtacagttctaatcgtgcatatttcaaaactaagtgttcttcatcaaagatgagtttttgtttttgtatcaattcaaatttctggtttcaataatagaaagaagagttgtctgcaggctcatagtcatcttttatttcagtgggcatttaaatcagccatatttggattgcagaatttcttaaaaagtcatcataaaatgcctttgacatgctcttttaaaattttgcttgtctttttattttcatatttaaacagtagtgacattacattattgaaaatgttttgaacatcttggaaattttatgttcaatattctcactgctgtccagctacggaattgaaatgtcagtgtaggaaaaccttttttaattgttttattttcccagacacccggaattaatacaggatcatttaacttagcctcacagnnnnnnnnnnnncaaaggtgagaatgatatcaacctctggttctcaacaaggacttttgctgcttaacagtaatggannnnnnnnnnnnaatctatcccctctgtcccacccctaatttgtcaggtcattagtaagtatatttttctcccttgatttaagtgctgaaaacttcagctaaggcccttgatatttaattatgattagagacttttggaccttctggatcatggtcatgtttctgttctatgaaagtgacttaacttgaagcctggccaaacccaactgtttttctttcttgtaatcaaa

SEQ ID NO: 181287 - DNA, 941 bp, Homo Sapiens
  misc_feature (213)..(223): n is a, c, g, or t
ttggattcgtcaaggggaacagtctcttgatggtttctatagagcctggcaccaagtggaatattacaggtacaactgtagtacactgagtgagtggaaaattctctctctccatgtattagttaaatggacatctgttctttgttgcttttgattgacccgcaaaatggccctcagtatttttatctagtactcaatgtaggaattgcactnnnnnnnnnnntaggctaatataaattacagaatttcttctggcctcttttagatttcttcttgtcttttgccctgggtgtatttacttgccttttcaaatagcttgtgcttttattccaccttattgcttgccaaatattattgtcatttagaaaaaaatagacatgttaaccgttgtgtgtggctctcactttgtttgaaattgttgctttgggaaaaacacagaactttaataaaacaatatttgacttttattcagtgagtaaaacttaaaagttcaacagtttcccctgaggaagataaaatatctttggttctttgttgctggactaacaggtagtcagtaatatttgttttaatgttttagcagttctttagcccgtggtatttcagtgttggtttcatagctatgaataggcataggtactaatagataaggacatattttatactttgtgtggggggtgtgttttggtcttccttttcttattacataggtacataagattctttcctgatggccatgtgatgatgttgacaacccctgaagagcctcagtccattgttccacgtttaagaactaggaataccaggactgatgcaattctactgggtcactatcgcttgtcacaagacacagacaatcagaccaaagtatttgctgtaataactaagaaaaaagaagaaaaaccacttgactataaatacagatattttcgtcgtgtccc

SEQ ID NO: 181288 - DNA, 1279 bp, Homo Sapiens
  misc_feature (252)..(262): n is a, c, g, or t
  misc_feature (1154)..(1165): n is a, c, g, or t
ttggattattttcataggcgtgtatatcagtaaaaccacatatattcgtcaaggggaacagtctcttgatggtttctatagagcctggcaccaagtggaatattacaggtacaactgtagtacactgagtgagtggaaaattctctctctccatgtattagttaaatggacatctgttctttgttgcttttgattgacccgcaaaatggccctcagtatttttatctagtactcaatgtaggaattgcactnnnnnnnnnnntaggctaatataaattacagaatttcttctggcctcttttagatttcttcttgtcttttgccctgggtgtatttacttgccttttcaaatagcttgtgcttttattccaccttattgcttgccaaatattattgtcatttagaaaaaaatagacatgttaaccgttgtgtgtggctctcactttgtttgaaattgttgctttgggaaaaacacagaactttaataaaacaatatttgacttttattcagtgagtaaaacttaaaagttcaacagtttcccctgaggaagataaaatatctttggttctttgttgctggactaacaggtagtcagtaatatttgttttaatgttttagcagttctttagcccgtggtatttcagtgttggtttcatagctatgaataggcataggtactaatagataaggacatattttatactttgtgtggggggtgtgttttggtcttccttttcttattacataggtacataagattctttcctgatggccatgtgatgatgttgacaacccctgaagagcctcagtccattgttccacgtttaagaactaggaataccaggtagcatttgttttttaaatggctttccatccagtctatgttttatatggttccttgcaggttaaagtaatccagtgcttctttcacttaatactggatgattttaaaagcaatcattcggggtcttaggaaaaataccaatttctgggcttttccttagaaaatctacttcagcaggtctttggagccttggaattgagttttactcaatcctagctgattcttttcaagcaagagtaaacactgttgtaatttgttacttcttagattacttaaatccacttaataactgatttagattcaatttgnnnnnnnnnnnnaaaggactgatgcaattctactgggtcactatcgcttgtcacaagacacagacaatcagaaccaaagttatttgctggtaataacttagaaaaaagaagaagtgagtatacgag

SEQ ID NO: 181289 - DNA, 1075 bp, Homo Sapiens
  misc_feature (161)..(170): n is a, c, g, or t
tgagcaatgctgactataaaaggcaactttgtacaaaaaagttggagcattcatatccttcaacactgtaagacaaaacagcagagaccttggatttgataattgatctgatatcctggacagtattcatatgtacagtgataggtatctttctttggagnnnnnnnnnngtgcatatgtgtatagttttatgggttctgagttggtgaccagtaagttgcatgtagtgctggcacttacttaataactattcatgatattgttaataacttgttataggattgtattcccaattacagtctctaagattgtaattgatattatctgagaggtagtgtgacaactttcttttgttgttacattaagccgaaaacataatactaatagacaactaacagtttgcttatcaggcacatcaactaaggcacctccccccatgctaagtttctcctggatatatggaagttgattgtttcccagtttaaaaacttgaactaatatctcctaagaaaatctgagtccatattgtttttattttacttagctagaatctcatagcatgttaaagtcatatccttatccccactaaaaataactatgtctatgtgagaggaatatagtatgtgggagctgtattaaatactattacaggtgttacagaatctttaaataaatggacatggaccaactttccatctagtagtgtacgatctatatagtgcatgtcagtagcacaaaatgcagtcttagcattagcctgtctaatctgaatagtttactcaaaagtacttctttgtgttaagtattcagccactgtttttagatctagttaataggttctatttaatttgctacaacatttactgaatggtggagtgaaaaaactgatgcatactgggaaatatctaccattttttaaagataatgttaattaaggaaaagaacacttttaaggaatttatagcagtgatgaaatgaattcagttatatcaaatacaccaaactgttgatggtatttaaatgtgacttcaagttagtatttctgtatatattattgattactggtttgttttta

SEQ ID NO: 181290 - DNA, 1560 bp, Homo Sapiens
ttggctaaaaccttgctataatatgagaggatcttgattttctacaactaagtaaaagataacatgctgctccattttcttaaatgatgaagggatggctttcctaacatggaacacttaacagatgactaccattatacctaaatataaaagatggtaagaactgatttccagaaggacttcaaaggattggttcggtgaaggaaacagagtatatcatgataacatactatacaattcaaggaagatatctgacttcctttcttagcagctctgctgcatgttggttcctagtgttgccattattaactgacaatcatagaatggcttctgcttgcttcacaactgaaactaggagggcggaggggaggaggtggcaagaggggtaaaggcagtagcagtaatgatggaccggttaataagagactctgagtgtgatgtaaatagtatgtttattaaacaatagagcccattggaatttttttcttccacgtattgttagatgtaaaacctgatacactaccatacagacaggtgattgactagaccttgtttatgtagttctaatgtggaatacttagagttgttatgaattacgattatccataacttttgaatctaaaaagctggctacacaacgtattttgttggaatctttttgtaataccaaatgtctacactctttgatctagagaatcacaaaattttagaaacatcactacccaggttaattgacttttttattgtttactgtccaaatacctgttacatattaatagtattctactttatatacctgtaataaactattcagggtttcttaagctggttgttgaaatgttttgtaatactgctcttcttaccttgttataggaacttttataataaacctgaaaaagtgaaacatatctttcccaaataaatagcagattatataaatgagccagcttcatggatcatgtattgaaataattagttgtaacctataaagtttgtaagcattcttacaatagaggcaatcttaagattactattattaggacttaagagatttgagaagttgggagctaacaaattaagaccctaatggtatatgtccttaacctgtaacaggagtttattttgtcaagctatttttcccatcctattcattactactaaaaaatattgcttaaaaacattttcttccttcgtgaggcttcttagaatgttaaatttaccttctaaaaattatacactaagttattttacaggaaaacagcttcttaggattaatgtaatatatatatgcaaaggtcaaatgaaatatttttgtggatggtaagaaaaatttcaacttacatttttgcaacttctttaacgatatcacggcaggtcatttctttcatctatagaaaataaaatgtatactgttcatcagaagaacattttccacttgtgtaataactattttcacttttatactcagatataaaaccaaggaaaataacctaaagtctgaaaaagaccagaatcgaagtttcctgattcatattttaatgttttgaaatttatactcca

SEQ ID NO: 181291 - DNA, 803 bp, Homo Sapiens
tttatacgccaaaaaagatattctgagataacctgtagttaccactaactttgtgacaaaattataaaaatccacagccatctatgaatctgtaggcagacctgaagtttgaacgactggtgaagacatctgattttctttatagccaagttaggataacaaaatgcaaacaagtcattaatatttactatatgcaagatacagaaagatgaaggaaggagtaagaagttatccttcgtggaactattcaaagcaaaaatgcaaaataccagggaaagctttgaagaaccaagatttgagcaggttcttagaatatagattggattggatttgatttcaagaaagatgaacgtgtaaagcagaagtgggaagccaaaaacttttttccaaattagaattaagcattctttcaatgaacatttggaaatcaaggtagaaaaatatccctagggcctagctgaggagtctgtatgttgttgggttttgatagtaaccagtccaagattttgttattagacgtgggtttctgaatagacaggcatttctgaacagacatgacaggatcaaaacaatgtttgagcaaactgcccttcatctactgtggatatgttgggggatgatggaatatagtgaaagataatgggtgctcatacagcagtctagacttaaggtgattcaactactatatattaaactagattatcttttattttttaattttgaaatctggatgctcaagctctgcctgcacaaccacatgaggagaaggacaatgacaacaaaataacactaaatttaaattt

SEQ ID NO: 181292 - DNA, 1416 bp, Homo Sapiens
  misc_feature (1172)..(1190): n is a, c, g, or t
ttggagatctttttgtctcagaggataggttttgcaagattcaaaggaaaatcaaactccttggttgttccagctttgaagcttttgcttcagtaaatttgtttaaagaaccagatcacataccatttatcaaattctttacttaagtcagaatactttgcagacatacatatttggaaaacaaactgtttcttgttcactagatagaatctgtattgtagtaagaaactacttacaaggtggctttctttctgctttgttactctatgtattactcaataatatatgtatggtcacaggttcctggagttgttttatttctttatgacagacacatgagtatgcacctctctctaatcctctgatgtcactgcagcttcagtctctctcactctgtttttgagtgccttcaaaatgccagcatcctggaacattcttttcctgatctaaatcctacctctgactatttcattatccatgaatattggaattcacccatattccaatgggcttaactctacaaactagctaaaaccttggacaagaattttgaccgtatttctgttttgttcctccatgtcatttttaggttatatttttaacttttatttatatcttatttcttcacatatttcgtctctctgttgaaagattttatccttatttgactcttcactttttttactttcaccagaaatttgacgttcctttaaaattaaaggtcattgaatgtcttttgaacacctttttctcaactgaagtcttcctgaatgcctcccctttctgatgaaaggatcctgagtgctgctgttgctctgccctgttcccatgtgcccactcccttccgtacacattttgcaagactatactctttattttagtcaaattaatttaaaattgctccctgggtttctgctctctcatggccctgtccctcaaaaacttctgtttactttttctagctgttttcatctaatttgtttaaaatgtatgatggatccataatatatgaaggatgtaatgaaaaggaggttgcagtgttttatataatatgatcgagcacctccgtgatgaaacatttagcaattggctagtccttcacagccagagtggaagtttgtgctgtggacaggtctttttactcccttccagttctcctccaaaactggagnnnnnnnnnnnnnnnnnnngaactctttcaaatgaggagatttgattgcatttttttaggtgaatgaaagcttggagttgagcatttgggccttagtcagcatttttcctttctgacttaaaatctcatgtccttttccttaaagttaatagtactcacgtttttaagactaataaccacacaagtgggtatctaagaacgcagctgttatacattctccatctttcctgtctggcaacaggaaa

SEQ ID NO: 181293 - DNA, 3112 bp, Homo Sapiens
  misc_feature (118)..(135): n is a, c, g, or t
ttggagcacctccgtgatgaaacatttagcaattggctagtccttcacagccagagtggaagtttgtgctgtggacaggtctttttactcccttccagttctcctccaaaactggagnnnnnnnnnnnnnnnnnngaactctttcaaatgaggagatttgattgcatttttttaggtgaatgaaagcttggagttgagcatttgggccttagtcagcatttttcctttctgacttaaaatctcatgtccttttccttaaagttaatagtactcaggtttttaagactaataaccacacaaggtgggtatctaagaaggcagctgttaatacattctccatctttcctgtctggcaacaggaaagatattattggtgagatagtgcaaaattgtgagaattggttatgtttgatgatgaataaattcaagatttttgaaggcttcactgctatttgggatgggaaggtgagtttacaaaatgaaaaaggtagatttttatgttacagaaatcagtaacgggtttcttgttgtgttaattacctttcacttgatttgccatgatgtttcttcctcattattgatctagaagtttgcctcttggatagtaactagtaacttagtatctactttaaaatttgtggcttttctcttcagggtcccaggccataaaacaacggagagctgtacttgcttgtcacttggaggaaccacatccttgagacagcctgctgtcttgtatgtcttcagtaggaaacttctgacacacacattcaagggagttcctgcccctgagaagtgttcccatagctttccagtcgcaggttactttcacactacgtcagcttctctggtgagatcagggatgttacatattacttgaaaatgatttcataggaagtgaggatggggcaagaaaggaggtagaagctgaattttgcttaacttcagaaggaaatctgatacttgccttggctagttctgatcaactaaagagcctgtgtctgtactggatgtgccaaagagtcaagttgtttctggaatatccagctcctctgaatgaacacagcttcctccctacctgtcttttatgggtgaaaagggaccgtctgatgagcatgatagacatcctgtacaggactcaagactgtttcattgcatttgaaagttggtgggaagtattttattctgctagagctcctaaccctcctagaaatatcttttcatgctctattaattcaattcattagtttaaaaagaaacagtgtgacataattttggtgtttacttcttaagttgtctccccaagggcatatatgtagcctctgaaaatgggatgatttcttctcaatcttccataaatttgaatatgcattttattcatttcttgacatgggctgtgtgactgttttccatcagcagttctggctttgtccacaagggagcaataaagtacgttagctttattctcaaccttctaaagaaagatcccacttttaaatctcttctggaatagcctcttagctcaaagcttattcatgtattttgattatttaagaaattttcccttattacaaagtccagtcgtcgttcatccctcatgatgccaagcaatgattgatgtgtgggtgtggagtccttgtgggtcaggcatcttaattaattagactttttacatattgatgatccccagattgaaagccaggaccttcccataggggcgcctttgtgtgctaaaggcagagcaggcaggcttctccactcctatctcctccgcaggccaccaccatcacatctataggaggaacaagagcactgggggaactctggagtatgagtaaggaaatgcttctcaccttctctgctccaaagagatatctgttacatcagggaacaagtcctctaggtcaggcacttcctcctgaccagtgcaacgggcactccaggttagaaacgtgtgtgctccctctctgtcagttacttgtctaagggctcctatccgtggtcatcagctctctggccatgagttctgtttgtgcttattgcagcagcatcttcacaacaaacaggtcagtaatcaacctgggaagggaaaagacgacagtaaatattaccccctgtagagccgggaggcatttacacctggaatggccttcttaactgatttctgcctggccccctcacccccagccaagtctgaacctgagcaataccaggcacagagaggtgtctacttgtaactccaacacttgacaaaaaacaaaactgaagctgtgattggtttaggcagcaagtggccaggtgcaacttgtttgtttttatttttgttttccccaacagtactgagatcacttgcacttttcctcatttcttaagaaaatccagtttgcttgccatgacttgtttagcgttaggtttacaaagcttgttgttgaatgttgaatatttgtccaaaggagtttgacaaaatagaagctgcttggtccctgttctgcctgctaggtcataaggatgaaggccatgtggctggggtacttatgtcaagtccagaatggggcagtgtccctctcctacctctctgcggagacgcaattgaaggtcaagtagactcagtgtagggcaggcagctgtcatgctgcaaagaagtttagaggagtctttgggttggggaggtgacaggtaggtaggacaggatctcttaagatgggaaagatactggggagaggagggctgcttggccccagggaactgcagtgaggtggaactgagctccgctcctgaatctccaaaggagcccatgctgcccggcttccctgagtcattttttccagcatcctgtcagatccctcaatgtactgatttcccccttgtgttaactataccgatattatttttttagcaattgaaatgcacttttttatttcaactcaatcatgattttaagtataaaaaatttatagattgttaaaactacttttttgtgtatttttaaccactcaatgtagcattgtatattttatttcttgtgagactctgggtacagggtgtgccgcctaatgattttttctgagatgctgggcctttgggatgtgtaccggtaaccaacttaatgcta

SEQ ID NO: 181294 - DNA, 908 bp, Homo Sapiens
ttggctggattgaatggtatttctctctttaggtctttgaggaatcgctacactgtcttccacaatggttgaactaatttacactcccatcagcagtgtataagtgttcccttttctctacaaccttgccagcacctgttattgttgactttttagtaatagccattcttacttgtgtgagatggtatctcattgtggttttgatttgcatttctctaatgatcagttatgttggccacatgtatgtccttttttgaaaagtgtctgttcatatagtaagggcctttttaatgtacaaatggaacatggaatacttaggatttgaaagacaattaatcaaattgtttttgttttttcttaaattttgcagtgtgtgattaataaagtttcacaaacagaagaaatagacacagatgttgttgtgaagtaagtataaatatataggttggtggttatcagtcagagaaaagatgatagatgtaaattagaataattcgaagtagatttcgttaaggaattatttactaaggtgtgagcagggtgtaggaaaatcacaagtgacagtgtggaacgaagacagtgcttaacagaattgaggagaaaggtagttggaaaaaaagctgtgaccttgagtagagggaagcagtcaccctgaggcaacccttgagagagacaggagaaataggtacctttactagagagctagaggagtaggtacctttactccttccagtttttgtaaggctcctcaatggccaggcccacatgttagcttcccagagcagagagcagatggacagggacagacatagatatggagaggtgaaattggagataattcattacaggggcatagcaagcattatgtttaaatttgtagctatgtaataaaatcaacttttaattgg

SEQ ID NO: 181295 - DNA, 1303 bp, Homo Sapiens
ttggctatctgcaagaaattctgaatgtgtcataaaggttatacttggtataactggttttgctaataaaggactgagctgtaaaatttgttataatatattaagatataaaatgttgaagcagttcttacatgcatttaataattattatagtcctccccaagaaattccacatggaaacttgataagactggctgtgaatgagttattctgttccaagattgaactgtgtgaagagcatgggtgagtatacaatagacatttaaaatgacagtatgtatgtgtttataaggaaacctaggcagatgtgctccttgaagtactttatgaatcttattaacctagtttactatgacattttacagtgtttttgttacggagtatatcactacatagaatatggtactacagctgattgatgaatacaaagcaaataccttttcttttttccccccccactgctgagtaggtacaataaaaccttggttaactggaacccagctaattgggaccctcaattatctggatttttttctgcactctccatttaggagaaagaggtaaatgacaactaaaaaacttaacctagtaaaagttgagagaagcagaacatattcatcccaatctcttaaaattttctgtgactacattattgtataatgagaattaatatttagaaggatgatcttattgctgattaattacaaaaggaaaggtaaaaatatgttctgttaattgtacctattaagtccagaaagtgaacgaatatattgtagcaacaaatactgaaacagatggttttctggttaatttggtttagttaataatgtttgttaaccagaatactgtaccctgagcattccggttaatcaagattttactgtataattcaatatgttatattctgatccatatacttaatacctcataatatgaggaaacaatttgttcatgcttatagtcgagtctaatggcaaaaggaagcaattagagtcatatttttcccctctctgccattatttgaaaccagcatatagagtgaaatataaaagcgtttgtatcagttctgcagagttatgctttcataggcttatacagaaatagccagcatttcctggagttttaaacgtgtcatttctagtgtaaggaacacagcttataaacttctggaactattagtgatataaatagtaattaccctataactataggtattaaccattacctacacctataatagataattataagaaaattaaagtcataagacactctgagtgttgaaagccagctttgtcccaag

SEQ ID NO: 181296 - DNA, 1106 bp, Homo Sapiens
  misc_feature (245)..(292): n is a, c, g, or t
  misc_feature (325)..(428): n is a, c, g, or t
  misc_feature (478)..(630): n is a, c, g, or t
tgagccgccatacctggtcgctgtttcatattatatatgcaagaagtagagaaatcaaatctaataaaaataaatggacctcagttcacttttggacagcagaaaaagcaaactgtggaaagcagaattctacaatggcacgctggttcccaccccttggtgtacatgctctgcatgaagtgagcaggacctgtgaatataatgggataatcactcctgtgattacattatgttatatgattccnnnnnnnnnnnnnnnnnnnnnnnnnnnnnnnnnnnnnnnnnnnnnnnncaggtggctaggacctgaagatagcctctaacnnnnnnnnnnnnnnnnnnnnnnnnnnnnnnnnnnnnnnnnnnnnnnnnnnnnnnnnnnnnnnnnnnnnnnnnnnnnnnnnnnnnnnnnnnnnnnnnnnnnnnnnaggactctgagcttgtgatgagaacacatccccagcttgaaatcaaatcnnnnnnnnnnnnnnnnnnnnnnnnnnnnnnnnnnnnnnnnnnnnnnnnnnnnnnnnnnnnnnnnnnnnnnnnnnnnnnnnnnnnnnnnnnnnnnnnnnnnnnnnnnnnnnnnnnnnnnnnnnnnnnnnnnnnnnnnnnnnnnnnnnnnnnnnncaagtgtaagtttgttttcttaaagaagaaaaaaacggggaaggaggtaagtgttaaaggatcaaaactctgacaaaaggctggttgcagaacatgacaggttgttgcactggaaactatttgtcatgcaagtttatgttaaaataagtagcttttgaggactttcatttttggtcttgtaaacatgccatttaatattgtccaactgataatactttttgcaaacagaaactgttaaaacctttaaagcaaatattactgtagagaagaagtaatgtgttatgaaactgtgaggatactaagaaggatcctacttaagtttcttcagcataaataaacttgagcgtttcgaccactgttactgagaatgaaattatttcttaatcacttttaatgaggtaaaatttacatacgataaaatgcaccaattttaaaagtatagtttaatgagcttgcacagatgtaaatatctgttt

SEQ ID NO: 181297 - DNA, 669 bp, Homo Sapiens
tggctcttttgctgtcacgttgacacatttgtttcctagcctagtgggcaagacctctagaaagttaagcagaacttttcccttactgggttatctttttctgcaaagaggatgtggaaatggatttgattttgtgtgcttggcagttatccatgtgtcaggtttgggaagtagttctcaagaacaactgaagcaaaagtcgtaggaaggaactgaactttttggcttataatcctcttaggatctcttactctcaacataagattctagggagcatatttattatacctgactatgagacctatctgaatagatctgaaattaaagctgactgatttgaggctcccccccctttctcaggtgctatgcctgaaatttctgcagttttggtagatgccatcaagggttaatgggtgcccaggaccactagttagaatagactcttttcttaaagaagagccacaagagtagcacatctgtatagttatctttgcattttctagaaaaatattcttaaaagattaaatcctcatactctagttttaatattgattttcttgaatcattggcatttatcagcaaagcaggaaatggcactaaacagtttcctacttgactgatacttgttataattttgacacagatttagttttcttaaaaagctggtga

SEQ ID NO: 181298 - DNA, 875 bp, Homo Sapiens
ttggcgcttgcgcgccaagacggctcggatgccggcggtctctgctgaagagagaagatggcgcttgacggaccagagcaggtatggcgggtgcagtggcggcccggcaggttacggggctgggtgcggagcgagcgtgatctgagtggagagcgggccggggcaggagcgtcgggtgggtcggaggtgcctggaccagtccatgctggacgctgcctgcgaccggatctgctgtgtcagcgccgccctcggtgagtcagggcaaggctgggagaggaagacgcggtagaagcggagtgagtgagggaagcgatgggcgcgggaatggccggcccacgggtcgcaggagacgggacgccagtcctttggctccgttccgctggctccttcgtcagtactgacacctcgggcttgtagagcacttcacgcagtgcaaagcgccccccgtctatatcatatcgcctctcggtcctcctaaaagtcgtatgaggtaggcggcgttcccattcttttattttagtcctgggaaaatggagggttccaagggagggagggattagaacccagatcctgagcctccgaagtccaaactttttctactacgcaaagctacctggtgtcaagccttattcaaagtgccctgcaagtggctttaccccctcggatgtttaacctgtcgtttaagactcactctgtgtcttcagatggagctggaggaggggaaggcaggcagcggactccgccaatattatctgtccaagattgaagaactccagctgattgtgaatgataagagccaaaacctccggaggctgcaggcacagaggaacgaactaaatgctaaagttcgcctattgcgggaggagctacagctg

SEQ ID NO: 181299 - DNA, 588 bp, Homo Sapiens
atcttaaggtccacggtatgtgtgggactgcacctacaagcagaagtgttgcattcaatcaacatctaatctttaactagggcctagggtctggaaagatttctctagagtcttggaaagtttctgaatcttaagacaggctgaggtgaatgtgtaagaatgctattattattcgatcagactttaggatctgagaagaccaaggcagggtcttaatgggttcgttttcgcattccatccctgatactcaggcaccagtttctccatttcttcaacgtttaacttatgcattcatcaaaattatagtaaagggttagtggaaactgttctggttgctaatggaaacctggcctgccacactgtgatcggaactaaagcccactacagaacactgaaaatgcctgcaaaacactgactttactgacaagtcaattaaattacagaaaagcaagttcacctccctgcccgctctgtcctccggaattgctaggtagaaacgtgcacattgtcctaggttcagttttgcaaagacggagtccgtcagagaaagcatttgtttgatttcatgcatttgtgtttcctttgtcc

SEQ ID NO: 181300 - DNA, 1330 bp, Homo Sapiens
  misc_feature (1180)..(1209): n is a, c, g, or t
taaagggttaacttaacaaggatttattcacaggaatacatgtaagtagagaaaaataacagaaaagctaaacaaatgaaatgaagaggatccaaaccaactttcactctgtagcttttaacttgcaccctgtgtgcatatatctagggcacagagggccaccaacatgcgccaaaatacagtgtaggaaccctgcattacatccattaacttaaacatatctttaagatcatgctttgaacaaaaaaaaggaagcttagaaggcagtatgttgagtgggaataaacattgaaatatagcaatcatttttcaacttctacaattgtctttatgtgccaactaacatttatgcagccttttacagatcttttaccacgtaatttaaattttagaagttttgataaaatcactagtagtatataaccatgcagaaagcacatcacactgacagcacagaggcaaagattttgcacaggtatatcagctttccacattgtgcaggttacacacaatacaatatcaatcttattcctaacagatcctaaaaaagatatttcaaggcctacctgtaaactacagtactttatatatctatgttcttaataaaaataaaatccacaaatcttaaaaaggaactttaaatgcagggctatattgaattggtaaactgcaacacaaactggcgcaacataggtaaatgaataccaatctcactctatgtgatgcaagcatgctactttcccactaatttaaattactttcaaccactatgagccagaatgcatgcctgaaccttaaactgcactttaaaaagtaacatcttggcctagaaattaaatctaatgaagtataatcatcaaattatatccgctacattaatgttcaatgcaaaattaagatgtcatctttagtttgatatgcccaaccccatttattcctccctccctgcccaccccaaaaaaggtaaaaggagtgactcatttggcatttcacagggtgcttcattgtttatgtttgttttgttttatttccaacttttttggggtaccttaaattgtaacttccaagaacctgcttctactacgggaaggcaagctgacttttaactatattagttttctttgtgtagttcttcatcaacatgcaaaacaaggccccatcatgtgggaaaacttacatnnnnnnnnnnnnnnnnnnnnnnnnnnnnnngcttctttactatttgtaactcccattcttaggtttcctttattgtgcgctatagaattgttcctctttcttgtccctaggcatcatttatatggttcttgtttgggtacaattcccccaa

SEQ ID NO: 181301 - DNA, 907 bp, Homo Sapiens
ttgggaggattccactgcgtgtatgttttctctttcacgtctcacttttgttctctgccatcaggaaatgcagtagacatttgtcaccagcagctctttggagacttcaatgttccttcctcccaggatccgaaaggggacttcagacacggagaatctaagacaccaggagctcagaagaatggagtctcaagacatcaggcaaataccgaagagatcagagccaagttctaaagggcagccatttcccaaatgtcaaccaagagcgaagccaagagaattatgatttcctggctatacaatgacaggaaaagcttgatcaaagctggagtgcaagttaaaaagtgtaaggtactcaagtgctagggtctgtgtccaagcccaatcaattgatcattagttgtttttaacttcaacgtttcttttgcaacagcacctcttccttaaagtagcaatcttagcagactgccaccttacatgatgcatcttattctccaaggacaatgaagactgaactatcgcacattacctaagaaagatgggaattgacatgcacatcacaattgtatacacaacagaaattattgaatcatgagatatacattccggtgtgtgacagattggcacatgacataatctgggttctttatagactcagttgttttggggcgatctagattatcaagagaagagccttcatgcttagctttatcttgtaccaaccaccagggcccttgcttctgagcaggaagcagctggggaataggctctttctcttaatgacttccaacatagttctctcaaaccttactcctccagaaagccaccctcacctggctatggctacttcagaaaaaacttggcctctggtataatagagcagaatcatcacctcacattctatttc

SEQ ID NO: 181302 - DNA, 893 bp, Homo Sapiens
  misc_feature (128)..(142): n is a, c, g, or t
ttggtaggtggaattgttcattttttcagaagcattttaattttattaatgtattaatttatttatgtattttgagccagggtgacattgtgagaccatgtctcaaagggaaaaaaaattacatatannnnnnnnnnnnnnngatatagatacgatatttttctcttctgttcattggtaggttggatctctgatgtgtgccataggggcaaaactttaggcaaggaagagagaaggttttgtgtcctgattctgctcctctctttgtcacttggtctgagtgttattacttagaccctaatagcatcatcaccctgcgtgctcttggaattagtcccagttttgcagtcacagatagctaagcagttggcaccaaaattccatggagcgacatcgtctcatctttattctaggtattttgcaagagtgtagcagccctagagctacatgtttgtgtgataaaactaggaaaggtagcaaggtagaactttttagggagtagaaagtttcagagccactctgcattgaaattacttacctgctttttttctcttgtttaactttattcagtgactttttgcatacagaggagcttactttctaggtggtaactaccagactagaagcagatgctggcttttggttctgcctggtctcttctaaaccgtttcctctgggtaaaagaggagaggataggccaggcactgaccaaagagtctagaatcagcatttttattttcaactgaaagcatacagagtacctcattgagaatcagattccatagttgctagtgttgcacaagcatgtgggtatgttgggggatggggcagctgatggttttgacaggaaccgtgttctttgagatggtaattagaatttcatgaaaggtcta

SEQ ID NO: 181303 - DNA, 1661 bp, Homo Sapiens
  misc_feature (1327)..(1335): n is a, c, g, or t
  misc_feature (1540)..(1548): n is a, c, g, or t
ttggcttataattatgccatcattctgttcatctaagttctaaatcttggatgtcataattggttttcccagttcctaaaacatttgcgtagatataaaaatttgtctattttgtgtgtttgtgatgattttggatttactgttcaccctgctaccttactattgcattagtagtattagaacagtgtttctgtcccatttcacatactatgttattgtcagagcagtcttcctaaaaccccactttgtaaatggaacttttctctctcttgcattccttttttaaagaccaggtctcactctaatgcccaggcacgatcatagctcactgcagccttgaacacctgggctcaagcagtcctcccacctcagcctcttgagtagttacaactacagatcattcttgctcagaataccttcatgatttcttgctaaaattccaaaatctttagcttggcatttgggattttctacagtaggaaccctgtccatcacataaaccttaacgtcactacatgtgcttatgcaaaaagggctgcctgaatgagttgcttgaatgtatgtactatttgaataattacctgtttgccattgcttgctgtttatattacctggaatgccatccttttcttcttgagagctttagcacaaatccctcctcagtaaaaatagtggcttaagtttcctgagtgcttacgtctgtgaggcaccatgcctttaatttccactattgcattgaagcagtggttatagttatcagtcaagccttgtacattaaaatatacacacccaaatatatatacacaccttgtgacacaggtactgttatcatcaacttgcatttggaggatttgtccaagatcacatacctagtaagtagcaagagtgggtctctgtctcatgtaattccagagcccaggtgcttagtcatactccagtgccatagcacttatagctaacacttactagaggaccagttacatgtcagggactgctataagggcttacatatttgatcctttgaacaccctaatgaggtagcaactgcagtgatctctgttgtatatatgatgaaattgacgctttgagaagtaacttacccacagtctcatatctgcgaaacgggaaagccagaattagaacccaggcagtctgcttttggaattctactgtaagtctctttgataagctgtcaaattgtacagccacagagggaaaaatttactgtttgtccatctatttgtcattatataagggattgggtataaagaaataagcattatataggcgttatataaggacttggatataaagaaatgaagcaagnnnnnnnnntctcatcttctctaaactcatagagcttgcgttgtagtaccactgtctatacctgatcctcaagggcacagatggggtatttagttgttctgtattagtagtaccttgcgcgagtaagtatttaatgtgttggtgatgataattcattggcttttctgttaactcctgccaaggagactttgccctgatttagcttattaataannnnnnnnncccagacaactcgtagccaggcgttcattctcttcccgctcatctttcctcttcccatttgaatcatgtttttgttgacatctagagtattttatcccattatgtactatgga

SEQ ID NO: 181304 - DNA, 946 bp, Homo Sapiens
gccaactttgtacaaaaaagttggctattttgactgctgatgaaaggctcagtataaaaggggagtactgtgtagagagcttcatgtttttaaatttttttcatatacttgttgatgagttatttagtattcattgggggagaaaaagccgtagcggaccctttctctttaactcatgtatgtctatatggtgggaaaattgcctggctaaattgcctggctttcaggtttgttctttccttctaaccaggtaaatctttgttttttatgctataagctgacagcagatcccaggtacagagggcacgctatgaggcagctaactggaaatacaagtatggctatgagattcctgtggacatgctgtgtaaaagaattgccgatatttctcaggtctacacacagaatgctgaaatgaggcctcttggttgttgtaagtatgctaagaggtctcccaaataattgatgaattgaaactttttacagaacatgtatacagaattatttaaataacacttgagttctgaacatgtggtttggaaaatacatagagtgggaaaatctttataataaatcagaactaaaggataggtttcacaacagtatgtcgggcattatctttaagctttagatgctgttagactttttatcaaagtatttccatttggtgtatgtgatttgaaagatgcaagtcctcattattaggatgttgtaatgaggttctactgcaattcgagattactaattccatagaaatacctgcatcaagcatcttaataatgtagctgtttgttttgaccaccctaaagaattagggtcacacacaggtgtgtaattcacatttttagaataaatttctatttttgaaaacaagtaaaattgtattgggagagggatgagatttactgatttttagatgtgatgtaataaattagcctgaaaaatt

SEQ ID NO: 181305 - DNA, 1709 bp, Homo Sapiens
  misc_feature (314)..(325): n is a, c, g, or t
aagctcttattacattttaattcataataaagtaccttctgctaaaacctaaaactatattaccttcctttttcgagtagaagttcctggcacatcagcatctttctcttcatcctttgaggcaagaatttaccagattcataaaacattttagatgtcattatactttatagttgattaactagcaattatttcctttacacactggaacacctgtaatgtatatgctggggcactttattgactcattaaaaaggttccccccattaaaaaattttttttaactataagaagaatattctactgccagttgnnnnnnnnnnnnaaattaactacactagacaaaaaataatgttcacaacagcttttacctgaaaactacaatatgtaaatttttttatatagagaatatcaatatggtaataataatgaaatattacatacctcagaatcagacaaaactttcttcttcattgaattataaagtggaattatgttataacaagtctgatccctacataacaaggaaatgttaacatgtaagattagaaccatgataatttttttccttaaaaatttgttcgtaaaaccatattttaaggtaaaagttgaagctgaaggcttgctttcttctccattggcttactccaataatttatgcacacacatttaaccctgacccctccactctatgtagagctttcagtgtggcctcactatatcattacaccaaacccaagtctcatctcccagtctttgcttaggtatctgctgtgcttcttccattcctcagtcttcaaacagctaatacatttcttgtcttccaactctttcttttatttttaaatgtatttcctaaaattttgttcttaacgcatcttgacactgtaccttttgcttcacatacttgtggtttatctgtgtaaatgaattccaaaattcctgcaatttgtcctaacccttctcctgagcattctaccaacacctaaaattccacgtctaaacttaatagtgactccccagatatccttgttcctttttctatttttctttaacaacatatcattcttacagtaatgggaatcttggtttttcattattctttccctttcctcctccttataaacccaattagtggtcaagggctgtgaactctatcctcaagtatgtctgggcatctgtccctttctcactttcataaattaagccctcatcaactcttagttggtcaactgtagcagtcaatctgctatttatgctttttgtctcttctctgtcaattaaattagacactgcagtcaaattaacatttttaaggcatagtgtaaaacatgttattctcatgttaatatactttcaacagccccttgctctcagagcttatattttagattcatattcaaagccacccacgatgtggccccaactcagatttatagcactgtatctctactgtgacttctccaatttatattacccttaattaaaacttcctacctcacgctgctccttatccctggaatggctttcttttcatctaacatttccagaatctatcagtatctacaccttgtatacaatgtcttaacagacttctcctcccctgtatctgaatccccatcatcacagctaaaagtaatcctattcttatctaaacttttatacaattctcttactacttgtcacagttttccttatattatacccaa

SEQ ID NO: 181306 - DNA, 920 bp, Homo Sapiens
ttggatcagttctgtccttggcaactttcttctgatatctgaatgttcatgaaggtcctagctttatattgtccctcttttaggaataaaattttgattttcaacaatgtgagtaaattgagtctatttaatataaaactctttaaaacatactaattttttaaagcttatatgcttatttcgcttccccagttgtttttgtgttggctaaatattcttttatatttatcaagattgattgcagagcagttctatcacttataattagttataagaaattataatgttaaaaaagtctcagtttttactaacactgtactagggtgatattaataaaggtttaaataatttatctctaattttataatgtgttgtaaagccaactagcttaaaactttaaaaataataaagcaaaactacactagtactcttttatgagaaaatagttactattttgataaagggcaaggataatcaaatagttcattttcagagaaaaatattttaaattgctaatgtacatgattgttttggttataatttatttatagaatgtatcttttctatattacattcttaatattcaccagatattatattgaccattctctttaacttcttaatgtggcatatttctactctcctttcccacaaacagcttcatctgtctccaaggttaacattctgaagctggagagtccttggagaaactctgctcagcttttttgtgacatttaaaaaaatgcatttggtattctccaaaccagaatgatacattgtctcaaaatctgttagacagctgatgggtgtttttgagcaacgtcttaataattcagttgtttctgttttaattataccattaaaaatcagctttagctttttaattctagaatttaaggcatcagtctgttcttataaaa

SEQ ID NO: 181307 - DNA, 656 bp, Homo Sapiens
ccatgagccatcacgcccggccaatgtctaaagttttggtctatctctcaaaattaagatgaccaaaaggacaaattattaaattaattacaccataaagctgccccctttcacgtttaattttggtcgtttttatttaaaatactaaactgaaacctacctggatatgtaaatagactgtacccattcttgtaccaatcaatgtgttttggccagtaaaatgacgtcaactgttcaaaccataaggcaactcccaagctgtaatcaatctgactgtttctgtacctggcttccattttccgcatgtcaatttgccttttctgttcataaattttttaccaccatgtggctatgctggagactctctgagcctacacaggctacccaatttgcaaatcattcttttctcaattaaactctgataaatttaatttctctaaagtttctttttcttttttctatgatgaaaataaataatgtgttcttgggctttgatttttctaaactcattcctcagctatttttcaaaattattatatgtccattcaaatgcttctgcaatttttttgagacagtgtctctctgtatcactctgggtggagtgtagtggtgcaaccaatcatgtctcacagcaaccttaacacttcagctcaacc

SEQ ID NO: 181308 - DNA, 969 bp, Homo Sapiens
  misc_feature (313)..(369): n is a, c, g, or t
ttgggggaggaagcagcagtgaataaaaacaaaacctgttttccctcagaccttaaataagtggcagagggcccagataacagtaaaaaagcaggtagtggtaaatgctatggagaagaatagagtacgttaaggggaaatagagagatgggtggggaaggggtcattttatattcacgattaagaaggtttttctgaggataggaaatgtggacagagacttgagtaaaatgagggagcaaacaaaattttaaaatataaaaatgtttttcttgtacttaagagctcatacaattttaaggatattggcctnnnnnnnnnnnnnnnnnnnnnnnnnnnnnnnnnnnnnnnnnnnnnnnnnnnnnnnnnatgatacatatgtcataaagcatttttaacttatgttttcttcttacacattttacttttaaaaatctgcctaaaacttatattgaggtgaatgtcaggcagtaacaagaagaaacatgaggtaggttaaaagggatgaaaattgacagtggcttctttcagtaatggtagaccaggtaatttggaccctccttttattgatgacatctaaaaaagctggacaaatattaaaatgtctttcttagaagtatcaaaaagctaacaagatagtgaggaattgtagggctgagatactgaagaaaacaggattcccagaaggtaagcctattatacttagggtcattttttccttggattatatgtgccagttctgaagaggcaactaagaaaatgaactgtgcttttggcagcatcatatgactagggggataaaaggaaaacttcagttttccaccatgggcctggaccccaaaggggctgcacctcagagtcagggtgaaccagaagtaaatgagctttctctgaaatgacagcctgagttttcagccctgaacttggagtaaaatgctttttctggattgtgcaggtaaagtagtaaaa

SEQ ID NO: 181309 - DNA, 1024 bp, Homo Sapiens
ttggtaaaatatgtaccttgtaattatttgtctcagttttctgtattctgtatactcaatctgtatttttgctaatgtgtaaatgtgttaagttctcctgctctcttaaaaatgtcagcttctccttgtacttgacaacttactaatatatttaaaattgtagttttagtttagtattgttacagcttttcaaaaactgttatgtagcatgttgtgaccattgtgtctccaacagtggttttgactttaagtccactgtctgatattagtatagttgtatgagtcttcatttgctttgtgttattgtatgtctctattagtcttaacttccttttccttaagttttaggtttatttcttataaattatgtataatgggattttaaagtttcctttgccggtatctggtggtttcattgatgggcctacatttattgtgactcctagtttaaacgtgtaaatgatacaaatgtttatttctaccctcttattttgtgctttctaatctagatttttttcaaactcattctttttctgtccttttggggtattttctttattctccccttgtccattgagttggaagttatgcattatatatatagacgtattatctatgtaatctatatattttagtgattcatttaaagtacatagttgattacaattcaaactgaaacagcataacatgtggtcctcattgttacaaccgatcatctcactggcattaaactactctttgtctgacttacccttaagaagagttgcatttttttcctgtagtttctagggctcttcatggagttgagaaatttctctaagttttgatcacttattttatggggagaatgagcagattgcccttacatctttttacttaatttctctatgtattttgtatctagcttattagagtgtgcttccaaatttctcatccaaagctatttatttcctttagcagtgaattaaactttctttatgtttcactggtttgtgaaagttgcagacctttgtaaaattaaact

SEQ ID NO: 181310 - DNA, 1173 bp, Homo Sapiens
ttgggtgtgactgtattaagcattaagcttccttcagagctggcctatcggagatgctactgccctctctacagatgtgtctgaaatgcctgcccaaggatggcccttagccagttaacagctttatagcccatcctcattgcttactgccacccctcagctggggtccaaggcagtactattcagtttattcaccagacctgcctccagacatctacttctttcaaaaattagtgttttccatcaaggagcatgttccagagcatttcccagagatgtcccaaagaacactgtccggtgctgtggcgtacagtggcaacagcattagactaagtggaacatcccagcaggctgctttagaatccgctcatttgactagatacgatgtaattggctgtctttaaaaaacgcgcacacacacacaatctgataggcatatctcatgcccattcaatatggaatgttcttcgcttgctgaatttaagcctgtattttaaggttttgtggttcctcggccacaatgggtgatgtcactgatagaacgaagctgagtttccaagggtttggggctgtgcaagagtaaacactagagcttgagttgttatccagctggcaagcacggaagtctttgaagaatgtaatgtaaaaagggaaaagaatgtaaagctttttgtaccaaatgagagttggagcccagccaacaaatgcttttccctgtgtaaaagtctctctggaagggacattccatctccatggtgcactctgaggggcactgtcaactagagattggccccatccaggtgggaggaacccctttgggatggtgagtatccaatctgctgtgcatttgacaggatctctgaatggctaggtaatggatcccaagcaggctcacaaatttaaatgagggctttgtgtgcagaaagaggaataagtacagattattttcctaccactagatttttggggagagtcaccatggaatgttgacaattacttaaaatattttaagctcccttgctgaattcctgtcctgtccctgaggaatcagatggtcatacagccataggcacccacccgaaatttccctaggagttggagtaatgctagaattgaagaccttctgagtaaagggcttctctgccttctcagaggcaggagaatttgcaccaa

SEQ ID NO: 181311 - DNA, 930 bp, Homo Sapiens
ttggctcacctgattttgcttgagtagggggggatcgagaaggttcttgacctctgtgctgctgcagggacacagtgtatttcccatgagttacttgcgtcggttcaatgcacgttctagcactcactgggtaatccttccaacaaacttctttccttctttattgtgaaggctggtcactgctatgccttctgccatgaaaatttgggagttagtttatataagatgtgacacatgggacattttttgtgtggagttgagtctgggtaaatcacatgtctttttcgctgggccacagttcttcatttctcccagggccctttaggaaggcctgccccagaataagcacattcccacgcaggcataggggttcatgtcacacctaacaacgctaggtgtggatatacggatagacacagattcgggcaggcagagtcacaaaaggccaattcctacccagctcttgtccaaaggaaattagaggtgtccactacaagtgtactttttacccgcccatctttcatgcagaacaccagcaaggaagaaataataattgacataaatcatgaaaagatgaagaaatggcagaaattgctcctagccattgcctcctctaccaaactcccggggagcaatgccaggctagagtttgaaccactttttcctgttctggaaggctcttcccatcttccgcggaaacacacacgcgtgcttactgccatgtctcttgggtttccctattccagttacaaaggtccccgcactctgctcacacagtgcctccgtgggcatcggcaagaagacgggtacttctgaatggcgccgctgtcccaccaggctccacctctgtatggggtgccggcacttactgtccctctgccccatctcacgtgaccttgggctttgagggtgctgctgggtctgttgctt

SEQ ID NO: 181312 - DNA, 894 bp, Homo Sapiens
  misc_feature (303)..(338): n is a, c, g, or t
  misc_feature (340)..(530): n is a, c, g, or t
ttggatctttgtatattcatccagtcccttattgatggatttatgggttgtttccaaacttttgctcctacagataatatcacaataaccatatgcatatactgttgcatatttatggggctgtttcttcatagtggattccttagaagtagaattgtcaagttaaagggtaaatctatgtgtgatttttctagatccccaaatttccctcagtaaaagtggtgtcattttgacattcccatcatagttatgagaatgcctgtttccctcatttttgccaactatgctgtcaagcttttgggnnnnnnnnnnnnnnnnnnnnnnnnnnnnnnnnnnnngnnnnnnnnnnnnnnnnnnnnnnnnnnnnnnnnnnnnnnnnnnnnnnnnnnnnnnnnnnnnnnnnnnnnnnnnnnnnnnnnnnnnnnnnnnnnnnnnnnnnnnnnnnnnnnnnnnnnnnnnnnnnnnnnnnnnnnnnnnnnnnnnnnnnnnnnnnnnnnnnnnnnnnnnnnnnnnnnnnnnnnnnnnnnnnnggtaaaatatgcataacatcaagtgtaccatttaaaacatttttaagtggtacagtttagtggcattaagtaaattcacactgtgccgtcatcaccactatccctctccagaacttctccatcatttcataccgaaactctatccattaaacaatagctactatttccttctctccacagtccctgggaaccactgtctctatgaatttgactattctaggtaccccatatatgtggaaccatagagtattttgtcttttcatgactggctaatttcacttagcataatgtcttcagagttcatccatgttttgtagctatgtatcagaattttacatagatctgtgtatcaaattttaatttt

SEQ ID NO: 181313 - DNA, 1378 bp, Homo Sapiens
ttgggaatttttaattaagaaagggtagtttggtagtctacttaaaaatgtttctgggaaattcactagaaacattaaccaataggattttggtgagcttagcttctgtattcctactgccgcccagaaaaggggcagggctctgcagccgccaggacagacgagcaccccatgcctatacctccctccccgagctaagtcccagggcatctgggccttgcctggagactgggctagctctgtaggctcggagagcctggggagggtgccaaccccacctctagtattttgggagatagggaaagtgaaccgacttccccttcccatacccctcagggtggttccctaccagccaggcttactacttctagaagaaagcagagtgccagggagtgagattgcatccctgggcttagaagtgacggagagaagacttgtttagtattttgccatcagcacaaggaaaaccaggagagagtctgcctccaggactctgagccttctgcctcgtatgttcagaaggtggataggtcttcccactccagcatggcttgaactcttaggggtctgcagtgctccatctccattggtggccccagctcagtaactatacctggtacatttcctgtgtgcaatcagtaccttgaaggcagaacattctgaataaagttggaaaaagaacagctttgctttgcaaagattgatgacagactggttcctcagaggcctaggctacccgtcacccctttttgcagagcgagggcctggaatgaaggcagtttatcctctgtccctggagcctggggtttgctttggctccttgaggtggaagagactaagagggcagctgcccagagcagctgtgtgtacctggctcctctcaggcttcctgatcccttccgttgcactgcgccttatccctcagccagccagacagcctccctgctcctgaccagaagatacgtttcggagtggttggtgtggtttttgtgatgagggcagcacgtggtggccaaggtggcaagctgagtctcacaggctcactccctcgttggttccctgtgggaatggtaggccaggcccagcaagccatgccccaacacgtcctctcctccggaggaagggccagctgccagctgagtcagcagctagtccatagcacagccttataactgtaaagccaggcattgcccatgagcagagctggaaccagagcttcagtcagtaagagggaggattaccttcacgagaatgcaaggaagaaactggctgctatctttatagttccactgccctaaccaagtgtccacattctaaatgtgtagtgtccatcccttatgtaatagtggtttcccgcccaaagtgagactttcctttt

SEQ ID NO: 181314 - DNA, 1512 bp, Homo Sapiens
  misc_feature (55)..(94): n is a, c, g, or t
ttggcaaacaggtggggcagtgtcggaccaggaaggagcgccaagcgggcaggcnnnnnnnnnnnnnnnnnnnnnnnnnnnnnnnnnnnnnnnncagtccaggaggagcctgttctgggtgccgcgggagccaccgacgggctgcagaggccgggaggaggcgaccgcggcgcggccctagaaggctggactgaggaccacagctggcttccggcctctccccggagcctggggccttccgcagcatccccgcggcctccttctcacgtcctcagccttggtgaggctgcaccctcacgtggctctttgccccatgttggccaggcaggtaaaacggccctgcaccccatttccagggccttcaacaggtctggaccacgggaactgccagctttcaccccttagccgggcgtccctggatccccccgggctctggctctggccgttctgggatttcatgagtcactgatcagtaaggcacgtctgcccgtgctgcatagtgacctgcctcccgcgacccacgaggccacatcagcaatcagcttctgcctcctggccatccttccacacccctggttgaatggggctgagactgagttctccccactgaaggtaagttcggggagacttcaagccagggcagtctcctgtcttctcttggaaaccacagcagcccatgcacacagaatggcagccacattccagcttccagggcaccaggagatgccgctgaccttccaggatgtggccgtgtacttctctcaggcggaggggcggcagctgggcccccagcagcgggcgctctaccgggatgtgatgctggagaactatgggaacgtggcctctctgggattccctgtccctaagccggagttgatctcccagctggagcaggggaaggaactttgggtcctgaatcttctgggagctgaggaaccagatatcttgaaaagctgccagaaagattctgaggttgggaccaagaaggaactatctattttaaaccaaaaattttccgaagaagtaaaaaccccagaatttgtatcaagaagactcttaagggataatgcacaggccgctgagtttcgggaagcatggggccgtgagggcaaactcaaagagcgcgtgggaaattctgccgggcagagtttgaacaaacccaatattcacaagagagttttaacagaagctaccgtgggcagggaaagatctttgggagaaagaacccaagagtgtagtgcatttgatagaaacttgaatctggaccaaaatgttgttagacttcaaagaaataaaacaggagagagggtctttaaatgtgatatatgcagcaaaaccttcaaatataattcagacctaagtagacaccagagaagtcacactggggagaagccgtacgaatgtggccggtgtgggcgagactttactcacagctcaaatcttgatctgcaccatcacatttcacactggtaataaaccattgtaaatgtgatgaatgtggggaaaactttt

SEQ ID NO: 181315 - DNA, 957 bp, Homo Sapiens
  misc_feature (163)..(193): n is a, c, g, or t
  misc_feature (239)..(266): n is a, c, g, or t
agttacatagatggctgaacatccacatctaatgaatggaacagtgtccactacagagcacattataggtgcttagtaaatatctgttactgttacacaaatgaatcaagctggagggaagtttctgatggtatgtccccatctattttatatatatatatgnnnnnnnnnnnnnnnnnnnnnnnnnnnnnnnttcctctgtcatcaggctggagtgcagagtgagaacctgtctcggnnnnnnnnnnnnnnnnnnnnnnnnnnnntttgtgtttggctaagagtaagcccttaacacaaaaatgtgaagtggctgccaaaagaacagtttgatcctaggctgcatcaccagtagtgacggggtctcagttcctaggacatgggtgataccaggcttactctacatcagtcagaacatcctgggaacgttatatgggcagtgctggatcccacactctgagaccggggcaaactgaaaaaattcaaaaaatgatcaggagagcaaaggcattagacactaggccatatgaagaacagctgctataattggagattttacctggagaaaagagtcacgtagcggctgatggctatcttcaagtagctgaaagtctatgatgtaaagaggatttaagcgttttatagagctctgtgaggtggactgaagatcagtggtgaaaactacagaagtcagcctagcagagtgtcagcagatgaagatgcaatggctgcctcagaaggcactcctgtcactggagatacttgtttgtgcacaacttcagccacaattcatggggaccctgcagaagagacccttaagaggcatccaagtagcattcatagtgtcaggatataaagacaatactcagaaatgagcaagaagtcttagaaattccctcggttaccaagtataagcaggtaggaaaatcttttgtttcgagaaggtatctgcaccaa

SEQ ID NO: 181316 - DNA, 1568 bp, Homo Sapiens
ttgggtcactaaaaggagagctgcctctacctgtgagaagacttttcacaggtgcctcgtgagccccggggagtggcagggccccagcgtgtgggcacgcatcaggtgcaggtgacttgagcaccgcaaggtcaaaacacgcctcgcagtgtgctctgctcaaaccaggtggtgtggacgctgtgcaaggccacagaggaaacaagcatagaaaaaaggctctggttcttggcaccaaaattggttctgcagaggagctggcgaaaataccagaaatccatgatgaaacggaagataactcttacaataatgaacctccttccctgtctttcatcattggctaatctgtgcgtttaaccaatttcaacatgaacagtcatctgtgtgctgccgccacagaatcccgttctctgtagcgtctctctgggtgacatcctcggggtcctcatgtctgctcccggtcaccgagtcttaaatatctgaatcagcaagaggctggatgaagaaactggtgctcgagggaccactaagtaggtggcggtaacaaatgtagcaattcaggaaccgcccagcagtttcccatgtgtctcacaaactctgagagggaagcccgtgggcgcgacccagcccgaggaaactcaaggccactgattggagagaggagagaacaggggtgggggaattgtgaaaccaagaaacacaccatcgtttcttggaaagagctttactacccagaatatgcatcaggggaacacagcatgcagactcaaggccagtgccccagaaacaagtttgccagggggttgatttgcttaagagcggattcacttaatgcaccaattatcaaaccaaagaaaatgcatttcttttaacagtcttaaaattagcagatgtgtgtcagatggattcctgctcagtatttctctccagatgtgagcatcaatcacgttgaaggacgctgggcagggtctggaggtgacgcctgcgccttttcccacagcgtcagaacaacacaactttgatttctcctctgtcaaagcagggacaaacaagctggtccagatccctgatatgctggaggaaggagggcatgtgaccctgagacccccatgagcagcatcctgtccccaagccacggaagctcctgctcccttggccaggcctgcccctccctccaagctgtgctgtggacattcggtgacgcacacgcctgacaaggctctccttgctggcccttaggagggatcggtgagaaggaaggggaagccagcacgtcttgatctagcccaggcaggcataatctctctctcaagtcatctgtgccactagggatttgggaatgggctgtttgctatatagagtgggagggctgttcctgcctcccacgaggacacagtgctgtgcaccatagaatcgaaaacttgaagatgtacaaaatttgatgttagcaccactggcatcagataggcatttaggatagatttgacttaacacccatgtcctatccaggagctgcccgatcagcagccccttcccagcctttgtccctcctgagctctgcttgtctg

SEQ ID NO: 181317 - DNA, 1578 bp, Homo Sapiens
  misc_feature (226)..(309): n is a, c, g, or t
gtgtgagccaccatgcccggcctaagaaatacttttaagtatattttcattagctagaattgcccaatctgtgtaggtataaattacttggtatagggagagagaaagcctatcttacctgttgctttcttacttggtggtaacatccagcagttagtctatttataaacataattactttttcacatatgaaccataaaatatttaactttctgctctatattgnnnnnnnnnnnnnnnnnnnnnnnnnnnnnnnnnnnnnnnnnnnnnnnnnnnnnnnnnnnnnnnnnnnnnnnnnnnnnnnnnnnncatatccaacaaatgttctcaatgtaaaggatcagagatgccacatgttctccttgatgggagagacccttccacatgggaatgatgggaaggagttgtactcctggatgttcagtaactgcttctaggagaaaaggtagagtcctatcactaagccgcagatatttatttgtgtgtggctagaatgggatgttttgaatcttctgttacaaccttgggaacgtggctgttatttcaatttatgagccagaaattttcacatcccgaaactacaaaagagaaaaagagccttattaagtgtcatgctttcccaagactaccttcaaagaaatatgaatcaggataacctgtgatctaaataatgtcatcttaaaactgaagagtttcttttgactcttctgctacaatagcttagaaaaaaatctgcttgcagacattttagagagaaaggacaatgaagtgattttctgaatgggaatgacagacctctgggaagccagctaccactgaatctcggtatcagttttttttaaagtttagagttagaaggggtggtcgcctcctttcacagatgcggaagctagggaccagcaaggcggggtgcccacggctgcacagctagttcatatcagaattgggagtggaaggcccactgcctcccagcatagcaatacataacctagcaaaggacttaacacctatctcactgtcaggttttttagtattttatgatgatgatgacttctactagaaaataacctccattaaaattattaaagatggtcacacctctatctctaagccttacttataaaatgagggtatttggactaaagtcttcttccagttctagaattctacaactcattaaaaagccaccttaaaaagtctactgagttacccaagggttgctcctacctgcccagagttccaccagcctgggtatagtatttgttataatctagtcgtaacagtagttgagccaaatctgagttgatctgatgattccgaacactggagagaatcttgaacaggagtgaagactggcggctaaagctctgcagagagaaggactcagctgtcattccacttcagctcaccaactctccatatggaggatgggggcggagggaggagtttcttggaaaagccttgttcaaaattctacagaaccacctggccttcccacattcctatttctattaggttcctaaatgacttgtaccaaatccatacatgcatgacttcctatgaaagtactctttcatc

SEQ ID NO: 181318 - DNA, 1258 bp, Homo Sapiens
ttggcattaaaccctttaccctgtatgttcattgtaatcaaggccttgcccttggatttctctgccaaacccgtggcaacactccagaagccattgcatacttctgaaaactggactctatcatccaaggctggcctccatgcttgaaagttctggatgcagctacattgctggcctcagaggcacaaaaactcaccctctaccagcacattactattgcatcttcccataacttatgggaccccatgagccattgatctcttcttttcctcctgccatccagcttacagcaaccctctaacaccttccagagatgtaaaattctaaatccaaccaccctcctccctataagtacttccaattctgaatcccccactcttgcctagacctcttagcctccctctcctcccctttccaacacatttcagaagcccctttgcggaaggaacccacatggttcattgatggaagctcttttaaggaaccatatctggcagctggctatgccatcattgccgaaaacaaactcctataatccaatgctctctcatcacatatcacctcacaacaagcggaactatttgccctaaccaagaccctcactctagcaaagggaaagagggtcaacatttacaccaattccaaatatgcataccatgtcctacagtctcacactgtaatctggcaggaaaggggtttttctaactacaaaaagaaccgccataataaatggcaaactcatacacaagccgctggaggcagctaaactaccactagaggccgtcattatccattgcaagggacaccaaaaggctacagatgccataaccaagggaaacttcttagcagattcggcagcctggcaggcagcccttagaacactattgttattgcccattttccctagcatacacccaagaagaaaaaggtgccttgctggctccagggctgttcataacgaaagctgaatttacttagactacaaactcatcctacccaagacccaaaaactttctgttctcacccacatccataaccaattccatgcgggttatctcccgttgctccaatttctaaaaacctgtatacattcccttaccatggccatcagcttggaccgcctcactaaaggttgctctgcctgcagtcagacttcccctcaagggcccttagaccacctccttttccctcccttcaagcccaaaggccagttgccgggacaggattgggcaaattgacttcactcatacgttccccc

SEQ ID NO: 181319 - DNA, 894 bp, Homo Sapiens
  misc_feature (99)..(111): n is a, c, g, or t
ttcctacattgggtttacagctgtgagccactggtactggcctcttccccattgttaagaacctcagaattgtcagttgtactccttgtcagttgtacnnnnnnnnnnnnnaaatcctttaactgatttgtacatgagcttgtagtctgatatttattcccctgaataatcttcacatctctggacctcacatcttaattttattcacatcttcatctgcagtggtttccagtattagcatacaggttttgtgttagcaaatgtgtacactttgttaaactgtcctcaagcagaagctgctgtgttgtgcttgtgttttccttggcctggacaaatccctctctacagcactcgcatgtcatgaggacataaattctgcagatgagtggtttgcagatgcagggattgtagaccctgcctctactccctgtgttacatacatggttgtgtcctttatgttatgaggcctcctacattctgtgaccattatagtccagtaataatacatagcaccatcttcccctccatgccaacaacctaaaagcaaagaaatgctggtgaggtacatgttgactttgttgagtatgcagcctacccacaagagtatctgacaaaccaaaaaactagtctatggaattatttgcacaaacagggagttgggttcaggttgaggttggggctgcttagcattatcacagatatagaaggcctcatattgtcaagggcatgactaaatgagtcaacagacagaataaaggcagggtctataactccttcatttgcaaacaacttgcctgtggaaccttatttgctgatgacgtgtgagtactatataaatatgtccaggccccccccaacatgactagagcacaacatcctttggtcagggactgt

SEQ ID NO: 181320 - DNA, 841 bp, Homo Sapiens
  misc_feature (469)..(522): n is a, c, g, or t
tttcttggttccctgaccaggaagtgaggtgattaacagacggtcgaggcagccccttaggcagtttaggcctaccccatggagcatctctgtgggggactccggccagcttgagcaacgcagatcctgagagtgctcctgggtaggcaattgtcccagtggaacgcctcaccagagcagtgcgtggcaggcccctgtggaggatcaacgcagtggctgaacgccgggaaggaacgggcacttggagtccggacatctgaaacttggtaagaacagtctttggaacttgcccactccatttgagtggaagcgtggcctcatcacccacggcgtgcctgtaccggcactttggtttttgtttttgacttgacttgaattgcttgatactttggttttggttttgacctggcttggatttctggatactctgattttggttttgattttggtttggtgtaaactgaaaaannnnnnnnnnnnnnnnnnnnnnnnnnnnnnnnnnnnnnnnnnnnnnnnnnnnnnagcttggtgttttgtctcgaggaaacatgggtcagacacaaagtaagcctactccgctaggaactatgtagaaaaattttaagaagggatttaatggagactatggggttactatgacaccagggaaacttagaactttgtatgaaatagattggccaacattagaagtgggttggccatcagaaggaagcctggacaggtcccttgtttctaaggtatggcacaaggtaactggtaagtcaagacacttagaccagttcccatacatagacacttggttgcagctggtgctagaccccccacagtggttaagagccaa

SEQ ID NO: 181321 - DNA, 2620 bp, Homo Sapiens
ttggccaatataatcattacagtttatgctttaaatactatgtgctttaaaaaggaaaatgggaccaatttgtctgctaagaatttgattttaggtactataagagtattaggaaaatatatacaactggtgttaatttctagatattttctagaaatcacttgtgttcctatttaataaaaggtaatttagaatactacttgtcctttgcagtagtttagtaatgggcattaagctgtgtcctcgaaggatgtacctattactaggtgcattttagaatgaaatattgatattttattagcatataattgtggccatatatctcagattttctgaggcagatctaattttagataattctgttggtagaccatgtgatccttctttttggttttggaaatataatcattgttaatgttttccctccaaatagaatactgttttatccatacaaatcataacagcatctatcccatgctagggttggaaactgatattggtattacttgtgttttttcttagtgtattttatttcccagtttcatcttcttttaaaaatgaaaatatggtgccttccctccctccaggaagactggcaaatatttccttttatttactgctgctgtggagtgatgagatatgcactttactctttaagattcagcaaaaagcttttcacttctcagtatatccagaatacatcatatctgggacttaggaaaatttgccaagcaatctttgtttttatagatactaatgttgactctctccagcgttcaatgttataaatagaacaagtcaagctagtgtttatctcctccccctccccaaaactgtggcacagcatataaaaatgtacctcaataatgttctattaaaaatgggacaggggccttatgttttcataatttcccaacaatgtgccgccatatttttgcctcaaggtaaaggttttaacagatgaaaaagtacttcccaattcccccgtgctattcctaacctataatgcccaaatgttttgtgcaatgtgtagtgtgtgtgtataaatacatatattcttgaaatagacataccatcagagacatcattcacaagtaactgatgtattggcatctcattcatatttctgatgtgtgaggtatatggtactaattaccttttccttgatgtttgccaaatttgaataaaggcattggtacgaaattacagaatgtaaagaaaatgtttttggcttgaaaaattaacatattttatgacgtaccacagtatactctgcccaaaccagcaccctatctatctttcctgttctttacatccctgttccccatccctacttcctcatttttggtataacacagttcttttgtagcatcattataattgcagttctatggcaattggacagttatagcatggaaacagactggtataaatagtacagtagtcaccagtgtgccacatttgcattagtaatgcaaaatatacattttataaaggacaaactttgtgttatgttttattttcattacattgtataatattgtaagactattgtatgtcctaatttgcattataaatgtttttttcctacgtaaaggcataaatatagcaactttgtataaaggtagcttattagatttttaattttttcttttataaaaaattgtccaacagtgggactaccattgccaaattgtatatgaaatatgaattttacccccatggttaatttcttttataaacattccatatttctctaataaaaagacataagtgatactgtactatgcatacattgtatcttaatgctgtttcagatcagcattttaaattttggtttgcatttttaatattggcaaaacgtaaccactgttaattaaaataaaaccttgttgtatatgtaacaacataattttccctctatcccttcccaccctttgttctctatttctccctatcagtgccaacttcatacattttgtagcatggcaataaaatataacttttacactgaggccgagtgtggctttttggaggaagtggggatgggacgattgccctctagttgtcctttgcatatgactgttttttgccatataagccatgtcatcaggcatgaaaagttttctcatatatgatgtaaacttgcttttaaggacaagtgtgaatgtgctttttaagcttaatttttgtcatgacaactaattttttttatctttggagaagtcagagttctttacaatcaacgtttattaactggagtacttagaataagctagtaattgaatttagttcaagggctaagcaacacatttttaaatccttatttattgtagagtattagtatactgtcctacaaattatgtaaaatatggtttaatattagatgactttggattttgcaatgccttactgttgtcattctagcataaatatccataacgaggtactcaagttgatactggaagctgagctgatcatacactgacctgaagcattcatgaaaagctgctttattgaataaagtctgattggagttcttttcatgctcactttccccttattgctgaaagtagattgcaataaaaccccaataaaacgtttggtcggatatctactt

SEQ ID NO: 181322 - DNA, 1597 bp, Homo Sapiens
  misc_feature (527)..(585): n is a, c, g, or t
gccaactttgtacaaaaaagttggtacatgttccgcatggataacgaccatgtgattgacgcgacgctcacaggagggcccgcaaggtatatcaaccattcgtgtgcacctaattgtgtggctgaagtggtgacttttgagagaggacacaaaattatcatcagctccagtcggagaatccagaaaggagaagagctctgctatgactataagtttgactttgaagatgaccagcacaagattccgtgtcactgtggagctgtgaactgccggaagtggatgaactgaaatgcattccttgctagctcagcgggcggcttgtccctaggaagaggcgattcaacacaccattggaattttgcagacagaaagagatttttgttttctgttttatgactttttgaaaaagcttctgggagttctgatttcctcagtcctttaggttaaagcagcgccaggaggaagctgacagaagcagcgttcctgaagtggccgaggttaaacggaatcacagaatggtccagcannnnnnnnnnnnnnnnnnnnnnnnnnnnnnnnnnnnnnnnnnnnnnnnnnnnnnnnnnncccttgtgggtgggtttcattgttttggttttctagtctcactaaggagaaacttttactggggcaaagagccgatggctgccctgccccgggcaggggccttcctatgaatgtaagactgaaatcaccagcgagggggacagagagtgctggccacggccttattaaaaaggggcaggccctctaacttcaaaatgtttttaaataaagtagacaccactgaacaaggaatgtactgaaatgacttccttagggatagagctaagggataataacttgcactaaatacatttaaatacttgattccatgagtcagtttattgtagtttttgatttctgtaaaataagagaaacttttgtatttattattgaataagtgaatgaagctatttttaaataaagttagaagaaagccaagctgctgctgttacctgcagaactaacaaaccctgttactttgtacagatatgtaaatattttgagaaaaaatacagtataaaaatagttattgaccaaatgctaccaggctctgcagcagctcgggggcttataaaatgttcatagggatgttacaatataattttgtgttataaaatatgccattataattatgtaataaccaaaatttcaacctagagtgttgggggttttttggaaaccgcagtctattagtactcaatggttttatacaccttacttctgacagagcggggcgtatgctacgactacaacttttatagctgttttggtaatttaaactaattttttcatattatattgttgcatccctacttcttcagtcaggtttttttgtgcttacaatttgtgataactgtgaataactgcttaaaaatacacccaaatggaggctgaattttttcttcagcaaaagtagttttgattagaactttgtttcagccacagagaatcatgtaaacgtaataggatcatgtagcagaaacttaaatctaaccctttagccttctatttaacacaaaaatttgaaaaagtt

SEQ ID NO: 181323 - DNA, 1464 bp, Homo Sapiens
  misc_feature (355)..(486): n is a, c, g, or t
  misc_feature (640)..(764): n is a, c, g, or t
  misc_feature (767)..(1052): n is a, c, g, or t
ttggcttccactcctccaacctgattgtgctgacaagccactagctgagccatctaatatacagggtggcagggatgaagtcaccgttactgtccaacagcttttattttaagctggtgtgggctgggcatatcaaagacaggcaaagaaaaataacttggagagttgccattgaggatatatccacagtgagccaacagcacccacacaagcagccctcgtctgtataatgccctctactgggtcttgagggagattaaaaagaaagatctcttccatcctggggaacctgagatatgacagcagcacacaaatacaggcagatttatagttctaagcagagttccagtagctnnnnnnnnnnnnnnnnnnnnnnnnnnnnnnnnnnnnnnnnnnnnnnnnnnnnnnnnnnnnnnnnnnnnnnnnnnnnnnnnnnnnnnnnnnnnnnnnnnnnnnnnnnnnnnnnnnnnnnnnnnnnnnnnnnnncctctggtcaagagaattctttgtttctttctctattatttatttatttttaagagaactctttataaggtcaaagagcaaatgatttaaaagcagaaatgattaacctggaagttcaaaacattgtagcaagaatataaaattttagattggnnnnnnnnnnnnnnnnnnnnnnnnnnnnnnnnnnnnnnnnnnnnnnnnnnnnnnnnnnnnnnnnnnnnnnnnnnnnnnnnnnnnnnnnnnnnnnnnnnnnnnnnnnnnnnnnnnnnnnnnnnnnnttnnnnnnnnnnnnnnnnnnnnnnnnnnnnnnnnnnnnnnnnnnnnnnnnnnnnnnnnnnnnnnnnnnnnnnnnnnnnnnnnnnnnnnnnnnnnnnnnnnnnnnnnnnnnnnnnnnnnnnnnnnnnnnnnnnnnnnnnnnnnnnnnnnnnnnnnnnnnnnnnnnnnnnnnnnnnnnnnnnnnnnnnnnnnnnnnnnnnnnnnnnnnnnnnnnnnnnnnnnnnnnnnnnnnnnnnnnnnnnnnnnnnnnnnnnnnnnnnnnnnnnnnnnnnnnnnnnnnnnnnnnnnnngaaaaaactcaaacaccaaatacaaaagaaaaaggactggagtatccatttgatttggcagttagtaacctttttgagaccaatttcagtggatttgtagaggtgaaatctggcttatagaactaagtaatatggagaggttttgtggttgttttaggatgggaataattcaggcatatttattgaaagagtgaaaggaataagtaaaagctggagctcagtagagaatgataataaccaaaaagcacggttctgaagagaaaggaggtgaaatgagcacaggtggatgtggtttagttacatggtctacttctgcagacgtttgctgagcacttaccgtgtgccagccactctactaatggtggggttagtctacttgggaagccaactgagtgagaaagtggtctcaagt

SEQ ID NO: 181324 - DNA, 1346 bp, Homo Sapiens
ttggcatcagaggagtgcattttacatgcaattacataagttgtgcctttaatttgccccaactacttgtgttagtagttggtattgactaggttctgtgttaaaagacagttccacggactttattattacattactggtataggtgctttgttgtcaagtctaaaagattttttttagtttatgtcatgtgaaaattatatgtggtttttgacatattcttctagtagtcttccctctgtgggaaatcttaataataaccaattgtcatcttccagagacccttaaagcacttatgtgtttaaatgcaattaaatatgtaggaaaataaaaattacaaaatacttttaaaataataataatgctttagttctgcttatttcgacgttagattaactctctgtgaagttctgtacattagaatgacccataatatgccaagatcatttctctcttctggttctcttaaatattgattatcctttagggcaaagagagatcataaataaagatagttaaggggaatgtaaaagtgataaatattaacttgtaatctctagaggcctcatgtaatacatgatctggggtaatgctgttttaaactcaagccagtccatcttttacttttctttctgtttttaaaaggaaaagggaatttagttgtgatgattattcaagaatatatattaatattggtatttcttggaatttctggaaaacattctggcccgtctaccatttgcttctcagaaaaaaacattttatacaaattttcagttttaaagacagaatagtagacaatgaattccagaaatggatttttaaaacaaaccatttcagtgaaaggcactgaagatctggtaataaatctaggaaataaattttaacatatttacagtcgggtttttattttttaacaagagtgatagtgatgttgtatataaggacttgtatcttgcaccactgtattgagagctaatcccaccacagaggaaggcaaatttagtgtgcattcttgaaagtgcttagtactttgaggttggtccattgagccaactgagaagattcttctctaaaacatgaggatcttgtgtcggatcttgtagcctatttatgttgccttccttatcataacaaatttaatataatttgattaccaagtacaatttatttttctgagtactttaccaacattctccaattactcttggaaaatgattatactgggtggaaatgtattaagttttagcagtgtcacatgttgagcaaaacagttgaatctgaaacagaggaattttgattcacaaatgagtctgccagtgagaacatacttacctatagtcttt

SEQ ID NO: 181325 - DNA, 920 bp, Homo Sapiens
ttgggaaaaggtaatgagtgagatgttggcaaaaagggctgtgtccacaattgctcatcaaagctcatgtgttactcaccccatctcagctgctgagctccaaacactggtgcagtaaaataaaaatgaaaatgcctcctgcctcctactgcttcctcctacatacaccttaaggaaacaagatccagattttctaaacaattttcttcattttactttattttgattggcaaaatgtcataggaaatgacttgtcagtgtatcaagtttacatatgtatttccatgaccatacatagaatgttggcacccatagatttgaaatcagactttcttgctgtcatcattagtatttcataagcaggtatatcctttccaagtaaaattgttcagtctagatagttagataattttgatagattgttgggtttactctgctttgtatgataattcaaaatatctaattctaccccaattcattagggttaaaaatgagaggtcagtgattcattgggtctgggtggattccagcttcaagtcaaccgtgtatccctcacttgcccaatggctgtcaagagaaaagacccagtgagctttggtgaaacacaaaatcaagttgaccttggcctaacagtaagttaatatgattaccagggtatgaatgcattccagttcagcaggcttctaggatggcccacataatcctggttatttcaagtggaaaatcttaatattcccttagtgattgagctacaggtttcaggaagtccattattaactaccactgccttgaattgaaacctgatgatgttttcttcctttcaccatgccacggagctgcactgccatacctttcccagaccatcattcactctggtagagtttgtcacacgtgtcacaatttgggaaggcagtgtgcat

SEQ ID NO: 181326 - DNA, 1683 bp, Homo Sapiens
gagttcagataaatcacattgcaaatttttaaagatttatttgactgtgacaacctcctgtttaaaactgcacattcttacagctatttaccatataagataactcttaagaactggagatagtcagctcccctgggttaatttgaagcagaagagggcagttgttatactgccctgtcagttggatgcggagtcttactcaaaattcattctcagcattcttcttttatggtatcttctttggcacttagcagcgcatcaggtaggcatcttctatttttcttcattccttaatttcctttgtatccctcaaatggttatttatttggctggagtctgttttgttcattaagcaaacatgtctttgctttgaacatgtctttgatttgatggatacttaaattcctcatcaaacattttgttgctatgcataacgttttctttggccaactccagcaatttcccacattttgacatgcaatcatgttaactcccattttcttttgtaatccaacatcttctatttagataattactttaacaatcaatgacttaatattctaatcataaatttatacaaaaataaaattacctccaaaacattgctacctttcctaaacattcagtcttgccacagtttaataaaaggaaagaacattaaaaaggataagacactgtaatgattagatgctttttataagcctaaaggcattgtgattatttagacagaagagaagaaagtgaagtgaaaacctgatagttatgtagtctcatggtttgctgttgagaggctgaacaccagctgctttccttttctaggaagataataaagtgggctttggctacaacataaagatgttgggttagacagtttcactacagtaagaacaacgggatgagttgcccaggaaattgtgaaatactttctaatgatctttaaagatataatgaacactaattcatctggatttgtttaggtgtggtcctggttaaaggcaaagggaaggatcagataacttcatgttttttccatttaacatacccaatagattcttgattaggggaagggaaaatgagcaagatacagtccagtattctaaaaacaatcagccttaggggatcatttcaaaagcatctgttttggacttaagtctttgatacttaaccaaattgactacacagtgaaaaattctagtgcctgggttttatagggtagaagaaagacatgcagtcaagtggccaatacttcatgtgaagataagcaatgagatccttcttgctgtctttcttttgactgttctgggcaatatcaaattagtttcagtggcttgattctaggccaagattctggcaacagattgtagtcttaccttgttttcttcaatctcactggatctctctctctttttaccccccttaggctgagggtaaaaagctgggattggtaggctgggtccagaacactgacccggggcacagtgcaaggacaattgcaaggtcccatctccaaggtgcgtcatatgcacgaatggcttggaaacaagaggaagtcctaaaatcacacatcgacaaagcaacttcaacaatgaaaaagtcatcttggagtttggattactcagacttccaattgtaaaataatggcctgaatttaagttttctaagataaactcagtggtttggttt

SEQ ID NO: 181327 - DNA, 780 bp, Homo Sapiens
catccatgatttgagtgagcacaggaatgctatgaggcatacataccaattggccccattttacaggcgatcaaactgaggtcccaaggagatgtcacctgcctagatgactgcgctcggtcagtaatagaaagccgaaggtcagagccatcaggtttagtgccctccatgaggtccctcagacttctgggctctgtctggatgcaggcagactccagaggcgccttcccagatccttggagctggagacctgggaggtgtgtggccagggtgcagcctgtctgacccctgagatcaagctctgagccaccatgccctcctgcctcccattgtgcaaagaagaaagcagaggtccctggagaaggggcaggatttgccttgagtcacacaccagggcatgggttcagatgcccaattgaggcccccttcagacatactgggaaaggtcttccctgggtcccgctggggcagggtgagttgctggggctcatctagcatttgtctggcattagtgttgagtgggaaaaggccagggctgctgtctccatcctgctgtcctccctttccaccagggccatgtggaagagctgtggggcctggccacacaccccagtcgggcccagtttgtgacctgcgggcaggataagctggtgcatctatggagctcagattcccaccagcccctgtggagcaggatcatcgaggaccctgcccgctcagccggcttccaccccagtggctctgtcctggctgtgggtacagtgactggcagatggctgc

SEQ ID NO: 181328 - DNA, 929 bp, Homo Sapiens
aatacggggccaggcgcggtggcatatggggcagcaccactttgggcaaactttaaaccagagagtgcatgttttagcaggccactgaattaaaatttgtggctcctggatttcaaaggcggttaatgtagtaatttgctgggagttatcaaaggcagagaaaatattgctccatggtaatatcctagctatggaaaataattagcactttcaggcagcaaggattagaaaagcaaattttctctgaattctctgccaaattcagctaaaatttcaggatacagcacaggaattccaaggcagacaaccgcacgaggttctaaggtttcacattctcaaaattcatcattctagaatgttctagggtgatatcattgacctttgcgggcaacccttttctgcacagtcagaccagtactggtagttgagagttgtgggtaaacttggctctcataaaaaagaaaggcattgtatttcaagtctttacagtagatgtttttgtgggacttatcaaaggagagaaggaacctctttgagttggtgagccatcaacaaatctgagtgccatttgtgtgtttcactggccattctgaacaagtagaaaggaaactaggatggaagttaggaaattatgttccatcctggctctttcactaaaacccaatttatgggtatataagatgcaatttcccctatgtgaaagacaattcaaaaattgctccatatcatacgtgtccataccacaaatggaaagcctagtactaaagttacaaaataatgatgtcacctctagtggtgaaataaggaaacaaaatataacagcaaaaataagagtttcccgtcataatggtagtttccttaacaaaaataaccacagggcaactgatcagaaggaaagtattactctaaaattttagatttaaatccaa

SEQ ID NO: 181329 - DNA, 874 bp, Homo Sapiens
ttggcaggttgggacccctcccacttcccactgggaaacacacccaaaaccccagcccagccagtcgcagcccaggtcaggcgcagaggaggtgcagcaaatccaggggaggctcggccaggaggaaggtgccactggggcagggatccccagtcatagcaacagtgacaccagcagctggtggctggcctggccccacatctagcagcatagcgtggccacggtgtggacagctcagccagccatgggcgttgtgtgtcctgtgggctcaacaaacacgtgagctgttgccagcaaagctgactgagtgacccgcaccaagcagcctgcttcctgtgaggaaagagccggcccgccagtcgagcccaggccacagaacaggtgacctgggagagggaaggttccctcgcttctgagccggctgaaagagggactgagtgggacagaggggattctgtgcggagaccacacagcactggcatcttgctctggcttttctctccaggcagccagtctcacaggaagtaaggatgtccccgggtgtccccatcacgttgccggaggaccagccagcttcccgctctcagctggcagcagctgccggtgatggatgtgaagggacagttgtccacaagactctgggagctgaggggaggccggctctccaggcagcaccagagcaaggccatcgcagccccgccagccgggtcactttctcccagggcagagccaccaaggagggctggggagagcctggcattgccctcctggagaggggaatttcctgctcacccttcacacacagaggagaggggtggcttttgcccgcagagatcttctggccccagaaacagcaggtgctggatttgcagcc

SEQ ID NO: 181330 - DNA, 1319 bp, Homo Sapiens
  misc_feature (986)..(1012): n is a, c, g, or t
cccaaagtcccagtggtttgattcaagatttttcaactttatgatgatgcaaaagcaatatgcacttgggagaaactgtgcctcaagtacccatacaaccattctctttttcattttcggtattcaataaactacatgagatattcaatacttcattataggctttgtgttagacagctttacccaactgtaggctaatgtgttctcagcacgtttaagggaggctcagctaagctatgacccatgctacatacaacaggagtgaaccttgaggactttatgctaagtgaaataagccagtcacaaaatgaccataaataccgtatgattccacctacatgaggtccggttaggttcggcaggttaggtatattaaatgcattctcaacttaggatatcctattttcagcttccaatgggtttatggggatccaacctcatcctaagtcaaggagcatctgtgtcctcacctaccaactagggacagtgagcttgccctttctaccgcacatggttgctgggaggaccagacgtttcctgtgtgccagagcagcgcttctgccagtagcaccaacctgccagagctcaaagctccactcatgctcccactgggggcggaacatctttgactgcccagaggagtgattatgtcatggtcgtggtcttcagacaggagcgggtaaaaaaggggtcttaggggttgacaggtaggcagcatctggacatcttcctaaggaaaacagcagggaaatggacacagtcctctcagaataaatgtgaacttctaaccatttcacacccgttaaaatggctattaacaaaacacagaaagtaacaagtgtcagtgaggatgtggagaaagtggagaccttgtggacggtcggtgaaaatgtaaaatgggtgcagctgcggtggaaatggtaaggtggttcctaaaaaaatgatgggaattaccatctggcctagtaattgtactgggtatatgnnnnnnnnnnnnnnnnnnnnnnnnnnntgaaagcagaatcttgaagagctatctgcacacccatgttcacagcagcataattcacaacagccaaaaggtggagacgagccaagtgcccattgatggatgaaggcacaaacaaaatgtggtccacccacacaatggagtatcagcctaaaaaggaaggaaattctgacccatgctacaatatggatgaaccctgaggccattatgctaagtgaaataagccagtcacgatgtgactataaataccgcatgattccacctacatgggtccctatagtaggcacactcagagacagaaaggagccaa

SEQ ID NO: 181331 - DNA, 811 bp, Homo Sapiens
  misc_feature (330)..(340): n is a, c, g, or t
  misc_feature (759)..(767): n is a, c, g, or t
actttgtacaaaaaagttgggctataaatagctcaaaataaaaagattattcagactctgaaaaaacaaaaagaagtagcaatatttcaaacaacaaaagccatacaaattatttcagtcttccattagttcatttcagtccatgtaatcaactcctgctctacttcatattcatctttatgaacacatcagcctttcaattagtgccttggaagttttctgtctaatccaatggcacactctccaaagttaccagaaacctgcattcaagagttcttttcatgaactccaaagaagtaagccttggactgtagctgattataagtcacnnnnnnnnnnngagaaggatcaaagcaaaacatcaattatggatgacaaaagtcttaagacagccataaagacacagttgacaaatgtggctatttctgtggcttacaacaatttaacataatcattacaacatatattaagacatatcagaattttagaactctcatacaatcctggaacacatattaacaacaaatctctatcagtataacccaaaggaagctaaacaccacctcacacttgacaatgtttcctgtataattcaaacattacaaataagcctaatataagcctaatatgtcactcttgaacttcaggaagcctaatatccaaaaagttagtttaaggtcaaaagtttttgaattaacttttttccattagtatggtcatatctttcttactaatttgtaagttatgtaatttatcaannnnnnnnngttgttctgtttcccaacctctatgtcagataaagaatcaccca

SEQ ID NO: 181332 - DNA, 1089 bp, Homo Sapiens
ttggcaaatataatcattaataatgggctggccaagggagggagccatgaaacccaacttagtgccctttaggtgccccagctgttgtcatattttagaggcccagtcagctagttttcaggtggtgtcccttactaatcctgattggttgacatcaaaacagcattcttcttctaggaaaatacataagccacctgtttcagcagttaggagatctagtccccttcgattttgcaaagcgaccactgccaaggagcctatccgaatttgtaaggtgacaatactttgagcaatgttatccaggctttccataaaatccttggacaagcgttggtaataggatagggaagttgcaatcccgctaactcccattcctacctctgctgttattcctagccgttgtgtctggtggttgcagttaaaggtataatgagggattggttgttgggagctatattaatttagggacatacaatatttctgtctccagtctaccacttccaccaaagacaaatcacagcagaaccgacctaacttcaaaataaactgcagtcccatatactgggcctgattacccacacaaagtgcaacaagaatcattgtccatatagactctcctagattggctttgctagaacatttcacaaggccatttcagtcaaagtcctgagaaagtaaccggtttcaattgtgccctattacaaaagaaaacgtggttattaactttatacagacaaatgccatgaattaagaatattcataaatagtttacaaattctggagaaattagaatactcaatacacttaaagtgtatttcaaggctataaatagctcaaaataaaaagattattcagactctgaaaaaacaaaaagaagtagcaatatttcaaacaacaaaagccatacaaattatttcagtcttccattagttcatttcagtccatgtaatcaactcctgctctacttcatattcatctttatgaacacatcagcctttcaattagtgccttggaagttttctgtctaatccaatggcacactctccaaagttaccagaaacctgcattcaagagttcttttcatgaact

SEQ ID NO: 181333 - DNA, 1112 bp, Homo Sapiens
ttgggttatgttgagggtcacaaatccagagccacatccctcttcttgagttcgtttgttacgtggtttaatgcattactgcaggacagcccttatgctatatttcctgggatagcctatattttgaatgttttgcctgccagaaaccaatggttttaaaaaatcattgagtggtcctacagattcaaagcgagcatccaaacatccctcacatggcctcttacaatgacataaaactgaagcccacttttttatttggaaaactcaatccctttggacaagccactataatttttcattagctacttgaggttgcctgcaaattcagctagctttccagcctgctatcaccaaagccataaacatcttttttaaaaataggttacaggtgtgagccactggacctggccaaatactgggttttcagtgctcactgccactaataaaaatctgaaattctttcattatgcaatttctaagtgcctggtgagggccaagctcagttctaggctctgaagattaagagagaaacaaggctctgtctgctcctgttgtctctgtgagcatctttgacagagtgctcagattgttgggatatagtgcatcggactggcagcctgaatttgtggagaccgcagtcagtaactttgtgatatatggaatatttagaggacagtaacccatttccctacgccctacctgatcacatcgtgccctgctgggccataccccaaacagcccaccttcctctaggcctggccatggccctgtgcctgccacattgaggattaagtcaggatatcttgagccctctcaaatccctgtttattcaggcctctgccacatatagagccagccttctgtccccaccacttccactaccatggagcccacttagtaaaacgctctctgggcccagcttcgccagaaaagacaccaggggagcaaggctcaaaccaggggcagctaaatctgatcttgtggaccagtctctagtaagggctttcagcgtggctgtctgtccattgctttccaataggatgcagcaatgattggtacatgggtattaagatcggtagtaaggggctagtccaagtttagcaatagccaaa

SEQ ID NO: 181334 - DNA, 909 bp, Homo Sapiens
tgtacaaaaaagttgggtaattttgtgttgcaagctgtcgagagataaaaatgattttaaatctgtgtactgatgattctttcggtgttaagaaacacagggttgtgtacttccctttttatgggcttatggattctatttatattaagacctgtttataattgttttctgccaaagggaattgtctaacttcagatttctacattgggttcatacttactgttttatatcagaaataaaaaaatagcttctgctttttcatatgaaatcttggtacatcagaaagaattcctgaaaatttataataaaatgaattttattaatgcagaaaaataccccagggtgttaaaatatatgaagtgtgggatatattcttatagtttgtaaaatgtagtcaaccaatactgtcttctaatttggtaatttatttataaaattacttaaacattaggtaattatatttgttaggatttgaaattatttgtagttaaattgtcatgctgtttgaaataattgatacttgtctacgtaatacattttactgtatgttttgaagatggttataatttcactttcaaaatttaaaaaatcaattttaaatgttttaaaaacatatagcttaggattttttttaaaaaggttttcttaataaaaacataaatttaaaagcccctgagttctaggagagggcttattgaattgctataagaaagctggagttactttgataagtaataaattataaatagcactgatctataatgctttatttctatccgaaagtactttttcttctttcatcatcagttttacccaattaataaatggaaatactcattttaagggatttgatttttgtttggttaattttctttcaaaattaaaagtatatttccaaaagttttcccc

SEQ ID NO: 181335 - DNA, 676 bp, Homo Sapiens
  misc_feature (366)..(428): n is a, c, g, or t
acaaaaaagttggcagaaataaaaaaatagcttctgctttttcatatgaaatcttggtacatcagaaagaattcctgaaaatttataatagaatgaattttattaatgcagaaaaataccccagggtgttaaaatatatgaagtgtgggatatattcttatagtttgtaaaatgtagtcaaccaatactgtcttctaatttggtaatttatttataaaattacttaaacattaggtaattatatttgttaggatttgaaattatttgtagttaaattgtcatgctgtttgaaataattgatacttgtctacgtaatacattttactgtatgttttgaagatggttataatttcactttcaaaattnnnnnnnnnnnnnnnnnnnnnnnnnnnnnnnnnnnnnnnnnnnnnnnnnnnnnnnnnnnnnnncttagtaaaaacataaatttaaaagcccctgagttctaggagagggcttattgaattgctataagaaagctggagttactttgataagtaataaattataaatagcactgatctataatgctttatttctatcggaaggtactttttcttctttcatcatcagttttagccagttagtaaatgggaatactcagttttaggggatttgatttttgtttggtttaatttttctttcaaaaaattaaaaa

SEQ ID NO: 181336 - DNA, 1966 bp, Homo Sapiens
  misc_feature (279)..(287): n is a, c, g, or t
  misc_feature (984)..(1148): n is a, c, g, or t
gatcaacagtataaacccatataaaagagagtctgcttttcatttgtacaaatactgctttcatcattgcaaaactttcaaggttaaaacgtaccatatgttgaagctataaagctattgcttgaatgtttctaaaacgaagttattgctgtctgttgttaatcggttacattgtcacctctaataccagtcatcaaatccataggatctcttaatttccaagagattgtattgtacagcaagattatttttgtggccaaatcaggtcataggattccnnnnnnnnnaaagataagtaaatgcatccagaaatgtatgcacagatttaagttttccccatagttttatctgctaggtgatagggtggagcttcttagtgcttctgctgggaattcagataggacagacttgcagcctcagaggacacactgcaggtagtgcagagagacatggaaggaaaacacactgcctgctacatagtttttatcccaggtataatttgtgaggaatgtataacaaatgtttcttaaagcatgaatcctcttcttgaattcttgtttttatgaaagccatccaactacttactcaatcctcttgaaatctgccttttgtaatgtaactgataggccagcgttttctttcactgtgggaaataaaggctacttggttgctttagggagggcaacaatgtcagctgcataagcagcaagaatattatattttattactagtccacccttaataaagagagaaaccttaggaaatggaaagaggtgtctgttttatatttcctttgcttttcaaccattgtttagacactctcccttctagtgcttggagaaccttcatggaaactctgttcaggttcttgactctcagcgacagatgtggaggtctttgtgtcttagctctctaggcctgagaatcacatacacctgcagaatttgcctccaagtccatgtccttgtggctaatccctaggcnnnnnnnnnnnnnnnnnnnnnnnnnnnnnnnnnnnnnnnnnnnnnnnnnnnnnnnnnnnnnnnnnnnnnnnnnnnnnnnnnnnnnnnnnnnnnnnnnnnnnnnnnnnnnnnnnnnnnnnnnnnnnnnnnnnnnnnnnnnnnnnnnnnnnnnnnnnnnnnnnnnnnataacttctctagggtggctgggcccaggcttggtaagactgttggtgaactaaccaaagtgtgctgaacattattaggctctccagacatgtctagtttatactggtaaatgcatatcaattgtaaatataaaaataaaatttgcattgaagtcacattatatatataaaccaacaaagtgctatgttattgcttttcttacatgtacagggttacactggcagatgatgagagtatggcatgcaactggatttttctagtagtaacaacagtgagccctttccattaacactgccccaacagaacctgcctcagaccaagctaaatgtgctttccatcatcttttaaaatttcctaaatataaaaacgatgcttctcttcttcaccatgacaatgacctagcttagctccccaatgaggttgtgcctttttataagagagagaaagggctttcctcttgcctcaacttaacccttttaaacaaagatttcagtttcaaattttgattctattgcagtctctctaaagtaaactgtgtttgttttagtagaaaaatgagtttctaaaaatatattgtacaaagttcagtgctacataaagagaactatatcccgcaacaaagttacaaaaatagatttacatttaaaaatcctgtctgtgtcttcaatagtacaaagctgtacccctggtatggcaggtgtggctggtgaaagaggcaaggatttctgttctgtaaggttttacagcccccaggcaaggaaatgtgagcagatcattatgttgcaataaaagtgtgtgcttatcacaagaaagccaa

SEQ ID NO: 181337 - DNA, 1179 bp, Homo Sapiens
ttggccaaacatttcccatgtagactattttgaccatgctgactctactgacactgtggttactgaattcactttatctctagaaattaattcttactaatggatgtctgtcactgtaagatccttctctcctctgaaataaggagaacattttaacttcagtagtttaaactagtgtcctaaactatagcattcaatgagataatatgctaaagtaatacacaaaccaaaaatcccagtggctaacacaaaaagtttttcttattcattttacatatccagggtaagtcagtaatagacgcagacacacccagagaccaaggatgagttgtgatctgtctgcacacatagttcacaatgcctgagtgagttgtgctttggcctttaaacttccactcatgtttaattaataaagatttggctcaaatgccatttgatgatgagtttcatgacgatgatcaactttaaaagaacttggaagtacaatcctcaagcgtttctggaaatagcagaactacaatatttgagaaaaatattttttaatgtataaaaaattggcagggtaggctagcaagcaagagacctagagaaaagttgatgttacagtctcaagtcgaaaggcaatctgcaggcagaattatttccttgagggatctcagtcttttaatataatcaattgactggatgagccctacaatattttggaaaataatctgcttttctcagaaattactgattttcatgttaatctcatctaacaatactttcagagcaacatctatactggtatttgaatatataactcttttatcttttaaaatatcaaataatacagttatatatatatacacacatgtatatatgtcacctaaattgtagatatcagaaatcagaatgctgtgatatgaatatttagtatattttaatcatgataaattatacatccttctaccttatgataatggattttaagatctatgctgttaaactctatatttatcctttaattcatatcttgcttattttacatttatctgagaatacattgggtctactaaatctttactatcattcacaagtcttacatcttaagataacttttcaataaaataaaaattcttcattgcacctagaaaggagcagggttttgaaagcgatcaatgattactctgataccta

SEQ ID NO: 181338 - DNA, 1650 bp, Homo Sapiens
  misc_feature (1027)..(1036): n is a, c, g, or t
ttgggttattatcttcatttttttgctgagggaaggaataaagtcacagccagcttacagaggctgccggaggtcacacatcaccagtacactgaaacacgtggtctgattacaggatccatgatctcctgtacagatcatagtgatattgacctgagaggaaagagcctaggacttacaatcagaaatctgggttcacatttcaactccgttccatgccaaattacattaaaactgggcctcacctttcccacctgtgaaagaggaataatactaggacttgccctcccaaccttagagattgctgtgaggataaaagcctatatgaatgtgctttataaactataaacaccatacaaatgttgttataagtctgccatttgaatacatcttagtctttttttcctatgtgaaataaaacattttaagacaagcaatgaaattcttgaaactataacaggtttttaagggtgttgatccccaaagccgtcttcactattttgctccctctctgactcgctctgtctctgcctagcagcgctagtcttttctacgtgtttgatctgttgttcctgtgtttaggcccatccctactacacagcggaagtcagctattttttctctttcctttgctctgctgagcaagattaaactcttttcacctggacttttcctagattactcaggctgggtggaaatggggtagctgtgaggctgggatgttactgtacaattcaaatttatgatctgaacttaactagatcttgctgaagattgacctggctagcacagttttgaggcacctatctttcagtcccttctgtcctcttggcctggccactggccacatgttagtagcttacttctaaggatggaatgccatgcatctcctacaaggttgtctctatgcttcacacaaagtaaaagaatggaggcaactttgaatgctgctcattttcactcaggcaatccctttacaatattgtgcttagtaaactccccccactctttttttcccttagcttgnnnnnnnnnnctaataaaagtctatatcaatttgatgtattagttagggttctctggagaaacagaaccagtaggatcaattgattggtcaatcaatcaatcaagacaaaaagagattcatctggaaggagttgattcatgccattgcggtcattggctagtctgaaatctgtaaggcaggctggctgactggaagctcaggcgggatttctctgctgcagtctcaaggcagaattccgtcctcttggggaaacctcagtctttgctcttaaagctttcaattgattggatgaggcctacacacattatggagaataatctgttttacttaaagtctactgattgtaaacattaattatatttaaaaagtactttcacagcaacatttagactagtgtttgaccaacaactgggcaccacggtcaagccaagttggcatatagaattagccagcaaacttggtattcacaatctgtcattatagtcttatctataaacctaaagtttagagaaacgctggtcattctgaacaattccctgtgaatgcagagatcaaggagcctccccttaactggggtaggcagtgtgaaatacctgcagtgtgcttgaccttactgttcaccc

SEQ ID NO: 181339 - DNA, 1758 bp, Homo Sapiens
  misc_feature (602)..(612): n is a, c, g, or t
ttgggtatccatcaaagcggccatcaaagcggcgaacagggatttagcaacacctgtgatgcagccctgtactgccctggattctcacaaggagctgaacacttcctcgaaaagagccctgggagcgcacctggaggctgagcccaagagtcagagaagcgctgtgcaaaagcccccgtccacaggctctgctccggccatcgagtcggttgactaagatgaggtgtgatcactgtattgagagatatattttgtgtataactttctctgttagtagttaactattggttttgtggtgaaaattttcttactttttctaccatatctgtattttcttagaactactggacttatgtggtacaggaggctgcttagcagttttgaatagtttaatctataaattttcctcagctgtgttgcacatcagcctcgttctccctccactggaatgcatgtgttcattgccttgtcctttctctccctgctccttgcacattatcatcctaatgaaaatttcactgacagggccgaccattacaagggaactttgttctgacgatggttccttgatgtgaaaacaatattaatttaaacgtcttagnnnnnnnnnnnataatattattcagaaaaacaaaataccaaggcgattagttttgtctaataacccatttaaatgccaagtaaaaataaaactcctagtgttgggtcagaagcatatttgattgaaattagctttttgaaaacatttatatctcgggacaaattgagatggccacatgcctagaatcctaagtttcggcagaatatgtatataaagatgtcacttgtggacaaaatagtacatagaggcaaatcactagacaaataagcttagtgtttacgtgactgaacagtcatcctgctttggtttcaggtgtgggatttggaccatgaggggctcccgtagaggatggcggtttgtgtttgattctgatttgggatttcagtacatattctccacttcccatagaaggccacttattctttgaaaactggtgttcatgtttgccgttcaatgaagtcccttgtcaaagacaaggacggtcaattcacgtgtcactttcactaggcagaagtttctccaataccttctggctacttgaaagttactacaaaaattccaccagcaaagtactccaggtttttcaaaagggaattttcattatggatcagtaccaaccgaaattgattttcatttccagaacaaacactggcaccaacatttttactttgggaagacttggcagagtgttagtcatgatctgttacttacgtgttcagtctgttttctcacccccttcttagttaccatctcttttttaagaagaaaaaagaaaagccacagtattatcaaggtctctacacttggactgggggaaaatttgaaattaagcacataacttttgaattagttctttgtttcaatgttgaatgtggcgcagttatgcagatgattaatcaggctgcactgatggaagttttgactttgtccctggtataatttgcattgaaatgctttatgaaataaaaggttctactagaactgatgttagcacattccactgagcaaaactatcagactgacacttgttaaattgcttactggactgaataaactctgttttgtccagttaaaagggttttctctttgttacaagtgttatttgtaaagtcctgtcacattcatggtcgaaactgggttgaaagaattgaaaattg

SEQ ID NO: 181340 - DNA, 1199 bp, Homo Sapiens
gtaaagctaaaataatcacatgatacttattctttggaggatttaaaatgtgctaaatggaggactaaagagttaccttataggagaatcatggggaacagagaaactgctttttgaagatgatgtggaaggtcagggtgggttacagggcattcaacctggaagagctgaatagctttacattgagaattactttgtatgttaaatcttctggccatcattatccattattggatattttaacaattttatagttattcttaatttttctcatatgaaactgtaatggctgtactagaagctgccattactgttccaaaaagtaaaggggattttctctacaaaaggaaagaaaatggcacattcacatgtaggtaagtagcttctggaaacatcctcactgcacagaaatggttctcagcatggggctcccaaactttcttagagtgtcatttgttttagtatcagagttttcaaataggtttaaaagcagtagatgtcaataggaactttaaggtgagtcaagagaattttgtaattatagataagttgattttctgtggctaacttccccttctaattagaacaagacattgggtgggaggtcctctgctggacttaggctggtggggttgctctgggctgcagccctggagaaggttgggctttgggcatcccttgggtgggccttgtagggatagccacacactgcagcagtcaccactttggctgatctaaagtagcaatggaagtagtgatttgactgtcaaactggagatgcatcggcctgtggtttgacctgggaaaggggcttgtgtctgggtgatagggaaaggtaaacagatgtattagccactggctttgtgtgggcagctgtgttgaatcagcctgctgctgagtcacagggagtaactgcagctgcctagggctggcttctagcatggagaggagaggaaaaggggtcctgcaatgtcccccagcagcctgtcattgtgtgtgaaactcctagcctgagagccccacctctggtcagcactagtgttgggagacttctgggagggattgtgactttcagctgggtaactggtgtctggctgaggccatcttgagcgcagtgaggaaggatctccagcctgagtgtgccgtgggccccccgaatacataggggagccctgcaaagcaggtttgaaatgagccaa

SEQ ID NO: 181341 - DNA, 1085 bp, Homo Sapiens
  misc_feature (336)..(353): n is a, c, g, or t
  misc_feature (376)..(434): n is a, c, g, or t
  misc_feature (494)..(615): n is a, c, g, or t
ttggcctgtatgacatatgatttaacatatagttaatttcattaaaataaccatggattttattagttgaaaaaattggtctatatgtaagtctctgtgtctcgactacataatactcttaagaatttcctttttagttaatattagtttgctacaatttgagtcttaatgatgttccatactatgttttgtgtgttatttaattctcagaataaccttttaaagtcagtaccattgtccccattttacagatgaaaaaggcttaaagaggttaagcttgtctgagatcacttgaaagtaagcatgtcttgaagacgtgctagatagcacgagggnnnnnnnnnnnnnnnnnnggagacagtttcgctcttatcannnnnnnnnnnnnnnnnnnnnnnnnnnnnnnnnnnnnnnnnnnnnnnnnnnnnnnnnnnaggcaattctcatgcctcatcatccagagtggctgggattacaggtacatgccaccatgnnnnnnnnnnnnnnnnnnnnnnnnnnnnnnnnnnnnnnnnnnnnnnnnnnnnnnnnnnnnnnnnnnnnnnnnnnnnnnnnnnnnnnnnnnnnnnnnnnnnnnnnnnnnnnnnnnnnnnnnnnatgagccagtgggcctgaccagctcaggttaataataagcactttaataattgctagatttgtaaaaagaaacatttggaagacaacaccttaaaatcgaggaaactggattaacttttcctgggtgagttgaggtgctgctgtgcattttgcttttcttggttctgtggtcaccacttatacttgctattagtcacctatattaatctgatcaagtttacattgttttatctcctaactgtcaaaaactttgttgttgttgcctccattggcaataatctaagcaaaatgcctttccactgtcctaaagtcaatttttgttactgtacagaggaggaagaaggtgggaaaggtgaaaagaggaagagagaaacagatgatgaaggagaagatgattaagaccccagatgacctgcagaaacagaactgttcagtattggttggactgctcatggattttgtagctgttt

SEQ ID NO: 181342 - DNA, 401 bp, Homo Sapiens
  misc_feature (114)..(138): n is a, c, g, or t
tggggaggaaggggaggggggctctgggcaccggctggggacagaggaaaaggcaccgaaccctgctctcgggctctctccccccagcccgctccggacactgcgctccaaccnnnnnnnnnnnnnnnnnnnnnnnnntgaacaaaatggccgccgccaccagccaggcaggaaacagggcagagcgcaggcgcgacccgccaggtcaccgctcaggccagccgcgacagcctgcaagggggacgaccgaggggagagaaaaaagggccgccgaggaaaccctgggacccgctcacgacggatcacgtcgtcgctgtgggcctctggccggccgaagcccagccagctccgggagagatcgggcaaaaagagaaacgtcgtgaagccgaagtctctgccaa

SEQ ID NO: 181343 - DNA, 446 bp, Homo Sapiens
  misc_feature (321)..(345): n is a, c, g, or t
ttgggttccagaagtcctctgcagaagtgcttccctctctcatttccaggaccacaattcccagagacttcggcttcacgacgtttctctttttgcccgatctctcccggagctggctgggcttcggccggccagaggcccacagcgacgacgtgatccgtcgtgagcgggtcccagggtttcctcggcggcccttttttctctcccctcggtcgtcccccttgcaggctgtcgcggctggcctgagcggtgacctggcgggtcgcgcctgcgctctgccctgtttcctgcctggctggtggcggcggccattttgttcannnnnnnnnnnnnnnnnnnnnnnnnggttggagcgcagtgtccggagcgggctggggggagagagcccgagagcagggttcggtgccttttcctctgtccccagccggtgcccagagcccccctcc

SEQ ID NO: 181344 - DNA, 924 bp, Homo Sapiens
tgtacaaaaagttggggctgattcaaaagttaatttagattaacagaatcttcagagggctttggacactgaacataaacaggcactagaaaacagaagaatgccagtccagtccaaccaaaaaggctggcttgggaagtcacactaaagtggtccttttgaaatacaaaatatcctagagaatgccaagattcaaaagagacttttgaagacaaagtattcccaataatccatccccaaatcataatgcctctacttcctttcttgtccttgtaagtaaccttttaataaacaaaggaaaaccgttagacattttactcactgagatactgccataagccattaggatggggttgctgggaagtggaacctatgaagaaattattaaatcaagtcattaaaaaaaactgagacttaggtagcacttgttatagacagagtggtaactgtattttataattttgaaaagggaaaaaagagaccctaaaaaactgacagagtgtaaaagaattatcaaacctgttagtttctatagtactcatgaatgagcttggacaatgtattttatctagaaatctgaaatggttaccctgcctcccaaaccaacatagaacgtgggtttctactcaagacaataatcacctcaatctgtaatttcctttccttcgctttcattaagaccaagttcccttcttcccacacttcctcaatttcttctaatatagtgagttggaaagattctattccatttattgcatatcctgatcttagttaataaatcccaaaacaatggtttttctccttgggaattccctttattgatactgtaacttactgtactctcttattacctctttccctgcagctttacaaatggctttgtgttccttcatttttgcagtttcttctcggtacaactcaata

SEQ ID NO: 181345 - DNA, 1178 bp, Homo Sapiens
actttgtacaaaaaagttggttctcttttagataggtttgttaccaagttcttccggaagcaagaacagtgagttgcagtctggctacttacttcattagttttcagatggtttatttccttgattttgcctctttccccggcctttataacccttcctcccccatctccccagacataatgtataccttctgtggaaagctgagtcagtccttggaagcaccagggtagaatatgccatctgtctggctctttgcaaaaacctatgagatgagtcatgttccacatggggatacaactggaaacgttacccttttccaaggaggaaaaacaggagggtcactgtgttctgtaaaatgtattagactgtggaactaagaggcaatggagtgatcatcagggaggagctggaattgttagaccccagttttgttcctgtaaggttttaaatactaatgaggactggacggtacttgatttgttggttcagtattatcatccagttttaactaccctttccagtcttgcccatctgttccttcagctctccttttataataaatattcatgttcctgatttgtcagggacataaattgcccttttcccatggggggaataattgacttacctagaaacaacattggtctctgtgatgaaccagcactgccatgcctgttcttgggaaaaccagtgtaccagtagatgtgctttctcagcttctgtcttttcaagattttctattacccctttaaccccctaaaatataaagttattaaggtcatttatttaaaaatgacgtgagtaggtgatgtacatttttcttgcaggtttgttaagaagttggagcactcttggaaagccctggtacatgacggagacactgtctcagtgcatcgcccaggcttctacgctgaacggttccagcgcttcatgtgcaacacagtatttaagaagattcccttgaagccttctccttccaaaaagtttcggtctggctcatctttctctcggcgagcatgctccagtggcaactcctgcattacttaccagccatcggtctctggggagcacaaggcacaagtgacaacaaaggcagaaattggatccaggcgttcaccatggtcgtcctgatgttttacctcagactccaccttgggagaaatcaatgagggctcgcc

SEQ ID NO: 181346 - DNA, 1486 bp, Homo Sapiens
cgtgagccaccgcacccagccgacaaacctttattaccaggtgatatcaaatattattagagctgactgtggtagtgacagtttttcatataaatgaaattgcatcctcccaaaggaatcctgagtatgtatgcactttaaaagaacccagaatcatctaaatattgtcacatggctcttgcaagtgatgataatagtgatgcttataataatgaggattagctgcactcatcagcctgtagaaagtaaaaagtttccttttcgaaatttcctttcttgttaaagaataaatcataagtgttagaaataatagtttcttttaaagactaacttccttcaagcctcctctgctctgtgctaatgactcttcattaagccctatcctatgtagctgttagatataagggaataagtatattctatgtccttgtactttaaccaagatatttgtgctggacatgctcacaggcacgttccagcttgcagcctatgccccttccttatttggaaatattattacttttctaagtctttttgcaagcaacttcttcttttcctttgttctctattgcctttccctatataggaaagttttaagttattagccagtcaggtttaatttaaattgtgaggtccagctccagccaatggagacaggacacagtagcagggacaagctgcataagggataaaaattgcttctctcctttgtttgggtgtgctgttgccattgtttcatctgtgaggagcaccctttctgcagaaagtaaaattgccttgctgaaaacactttttgtctaaatgctgatttttccttgcagtactgaggagcaagcattctgtttctaaataaacactttacttataacaagcccactttaaattatgtattattagaacacattgagtccacttggagaagccgattaagtcttgggctgctgtggttcctgagcatgagctttgttaagctttgtcaagtcttcctaaatactatgccaggagtttcttttgaccagatgattcctgcttattgctttgatcctggcttcatatctagatattatagatgtcctacactttttctgagaacatttgtgtgaattgaaagttggataaatcatatgtaaaatgcatgaggcatgtgtgtagggtcaaagttatagggggtggatgtcagtggcaggaagattcaaagttgagatgtttttcttcttagcaagctaagaatctaccttctataacttctagccattgcatcttctttttcatctagaggaatgtttcctccagagtgtatatgctgcaaagtggtagttctgaagatgtcaataaataccatgtagaaaaaaaagtgggtgggttctggagttgaataaatgtgggaaaaaactggattcaagaaagataaacaggtttctttaatgctgggctcttggagatgctaatgtgtactgaacatagtaaatctctagggagtatggtt

SEQ ID NO: 181347 - DNA, 948 bp, Homo Sapiens
ttggctgggttcccagacaaagttcttctttcacgtccatcttcttccccttgcaaggaatctgggcaccaagctttgtgaatctgggcactctcatgtgatttaggcactctcatggccactgcagctggcgcaacacacctgaagcccacagcctcccagaccagagcagcactggggtttatctgagtcctgtggccactatattgcctgactgctgctgacttatttaggtttctaagccaggttagtctgctggtgatgaagctggcctgggtttgggtccatcccgccagggtggcagaatcccttctccctgcaggggggtctgtaggtgtctgggagctcctgcctaggatcagggccacagtattctgcctgacactgtgtccactgtagtagggctgatactgggttctcctctttctcgcatagggaaggaattctctctgcactgcactgcctggagttgggattggggtaacacaggcagccctctggccactgcagctgatgtcacataggaagcccacagcctcccagaccagcacattgttggttgttggagctcacccaaggaccaaagtgactctggcctgcctgccactgaaatttatttggggcctgaggccacttgaatcagctggtggtgaagcaagtcaggactcaggtttgtcccaccagggtagtggattcccttttagaccaggtcgtgtctaaatgctgtatctatgggcactagcctggaacgaaaggccatggggttctgcccagtgttgtcctttactatagcagagctggcactgggctccaaggcaaagtcccacggacccttccttgtccctcctgcaagaggtggacacattctctgcactgcactgcctggggttgagggaaagggcagtgcagtcactgcaagactgtcttttcaccctcgttaatgtgtgt

SEQ ID NO: 181348 - DNA, 1024 bp, Homo Sapiens
ttgggttggaatttactatgttcctttatacatggtgtttattgaggtttgagagtctcttgactgtgaagaatgtacactgtctggttttgacagctatttctgtattattatcattataatcttgtcaaatagaaatgttgcttctagaaaatttgcctaggaggcgaatgtggggaaggtgaagcactcaccataattccctaaattcatgttagaacatttcttgctatggttaaaaatgctgcttcctttgacctttatgaatttctgtacctttgtcattctgttacctttgtcattctgttatttgcgctaattatattttaatgtctcctaattaaaaattaaaatttggttgttggctaaatacaatatgcaaaagatgatggcaggtccccgactaaagaagattaatgtgttcagttttcactggttaagtgaattataattttaaatattccattcttatttatgtctttatgataattcagactattttattttgaacctgttttctactctggcaaagaaagataggcagaactattagtgttccatatacattatggaatagataaagcttgagagataaatgacctaagttttccttccagagagactcttccattttctctcattacaaaaccagaagatcagctatgtggggccatcagctcccagcctaaggtcctataacccgaagcttgaaggcaatcagtacctctgcttttcaaaggtaaatgcattcattttctttgattcagttataagcaagtatatattttcataatattcttgacattacctgagaaataatacttcatgctaaatcttttactgccacttttctcattcatttggtttatcatttcagtttaatgagaaaaattaataaaggttttgatgccctattttattaacctagaaatgtattttctttcaaagtttaatacttaaaaatgcataaaataatggtaagataaacaccatctattaaatttatctgggccttaaagattgc

SEQ ID NO: 181349 - DNA, 1452 bp, Homo Sapiens
  misc_feature (395)..(434): n is a, c, g, or t
  misc_feature (667)..(702): n is a, c, g, or t
  misc_feature (754)..(763): n is a, c, g, or t
ttggctattcaactaagacactgtcttgagagttattttttccagatggatcgttggcctaaattttcacacttctcccctgttcatcctttttcctcttccctgcttcctgggaataaaaggaacttttttaaaaaaattaattagtccacaggtctcattatctttctttatgattaatctatgactttttggtacaagaacaatggaaaaagtgaattaaggtaatgaacaaaacctttcacccacttaaacattttccagttttgagattcctcttcgtgtttgtggtgtcttccccttgttaccccttctgccctttttctctgactatggtaatttggtctttaggctcatatcagtctccccgagacattctgcagtcattatcaccnnnnnnnnnnnnnnnnnnnnnnnnnnnnnnnnnnnnnnnnaaaaaaataactttttaacattggtgcatatttgcttgggatagagcttgtgtaatttaccaatcgtattgattgtaagtgattgtgccctgcagaggtatatttaacaagacaaaaataatcttggttaataaaggagcccatgagatttgagtcaggttgtaagtgaaatcacttacacttttggatagaatttatactcctgctcttataaatcagtggtagacttaccnnnnnnnnnnnnnnnnnnnnnnnnnnnnnnnnnnnnattgccacagctccctattctttcttgcctgcctccacccccctgttcaggnnnnnnnnnnttgagccttaaagtgacagctgattttttaattgctgaattttgtgaaattttactttttccaagtgtttccaactttaaaaagagaagtgaagacaaataggttggaatggtgaagacaaatggattggaatttcacaggctgtgaataattccttaggatctggcaaaccgtgaagtcttatttgaagaccttatctcctgagagttcttttggagtaggaaaaagaaccctatttgaaatagaccgtttttctcttgtttttaatctgtttaatatttctgatttttaagcagctttcaaaacaagtgtggtggaaaaaaagaaatagtagtaggaagatgtttagggcagcagaactctgggtctaaataagtcatgttcccacttgttgccgatttttgagagtactagggccatctttctcaattttgtattatttgtgtgcatgtttatatcaaagatgcccattttgttaaaatgctatttcctttattaccttggaaactgactcagcctcatgttgctcctaattagtgtttaaggctcccatgagttgcagataaaatgatttattttaacaagtagaaggaggtgattcaccttttggattgtaaatatatgaaaatgtctacaaggtctttatctgctttctgtcagcatttatattaaatgataaattaatgagg

SEQ ID NO: 181350 - DNA, 2196 bp, Homo Sapiens
  misc_feature (1481)..(1502): n is a, c, g, or t
  misc_feature (2041)..(2069): n is a, c, g, or t
ttgggaattcttgagtatgtgactggtgagaaataactaactatagtcagtacatgtacagattgttaaaattcaagacaaaatactttcactaaaaaaaaggattcgtctcagtaaagaagtattcagttgctgtcacttatatacaaatggtggtgggtagcagtctcaccatttttctactctctttttgctcgttttaaataattgagtaaaggttttatttgtaaaatctatctgtaaaaagcacctgtaacgatttatatgtcattgaaaggaatggcccagttactttttaggagagattaataacctacctggaaattaactgcagtgtttacttagattttttccccctaataagagtctaagtgtgttaaatttttaactgatgatatggttacagtgttgcaaggtgatctcttcccctgaaaaatctgcctatccttttaagaaaaattagacctactaaactaaagcaaattttactttcatcattagcacctaaacaagcaagcagtctactactgtcatcattttacctgagtgcccattttgctgatccacattcatacctttctaccttggacagctatgatttttatatttatttgttgcttcagctcaggtttatgaaattttcctgctgaaatgacttattgggagttgtaggttgattatagttactattaaacattttctcaatttagcttttctgagccacttcaagaagaaagctgtttttgtcaaaaggtactattaattgtagcaagtaaatcttaagatttgaatttttaagattttatttctgtgttcactaaagatctttccacaagtaatagattataattgataagtaatactagctatagtgttaataaagagtaagactatcaccaccaggaataagtaacaccttttaataataaatctattcctaataggtatgttttcaatactgcactgaacaaagtgggtaaagagccctttgaaatcttattgtaataaagggacttacctcaccactggaatccttgttttcagagcctctggattttcagccaaacactgaatttctcctaaactttatccctgaaacatccctagagaacgaactttattttcacaagaaaataaggcacaataagggggaagaacttaaacctcaacataatatcgtgtccaaaaatgtgtatttagaaaaataaaatcctgtggagtttgttatcctaatgtttattttatactagataaggtgacttgttttcttgtattgaggtcttactgtttcagatttgtttttgtttctgttctaactctaagcagacagagctcacaagtctttggcatccattttaggttgtacactcagagtcatcttataactggaaactgtcaggtggtcccccaccccagtgagtgtatgaaagagtcaagaaaaagattggaaacaaactattgggtgaataattggttgctcnnnnnnnnnnnnnnnnnnnnnntgcctttttttaatcaccatttatttgtgtaatctttctccattgattggctgtcattcttataatatctgaactaccccataaaataattctctgacttaaaggcatttagcttttgcttatcgtttttacatcctctattcaactaagacactgtcttgagagttattttttccagatggatcgttggcctaaattttcacacttctcccctgttcatcctttttcctcttccctgcttcctgggaataaaaggaacttttttaaaaaaattaattagtccacaggtctcattatctttctttatgattaatctatgactttttggtacaagaacaatggaaaaagtgaattaaggtaatgaacaaaacctttcacccacttaaacattttccagttttgagattcctcttcgtgtttgtggtgtcttccccttgttaccccttctgccctttttctctgactatggtaatttggtctttaggctcatatcagtctccccgagacattctgcagtcattatcacccttttgggtggnnnnnnnnnnnnnnnnnnnnnnnnnnnnnaaaaaataactgtttaacattggtgcatatttgcttgggatagagcttgtgtaatttacaatcgtattgattgtaagtgattgtgccctgcagaggtatatttaacagacaaaaataatcttgggta

SEQ ID NO: 181351 - DNA, 710 bp, Homo Sapiens
ttgggattaattactgatgcctcccttgggatgggaagagatagcaaactgtacctcatttatggtgtttggttgtgttactcttgggaccattacattaccattattaagtgacagttaactttttaatgcattatttaagacaattctttacaagcataattcatattatctgatggtatttccactccagttattaacatacctgtcccttatatgcataatcaggatcacaatatgaatctgagtcacttcctgatttaatttatgtctttggtgcatttcaaattaggattgtactgcttttcaccctaaagactataaaatgaagcgatttggaagagaagtaaaatttaatgtttagtttcactggagtcttagtcatatatgaagttttgaaaaaatgcataggaaaattaatatccttaagagtttgttccatagagggctgtgtatgtgtatatgtgtttgtgcctggagggaaggagttccatgaaaaaaactaaatattttccaccagactaacttaatttgcctttttttaaattcttctagaaacctgtggatttttgtatctaagtttactgaatttgatgcaagaaaattacataaattatataagcatgctattaaaaaacggcaggagtctcaggtaaacttgacatcatattttttccctgaatttatataattaaaaccttgagacattc

SEQ ID NO: 181352 - DNA, 1432 bp, Homo Sapiens
  misc_feature (183)..(198): n is a, c, g, or t
  misc_feature (310)..(327): n is a, c, g, or t
  misc_feature (406)..(521): n is a, c, g, or t
ttggtatcattagtgttagtgtattatatgtgtgacccaagacagttcttccagtgtggcccagggaagccaaaaaattgaacaccctggtgtaagttataagcaagcacctttttctcaagacactatgtgttcagctgctgagaaaccattacaagtaataagtatatttagattccgcannnnnnnnnnnnnnnngccgccttgtctccaggcaggtttctaactcaccaccaagcaagggggactgcatatcctttgtgtaggaggcttctaaagatcttctcttctcttgagactttctcctttnnnnnnnnnnnnnnnnnntacctgcaagttctccaagggatgtctgggatcactaaatagtctgaggtggtgtttccctcaggcaaggctgtgcccnnnnnnnnnnnnnnnnnnnnnnnnnnnnnnnnnnnnnnnnnnnnnnnnnnnnnnnnnnnnnnnnnnnnnnnnnnnnnnnnnnnnnnnnnnnnnnnnnnnnnnnnnnnnnnnnnnnnggaataaatgagaatgcttaaacacagcccaggacctaacacagagtaaaagctcaagaatacccagagggggtcagccttagtgggctgtaacttgtataggatttgggggtgggaatacagagcagacattgctaattcatgctttgcctgatctcaagaaataagaactctaccctaggcttactacctacggagtaagaactacttggccctctgggactgatcttcaagcactggtcattgtgggaccaataaggggccggtgttcagtagaaaatactggctttggattagcattttgcttcttcccaagatcatatggccagcaaggtggccaaatgagtatcttctctgaatttgctttatttgtaagatgggtctgctgcccactgagggttaagtgaagccctgtgcaggaaagctctgaggccctctgagctgtagtgggagctcagtaggagcctgggtgccagcaaccacagtcctgggtgtgctttgagggggtctgcaggttgctgcccagggtggacgtggctgcagtgacactttctcctgcaggtgagcatgggtttatgcgtcttaggcattattgtgatggcgagcaccaattctctgatgtggaccttctttagccggggcctcagtttctccatgtcttcagccattgcatctgtcacagtgactttttcaaatatcctcagctcggccttcctgggctatgtgctgtatggagagtgccaggaggtcttgtggtgggggaggagtgttccttattctctgcggactcaccctaatccacaggaagctcccacccacctggaagccctttccacacaagcagcagtagcaccacttggctagacggatccgctggaaagatcatgatgggtgggcccagccctgggatg

SEQ ID NO: 181353 - DNA, 1619 bp, Homo Sapiens
  misc_feature (112)..(120): n is a, c, g, or t
ttgggggaggggataaagaagataactgatcattttctcaggtgactgacctggtgattaggagcagccttcttggatgcagttaggcaaagtctgaatgtcttcccttctnnnnnnnnngctctctcctgccaccccaggagcaacatataaaaatgtgtagctccaggcatgaaagtagcttctgtctacacaatgcaggtcaaagagaaggaactgaccaggtgtccaggcaccaaaataccaggctggtctagccccaactctccttctcacatgcccacgttcacgcaactaactcacagggttttggggaagactaagacggagtgaatgtaaaacccactcccttctgcccacgttcacatggtccatgctgagggaattcagaaaaggagacagacccgggggggtgcgtcagtcaaggcaagtttctcgaaggaaggaagcagaactcaggaggacatggactggaacagtcagggcaatttcaggctgtgacaaagctggaacggacgactgtagcaggagcaggagtcactgacattctaggccaggccagggctaagccagagaacctattaatagtaatccacaaatagatatggggcacctcctaggaactctccttgttccaagcgtcgtacctcgtgtgatccttagcggctctctgaagcagacagaagagggccagccatctttcttccacctttgaggcttgggaagggtgagacttgctggtgacttacaactccatcaaaggggcatggtgaaataagggcctgggctcctgacttctgggctagggctcttccaaaggcagagtctggagaggcctggctgtggccagaccatggggcaagtggctagaggggcgagtagacagcagaggcagctgtggcccccgggattagcactgggggaccggatgggggagggaggcctcactttgttctatctgagcagcttcctcggcagtcatgggactgattgagaccacgcgagggctcctcccgggggcaggagggactcagaggctgccccgttgtctgggggtggccctggcgaaggagctcatcttcacgggccgacgactgagtggaactgaggcccacgtactggggctggtgaatcacgctgtggcccagaacgaggagggggacgccgcctaccagcgggcacgagcactggcccaggagatcctgccccaggcccccattgccgtgcggctgggcaaagtagccattgaccgaggaacggaggtggacattgcatctgggatggccattgaagggatgtgctatgcccagaatattccaacccgggaccggctagagggcatggcagccttcaggagaagcggactcccaaatttgttggcaaatgacccccattttaaccttcagcatgggagatgcatgccctgaagagcaagatccagaagaagatttgtggccagattgcctttcatcatttcacctctccagacttccatttcttcacaaggatgatgatggaaataaaatgactgggcgtgatgcctggaaccaagtgctgatcctacacctactgctaccttccttagcttcacctgggctagaatatcacgaagggttggg

SEQ ID NO: 181354 - DNA, 1495 bp, Homo Sapiens
gaattaagataacctggctgaggttccatgtaatgtccccagacctgggtccactgaggcctctgtcccaaccagcttgcccctccccagccttgagtctctgtcctggtcccaccagggctttgcaggctgagcctttcttcctctccacagcagccttccctgcacccaccattgcggctatggatgggtttgccttgggcggaggcctagagcttgccctggcctgtgacctccgagtggcaggtactgggccaggactgggggcagggggtggggctagggagtcaggggtgagtgaaacagggtgagtctggacattctgcagtcagccactgttcttggcttccaaccaaaagcaaaactaaggcaaggcagagcacagagggtgctcaggcagaagctgcttcccctcctggtgcagccattagctgctgtagtatctgtgacctgtcagaacctgcttccttcattttgggaatatttgaccaacctcagagcaattgctgttacgagccaaggaggtcaaagagcaatgtccagtcttcccattctgtccaagtcagatttatcgaccatgtttcggaaaaaggtgagcctcagggatagtttgtcaatggctgagctaatcacaaaggtgcctgggcaggaatactggcaccagccaaatttgcattacttgttctgagcaattgagctttgtttgaagaatgggaggggataaagaagataactgatcattttctcaggtgactgacctggtgattaggagcagccttcttggatgcagttaggcaaagtctgaatgtcttcccttctccccccaccgctctctcctgccaccccaggagcaacatataaaaatgtgtagctccaggcatgaaagtagcttctgtctacacaatgcaggtcaaagagaaggaactgaccaggtgtccaggcaccaaaataccaggctggtctagccccaactctccttctcacatgcccacgttcacgcaactaactcacagggttttggggaagactaagacggagtgaatgtaaaacccactcccttctgcccacgttcacatggtccatgctgagggaattcagaaaaggagacagacccgggggggtgcgtcagtcaaggcaagtttctcgaaggaaggaagcagaactcaggaggacatggactggaacagtcagggcaatttcaggctgtgacaaagctggaacggacgactgtagcaggagcaggagtcactgacattctaggccaggccagggctaagccagagaacctattaatagtaatccacaaatagatatggggcacctcctaggaactctccttgttccaagcgtcgtacctcgtgtgatccttagcggctctctgaagcagacagaagagggccagccatctttcttccacctttgaggcttgggaagggtgagacttgctggtgacttacaactccatcaaaggggcatggtgaaataaggcctgggc

SEQ ID NO: 181355 - DNA, 1669 bp, Homo Sapiens
ttggagatttccaaagagatgaaattttcttaatcctttaagttttcatagtaaacagtatggcagattgggttggttgtcctacctggtctatttttaaaagtcaccttttaaagtgacattattagatacacttaaatgtttccaaggcactctctgcattacccttgtttttctctttggatactgtcctgggactaagtgtagatttctgcttcaagcacttctggcattgtgtgtttttgtatgcactccccttcatgccacttcagatgtttatttggatgtggttggggacgagagcagacaccaaggaaagggagttggagagaatgtaagtcctgacctgaaggtcttttgtgatgcatgtataggattgccctgacacacaccctcctttcttgggattataccagccatcttcctgagagttttggagccctctaggatattttttctagtaccccaccccccacccctaaagaaagaccttaatatgttaaaacagcattgcttggagaaggtgtcattgaattccgggacgagccggagcctttaaatgggtgcttccaccactacaggctcctgacacgagtaacaggcactgttgcttagaagaacacacgaagttgccgaacacagggtaaaatttccaaggcgctgatcgttgccctggccagggcctgatgagagccagtcagtacattctttttttcctacagttcttgggtttcaaacttcagtttcagggaatttcaagtcaacaacaggtagaatgaataaacttggttaccagcctaataatgtgaattgctacagaattattcttattatgtaagaaaacaaaaactttatgcagatactttagctataaattgatgtaaaatactgatttttttaaaggaaggagagaacagtatcttgttcaattattatgcaatcaatcagtaaatgtttttaaaatgatactacaggagagcttagtaaggagagggcatggatgggccagtttggcatagttgggagaaatcagtctggtttccatcccagtcggggaagagagaggtgagagggaatcagaacgtacctagttgattccttggtgacaagtgcaatggggtatgggtagaatttattttcagagccaagaggacttgatggttataaataaagttgcctttagcaatggaatttacagatcgatcatgttgttccgaaagatgtgaataggatccacaataacaagttgattcagactaatgtagatatttagattagcaagtattgaacatttgatttcttagactgaggttttaaatgaatttcattatttctcccggtaatacacagagcatcgggattaggaaattagccattttggattctgtctgccacaaacagacctattctaaacagtgctattaaattttagactgttgttcaaatattttattttctcctaaactactttttatggtgatgaataattaagaccatttaaaacacgggagtacaagtatttttttgaattaaattaacttgcaaaaaccaaattgcagtggttgggttgtttctagacagactttggtatcaattttaaaccaagataattttttatattctttccatagattttcatggacaactcctgcagttttcttaaccctcc

SEQ ID NO: 181356 - DNA, 1164 bp, Homo Sapiens
  misc_feature (128)..(147): n is a, c, g, or t
aaaaatcatcaaggtcaaaacctgatctcaaaactgcagtcactgccctcccaattttgtttgcccaaatacctttaatgcagcaaacccatcaaaccatctcatgcacttaagaaggtgtttatttnnnnnnnnnnnnnnnnnnnncctcttttccattattttcaggttgttataatattaaaattaatattttccctggtttctttaatagtaataaatccaccattggggagtacgaattgttttattatcatcaacatggcacttaagtaaatgaaatcttgtcaagtacatggtgacctacaagttcaaaagaaaaaaagaacagcatgagatcaaaatggccagccaggacaggagatacaaaagtgacagattaaatgcaaacacagccctttatccaacaggcttcacatgctaagacttttctaaagtcaaacctgtaaaagcatatctgatatggaatatttaatattctgccccctcttaggggctcaaccaatcagcaagggtaccatatccattttaactcagcaaagtacaggaatcctgaaaacattcagttattctacaaatatgtatcgagaacttcctttaagggcctggggagaggggacaaggaactgggcagatacttggagtaggtattttatagtttaacacatgctgaagtatcagatttcccttaaagcctggtagaggtaattaagtaaaaagctttgccctgttggtatcaaaaaatgtaaatggctcttctcagtcaacagttacaaccaagaaccaaagacatctatgaaaatttcaaaactaaggaaatttgcaattccaggcaaggccatattactctgagtttccaataagacctgaaggtcacttactttgtgttaatattaaagaaacaacctctgtggagaggaaagatttttggcagttcaaattcttacaacatcttaaatagaatttactaaaataaattattcttgaattcctcaacttaattttgaagcaatgagctggtaataactccagagattcaaataatagagcctattcaagaagaataagagtttgacattcttctctacaaaacaactaggcacaattttatccatcagacgtctatcaacctacggatattgttatcatgttctcccaagccaa

SEQ ID NO: 181357 - DNA, 920 bp, Homo Sapiens
  misc_feature (231)..(533): n is a, c, g, or t
  misc_feature (791)..(833): n is a, c, g, or t
ttggcaacaagtttagatattaatagccactcaaagccttcagcccatataacatgaagtgacaactgagctctgcacataatgctcaagctctataataaccaacactctcagcacaagggtagacaagaaaagaaaaatctcctgctggccaggaagaccacaaggaggctttctgacttggcctgtgcttttgatttttaaaacattttttaaaagaggcctctctgnnnnnnnnnnnnnnnnnnnnnnnnnnnnnnnnnnnnnnnnnnnnnnnnnnnnnnnnnnnnnnnnnnnnnnnnnnnnnnnnnnnnnnnnnnnnnnnnnnnnnnnnnnnnnnnnnnnnnnnnnnnnnnnnnnnnnnnnnnnnnnnnnnnnnnnnnnnnnnnnnnnnnnnnnnnnnnnnnnnnnnnnnnnnnnnnnnnnnnnnnnnnnnnnnnnnnnnnnnnnnnnnnnnnnnnnnnnnnnnnnnnnnnnnnnnnnnnnnnnnnnnnnnnnnnnnnnnnnnnnnnnnnnnnnnnnnnnnnnnnnnncctctgagaattctgactatgagcttacctgcccatggctttagaatgatttgaattcacactaccttcaaattcatgaaacctcaaaacctacaaattaacctaaaaacatggagccaagctaaaaatgccctgggggtaactagcacttggactagttacaggaatgtagcttcgtctcaaaggattccaaaagctaatgccttgcttaccaagggcttgtaatctcacaggatgtgatgggtggggcctcaaatnnnnnnnnnnnnnnnnnnnnnnnnnnnnnnnnnnnnnnnnnnnactggctatctagcaaagttgaaaaccctacaatctaacagttctcctaggtgcatatcccaaagcaagtctcacattgatgcagtg

SEQ ID NO: 181358 - DNA, 1658 bp, Homo Sapiens
  misc_feature (206)..(220): n is a, c, g, or t
  misc_feature (753)..(761): n is a, c, g, or t
  misc_feature (1204)..(1212): n is a, c, g, or t
  misc_feature (1574)..(1584): n is a, c, g, or t
ttggcatatactgagagctacatagccaggccagatggggactgtgcatcttcccttaatggtggaaatattaaaggcattgaaggacattcacctggaaacttaccaaaattctgccatgagtgtgggactaaataccctgtagaatgggccaaattttgctgtgaatgtggcattcgaagaatgattctatgaatagaatctcnnnnnnnnnnnnnnngccaagttcagagtttatgattattgctgcttggacagctagagcacatcctctagttagtttgtgctaaaaatactcgaaataccatttccagttaattttgaagtgtaatcttttggctatataatgtgtgtatgtttatatgtgtacatatactgtatataataaatatctgataccccagactgtgtcattcaaggaaatattcacttatctgtcagaaaataatttcaaatggaacaattaatttaggtgttacttttctgttgttgttaaagcacgttaagtacatttccacaaactctcatactctagtgcttagcccttcaagctttaggataagtataactttgagcaaaaaatttggataaacatttgtattattggtgcctatcttcagatagtatcatagtaggatagatgctgggaattttgtaattaaagagaacagttttagttaccattaggtatgttaaggtcactcctgtagagcatgtcaacaaattatttcataaatccgaaaaactaagagnnnnnnnnncccctctattagttacgtaatttaaacatcttacttgttttgtaaaaatgtaattatgcaatttccttttcaaatacacaagactaaaaatacaaatctatcttgttctatttataactgattttttttagttctgtatgtattcgttgaacatatttttttacttccaattgtttttccagatttcacttttcctctttttccataacccgtgaagatagttttaatttgctagttcattttttgctgtatttgaaaatgtaattatttaatatagaaggcacagaattccctgcaaaatcttacatgtttaacaacatataattttttgtatctgaatttagaataaatcattttaatgcatcttaaatcacgtcacctaatcataatagttgtggtaactaatcattagtgcagagcatgcagataaaaaatatttgaannnnnnnnncttggaagtacatgtagttatgagtaggttaagagaatatctaattttcctactctttttttcatctttagcatttaatgttgaaacaccattcacgtcacattaaggacccactgaaaatgtattgttttaatgcataattgacttacctaattaaacatacacacaaatttaattatttttttctctttaacctgatcacgacacagctcttaatcattgtcactttcagtatatcatagtagttagtagtagattgccttgatggcagtaattctgtagtaatttctattcaatcaaacctaagagagctttgatcttactgtaaaggtacaaacaaatctcttatataattcctagcnnnnnnnnnnngtttatgattctgatcaactataagacacaatgtaaagaattgtggcttataatttatctgaaatttattagct

SEQ ID NO: 181359 - DNA, 1190 bp, Homo Sapiens
ccagccccagaagttagaaatctaaaaatcagtaaggtagagcaggctcttgcacttcaggtctgcaggagctagagaaagccacaattaattacagtacattgagagtacgtgctgaaaaagaggcaagatcaaaatggaggtgggggagaggcaccagcctgtaaacaactttgaggtgagtactgtttatggaatacccccaagtgcctgcctcagagcagatcctcaaaaagggcagaatgaatacatgcttaattgccagtgagttccaggtaggcagaactgagcctgctcattttctctatcccagtgctgaacgtgaaaaagtagcttaataaacattcacaaattgaatgaatacttgggaagggagaagagagccctggaaagctaaggtggtgacatgtgggttggatcatacaagagtagaatttgcctggcagagagcaagggccagatactggaggcagcagagataaggaatgaggagggttccttgtagcaggagagtagcatgactgaatctagaaagatgggctggggtgggcatgagaccacatgagccaagcagaagtttgaatttaatcctcggaaaaggaaccttttcacaatagtcatggctgagggtggggaaggggagaaccaagaattttcctccagaaccttttttaagacaagggaagcaacaaagttgtgtggaatgtgaagaaaggtggatgtctagggcaactcccaagtgcctggcaccataaatatggatagtagtagaagggaacctacatttgttgaagagctgcttaggtgctgtactgcaaacttgtcccctctgcaagggtaggtataattccccctttcaaagatgaaaatacagaagttaacacgctcaaggccattacagctaatgaggggttgaggtttaaattcattaagtaaatctgataagcataacatcttcaacttttccactgcctctaacctgtatcttttgttcaaaatcaaacatgtgttgagcatctaccctagactagaggttggagataaaatagagaacaaaaccgatgacagattacactccagaacagtgttttttcacattctagtcatataacggactagtaagctacgatcagcattttgtgtacatgtacacaataatagaataaaatcagcaattgtatcacagccaa

SEQ ID NO: 181360 - DNA, 1816 bp, Homo Sapiens
ttgggtcttttgtttttcctccttgattagacatattacttaatagcacagggcccagtggtaagtgaccactgacatcggagcttaatgtagggacatagtagggagtgaactggagaccaaccactggcttggccagaaagtacagccccaactccaccaaggctgactgttcccataggtaaaatattgcatgtaagtcctattagaaccatggaagatagacgtcattgttccctatctgataggggaagaatcaagagtttcaaattaggttgctgaaggtgacacacctagaaaggcagcagacgtgagtctgctgagagagcattagaagaaaaatacataaataaagtcagcagatctggaacctgaaccaggcctgtctgactgcaaagttgtgcttagaagctctctgctttactgttcctcagaattcagctttaggctttgttgataaggccacagatgtacctttacctcaaagtatctacagtccaaacaacgctagggcaaatctgtccttagcctgtggcattcttagaaggcagcaggagggtgagctggagaagaagataggcatgccagaaatatcccagaaataaacctgatttacatgtcttattttcttctcctttatctgataactactttgtttttaccctaatccttcaggaaaggcttagagagaagaattcagtgttcaattacaactgctgtcacaaacgcccagtatctggtagctttacatcatagtacagttatgcttacttgggaagacatatttcttcatattaaatacaaattagtaaaatttcatattaaatacaaatgaataaaattatctttgttttcctacactcagtgttagttagtatttaacagctaaagtattaagagcaaaggagtttccaaacttatgttctaaaccaagtcaggtcagagaattcatattaaatcattctatttatgggcaaatgtagaaagttctttacatcgagaatcaacctagagaaggtatgggttagctttcttcctttctaaaacattagtttctgagaattgaagataaacgattttttttaatgaaatgcttacaaatgtttggctttcatgcaacccagagaatggagtggtattaattttcaattttgttcactcttacataccagtgatattctttggattagaaacacatgggatcctgccgccttcttttgtgtttcttcccactctcccgctggcctggccgggacaccacattctgtaaccagggaactgaaaacagaagagcttgttcacagcaggcaaacagcctcaggtcttgtgcagggttcagacagcttagcagggaggccggggaggtttacaggagcaccagtggagactacctttgtctcaaagcagaaactgattcagtaaaaagtggatttggggtcaaaatgcgcgtgttgatgttctaaaaagttagaagttgcacacattgctcaaaagaatctaagtattaaaaaagaggtaccaggccacacccgtgctctttttgattcatctgcacctttcctcagaggcagctgggcactagcgcagcacagcctgccggtgaaatagcagctccatgctgctgaagtcttatactccataccagcaattccttcttctcaccttcgggggccggtgatgtctaagcctcatgatctttctctgcttataacttccctatttctgttcatggcatcactgctctttcagtcatcctcattggaaatctaggaataatttttaactccctctttccacctgccactggttgactagt

SEQ ID NO: 181361 - DNA, 803 bp, Homo Sapiens
gtgtctgtgaaagcagtagagtcatggaagataccctcttcaggtaaaggcaagaggataagagggttaaggaggctgcaacaaactatggttaggttacaagaggaggagaagaaaagtatctcctagcaagttagttgactggctgaaagatgcttagtgtggtgagaggtgagaatgtggaatacatagtgagagggaattccattattaatgttttggtagccttaatgagggtggaaatggcagcaattgccctcaaacaggtggcagttcttgagctatggagtctgcttgttgactgtaatacccacttggctgcttgctgttcctgtggggctgagttagggctctcatggtgtttccttctggtttatggacaagaagggaaaagaggagatcataatttggctgtcctagagtgggaggtgaggtgagttgaccttttgggtctttgaaggcctgttagtttttggggtccaaataagggagtcaggggaggaaactttaaacaaagcatatagaagttgtgccatcaaagacaagttggggacccaagttctgcagtatcctgcaagtccaagaaaccctctaagctgtttcttaggggtctggagaggaaaggaaaagagaagggtcagtatttaagcctaaaggggttaatgtgtgtccaagaaacttaatagaatccagacaaagctgcagcttgtctttagagatcttgtgtctcttaaaggctagctggtggatcaagtgaagtatgtcagtaagacgagtgtcttgtgaggcataaagtaatcatc

SEQ ID NO: 181362 - DNA, 781 bp, Homo Sapiens
  misc_feature (309)..(519): n is a, c, g, or t
ccaactttgtacaaaaaagttgggtacacattaccgttataggaatgctacattgtgatttgccccaaagggggttgctgtttgtatgatacacttgtctggactaattctgtggaatttgtctccactacaatgtgaggctgctaatgtctgcactcacattttttaaagagaggctttctagaattactcttgtttcagcatattttgtcagccaaagattagtcagaggtttggttcaaacatctcaagccagttaggtccccactctttgctgatagatctgtgtatggtttggagaatgtattnnnnnnnnnnnnnnnnnnnnnnnnnnnnnnnnnnnnnnnnnnnnnnnnnnnnnnnnnnnnnnnnnnnnnnnnnnnnnnnnnnnnnnnnnnnnnnnnnnnnnnnnnnnnnnnnnnnnnnnnnnnnnnnnnnnnnnnnnnnnnnnnnnnnnnnnnnnnnnnnnnnnnnnnnnnnnnnnnnnnnnnnnnnnnnnnnnnnnnnnnnnnnnnnnnnggaaaaaagacctgtgcaagcatgttagcatgctcattctcctccccatgtgataccccatgttgccttggaactctacagaaagtccctctgttagtccattttggggttgctatgaaggaatacttgaaggtgggtaatttataaagaaaaaagatttatttggttcatggttctgcaggatgtacatgaagcatggcaccaacagctgctcctgtgaggcctcaagaagcttacaatcgtggcagaaactgaaggggga

SEQ ID NO: 181363 - DNA, 889 bp, Homo Sapiens
ttggcctctcttcatactatggttttcgtaaaggatctgttgttgttacggattcattttttccctctatttttataagagcagcagagttgtcttctcaaaacggctgccaagctctgcttcttgggaagatggatgcagtcatgtaggcctgagctgtccgtctttcaccgttaggtgggaggagcgtatgggtggacttgaaggacatggacgtggctggaatgagcacagcattgggtgagcgcacaaggatgaggacatcatgtgatcagttatgggtttgctcgcagggcacccagagattctcaaagaatcctgcagcctctttctgtgctggatttgcttgtcacggagaggcctccctccctttccaccccacccatggggcattatcctgtcactcccagccttgctccacacacacacaggtgggtacaagttccactggaggagaaaaggcaaggatggactttttccccttgtgagaggtttgatacccagaaaatgagctcaaaacctttacattagggttgcttgtaggaactggagcctggaggctgcatctacttcacctgtcactgctgagggagaggaggggagaaaggcccagcaacagcgtacagaggggtcagtcagcaagtccagagagcacatgcagggagatgtttggcccacaccgcacagccccgccatctccagtgggcgatgaaagatgtaggaaaggttgatttcaagatggaaatgacagcgctatccgcacagtatgaattagggatttgctgtgttagttgatttatccatccacacagaggggaggaaaaagacactcgttacttggtgggagattgagaaactgtggtacctaccacaaagtaatagctctgtt

SEQ ID NO: 181364 - DNA, 1558 bp, Homo Sapiens
  misc_feature (87)..(118): n is a, c, g, or t
ttggaacatcttttccaattttatggactaaaagtaacagaatttctttatcactactgtgattggatcttttttatgtttatggcnnnnnnnnnnnnnnnnnnnnnnnnnnnnnnnncgcgcgtgtgtgaatttcttgtcctctacattttccccttccttttgtggcgtacatgttaactgttaacagctgcagtgcctatgagctcattatcaaagtgttgctccataatttacaattatacctaactttgggggcaaaatcccaatttggaggtcaaaaagagaccaaagtctctgtacatctcacatgactttacttgcattaactttgccttcctaaattacagtctataattaagaagtgctagtctcctggccagctcttatggttatttttgaagctccttgggtgcttgcacccttccagagggctgttactttgccccctctctggaagctcatttgcttccacaggaagccttaagccaaagcacattggcttattcaatctggtgtctggatcttaaaacctggcttctcagtttatgatgctcaccagtaaaacactcatggctcttcttgccatgaagcgaaccaggcttgcttagcttagcttcatgtgtggccttcgtgaatcaaaataagaagaaggtagaactagtcccacccttaagtcaagaagaactggttagtcatgaagtgaagccacatgactttgctcttttctattatgtcttctaattgtttctgacaagaatccctggatttctctcacactcttctagcttgatgctattgggctccttttaccgaacaattgtgaaattagtaactaacctctgcttgctgatgagattgtttgacagccgtttgctacctggaaaccagaatggctggaaagagacctgtttatgcatttttcatgttaaatgctaggcaaagaggttataccctacatgtggactctaagctaaggaagctgacacgtggggagggaaaagggctgaaatccaatgcatacgcccctcttcaatcctgggagattgtatttgcccgtcagaggcacctttttctaatttgcccagaggtgctgaaaaggcggctgaggccctgctcaactgcctgaacaacttacagaagcacctctccttccaaccaggttaggatccaaaaagctgtatgtaaaacctcttgtttataaatccaaggtggcattaagcagccactgggagtatgatctgttagggacaggcttttgctccagtatttaggcttgttcttatcagtaaatctaaatagaaagttcctaagtaaagaagcttccgtatttaaatagctcaaaatacgacagccttatttttttaatagcggcattgtttctctttcccaaagcaaccataactgagacaggattagatgcaaaaaccacttgctgatacagtttagaattgcaaaattctaaattccaacagattcatattatacacaagtataaacagagtgtagccagttttctcaaagagatacatgggttctccacagtatttttgaccca

SEQ ID NO: 181365 - DNA, 675 bp, Homo Sapiens
ttgggaggaacatccttcttggcccccagggcagaacagaaatgcaggctctcaggccagctgtgaagagacagtttgcagttaacatttgccaatgctttctctattacttagaaaaagttagtgagtgaccctccagggctctcagctggctcatttttattctttcatcacctctgatcctagttgccccttgtcgtagctcaagctgctattttaaaaaacaactatagactaggtggcttgaacaacagaaatttagttctcacagttctagagattgggaagtccaacatcaaggtgccagtagttttgattcactggtggggactctcttcctggcttacagatggccgccttcttgctgagtccgcatgtggtggagagagcgagagctctggtttctctttttcttataagagcacttcacatcctgaccctcactcatgacctcatctcaatcttattacctcccaaagaccccactttcaaattccaacaattgaggattaggttcaacatacaaaatttgagggtacatattgagtccataacaccctgcctccagaaaatgttccctgaaccatgccaataagctgggttgggtgcccctgctctgtgctgtgacatcctgtactatgactacctgattactcatctagactgtgaacccca

SEQ ID NO: 181366 - DNA, 1228 bp, Homo Sapiens
ttggtgccatttaaaagaaaatctgtatttttttgttgaaatgcaaaactgtactctatgtttagatagtacggtgaagtattaatagaaaggaaatttggaaaccgtgtccaagtttagctttgggcaggtgcttaactggctgtttcattatctataaaaacaagggcattgtataagttggtttctaatttcccttctagctgataatctataaaacttatttttatggaatataatttttcttccaaaagctcacttttgaaatatatgttttctaaaatagcacttaaacgttatgctttactttatcattgtttcctataaacttgtggctactaatagcttaatggaagattttcagtttgatttcataaaacaacatttgtcaaaataagtcctctcttgttagtttgtctaacctaaaactgtgaaccatgtagaagttttctcctttctgggaaattaaagattgtggtgaaatttctttcaaatgtaggagcatacaaaagtgttcttttacaatatcattttgacataatgtggttctgctcccttcccaagtattgtgttaggagtcaacttctgtgtatacaggcacttgtggagtttgcacgagatgttgtttttcttcagcagagaaaaatatatgtttatttgaaactgtacagaatatgctagattatgatacagatcaaactgcctttttgtagggggacaaaggaaatcaaggtgaaaaaggtattcagggtcaaaagggagaaaatggaagacagggaattccagggcaacagggaattcaaggccatcatggtgcaaaaggagagagaggtgaaaagggagaacctggtgtccgaggtgccattggatcaaaaggagaatctggggtggatggcttgatggggcccgcaggtcctaaggggcaacctggggatccaggtcctcagggacccccaggtttggatgggaagcccggaagagagttttcagaacaatttattcgacaagtttgcacagatgtaataagagcccagctaccagtcttacttcagagtggaagaattagaaattgtgatcattgcctgtcccaacatggctccccgggtattcctgggccacctggtccgataggcccagagggtcccagaggattacctggtttgccaggaagagatggtgttcctggattagtgggtgtccctggacgtccaggtgtcagaggattaaa

SEQ ID NO: 181367 - DNA, 520 bp, Homo Sapiens
ggaaaatcgacctcagataaaataacaaatcaaaatgcatgtgcaatatgcgacctgtgggagcatttcatcaacaatgtctcacagtcatatgtgacctttactgactcgcccaaaattcggtcatttatacaccaagtgcacataaatttcatagtttcctattaaaattatatttaatgcctttataaaatctaactcagttttctgatcaaattaagtaacattttatatgacgttttaagttccgtttatattaaacttacataattttattaggcagcgtatgcgtgtctactaccaaatattcttttgagttccagcatttgcacaggcaccacagctgagaagcacagattctgggtgtttgtctgtgagactgagccaaaggtggacgctgtgttcaactgctgaagggcatttttactgccttcctgacttgacagtgaaacacttaaaaagataatggaatggatgttaactcctgtcaaatagatcacttgcaatttcttccttatgg

SEQ ID NO: 181368 - DNA, 2272 bp, Homo Sapiens
  misc_feature (876)..(886): n is a, c, g, or t
cttattcttagaataaccattttgaaaagaaaatgaatagtgacaggcatcatcaatttctggagtatatataaagatttaagtaatataggtttatattaaatagattcaatagcggctaatattggttctgttgtaatctgtaatataagtaacagtgattaaaataacatttaagggaaaaggtgtcatttggatcagatgtttacgtttaaatactagtactttttcttaaattgcatagttttttgaatatcaaaactttaaaaaattttcagacatcaaggatctttcctaaagaaggattttatccttctttcagtaacaactgaggtatgttatttggtttacaaaaggttaattgaaaatatacacttgtttgaatataatttctgctcagtggatagttctatctttggtttttaatgaccaggtatgttttgaatggtttaatcagttgttcaaagactatatgtagtgttaaagtatatttcattagattgtctttgtgaggtaagtttcttaattatattcatattttcagtttgaacatttgtaacattctgaatgtcatggcaatgggttttatttggaaatgttgtgatatgttatatataaaacaataccctgtatagacaagaatgttacgtgtttccattttgttgttgttgctgtaagaaggtttacatgtattcattataactctgccaagatttgaaagtaatgtgatactacctaccagttatctgtatctgggtatgattttacttattctgtttcatggttttataaaatgactgaaatttgagctcttttcttcagtacattgttttcattaacatatacgcataaacacacacatctgtgtagatttcnnnnnnnnnnnaaggggttgcttgaggcaaatttgaaattaaacttaagattggtatgtattcttattttatagcaggtatattttaaaaataaaatttcccgaaaatgtctattataatgatttagattctcttttcagggcccagcactagaagatttcagtcatctgccaccagaacagagacgtaaaaaactacagcagcgcattgatgaacttaacagagaactacagaaagaatcagaccaaaaagatgcactcaacaaaatgaaagatgtatatgagaagaatccacaaatgggggatccagggagtttgcagcctaaattagcagagaccatgaataacattgaccgcctacgaatggaaatccataagaatgaggcttggctctctgaagtcgaaggcaaaacaggtgggagaggagacagaagacatagcagtgacataaatcatcttgtaacacagggacgagaaagtcctgagggaagttacactgatgatgcaaaccaggaagtccgtgggccaccccagcagcatggtcaccacaatgagtttgatgatgaatttgaggatgatgatcccttgcctgctattggacactgcaaagctatctacccttttgatggtatgattttcttaataatattgtatgtaaaaaaattggttctttaaaagtatttacatcaagtcactcactgtagtatccttatttaagtaatatatgttgtcagaaaattattatcccatttctttagtatgcatacttttgttataactgtattacaaatgtagatatttttcttccgtacatggaattaaaaggaaattgcccacgttactagcatcctaatacagattattaattaattatcaattttggtcagtgcagaattttcaccagagtccttactgtgcacatgtcctaaacaaagtcgaggcagcttgaacatgtagctcaacccaggaagcgggatgctggcggatgccacttcatgctcttccttgtagcttactaacattaagagacaggtacaaggcatagctagctgaatgccatcatcatatactgagtccgtaggccacctgtttagatgaaagtgggagagaatgtagtagctactgactatgttatctcttactctatgaaagttgaagaacaaactctggaagggaagtaaggcactgaggccttctcctgcagatttttagttcctctttatcctggactgtgaaaaatactttccctcaactaacaggagaactgagcgacactttcataaataaacggttgtaaaatggtgcttgatttaaagtctttctccccacttcgtgttgggtttaaaattgagcaaagtctctagttacttcttattagaaaatatattaaatttaaga

SEQ ID NO: 181369 - DNA, 1333 bp, Homo Sapiens
  misc_feature (798)..(814): n is a, c, g, or t
ttggcagtaattctgctctccctcttgtaaacaagacgcattagggcttaacgtttatgacatgattttaaatcattttaaattgaatgttgatgagcaactaatattaagtgataacctctttggggaagtaggttaggtattttgtggtttgaattctatctactttatgacaattatagctaatttattaagtattcatgatgtgccagacacttgaaaaggctatgtgttaactcacttactcttcacaaaaccttatgagaaagatacttttattttccccatatcacagataaggaaactgaggcacaaagaaaagactgtaaggcagagccaggatttaagcccaggcctggtcccttagttttgggggggttttgtttgttttacagactataatttgagagaagtagattgaggagatagctcattgaaattgttcattttctgtatagaactagaaggcctaatttcatttttatttttacttgtgtcaacttatttttagacttggactattgagaatcttatatgttgttcctaaagcgacacacctaacagcttcaaaaggactatattacagttgaacccatggtagtttggatcctactgatacttgatgaggatctttacatagtgttttatgttagttttgggtgatgtagttgagtcccccacttactgagtttacctactgtgtatgactgggctcaatgataaatagaatggttatatcaacactcaaatgagggctgacacacttcacctctccttttacttaagatctctctgcannnnnnnnnnnnnnnnngaagccaagtaagcaagaagaaaaatgagagataatgcttcagtgagagaggaaaggtgctacatagagtatgagctgttaagttacaacccaggggaaagacctgggaactattgtattattctcttgaaaatttggcccagtaagctgctacatccagttcaactaacaaaatcctgtataccacagagaagaataaagaaaaccaaactgacaaacatccttcttttatttaagaccaaactgcagctggaatacccagtacagttctgcttactacacttcaagaaagatctgaaagcggaaaaagaaccaaagaagggcagttcaagcgacccaaagggtgggtggaaggtgctgcagtatgaatactgtacgaatattttgactctggtctgaaaagataaaagaatgttatcgaaaactacatggaataattgaagtcccttcaagtttgaaagtaagcattttaggacaaataaaaggaaattcaactttgtacttgtggaaactaatccc

SEQ ID NO: 181370 - DNA, 950 bp, Homo Sapiens
ttggatattacatttattttctaacctttatttgattacaacactgaattctgtaaggatgtgcccagctttcacataacttgatcatgtgctaataatgaaaaggaagaaaaaaggccaggcaacactgcttttaactgaaatgtggaaacatagtcaacattgttaaaacctagtatattaattaacatttttgtttgttttgttttgtcacactgacttctgggtgcagtttaacggctactttgtacactactcagggataacttcccttttctgctctcctcattggatgtttttcctctttaacgtgcctgactctcaaggcaactgcaccatgactagcacgcagtgaggaccagatgtcaagaacttgatgtaatctagtaattttttctgtctcggattacattgatgagatggtcagtggtaactctcatatgtagctgtttaatgttttttaaagagtgttggaaaatacacaggaaatagtgaaaaatctttgttagatcatatattctgtgtttgcagttaaacatggacagttgtctctcattttcatttcagcttgcctacatgtagcctgtgttgtacagcagaaagatgccaggcaatggtttgctgagctttctgtggatatggaaaagattttggaaataatcagggttattttaaaactatatgagcagtggaagaatttcgatgagagaaaagagatggcaaccattcttagtaagatgccaaaaccaaaaccacctccaaacagtgaaggagagcacggtccaaatggaagtcagaactctagctacagccaatcttaaaacattccgaagaattccatagtggaccacttggaaataaaccattggacagatttcagtaatgtcttcagtggaacacaaatgaaaatgatagcttgtttctgtcaagcatattggaaagtgatttta

SEQ ID NO: 181371 - DNA, 932 bp, Homo Sapiens
ttggctttaaacctaagtttctgttgctctctattggaacctttaagttctccaaatatcatgttaattgtggggaactaaattatgtttattattttcctgaaagtctgttagaagctaagtaagaattttacttcagaatcttgcaatgtcttgtatcagtatagcccaacctgttatatttttttgttcacctggtaacttccaggactctgatagctttccccaatgcctttatacctagttgattattcttgtacttgatttttgtagaacttgtttttcttctttgtagtctattgatctccatgttgtatgcttttttctgttaccatttcacttaaaatttgttgaggttgttttgaattctgatcttatcatccaagacaatagccttctcagccagtttggtaatggtctgtttagtcacccagatgaaatccctgaatctcacacacagacttgcagagttcatcagtttttgaacacctgtcaaggtgctcaacatcttgcagggtactctgcaataagaaaatgtgcctatcctcaaagaacttaaaaacatgattgagaacactatagctaactcttaagtatgtgccgaactgaactgaactgaaacagtgccagacaatgacttgcccaattgtgtgagtaccgtatgggtttgtcagagtgggagatgagggagggctgacggtaaggcttcttgagggcactggcaaatacagcctcttgaaggatgggctaaaattggataggagggaattaaaagtaaaggcacagagtggtgaacaacagtgtgctgtgttctgaagggaagagtctgacagaatgggtatggtacgcactaaatttatgttcaccagggtagcatgtgcactggcaagcaagagcctgcggttagtagaacagtgactgctgcaattatc

SEQ ID NO: 181372 - DNA, 1125 bp, Homo Sapiens
ggctggggtcccacacggacttgaagggtgccgagctccctttcccaggggcctggaccgccctccctgcattctttgctccttgggggagccccgcccctgccctcttgggaccctgcacttgggccacggggacccagctccagccaccggggggtgccagggcagcagggccagctccagccccaaggcttgaaacgaaactgaggagggccaagctcgccaggatggggagactgggttgggagccagaggttggagggctgggagcaccgggctgtgtcccccagggcttcccatctctgtccactgtgccttcctgctgggaggtgaccggcacccaacttcccagccaggccacttcctgcagtggctcaggcagccccaagaggcctggccggcccaacctttgcagagggctcagcgtcaggacggctgctgaggcgcacagcctccccaggacagaccacactcaggcggcctcaggacgaagaattccatacacaggctgcccagggccctccacctggcgctaagggtcggggaagccctggagggccacggctgtgggctctcccagaaaaagcacctggcgtttgccacgggtggtagcaaggctgcctcctgaggacacaagggacagacacctgaggtggcaccctatgcacagcgcagctccatccctgtgacctggccactgaagaggggaacccccgccagcaggctgcccggataggagtcctcaggcagcccccagccctggtctggacctggccttgtggcccccaagacagctggcaccggtgcagttgccagggtctcgatgccaatcccgacctatgcagatcttagctgcccagcgctctacagcccgaagatgcggggagcacagaaacctcagcagcactttgtacacagccctgtttacaaagatccagggcaagacagagcctcacagcctgcgtgcatccgaagcagatggagagcctggtcctggcccgcggtggggctgcaggtgggtggggagggccgggcactgggaggccgcctcctctcactttcaatgataataatgcaaccaaaacctttatataaacagtttatttacccaacttttttgtacaa

SEQ ID NO: 181373 - DNA, 740 bp, Homo Sapiens
  misc_feature (443)..(620): n is a, c, g, or t
tcagaatcccttgggggagaataatagggttctctggagaaacagaaagtggtgtcagtttcagttggggtctgaaggcccaagaaccaggagcatcgagggcagggaagacccagctcacgcagtcagcagagcccgaagtcacacctcctctgcctacttgggccctcagtggatcggatgtggcccacacccacattgggggagggcagtagctttatgccagtcaccaattcaaagaaacacccagaaataaggcttaattagctatctgggcatccctttgcccagtcaagtggacacataattaaccattacatgtaaggtcttgaaaaccaggtgtcttggcctctgcccagatctcctggtcccagcatctctaagactcccacgtgatgctagtgtcaaggctctgtagcgtggtgactgagagctcaggtatnnnnnnnnnnnnnnnnnnnnnnnnnnnnnnnnnnnnnnnnnnnnnnnnnnnnnnnnnnnnnnnnnnnnnnnnnnnnnnnnnnnnnnnnnnnnnnnnnnnnnnnnnnnnnnnnnnnnnnnnnnnnnnnnnnnnnnnnnnnnnnnnnnnnnnnnnnnnnnnnnnnnnnnnnnnnnnnnnntgttaagtgttagtattattttcaggtttggaagccactggcatcattcatttattcagtccacccttggcagctatttaagcagtttgcagagttttttattacctaaaaatggtgcag

SEQ ID NO: 181374 - DNA, 1895 bp, Homo Sapiens
  misc_feature (526)..(832): n is a, c, g, or t
  misc_feature (1517)..(1566): n is a, c, g, or t
  misc_feature (1647)..(1676): n is a, c, g, or t
aaatacatctacccagagaactgaaaagtcaaagggattgatcatagggagcctggatttcagatggagttaaggtaggacagaggagcacaacttctcattataagcccctctatgctttttcatttgtacatcgtggttattcctctggttcagtttctaaaattgcttttttaaattgggaaggcctttggtggtaactgtgaggtagaagccaaggagtgtgaatcctaccctgctgccagcttgctggcagagcccacaggatgactgctggcaactgctgatgaaggagaggaaattgcctggaggtcctggggactgtaggcaagacaaagggaattggtaaaggagagatggaggcctaggctgggcctgcacagtgaaggggccacttaggatgtcttcttgccacgtggttattttatgtagtttttaaatatactcaagttgacataattttcattaaagcacatgggagctgaattgagaagtttgctcaattctgcttaaataaacaaattannnnnnnnnnnnnnnnnnnnnnnnnnnnnnnnnnnnnnnnnnnnnnnnnnnnnnnnnnnnnnnnnnnnnnnnnnnnnnnnnnnnnnnnnnnnnnnnnnnnnnnnnnnnnnnnnnnnnnnnnnnnnnnnnnnnnnnnnnnnnnnnnnnnnnnnnnnnnnnnnnnnnnnnnnnnnnnnnnnnnnnnnnnnnnnnnnnnnnnnnnnnnnnnnnnnnnnnnnnnnnnnnnnnnnnnnnnnnnnnnnnnnnnnnnnnnnnnnnnnnnnnnnnnnnnnnnnnnnnnnnnnnnnnnnnnnnnnnnnnnnnnnnnttacaatgtaaagagttgtataagggcaacttgctgttgcctttttagggaatttctattgttttccagatttaaggcagaatgaaacataactagccagttattgaaaattgatttatttatggattttcagaatttcctttgccatattttcccattttatgatctccagcattgtttgcacattgttttcattactgcactttgttataattcatcatttataccatccatattctttcttttcttacagattgtgatatctttagtctgaatttttaactggaatcagaactggatgttggggtcactctttgttttattgtacctcgtgattacctaattcaaaattgccccccaaaaagtcagattagttaatataattttttaatgttaaagatgtatcgtggtaaaaaatttactctagcagccatgttgaacaatgtatttaaaaattgtaaactcttggaatactgtatttatctgctatttcaatataaagtcctttgacttagtcctggtaactgtacagtaatttggtttactaatgaaagttgtgaataaaactgtgaaactaaaagggagactttctggactttaatagaaaaatgtgattttaagattgctttttcttttgttttagcgtaatttttccctttatattcccctcatcaatgtaaataannnnnnnnnnnnnnnnnnnnnnnnnnnnnnnnnnnnnnnnnnnnnnnnnnctttcaccacaatggtaatgcttctgtaaatgcctctatttgtccagttggctgaaaatgttgtaatctttattagacaannnnnnnnnnnnnnnnnnnnnnnnnnnnnnttaaatattggctttttccagtgagctattatgtttagtgtacagtgaaaagttttaatattataggttaaaattttcttaatcgttcttttctattcgcttgccaagggtgaatgagagaacatggctcgcttctcacagactgactgaccttggcatccgcataaagcatcatttgttttcaaaaatgaaggggtgcttaattgttccctttttttc

SEQ ID NO: 181375 - DNA, 383 bp, Homo Sapiens
gtgtgagccaccgcacccgacctgttaaatatattttctatgccttttgtcatctctttgccttctggaactctaaaaatatgaaatttttttcccttgatgttatctaataagtctggtaggctttcttcactccttgtcattcttatttattcttctctcactggtaattccaaacaaactctttatctttctttgcttgagtaagtttgctattgatgctctctattgtaccttatattttatacattaaattcttcagctgcaggattcctgtttggtgattttaaaatatttctttcttaaatttctctttcatgttatgaattgtttttctgattttattgaattatctttctgtattatcttgtatcctattgagg

SEQ ID NO: 181376 - DNA, 875 bp, Homo Sapiens
ccagtctgaatgctcatctgcaaattcagcctgactctcaaggtgtggtcaccatacttggaaagacttgagaaatcacattccgtcaaggtagtattcatgcatttatcttggaatatcctataacttaggtactgagctgtgaaagtcaggttcccttcggcaaaagcaggtgactcccactgtagaatgttcttgaaattaacagaattcattctgacattttcgggaggtggtaccattcccaatgctatgaaaataagacaaaaacatttacaacttttctcctcaaaacagatgcccatgaaaaagcccacatccagcacttggttctcctctatggctccatgtcttcaaaggccacgtgggtgagggagggagagacaggttggctgtgctgaggagtctagattttctttgaacagccgtgaggagaaatttctggaggggcaggagtaaaatggggacagacaaaggagccttggatttgtctggtggcagaaagctatgagggggtagggtgggcacatggatttcagatatatttccagacgtaaaaacaaactggagacttcctgatacatttgatgcataaaagctgaggtcaatgtccattttgggcttaagcagctggtgccccgattggagctcagctggggaactcacgagtcccatttgagctgcattaggttggagatgctggagagaggctgaagtaggaatgtcagggagacagccagatgaatgagcccagaggtcacaccaagaagagatgtgggctagagacagaaattattttcaaaccttttaatagaaaattcgaaacctggccaggcacatgatcgttccacaagtgccaacttttttgtacaaag

SEQ ID NO: 181377 - DNA, 1205 bp, Homo Sapiens
ttgggggcttttagtttatacttcataagaccatggaagcaaaatttaggtatctgacccttctgcacaatttaggaccccgtgtgtgtttggcctacctattcgagttcaattgaatctttctgagcatctatggtgtgccaggcactctcctaaatgggaatacaatattaatccagatacataaagtctctatccaaaaggagcttcaagttggcttgggcaaagaatacatgtcataatggactgtttatataaatgatgggaaagggttggggttagggtgtgagattactttagaacgtgttatttaaaaacagtatgaatgaaggacattgtaagtcaggttttttattatatcatggtcatatactcctgttcctgtcagtttttcctgcttcctttctttcaccaagatcactcctttccttctcagatcaccaagtcctcctagctatagagagggccttctattcctctccacctaaacttatataagctactgttttcctcatacagacatgttaatgaaaatgaatttctacaggatctccagtccattgaaatacattaatttttgagtctcttcacacatttttatttcctagatttaagtcttgattgcaatcacatacaactagtatttcttggaataaaacagcaatcacaaaaatcataaatatcacattgtttaaaaaaatttattatttgatgttgaggactccatcctgatttcaatgaattaattcatttgttcccttttaaaatgtcatctgtgttatttatgtgtataaattttcaataattgtttctcaatatagagtaaatgatacagctccatagaaggcctgtaagatttttgaaattaaaataagtttttaaataaaatatgctgttatgatcattgaagttgataataaaattattccattgattctgtttctcccaagaaccaccatttaatcatgaaagctagctaagtaatatttttcagagttcgtgagttccagaagtaaaattctttaagctaaacagcttgtaaagtaacttttgctttataattattataattttgggtgttatttatgcaaactcaaatcaatgtactcataatcaaaacattgacatgcaaacttatgtattaagcaaaataaaatatacaagtgtgatatatcattgtttataattccacatacacatgtaaa

SEQ ID NO: 181378 - DNA, 1046 bp, Homo Sapiens
  misc_feature (459)..(487): n is a, c, g, or t
  misc_feature (538)..(606): n is a, c, g, or t
  misc_feature (956)..(964): n is a, c, g, or t
ttggatgttattcaaaagaacgtttagtataatatatgttacataaaataccagtttacaaaattggtcttgcacaaaaaattatgttgattaaatgcttatattttattaagaaaaccagtcctttttaatttttcaagagttactacaacattttatttcatagaccatgcaaatgcccaaatatttgttgcttggcttaaagttatctacattgttctaaaccacatataatactgttaggtttttcaaaggggagaaactgcatgcattagtttgaaaagtaaattttaaacattgttctttacaatggtaatgtattcagaagtgtttaaactacccattaatacttgctttttaaaaattgactactaaagagaacatgttgaattagttgattcaccttttatgactataagtagctggcagaattagcttttataattaaaaaaaattggnnnnnnnnnnnnnnnnnnnnnnnnnnnnnaatagagacagggtcttgttatgttgatcaggttaggctcaaactcctggnnnnnnnnnnnnnnnnnnnnnnnnnnnnnnnnnnnnnnnnnnnnnnnnnnnnnnnnnnnnnnnnnnnnnctttttagtcccattcttaatgagctgtggatttaaaaggtatgtgtttcagtccattgtagttatttttcttattgatgctcaaattgtctcatctttgatcaattaatccttagtgacttctttgctatatggtaagacaagtcattctaggattaatttgtacatttctaaccattacacctagaactggctaatttttcaggaaaccctgtcgcctttttggtgtgctacttttgaatagctattgatctctgaaattgaacaaagaaaaagtattagctcttgatctcattgaaggaaacattaaaaggtaatagggtttcttgaaaaattggctgagtctagcnnnnnnnnnggtatttaggttctagagattcttatttgctgttgcattgatcattgtttctaggccttttttttctatttaaaagatccaa

SEQ ID NO: 181379 - DNA, 1589 bp, Homo Sapiens
  misc_feature (96)..(151): n is a, c, g, or t
  misc_feature (721)..(749): n is a, c, g, or t
aataataaagttaagaaaacaaaacacactcgcaaaattaagtttggctcaaaatactattgaaaatgacatcaacgttaaggaattgaaaggacnnnnnnnnnnnnnnnnnnnnnnnnnnnnnnnnnnnnnnnnnnnnnnnnnnnnnnnngaaatactaacagaagcaggcacattgtgacttactttgtaacgaaatccaagcacagtaattataacagtcataaaagcagtaataaatatagattgtattcgctgagcacatactgtaggctaaacacatactagaggctagacactgttctaggttagggggatgcaaactcttttcttgcagagccaattagtaaatattttaggttttgcaggcacacacttgctgctgccatctctcagttctgccataaacaaatggacacgatggtggtttcaataaaactttatgcatacacgtcggcaggagcttgctgacacctgttccagatgctttccatctactggaacgactcccccaaaatcggtgctattattaccattttatgattaagtgcatcgaggataggaagttaagaagcttgaataattttacaactaggaagtgcctggtgtttttactgagggctaaaacaagtatttggcctggttactgacataggtgaagtaacgtgatatacgttaagcatgtatacacactcacacgcacacacgtcagaccccaggnnnnnnnnnnnnnnnnnnnnnnnnnnnnntactcacggttattaatcacaagtcctggaaatggtctaaagagagaaacaaattgtaaagtataacaatttattttcactctgtaagaatttacaggtataactgtttattcaactcatatctagcccacgtcatttacgtactacaatgagaagtattatccgtgaccttataagcttatggaagagatagatacgtatcaataataagaacactgttagaaagtgttaagctactagtaaatggaggaaaaacaaaaaatagaaacgcagagcagggaacagagtgattctaagtttaacatacggaagaacggaaggggctttttgcctaactcctgggagtgatatggagaatgacggtgggtgaagtggaaccaaaatatgagattttgagggaaagaagattggaagaagatgagtgtatgagaagcctcaagaggatttattatgagatttctgagtgccagtcccaagagacctgaactagagacagtggcaatctgatgatgaaatgattgggtaggttgagtcgtagctgtttctggggggctggaagacaaaggggaagataacctggggttggtgctcaggtgggcatctcttacagtgacaaggacgtgggaaggaatgtggcactcacaatggtgtcagaggtgagtacaatcatcatgcctgctctacgggaaggagctgacactctcagtgggaacaacgatcaatctcatttacagacaaagaacagagtgacctggctaacaaatggctgatgcaaggttgaatccgtctgacccgaagcctgtgacaaggcgccctaagacagaggttgacaaagttctt

SEQ ID NO: 181380 - DNA, 840 bp, Homo Sapiens
ttggcgttggttccggaggtcgctgcggcggtgggaaatgctggcgcgcgcggcgcggggcactggggcccttttgctgaggggctctctactggcttctggccgcgctccgcgccgcgcctcctctggattgccccgaaacaccgtggtactgttcgtgccgcagcaggaggcctgggtggtggagcgaatgggccgattccaccggatcctggagcctgtgagaaacctcttctgcccaccctgggccagccagatgaccaatccctcacgacatgcaatgtcgggaggacttcctttgggcctgcccgcactgttagctcccgactctgtaggccagacctgacagggcccaggctgctgaccatcatccccatgttaccaccttttcctatgcatctcacaggccccattcttgggaatctcccctgcccactctcagccctacctctcagtctgcatagagatggctattctgctggctccgattctcatgactctcccctccattcaggggcctagtcttgcattcctgttctcttgggttttcttaccagtgacacctcagccttctgaggacttatttcttggtaggagctgctgcttttctgggcatgttccatgtgttgactccctacatactccaggactagcttaggtcccaacccaatagttcccagccttctgaggacccatgactcctctttccagggtttgaacatcctcatccctgtgttagaccggatccgatatgtgcagagtctcaaggaaattgtcatcaacgtgcctgagcagtcggctgtgactctcgacaatgtaactctgcaaatcgatggagtc

SEQ ID NO: 181381 - DNA, 1242 bp, Homo Sapiens
  misc_feature (924)..(943): n is a, c, g, or t
gccctaattcagaatcctcatctatgctgcaatcccatttactcttctcagttatttatttcccacaccctctcccaaactcaagtttgacaaatgctgaaagaactttctcacttacacctggactatatagatttctttccccttcctgtactccctcccctacctcctcacatacacctctgtactttattatttttgactgacaacagatttctccaagtcttacccctcctaagcctttcaggttctatcttctattaattccctgtcaactctctaactctgatgtgtgaagagcccaggactggtctagctgagacaattctccctaggagacagatggggcaggaacaaaaggagaagcagggaaggcaattaggggcttattttggcagcctggagctgggtggagagtctgagatcaacttcattctttcagtgaacattcattgtgtgccaggtctgtgcttggtgctggagaatgtgcagggagcatgccagacaaaagcctgccctcctggagctcactgtgctaagtggtaggaaagaagtcgaaataaatgctgatggcgggggtgggaggtgagcattccatagggagtagcaaaagtcactctgaggggttgacattcgagttaagacctgaagcactaacaggaacgctcaaggcagaggaacagcagccctaaacatggcatatttgagaagcagaaagaatggatcatggagggtgatagggtttggatggttgtcccctccaaatctcatgttgaaatgtgagcttcagtgttagaagtgggcctagtgagaggtgtttgggtcatgggggcagatccctcatgaatgtctcggcagtaatgagtgagttcttattctctgagttcacacaagatctggttgtttcaaaaagcctggcactgnnnnnnnnnnnnnnnnnnnnatccatgtgatgtgctggctctcctttacatcccgccatgattataagcttcctgaatccctcaccagaagcagatgctggcacgatgctttgtgtacagcctgcagaactgtgagccaaataaacctcttttcctgatgaactacccagtctcaggcatttatttacagcaatgtaaatggaccaatacagagagcaaaggaggaaatagacctactaagtcaggttatgttgtaggatgcaagccttggtgaggatgagttttattctaataataagtgaagcctcagaagggccaa

SEQ ID NO: 181382 - DNA, 1359 bp, Homo Sapiens
  misc_feature (159)..(173): n is a, c, g, or t
ttgggggattccttctatggaaccaagttccatcaaagcccatttaaaagcctacattaaaaacaaaattcttgctgcattgtatacaaataatgatgtcatgatcaaataatcagatgccattatcaagtggaattacaaaatggtatacccactccnnnnnnnnnnnnnnngctaaattctcagtagaacattgtgacttcatgagccctccacagccttggagctgaggagggagcactggtgagcagtaggttgaagagaaaacttggcgcttaataatctatccatgttttttcatctaaaagagccttctttttggattaccttattcaatttccatcaaggaaattgttagttccactaaccagacagcagctgggaaggcagaagcttactgtatgtacatggtagctgtgggaaggaggtttctttctccaggtcctcactggccatacaccagtcccttgttagttatgcctggtcatagacccccgttgctatcatctcatatttaagtctttggcttgtgaatttatctattctttcagcttcagcactgcagagtgctgggactttgctaacttccatttcttgctggcttagcacattcctcataggcccagctcttttctcatctggccctgctgtggagtcaccttgccccttcaggagagccatggcttaccactgcctgctaagcctccactcagctgccaccacactaaatccaagcttctctaagatgttgcagactttacaggcaagcataaaaggcttgatcttcctggacttccctttacttgtctgaatctcacctccttcaactttcagtctcagaatgtaggcatttgtcctctttgccctacatcttccttcttctgaatcatgaaagcctctcacttcctcttgctatgtgctggaggcttctgtcaggttttagaatgagttctcatctagtcctagtagcttttgatgcttaagtccaccttttaaggatacctttgagatttagaccatgtttttcgcttgagaaagccctaatctccagacttgcctttctgtggatttcaaagaccaactgaggaagtcaaaagctgaatgttgactttctttgaacatttccgctataacaattccaattctcctcagagcaatatgcctgcctccaactgaccaggagaaaggtccagtgccaaagagaaaaacacaaagattaattatttcagttgagcacatactttcaagtggtttgggtattcatatgaggttttctgtcaagaggtgagactcttcatctatccatgtgtgcctgacagtctcctgggcactggctggtaacagatgcaaactgtaaaa

SEQ ID NO: 181383 - DNA, 1629 bp, Homo Sapiens
  misc_feature (1405)..(1419): n is a, c, g, or t
ttggggattaaatatgatttacaaaagttacatggagggctctctaaaacattaaattaattattttttgttgaaaagtcttactttaggcatcattttattcctcagcaactagctgtgaagcctttactgtgctgtatgccagtcactctgctagattgtggagattaccagtgttcccgtcttctccgagcttagagttggatggggaataaagacaggtaaacagatagctacaatattgtactgtgaatgcttatgctggaggaagtacagggaactattggagcacctaagaggagcacctaccttgaatttaggggttagcagaggcatcctgaaaaaagtcaaagctaagccacaatctataagcagtttaggaattagcagaacgtgcgtggtgaggagatgccaaaggcaagaagagaagagtattccaaacaggagggattccaaagagagaagagtatcccaaacaacatttgcacaaacctgatggggagagagaatgtggggtggggatggatgatgagactgaagaagaaagccaggtctagataatcagtggccttgtacaccatgttaaagagtgtagacttgattctgttgtaaacaggaaagcagcacaattcatatgaatattttagaagactcccactggaatatggagaataaagttggagatgactaatcctggaagcagggagaacatttttgaggaagttggctattttggtgaaaatgatggtcataaacatgaagaattgtaggtgatcatgacctcctctctaattttccagaagggtttggaagatataacataggaacattgacaggactgacgaaaggagatgaaatacaccatataaattgtcaaacacaaggccagatgtctaattattttgcttatgtgttgaaattacaaatttttcatcaggaaaccaaaaactacaaaacttagttttcccaagtcccagaattctatctgtccaaacaatctgtaccactccacctatatccctacctttgcatgtctgtccaacctcaaagtccaggtctatacacacgggtaagactagagcagttcaagtttcagaaaatgagaaagaggaactgagttgtgctgaacccatacaaaataaacacattctttgtatagattcttggaacctcgagaggaattcacctaactcataggtatttgatggtatgaatccatggctgggctcggcttttaaaaagccttatctgggattccttctatggaaccaagttccatcaaagcccatttaaaagcctacattaaaaacaaaattcttgctgcattgtatacaaataatgatgtcatgatcaaataatcagatgccattatcaagtggaattacaaaatggtatacccactccnnnnnnnnnnnnnnngctaaattctcagtagaacattgtgacttcatgagccctccacagccttggagctgagagggagcactggtgagcagtaattgaagagaaaacttggcgcttaataatctatccatgttttttcatctaaaagagccttctttttggattaccttattcaatttccatcaaggaaattgttagttccactaaccagacagcagctgggaa

SEQ ID NO: 181384 - DNA, 808 bp, Homo Sapiens
taatttattttttgccatggtatataataggaatttcaaacaggtatagttgtaactgccacattttttatcactatgatttgctgagaaatgacagcaatatcattcactcccctcctttgtttaagacccgtactgtcagtatattcaaccttctcccatccccaacctgtgtcttgcatatccccagaaatttaccctttattcctccttaagagcatctcaatctcagacctgtcttagcctatctcacacccccaaggaatgcaaggattatatctggtgcttcatatggttcacagaacagcgctttcatatgggtaatcaaacattggctgagtagtttctattctattactgcttcacttctgcctaatttgtaactgtcttgagggcaaggactacatttattttacctgccactacaagtattgccatttacagcttaatacatatttatcgaattaatacatgaacggacacaatgtaaaatactttttcttacctactatagtctccagtcaaaaattctgcaatagcagcaggaagctctgttttaataattaaaagataagatgacatagctccaatattctgaattattatggtgcctgccaccaccaactttccaggtaatccaaatgcaaagagtccaagatcttcataagatgttacagctgtctgaatacacatactaagcagaagatggactgagtaagaagccaggagagcaactgtcagcagcaagaagctaaatccaaagacaccggtattagccataacataagctaagccaaggatgccccaa

SEQ ID NO: 181385 - DNA, 1319 bp, Homo Sapiens
  misc_feature (1092)..(1104): n is a, c, g, or t
aaaattgatgagcaatgctttaactttaaaagacaaactttgtacaaaaaagttggtctgcattgagaccaaaaacaatccgcatcttgggctttaaaatgtgtgaagatcggagttgactattttaaagttggacgccatgtggatgctatgaatgaatacaataaagctttggaaatagacaaacaaaacgtggaagctttggtagctcgtggagcattatatgcgacaaaaggaagtttgaacaaagcaatagaagattttgagcttgcattagaaaactgtccaactcacagaaatgcaagaaaatacctctgccagacacttgtagagagaggaggacagttagaagaagaagaaaagtttttaaatgctgaaagttactataagaaagctttggctttggatgagacttttaaagatgcagaggatgctttgcagaaacttcataaatatatgcaggtgattccttatttcctcttagaaatttagtgatatttgaaataatgcccaaacttaattttctcctgaggaaaactattctacattacttaagtaaggcattatgaaaagtttctttttaggtatagtttttcctaattgggtttgacattgcttcatagtgcctctgtttttgtccataatcgaaagtaaagatagctgtgagaaaactattacctaaatttggtatgttgttttgagaaatgtccttatagggagctcacctggtggtttttaaattattgttgctactataattgagctaattataaaaacctttttgagacatattttaaattgtcttttcctgtaatactgatgatgatgttttctcatgcattttcttctgaattggaccattgctgctgtgtctgtgacatctggtgctgctcatccccatccacaaactggaaaatgatttcctatgtaatcatgcatccaactgggctgtgctatttttttaaatggtttgtatttgaacatggtgattcctccttcacttcaccttaacggaatgtctttatttgaattttatttgtaaaatgtgtcctgtttaaatttttcaatctttaaaaataatttttatgtacnnnnnnnnnnnnnaacctttcttgcactctgggtcatgggtaccactgcaatggcttcccctttttttatgggataccaactgcaatatggtcctcaatgctgttctggccatttcaatgactaatgccaaacatctgtatgactaatttttttatgttaaaaaaatactgtttaatgctggctctatggtgatttgggttttactaaattgggtttctcgttggggg

SEQ ID NO: 181386 - DNA, 2330 bp, Homo Sapiens
  misc_feature (220)..(233): n is a, c, g, or t
  misc_feature (542)..(604): n is a, c, g, or t
  misc_feature (914)..(1138): n is a, c, g, or t
ttgggacatctggtgctgctcatccccatccacaaactggaaaatgatttcctatgtaatcatgcatccaactgggctgtgctatttttttaaatggtttgtatttgaacatggtgattcctccttcacttcaccttaacggaatgtctttatttgaattttatttgtaaaatgtgtcctgtttaaatttttcaatctttaaaaataatttttatgtacnnnnnnnnnnnnnnaacctttcttgcactctgggtcatgggtaccactgcaatggcttcccctttttttatgggataccaactgcaatatggtcctcaatgctgttctggccatttcaatgactaatgccaaacatctgtatgactaatttttttatgttaaaaaaatactgtttaatgctggctctatggtgatttggttttactaaattgggtttctcgttgggggtggtcttttgaatactgggttttatatattctgctatttttaacgtgtggtttttttcgatatctgggttctaaaagaaatctttggaattaagnnnnnnnnnnnnnnnnnnnnnnnnnnnnnnnnnnnnnnnnnnnnnnnnnnnnnnnnnnnnnnngttgcgtaagctcttaaaagaagagaagaggtaaactataatattcagtatttttaaacttaaggcaactactgaattgaacccaaagtgccatactggaggtaaagtaaataaaaatatgaaagtatttcaagtgccaatcagtgactgttaagaatctttagcaaatatgtgttccatgtattttcttattaaagagatgaagtggaatttaaggctagaattctacaaaaaaagagtatcttagaattaaaatatagaataagttactttaattatgttttaggaagaaatattttagaactagagnnnnnnnnnnnnnnnnnnnnnnnnnnnnnnnnnnnnnnnnnnnnnnnnnnnnnnnnnnnnnnnnnnnnnnnnnnnnnnnnnnnnnnnnnnnnnnnnnnnnnnnnnnnnnnnnnnnnnnnnnnnnnnnnnnnnnnnnnnnnnnnnnnnnnnnnnnnnnnnnnnnnnnnnnnnnnnnnnnnnnnnnnnnnnnnnnnnnnnnnnnnnnnnnnnnnnnnnnnnnnnnnnaactagaggtagccaaataaaaaagttgagttctcctttatgtgttcagtagtcttaagtttttaaggtagtgttgaaaaaagtctgtctttcagagatgatggatttgcttacaatgatacctgtctgcaagcattttttcccccaaaagtgcttaatagtaaaattagatcttgtagtagccgagattattgtatcatttatctgaaccacagcttttataaaatctttaaaggaaacaaatagggcccacatctttatgaataatttagaaacatttttgtatatatatgacaaatgaactgttttttttaggctaaagaagaaaagaagaaaatcaacttcttcttcaagtgtttcttctgctgatgaatcagtgtcttcatcatcatcctcttcctcttctggtcacaaaaggcataagaaacataagaggaaccgttcagagtcttctcgcagttccagaaggcattcatctagggcatcctcaaatcagatagatcagaataggaaagatgagtgctacccagttccagctaatacttcagcatcttttcttaaccataaacaagaagtggagaaactactggggaagcaggataggttacagtatgaaaagacacagataaaagagaaagatagatgccctctctcttcatcttcacttgaaataccggatgattttggaggtaggtctgaagatccaagagatttttataacagctataaaacccaagcaggtagtagcaaaacagaaaagccatataaatcagaaagacatttttccagtagaagaaattcctcagattccttctgtaggaattcagaggacaagatttatggttataggagatttgaaaaggatatagagggaagaaaagagcactatagaaggtgggaaccaggttctgtgaggcagtctacctcaccagcaagctcagaatactcttggaagtcagttgagaaatacaaaaaatacgctcactctggatcacgtgatttcagtagacatgagcaaagataccgtttaaatacaaatcaaggagaatatgaaagagaggacaattatggggaggatatcaaaacagaggttccagaagagatgcactaagtagcaagaacactcagaagcagtgttaagaaaatttacctcagaatttactgaatatatttaatcagatagctgaatttg

SEQ ID NO: 181387 - DNA, 1319 bp, Homo Sapiens
ttggattgaattttattatatgtatgataaatattcttcattcaaagtgtaagtggtaccaataagaaagtaaacagggactctagaaattcataaggttttcttgaatattctggactgctgtgggaaattatagctgtagtaattaaaacatttgacattataagccaaattagttcattttcacatcatcttgtgtgaactttaagcatcctctgatgtatattctcagacttctcatctctgttcttagggcacagctgcctctactcatcaatctccacattattcaatcttctgtcagtttatcaacaatctgcctataagtacattttctgaaatattttaaaaaatcattataagtatttcacatttgatagaagcaaaaaatttggaaatgcacacacaatataggtggtgtattattccgttttcacactgctgtaaagaccttcctgagactgggtaatttataaaagaaaaaattttaattgatcacagttcctcatgactgaggaggtgtcatgaaacttaccattaccgctgaaggggaagcaggcaccttcttcacaaggtggcaggagagagaggagtgagtgaaggaggaacttctaaacagttattaaatcatcatatcttgtgagaactcactcaccatcgtgagaacagcatgtgggaaactgccaccatgatccaatcacttcccaccaggtctctctctcaacacctggagattattattcaagatgagatttgggtgaggacacaaagcctaaccatatcaggtggcaagtatggacaaaaataatgtgaacaaaaaaatgtgtaatctcaattgctacggctaccaatatttcttcagtcttctaatatcatttctatcttgtatttttaatagatttagaagaatttaatgtaattaagacaaaatggctaatatattttctcaagttataagaaaaatgttgtacagtattcattgattctatatatcgctattttagaatccattacatgtattgtatgtaacctatttttaaagatttgcggaacaaatacatatttttcctatttcagaaacagattgtctcagtttacctagctttgaaaatgccatacccatgggagagaagaaggatgtgtataaggcgggtgagcaagtgacttacacttgtgcaacatattacaaaatggatggagctagtaatgtaacatgcattaatagcagatggacaggaaggccaacatgcagagacacctcctgtgtgaatccgcccacagtacaaaatgcttatatagtgtcgagacagatgagtaaa

SEQ ID NO: 181388 - DNA, 872 bp, Homo Sapiens
  misc_feature (775)..(783): n is a, c, g, or t
ttggcggttgtttctattttatgggttttatgaatagtgctaccgtggagatttggatgtaagtttttctgcagacatatgttttcatttctcttggatctgtacctaggagtagaattactaggtcaaatgctcactgtttaactttctgaggaagtgccagactgtgagctctgcactcttttgctactgttgatgcactgagttgttgaatgaggggtcagagcatgcctgaaactccagattaaggggggcccattttcccaagctgtcagatttgttttggaaggaaagctgagtaatttaatgggcaagtcattttaaatattaatttttattaaaataattatatctaatagaaagctaaatttatatcacattttagataaaagacttcacagatctttgagcttgaatatgtccctagaattcctggagttaattgcccgtggtcataaatgtaaagtttaagaaatgtgggaaataaaactaaaaataatattaagtgtcattttgtggttctttaataagaacatgaaatattggagaaagggtgaaaagatgtaatagaaaattttttttaaatacacataaaaagaacatgaaattaaatgatgaaaatatccatttcctttagcaggcaaataatacaaatccctgcttgtcactttaaggattccatagttattcactttaacttatcagtaaccagattctgattattgatttggaaattattctgaataggaatttagaaactgaactctctgtcgcnnnnnnnnncccagggtgcagtacagaaggtttctaaaaattagaaatgcacgtttacagcaagaggttgggagatcatgctccaggacatatttgga

SEQ ID NO: 181389 - DNA, 1270 bp, Homo Sapiens
aaactacccagactctcacaaatgacagggctgtgactgaccccaaaataccagttaaagggggagtcaggcatctgtccaatactcgaccatgcctctccaagcctgggaagtgaagtaggccgataacactatctcgatggcagatacagcactcagtacatacaacgcagtgattgttccaatgctggagcagtcacagaagatgggttgtggtatgaacaatggctggcatgaaagatgggggatgggctacagatccaagagccagacagactagggagacagaggcaaaaagctatggttggcaaggtttcccaagggaagtaaactacaaagcctcttcctcacactgccaaccctctgccctgcaggaacagaaacccagacacctgggagtgggatggcttcaagttcctgaaagttgagcagtttatttggagataaatcagtgatattttatagaggaagtagagcaatgtgtattctggaaaagagagagacagaaatctgtcttttcatcttggttaaatttctaattctcctgggtgagagggaagcagactaattacccatcatgcagagcctaattataaagttccttgggtctcaggtcactgaaaaacatccctttacctggttagagccaagaaaaaattcctaggtttgatggaaagacagaatccaactaaaatttggcaaccctgggtccctattgtctcctgggaattttgtagtgttggcagaacaaaagctgtttccacaaatggggaggaaagagattaggaaacacactcaagacaaacgaaatgactttctccataagtatgacgtctcagaagtggtctcacacaatatgggtaatagataaatacaaattaaaaccactgatatcatgttttactcttattgtccagaggccaaagatttaacaatatactgtgatgctggggctgggaggagattgcacctttatagcctggtggtggcagtccagagtgcaacccctagagatggtaacttgacaagacctctcaaaaacactacacacagcttttgagcccctcatcccacttctgagagtaagtcctatggcaacatgtgcacacgtggaaaatgaagtctgtacaaggtgagttactgcagcattgtttataatagcaaaatactggaaatgactcaaatactcattaatagggcactagccaagtaaattatagcacacttacataaacgaatactaggcagctgtaacagagcttactcctca

SEQ ID NO: 181390 - DNA, 934 bp, Homo Sapiens
ttggaattcttattgtagcaaaactcttaacatagcagctgaccttttagaataaagactaacttttaggtgctggtttttggttactgtattttcaaacactgatggtgtctgcatttctgccaaaggtattttagttttatagataatgtgatagtgtataaaggtttaataatgatacctccttaaataggaagaggagattattctgttacgtttatagcctcttatgatacacattctttgataatttaaaagctttgagtcaccttagtgcacagtaaatctcttgtagaattagttgattagtaatgatttggatataatgtcacattcatttgccaactggttggacctgatgttttgaagtgcttcttataatttataaggctgtatttgaagattacacaattgaatgtgaaggaaagttatttagaatattagtttcaagcttttaatgtctgtgtctttgtgtttttccagataagtattcgtttctagtcttccccaacaaaatttcagttctcctgttagtaagaaaagctatcaaagactttctatttagtttctgaattttatccagtatcttaacttacaggagacttacttcaaattaaaaagtaggttaattaatgaatgactatcagtatcatggtaaatttcctgtaaactggacattaaattctaattcactactttagatggagggaaggtttttaaattcttagttttgaattagtacattttcaacaatgtagggagttttgaaaacttaaaagtagaaacactgaactgtaagtagctctgggaaaacaggagcaaaagaatagataagcagatgtctgttaatatgtgatgcagcttttaaagttactaacaaaacccgggtctctcgttccttcatagggatatatagctttgctactgctttttg

SEQ ID NO: 181391 - DNA, 1422 bp, Homo Sapiens
  misc_feature (438)..(448): n is a, c, g, or t
  misc_feature (1086)..(1101): n is a, c, g, or t
ctgcagaaaccaacgggataggattcaaaactaggtgacaaactcatgagaaatccaacctggctgaatgtctgagaggctgctactgtatcaacatcacaagataaagcactctggtatcacctgcccatatcctcttagtgtcacccaagacatttgactctgatgtggttaattgataacttttcttgctccactttacaatgttttgtttcctacatcttattaccttgggacacaaaagtggcagagttgttgagagctgatgacaataaaaaggagaacactagaggaaatgagacaggaaaaaaagccaaagctgattttccaactctatgctgactccaacctgcagaaaaagctgaatatagaaatcttcttccatatatgatgaagtcactccacttacgacataacacacaaaggaatcacctggcnnnnnnnnnnnaacccagaagagttgtgctggggaccatgccccatcccgctgatacagatcctgaatggaataatcaggaatggcacagtgcaggtgtcaatatcaaagtaaggccgcagaatttttgagaggaccctccaaatactgagaacttctgttgcactcgaaacagtctcctggatttctatatttttatgtgaagggctcttattgatgtcccccagaatccagactcagacctatttctccaaaaaggtccaattgggttgctacatagtagcaagggtttatcttcatgctcacctagcattccaggcccccattacttcaaaagtgagcttgaaattgttttaagtgaactatggctgcggattttttactgttttatctcagggagcatacagtggagtgattaaagtttggactccttctccttgtgatgaagagaaacagtgagtccagctcttaggaatggcatcagttctcctgcaaacaaaatgctgggatgcagacttttggcacattgtggaagtaggagaactattaatcctgtaatggttttcatgccactgggtcaggaaggctgtcctacactaaaccttactgcatctgaaaacatgtttacatcccaacaagccaccttagcnnnnnnnnnnnnnnnngaaaggaaaatgagattacaagtcaatacctccacagagaggtaactcctaatattcctatgatctctgaaccctatttaaaccctcctaaaataaaaatatcattttggtttttctattatatttaactctaaaggcgggctctgactaatttgcttgggcttgatgctacagtattagcacaagctataagctccctaccaccatataagccttgctcttcggccttccatcattttgaaccctaaacctcatagatttagaacgaaacactgtataaaaacaaacagataaagggttaaaatattacaaataaaccaa

SEQ ID NO: 181392 - DNA, 958 bp, Homo Sapiens
  misc_feature (369)..(391): n is a, c, g, or t
  misc_feature (609)..(618): n is a, c, g, or t
agcaatgcttttctataaaggccaactttgtacaaaaaagttggcggggctaaactgcttcaccctgcctgagaaccagggagcactgcatttctccacagggtggaggagaagaggcagaataaaccaagcctgggacacctccctcctgtctaggtgtactcattcttctgtttcaaaagaaggcaaggacatgaagtcaacttctacctatcttctgctgctggtgtcttatgtattctcagtttgacctgattcctcttctgtcttttgacttaacattaggggttcttggtcataacctgctctgatgtacataaagatttcaggttcaatatcaatgtgtcttaaaacagaattattttagcnnnnnnnnnnnnnnnnnnnnnnnacaaacaacgcaagatataattgccaaaaccaggcttgaggttggtgactcttgaaagattttctttcttcaggcctagatcataaaattaagtgcagcaatatcatgaattctcagaagccctttcagggagccagtgagtcatacagtatccacagttgagtcacttaaagatgtcagtatacgaaacattattcacaatccttgggcaatctcannnnnnnnnnccttctcccctcctcccctgccccccatacatttctatccttgagttagttttggaggggcaggaagtacttaacatctcagaagctagattgggaaacatgctcagctataagaactgagctttaaattttgagtttaaaaatgtacatcaggagcagttgtggagggtctttttttaaaaaaatctttcaaatttggttttctgtgcatatggccgttttgaaaatactttggggtttttcatttttttgaaagtagatgaaatctgttgtgggatttttttcccgaaacattacaaaataacctgtttatttacatgcaaataaacttctttgataa

SEQ ID NO: 181393 - DNA, 1231 bp, Homo Sapiens
  misc_feature (170)..(180): n is a, c, g, or t
  misc_feature (620)..(632): n is a, c, g, or t
tttgtacaaaaaagttggaacagaagttctctattatttggagggtcctctcaaaaattctgcggccttactttgatattgacacctgcactgtgccattcctgattattccattcaggatctgtatcagcgggatggggcatggtccccagcacaactcttctgggttnnnnnnnnnnngccaggtgattcctttgtgtgttatgtcgtaagtggagtgacttcatcatatatggaagaagatttctatattcagctttttctgcaggttggagtcagcatagagttggaaaatcagctttggctttctttcctgtctcatttcctctagtgttctcctttttattgtcatcagctctcaacaactctgccacttttgtgtcccaaggtaataagatgtaggaaacaaaacattgtaaagtggagcaagaaaagttatcaattaaccacatcagagtcaaatgtcttgggtgacactaaggaggatatgggcaggtgataccagagtgctttatcttgtgatgttgatacagtagcagcctctcagacattcagccaggttggatttctcatgagtttgtcacctagttttgaatcctatcccgttggtttctgcaggnnnnnnnnnnnnntttatgtggtttttaaaatttgttctgagtggggagaatcttagggggaatgtactgaatagtatcatgggctcagctcccccatgcagggccaacaaataccaaaatgagtaaactgggaagcttttctctctttctgtcttcatcccagatcaaagaatcccgagttaggatctggatgaaggataagcccctgaattgtcgatgggctcacccccacactgacccagcatctgaacttgcttaacagggagccggggctaaactgcttcaccctgcctgagaaccagggagcactgcatttctccacagggtggaggagaagaggcagaataaaccaagcctgggacacctccctcctgtctaggtgtactcattcttctgtttcaaaagaaggcaaggacatgaagtcaacttctacctatcttctgctgctggtgtcttatgtattctcagtttgacctgattcctcttctgtcttttgacttaacattaggggttcttggtcataacctgctctgatgtacataaagatttcaggttcaatatcaatgtgtcttaaaacagaagtattttagcgggtggggggtggggtggtg

SEQ ID NO: 181394 - DNA, 1334 bp, Homo Sapiens
ttggctcagttttttaaataattgaaagaaacaatgtaagtagtgtttagatattcaggctagtccataaaatttctgatcaactcatgtataggcccaagtgtgggtctttgtgatgagaagaacatagaaaaatatttacatccttgtaattgaaacaaatttaaatagtttatttgttttgtttttatgaaagtgcttaaaaatagtagttggcaagctttttctatgaagatccagatagtcttttaggctttgaaggccatgtggtctgtcacagctactcacctctgctattgtggcctacaaataaccatagataatacataaatgaatagtggctgtcttccagtaaaacttcatttataaaaatggaggtgggggttggattgggcttgaaggcatagttgctgacccttggcttaatacaagttcaataagaaaaaatgaacaatttgtataaattctggaatagatccttatagagagtttagaggtgggtttcattcatattttaaaatattttaaacttcatacttattaaacataatagctttttgggggaggaaaatatcttcactcaaatcagccttataaggggagaagcactattctctagaattatttggttgatgttaagggctgtctctgggagaattagagaagttagctagtattggctattcataagtacttgacttgtagtataatgttttataatcaatttattaataaaatgatggaaagtgggtaaggcaaacaggcaaatttagggactgtgaatgaaatattgtagtatatggcattttgaattggtaaagtaattccaaaaattaaataagaatacacattgttcagttgctaagaaaaatgcattctaacagtacaaatgaagtccagagtcaggtcttttctcaaaatacttggcatatcaacacattacacataaacaaataaaaaccagtcctgtccctcatgataatgggtttctaatgtgatgtattcttgcaatctgaaacaccttataaagctgtattttcctgattgatgttggaaaaagcattcccaaaatgtgaattattgtttttatgaatagttacggaggatgtgatgacaatatgccagataatctatgtaattctttattcctggatacaagcacatggtggactgttttctcacaaccgattaaaattggatttatttttgcatgagaattgtaaggggagccacaaccatgagtagtaacataattaatatacagtgtcaatattttatatttaatgagacatttattctataattcagttcttatttataaagaggcgcaaatc

SEQ ID NO: 181395 - DNA, 1642 bp, Homo Sapiens
  misc_feature (1370)..(1385): n is a, c, g, or t
ttggcccacccaaaccggggtctcgcagtcggaagcactcagagtgcagccccgcgcggggccggtcgtaaccgcgccgcgggccggacgatgcccaagaagctgctgctgttgcccccgccctccgcgtcctcggctttccgcgtcccgcgcgcccgccccgttcccccgccggccatgaacgccgctcgcaccggctaccgagtcttctcggccaactccacggccgcctgcacggagctggccaagcgcatcacagagcgccttggtgctgaattggggaagtctgttgtatatcaagagaccaatggagaaacaagagttgaaataaaagaatctgttcgtggccaagatattttcattatacagacaatacccagagatgtgaatacagctgtgatggagttgctcatcatggcttacgcactgaagactgcctgtgccaggaacattattggggtcatcccctacttcccctacagcaagcagagcaagatgaggaagaggggttccattgtgtgcaagctgctagcatccatgctggcgaaagcaggtttaactcacattatcactatggatcttcatcaaaaggaaatacaaggctttttcagctttcctgtggacaaccttagagcctcacctttcctgcttcagtatatccaggaagaagtgaggaaccaccagcaaacaccccattgtcctcaaaagagatcttatttagtttttctctggtatcagatttcgatattggggcacatcaaatgagctctcccttaagtcacaatgcctgaggcagcagacagggtcagctttagtcgtggacgatcatagctttaaaagacactaaaaacagattttttttctacgtatctttagcaatttgcttatgttttctaaaatgaatgttttaagaattatttttaaaaaattcttgacgtaggagtgctttttccagtgatgttaattgataaatattgaaaaatctaaaacttgtgactaaaattctagcatatttgatgactagtttggatcattataagagggaaaacttgaataccagcatccaggtgttattttctgataacttttcagtattttctatttttccttcaaatctagattccaaattacagaaatgcagtcattgtagctaagtctcctgatgctgcaaagaggtaagtaagctagacatgggtcctgatccctcctgagtgctcccgaagtcagaatgagctgctttggaatccagaggctgtcactcgtggcctttgaaagcccactggctctcatgttaacccctccatcgttgtcatgtcccatgccacacacagctttatctccagcctgggtgacagtgagaccttgtctcnnnnnnnnnnnnnnnntgtctagaatcagatacaatcccaaaccctaactcacgtgccctttgagtcatttacatgctggcctgggcctcacattctcatttatataaataatgcctttgtatgtccctgaaacgttaaatattttcattttatggttaaaaaatgatgccgtagtgatgcgtgggatttcttcctgtcagtttcaccatttccctttgtccttctagggcccagtcctatgcggagagactgcgtctgggtttggccgtcat

SEQ ID NO: 181396 - DNA, 916 bp, Homo Sapiens
  misc_feature (150)..(426): n is a, c, g, or t
  misc_feature (428)..(479): n is a, c, g, or t
gaactaaaggctcaacacaaataaatgataaatgttcaatgtgatggatatgctaattgttctgatctgatcattatatatgtatcaaaacatcattatttaccctgtaaatacgtacaattatatgtcaattaaaaactttaaaaaggnnnnnnnnnnnnnnnnnnnnnnnnnnnnnnnnnnnnnnnnnnnnnnnnnnnnnnnnnnnnnnnnnnnnnnnnnnnnnnnnnnnnnnnnnnnnnnnnnnnnnnnnnnnnnnnnnnnnnnnnnnnnnnnnnnnnnnnnnnnnnnnnnnnnnnnnnnnnnnnnnnnnnnnnnnnnnnnnnnnnnnnnnnnnnnnnnnnnnnnnnnnnnnnnnnnnnnnnnnnnnnnnnnnnnnnnnnnnnnnnnnnnnnnnnnnnnnnnnnnnnnnnnnnnnnnnnnnnncnnnnnnnnnnnnnnnnnnnnnnnnnnnnnnnnnnnnnnnnnnnnnnnnnnnngctaatataaagcctttaccttaaaactctgaatttatcttattcactttttacccttagaagtttatgaacttgcaaaggcagttgaaaactatggtaagtcttcaagtcccagctttattaatgtaagagaccagcaaactttaacctaaattttaagaattttaagaaatatttggaaaatactattagaaaaataaaattatttgatatccagtaacagttaatagcattctctgtattaaaaaattactaaagggaaatgggtatgtctgcggcatggctgagaatgagtaagatcacacacagcttatctgctcaacaaatcctgaatatatcagacagcccataacattgctatgagaagtctgattcaaatgcttagctgctatagttagttaatctgggactcaaaggacaatatacctgggtcccaa

SEQ ID NO: 181397 - DNA, 1604 bp, Homo Sapiens
ttggcaatctacatttttatttagagttgaccaccagaacaacatggattcaaacttgcagctatttgattttgggccttaaatctatctggcactcctcgtgggattccaatggcatctatataaacatgagagtcacgagggacatccattgttttatgatgttctgtttttatgtatgttttctggatgaaataccagggtgaaagggagatagccaattggattagagctcaagtgccacgccaagtaacttggcagagtattcagtaatggtccaccacaacaccaccatacgtttgcttggggatgaataagggacgactgattggtaagctcctggaagggcttaagctcactgcatctcgttaggtctccaagcaaattcaagttctccccctgtgagagacacgaggtaaaattggcattggaagacggatgcttgatggccctcgggggctgacccgcagggtgtcggacttcaggggacttcaggaaacagcagcgagagagtttggcatagcttattgccccaggttgtggggtcttggaagagagctgccatacaacttaatgcctgatcggctggaggacgatccgagtggaaagggaacaatctggggctctggcttaccacgtgcgtaagcataacaatcgctttgtttagcgagcggacagaatgtttaatccattccagccatgcatttgcatctcggtaccgtttcaattggtagagtttgctttagatctttaacctctacaatggtcactttggttttggcattgggtgtttgtttagaaggggatgaagggggtgggggaacaatgaagcgcatttcgaaagatcctgtagggtctatccctaatgttgcggctcccatgctgtagaagctacttaaagtgggattaggattggtggaggtagaggtaagaatagaaatttgcactgggttacattggtgatattggcaattagagggggcctcccctttgaaacgaaggtagggttgtagagagatgcagctttttggggaagtctacccttgaggatcggtattccataggacgtcattccgggatgggcagaacctctcctcaaacccttcccattcccaaactgcaaagaatgtaatggatttagtttcgattaggcaagcattgtgtgaggatttagaatttatcttggaagggcagagatatttttctgagaaggccagttgcctctggttttggagatccccacaggatatgacaagacaggcatcaaatgtgattgaggtgagcttgatctagttacattaatgataaaatagctgacggtagagagaggaaagaagacaaggcagtataagagggttaaagttttcgtagctttaggttggtagaaattggccctggaacaatagcccatgactctgaagatggtgatgctgttttgactggggtatgatgggtccaccccttttcggctgttcgggctgctgtttcagttatgagtgctacgtatggtccttcccaagctggctccttccagcttttgataatgatgtgatctccacgctggtattgatgtaccaggaactgtaagggtggcatctgtgcta

SEQ ID NO: 181398 - DNA, 1239 bp, Homo Sapiens
  misc_feature (371)..(389): n is a, c, g, or t
ttgggtcactttaacattgagacctctgcctcattgaattcaggttttttaagtacttgaaactcttcagattctccttattttagtttctttttacatttatgaagtagaaagcattgttttgtaaactgttttgaaaataaatagcctagtctcttatcctctttagcgtggattaaaggtgaagttctgcaaatgggagagtgttcacagtagatagctcagattgattgaacacatttgaggaagagactcctgcatgagataccagcatttttacaaatactttttatgtacattctttattttgtcattttgtcaaccctctccccaagcacatcttctttccttttactatgtctatgtagggnnnnnnnnnnnnnnnnnnnttgcacttacgttacactcccaaaatgtgggtaatccgtgtctttcaaaaaacatttctgttttttgttttgttttggtcagtccattgcataagtgacaagtttgggtgcttgtggcacgtatgtatgaagcgggagggggatgagaattgcctgtccttcagtaggctgtaaaagtaatttacatgtaagtaaaaagggaaaatagaatagatgccaaagtcatttattcagtccttagttttcttatgtggcattactgcatctgctagttagtgagaaagcaccctcagcttttactgctcccctccctgcctgccaacacacttgatgtgtgcaaacagccctcaagtatctgtcagatgacctatataaggtattgaataaggtattcttgtcagtttagaaatggactggataaaacttacttggttgtcattattttatctcatttgtcctgttacatgccctatgttaagataattatattgccactaataatcaagatgctaaatgagtattacaactggctaatatcattttttatatacaagggtatgtgtatatttggaattgatatgagaaactcatttgtacccatttgagtgatattgcacaacaaacacagatacctacagactccgttttcattttctcgtgttctttatgataatgatctttgtagattggttatttctgtactttatctgtaataaactttgtagatcctgtgaaccattactttgcctaaatcacttgagacttgagtctttaataacaaagcatcaatattcactaagtcaatctcttttgagtttctgtgacttggctagagctcttgacactaagg

SEQ ID NO: 181399 - DNA, 343 bp, Homo Sapiens
cactattaaattcattaatgttatacagggcatagcacttaatatggaaactgggacattcaatacagaaggaatcagaaatgtattataggtcacattgaataaaaatctatacaatagcttttactattgttaagtacctggcacaacttaaaagctcactattttggactaaatggggagtaacattcataatgacaataaaatctctacctctggatgaaaaaaggatcatttaggtaaaaattaaatgttcctaactaaatgcagcttaactaacctcatatatacataatataaccgatagttttgtctaccaagggtcttatgaaaatttagccaa

SEQ ID NO: 181400 - DNA, 1673 bp, Homo Sapiens
  misc_feature (317)..(333): n is a, c, g, or t
ttggcttatttattgaccatctgttggtagtagatactacaacattctagcacttcaatggtctatacaccatggtccccaccctagggcgttctcagtattgtggagaagtggatgctttaaatgctggaagacaagagctgctctggagcaagcagggttgggggtggaggaacactgcaggtacctgaggatagaacacaatcaatgactccaacctgaagatagaacacccagcatagtccttgatgttagccccgctcctttcccacctgcgatggtggttgtaaaactagccctatacattatattttttnnnnnnnnnnnnnnnnnttgcgtgcaattttgtattttcatagtcgtatctttttaaaggtatcatgatttcagttgtggtcaggaagtatgtgccttaaatcctctactctagacccaaagtttggagagctatattatttaataagttgtttgtgacagccttgttacctttttcatttgatttgagggagaaagactgtgatcctgacagattccttctcataaaatggcctaatgtgtatcagtctaggacttctggggagggaacctctaccatgcattctgtcccaggatgtcaaagtcataagaatcagggtcccctgaaataaaatcactgaaaagatatgttctgttatatattatttaaaaaatttatctggtgccaccaaagaatgacagcagtttctaaccaacttcatatttatagcatcttatgaagatattgtaaggcttagcatattttgccactggttttctttgtaatataggttgaaagtgagacatgtttgaatacttttgtatgtaaatatctcccattctttttctatctcttcttggtctatatttactaagaattgatatttaaaaaacagttcactaatgaactctacatattattgaacactcacagggcaatattgatttgggtgctactagacttttacctaacattagtctttctcaatagttgttgtaaaggatagtattcaatccagtaaatattaaagtgtattagtttaatgaaggttatttatatactgtcataccacaaacctatggtggaaagaacatctgcattcaccagaatgtacttgttcctttggctgtgaataaattggataagacttttttattgtaagttccagctgttggaagatacggggataagattgacattgctgttgcagtattgcaaaaacatgactaaattggttaattatgtctaccgcttatgtttaagagaatcctttcactaacttaaattgttaacattgttgtgatattgagaaagaatattaacctaaacagtcactttacaacaatcatgtaaagacgtgtgcctgcagttgaggttttttgcatttctgagcctgctttgtattcatgagaaacaaaaacataatgggagaaaagttttagataagcagcattgtaagtttttgtaaagtttgggatgtcaaagtattaacgaagggtactgaaaacatacttttacttgggtcaaattactttttatgatctgatttcttaattttctgtatttgaaatcttgcaaattaggaatatctacatctatagataaataagtaaaacttaatggtagaaataagtgtaattcagcaacatgattcaac

SEQ ID NO: 181401 - DNA, 1105 bp, Homo Sapiens
  misc_feature (952)..(982): n is a, c, g, or t
cagagctgggccttggatgcaggactgcatcagcctcttctgcctctgtcacttccccacaagggcagattctttctcaccttttcctcctccttctttgtgtatacacttaacctgcttcatgaggagatatgctactttaaattttgttataatttttatatacctctatgaatgtttttagattatggtcatcagattccaaaattaatttatgttttgttttcactggagtactgcatattcccatgtagatagtcaccatgcttgcagcattatttaggattctttgattgtaactgctgtacactcaactcacagcattaagcaaaaaaggcaacatcttgcctcacataactgaagagctgaagaggaaaagctccagttcaggcaggggtggatgcaggtgttcacagcgtgtcactaggaagttgtctctctgtgtggcttggccgcaccgtcctctgcctgggctgcatttgtaggccaacgctgtctatgtgttggcccctgacccacttacttcatcacagctccaagtccagaaacaagaaaggtctctctttcctgataggtccaatgaacccctgagttcagtctcactccctggggtggttacagctaggccacggaacactgtgatcagtcagggctgtgaactgccactcctggggtcggaggaggggctacccttatgaacaccacatagcttggttgaaagggcatggttcccccaccacacacaaaaaaacaaggtgttacaatcagaaaaaatgggaatagatatgggacaggcaaagatgactcttcacagcatctgccatgcagcggctcagagtgctttgtcactaccccaatcacaggcactttggttgcttccagagaggaaccagacgccctgggttcaaaccacatttgcccctctacagctatgacccttgggcaaatgtcnnnnnnnnnnnnnnnnnnnnnnnnnnnnnnngagatgatatctaggcaagagcccagccctcgaattgctaacagttttgcttgggaaccggaattaatgtcttcagcatactcaggccaaggtgacagcaccggctctcccaacttttttgta

SEQ ID NO: 181402 - DNA, 1565 bp, Homo Sapiens
aactttgtacaaacaaggaagctacggtcaaagtgaaaaagcccaagctaaggcaaggaagacaggggagatacccaataaataaatatttagggagagaaaggacttggtgaatactggagcaggaagtgcaagggagaggaagaggtccaagatgacatgcatggtcctaggaagggtgacttagtagacgggaaagtcacaaggggcatgcaagtgggctgtccagcagagtgtgggatctataagcctgggagtggcctaagtgattgtccaaaacagcgtgtttaagtttgaatctgttttcatagtatcttgttaatatataaaaatatagaagcaccttatttcactgccccattgtaaggaaatgaatccttcttgccatcattttaaatcattttcaactattcaagtttcctgtctccccagttttctgtccacatactgcaggaagccgtccatgcatactgtaaactgtttactctgacctatccctgctctgaacctaacaacattagaaaactctttacttcctagatggttctcttcttaagctaacatttcttgtttcactatctagaatataagtttaaggataacttcagtgtctcatacatttttgtgttcctagcgtctgttgtgaagtcacaatttaggtatataaatatttatttcttaattacggaacccgataatcaaatgatggagccaggcaaacttatcctgactctactatcattcatcattcgttcaataaaaatttattgagcatgttgtatatgccaagcactctgcaaggtaccaagggtacaataattaacacttctttcccttggggaacttttattttagtagagaatgacagacagtacattgccctttgtacttccttaagtcctagaactatagaacataatattgcaagagaactcagagatgttatttctgttcaatcctctcattttacagatacttaacctgcacagagatagaatttgaactgcccatctcaccattagagtagtgagactttcatctacattgcctagattgaaaaatgtgatttgattcacactgaagggcatagtcactcattgttttaatgtgccttttacatatggggagtagtttgtcatctttggtcagtgttgattctgaaggtagcattttttctttttgttattaatacacccctaccagacttgcctttgaatgcaaacgctccaccttaatggggtcaaatttagggaggaatgcttcacccttagagcaagttcttatctcatataacatgctgctatctctattcttgaaaactgactatctatattcttggaaggctatctatattcttggaaaataaaggagcatagagtttccggcagcttcccgttttcatcgttacaagagttgaaagcatcaattttcatttcatgctttgaattgcttgtaatatgggtttttagcgagtctttggtaggcagatgagccagcgatttggggctgttcagaaaaggagcctctaaggaaagccggagaataggctctagagccttgggaaa

SEQ ID NO: 181403 - DNA, 1488 bp, Homo Sapiens
  misc_feature (945)..(953): n is a, c, g, or t
cacatttaaattaaagcacgtatcagaatgcaagtccagaggccctggcccatccgtcacagtgtatagaacggtctctttctacagagtaagagtgaccctatcctggtgcctttaaatctaaaaactattcagttcctttggtgggcaatcttcctagaagcactgacaacttcctctcatgggtgaaccattggcttaagctttcaagcagggatccaactggatctccctgaaaccactgccacctagctgcaaagcatgcaaccgggtgctctaggaagcctggtgttgcaaagaagggaagggcaactctgtcaatgtgcccaagggccacctgaaatgaaagtcatgagcagcctgggattaagcacttttgttgtagtcttcataaagcaatgtgcaactgacaagaaatagcaaacttccttctgcctatgtcctcactcttcttccactgaagccttctctcatcagctggagctcactatctgctacagcttggaaggccttcgctttccagaccaaactgactcaggtgacaggaatcacagctgacagctactgctctccagtccttccagccgctgcatcgaggtgtctaaaagagacaaagctatggcatgtggtgagggtgcttataaaaaacaaaactctcaggattcattcagagcaatcccagtgatgttacagatctaattagctaaactaaaaaaacaggggttttctccttatttctgcagttgtgattacacatggctggcaaaatggctgaaatgctattgatagtgttgcttttaaactatacaggtgttcagtcttagtttacaatgttttgaagcaggtaagtgctttgaaattacaatgatgaagagttttagcatcaaggtttgatttgtacctagtaatcagtgtgtctgccttagtagtactgactaaaaaaannnnnnnnngaattctgttagaattcaaatttgctgtttgacttttgaattcaatgcactgtgccacaagcctgaccgcgctatgttatgtacatttaatgtgtactcaaggaggaaaaaattactagcactactgaaaatattgcaaaattgccatagttaccgcttagagatactagttttcttctcttctttcttaaagtatatattacaactcttccataacttaatgcaaacaaagtaaattcatttcttctcacatcttaaagcaaagatatctttgtttacatgcgagaataatattctataataataccctggccctatgagccagtactttatattaggacataataataaaatgatgatatagaaagaaccagagagacctacacactgctattgatgcaaaaatccatttggaagttttctcttgtaaagggtatctaagaaagagaatagggctgaggggtgaaatgactttagaagtgggctcctatttactaagaaaaaaaccaaagccattctattgcaagatacccaa

SEQ ID NO: 181404 - DNA, 1277 bp, Homo Sapiens
  misc_feature (338)..(360): n is a, c, g, or t
  misc_feature (1206)..(1216): n is a, c, g, or t
ttggatatttaattttttaagcatatttctcaatttaggaaggaagatgtgtactccagagactttggttttctggggaaaagatgataaattttgttcataattaatatatacataagaatagagtgttattgatgtgagcttatgaaccaaaagaaaaatctgcaatgctttaaacattagtgaggcggagaaaaaaaacatctgtgagaacagccattattatcctcaaattaaatgagcaggtttggaaacaaacatgggctccaaagtccagtagaactgagttaaaatcccagccctccactgatgagctgtgtggacacctagaaaagttnnnnnnnnnnnnnnnnnnnnnnntgttatttgacctttctgagtcttatttccctcatttgataaaggaagggacttttgacgattaaattacctaacacatgaaacatgttataggcactcagcaaatggtaacctgtatcactctaattatactctgtgatcacaccaaggtaggtgcaaagctacactcatgaatctccaggtcactgactgatgtgcgtgagtttagtcatgtgaacctgacttttgtttaaatgtaacataatagcaaaatataaattggcttatagaaatagatctgtgggaataaagtagattgcaataatgatcatgcttaagtataaggtggagtgaaactattacacaccatacattagtcaataaatgcccctaaatatttaaagtgtgttgaaacgctgatcacactcatgtggttagccgaaaatttaggtgtgttttctgtcactgaacatttccctctgtgtcctaaccttgttatcaaaataaataaaaataattagcacataaggtatagtcgtggatcatgcatttgtttatggacaacaagaaaatcttctaaggaaaaagagtagagatagtaaagaataaatctgaaaatgagaataaaaatgctcgccagcaagatattctatactctgaacatttatttctgtaggcctgcctatcaaactggaatgtattcagtggtgagaatacaggattaggaatgacataagggagtggtgcctagaaagaaggaagagtttaagagattataaagtagtatgatcagccaagaatttggagatcacaactggcagcccatgggtgcagtctggcctgcagacttattttgtttggtgcagnnnnnnnnnnnatttaaatcatattggttgccaacattgaaatgtcaggagattttacatttaaaaagtttc

SEQ ID NO: 181405 - DNA, 933 bp, Homo Sapiens
ttggctcaggagacagtgagagtgaaaaggtattaaggaaaaagcccccagcggcactatgggggctccctggtgcatgcctgctcctgtccctggattaccacacgtgccctccctgccaccctccgtctagagcaagcggatgccccccagcctgcagcagaagcctccacagtgagaactggacccaaaggtagtgggggccggtgtggggcagagtcctgaagagccacctctaggaggcagcccctaggagcacgcacgttctgtcagtattaccccacctgtcctatcaggtgggccacaccctgcttgcccacaccagggtctgtcctggtcctcaagccacgcacccgctatgcctgcactgcagcccagccccggacagctccaggatccgtgcagtggctgcgccgccaggccccaacaatggggaccctggggtggctcctggccaagtgttctctgttttcctcgcacctccttacactgtgtgacctgcagggcatgaggtattgatgtgttcgggtttcctttcccaagccagcagatgcaggtgttccaaggtgtgttgctctgtgggatttgtggacacttaagaaacggactgagtgggaaccctgcagccaggggatggggagcctctgctccccccatgctcccaccctggctgagggccagcctcatctgcagagccctggaggaggcccacctatggacacagcccgagagatgggcgcaaggggtgctgggggaggcctgctatcctgcctctgggccacttgaggggcctcaggaagtgtgtgcttgtggctgcatctgcccgtctccctggcccaccatgtggctgcaggccaagctcttcattgctgaccatgaagagacctagttacctgccaagggattccccttccctcctcctcagggtggggt

SEQ ID NO: 181406 - DNA, 1613 bp, Homo Sapiens
  misc_feature (607)..(615): n is a, c, g, or t
aaataggttccagaaaacatggttgtttctaactagggttaaagtttagctttctatatgaattcattgttggaccacagatctgcttaagtaaagagctataatcccaacctaaacttttctgagattttacaataattagatctttttccaagttaattgggttttcccttctcccagtcataggtggtttttatcatcaagacagactgatattttgtcaggatattttcttttacagtgtttgatgtgcataatgccagagttatttttttattattcattttctctctttttgttcaatatgagattcaggatcatatttgtttaaaaggtaacacatagagatgtatgtatatattttgttataagacatacaaaataattttaagagggataaaggtgaaaatatcagattctggaaattttaagtatctaaactttatacttgtatgatttaccataaacataccaaaacatttttctgaaaatttactgtcggtctctgacatgaaaccgtattttgtcagtagttgaccaagcagttttatgagaactcttctatgcaatgatgcatttaatttctaaagtaaatgttgaattattnnnnnnnnngtttgaaggtaagatgccttagaattttaatgaaaaatgacactcaaacaaaggctatatgtcgaatgttataaactcttgagacataatgaattttagcagtggcctagagtaaggtaatgctttgtgactgatatctactaatagacttctgttactttgggcctcacataaaatttctcacattcgtattcttagagaattttatacttttttattataagtattttgcccttgagtccatgaaacttcaatagaaaatattgcttatacaataattagcttaaaatccatccaaaggaaaagagaagagctttttttgagtgttaagttttttaatttagtattctgtttggaaaagatgttaagagttcaaatatgcttcttatgtaacagaaataccattatttctggggtttagtgacacaggctggagaggacaaaagtttcctgtcctgaatgatttttcaattaatgctctaagcttaacccatgttgggtaatagaaagacatagccagcagtattactacgtagaccttgcacatcttacttttgttttgcatttttaaaaatttcttaatttgtttatttctcttcagaaatagcgttttttaacagtgtatgtgcttttttaaaaagtattgtgaatgagaaccctgtggattttttttatttcatttgtttgtcataataagctaacgtagaaatgttgtaggttaaccatatctgtggaaatatgcagttggaagtcagagcctgacatcacatagttttgccaaagggagagagctaagctggaagatgtttttgatactttcggctctaaacattaatggatgtttgcgtagagtaagatagcgttcaaatttggttaatagtttatagatagacttgtggcctctgactgactaaatttcttaacagcacagaagtcgttgtttttctgtctttaaaatttattcattcagaaaattagtcattgctttttaagattat

SEQ ID NO: 181407 - DNA, 764 bp, Homo Sapiens
tttttttaattactaaacactaagtatgttactgatgattaagttaaaatgtgacttttatgacacattatgcttgcaacagggaatcacatcttcttgtctacagcaaatatacataagcctagattatatttcgtgaggccaaacataaatttaaaaattctgagtagcagtcaccagaatgaaggttgctggtttacattcctagttctatttgcttgagggaaaatgattttttgcccattaggtgatcaacctgggtgacacaagaaaaatcatagtctttgagttgacttataatgattttttttctcatatcagagaaagaaggagctgaactattctctgacttgtttggtgcagaacacaacaataatgtcagaatctatctgaatactctctcaacttggattttaaaacctttaaatgctaaagaagtcagtcaacattagttaaggtagaatcaaaatgaagaattactctctgactttacctacctgcctccattttacatataaagccttttttttcttgacacggggatagctgccataatccttcagggatcctcaaggcaacacaatgatggggcttgaagtagtctgtgtctggcttccgaatgccccagtttgactggtctgtgggagttccatcaaaccactttatggtttcatctgtgagaaaattgctgactcattatgaattatgtgcatggttatcaaacatactaagactggaattaaccataaaaagcagcccctgaa

SEQ ID NO: 181408 - DNA, 1219 bp, Homo Sapiens
  misc_feature (253)..(267): n is a, c, g, or t
  misc_feature (560)..(706): n is a, c, g, or t
  misc_feature (708)..(829): n is a, c, g, or t
  misc_feature (1022)..(1030): n is a, c, g, or t
ttggggtggatgatatggacatatgtagcccagtggcattgtactttctgctgacagctgcacacattacagctgtctccaaacccacagtgatgcttagggaaagaccctgctcaggacccagcaggtcagcaccccagagcagactgataggtccgtgggacccatgttagagcagaaaatttgggctcagcacattttactgttagtagagagccaggaaacgttttctgggttggggattttgtgggannnnnnnnnnnnnnnagtaggttttgtttaacctctgtgcagtttgtatgaatgaattgctatacatttataaggagccagggtctggagggttgctatcactttgtccagcccaaataccttcctgggcaactcctaccatttgtttgcagttgcctctactagctgatggcagtatgctggaaagaggttgtactataaagagagttctttccttctactccagagttgttgtgtagctttgccattgaaccgatcaatttttaaactctttaaagaagcagcagctatttttttgaaattaaagnnnnnnnnnnnnnnnnnnnnnnnnnnnnnnnnnnnnnnnnnnnnnnnnnnnnnnnnnnnnnnnnnnnnnnnnnnnnnnnnnnnnnnnnnnnnnnnnnnnnnnnnnnnnnnnnnnnnnnnnnnnnnnnnnnnnnnnnnnnnnnnnnnngnnnnnnnnnnnnnnnnnnnnnnnnnnnnnnnnnnnnnnnnnnnnnnnnnnnnnnnnnnnnnnnnnnnnnnnnnnnnnnnnnnnnnnnnnnnnnnnnnnnnnnnnnnnnnnnnnnnnnnnnnntttggcatcatttacaatttcatagaattactgtgaaggcctttctagttgagatgttggggtatttgggattctaattgttaaccccagaagaaggtaatttagcttgtatttatttaaaacccatttagccttttacttatatctggtagaattccagtgatcatcctaataaggtatatttcagaataannnnnnnnnccttcagaataacttagaatcagatgctataagggctcctaggagcagtgtgaaatttccgtaaagataaatttgaatgttgtaacccaagtttatattaaaccaagaggcgatttcccatatgattttttgtttcttttaaacttgttaagtccctaagagattacatgctagggcttgagtcatttc

SEQ ID NO: 181409 - DNA, 1427 bp, Homo Sapiens
  misc_feature (375)..(402): n is a, c, g, or t
  misc_feature (421)..(563): n is a, c, g, or t
  misc_feature (686)..(976): n is a, c, g, or t
agcagtcacagtggataattctccaaataacccctgtggacagggctgagtttcatagaaagcatcagcagacaccctccacggagcaaggggtggcacacacttctcgggtgggagagaatgttggcctctagcctggctgcgagaggcattctgggtcctgcaggtagtttcttagagcaatgctagtcagccctttgttaccaattcaccaatttcagactttgccttcatgtcaatgtttatatttattagagctccttaagattaaaatattactttcctgtcatggaagtaattggtgttcagacttgttttcgtctgtataaaactttccatgggaaatttggagaacaaaaggttgtgtgattatannnnnnnnnnnnnnnnnnnnnnnnnnnngagatggagtttcactctnnnnnnnnnnnnnnnnnnnnnnnnnnnnnnnnnnnnnnnnnnnnnnnnnnnnnnnnnnnnnnnnnnnnnnnnnnnnnnnnnnnnnnnnnnnnnnnnnnnnnnnnnnnnnnnnnnnnnnnnnnnnnnnnnnnnnnnnnnnnnnntctagtacattttggaaggactttacccctcttcctctttaaagcatccaagtcatgcattttctaccttaattttaccaaaaaaaaccacttagatttcatttctaaaactagcgacctgannnnnnnnnnnnnnnnnnnnnnnnnnnnnnnnnnnnnnnnnnnnnnnnnnnnnnnnnnnnnnnnnnnnnnnnnnnnnnnnnnnnnnnnnnnnnnnnnnnnnnnnnnnnnnnnnnnnnnnnnnnnnnnnnnnnnnnnnnnnnnnnnnnnnnnnnnnnnnnnnnnnnnnnnnnnnnnnnnnnnnnnnnnnnnnnnnnnnnnnnnnnnnnnnnnnnnnnnnnnnnnnnnnnnnnnnnnnnnnnnnnnnnnnnnnnnnnnnnnnnnnnnnnnnnnnnnnnnnnnnnnnnnnnnnnctagcaacctatgagatgaggaattggaagtcactgtgtaagtcagaaaatattgccttaataactactgaagcaatgtgagtgtaatgaagatacttgcctgagctatgcctcagggtcgaaaggagaagagtcataagtcacagtggtttcattcgctattttagtgagattatataagatgttgataaaatatctgttgattggaaggggcctgatgcagaatttctctttaaaggatgaaacaataaaagcagctgacacttactgagcacttattgtgtgcaaagctctgttctgtgtgctcatttacttttttccagccaccctatgaagcccaggtagtactcatatttccttattttactgtaaggaaattgaggcataaaaaggtgaacgtgggaagatacagagccgggatttagatcctggggagtctgattacagagtc

SEQ ID NO: 181410 - DNA, 1192 bp, Homo Sapiens
gtgtgagccaccgtgcctggcctagaatttgttttgatagatattagattgagatgtaacatttctccccattatttgttgaatccttcattttctcactgatctcagactttatcaaatggaagcctgtgtctttgcactcgagttctttctgggcattctgctccattcctgtctgtccagcatcagtccactctctctcattagtggtgtcatatgagatagtcactgtttggtgaacacattccatcccttattctgcctccttttaaaaaagattctttgctattctcaagcatttaattcttccaagtaatcttctaagtcattggacaaattccttacaaaaacaccatggagatttcagttgaaattgcattaaatttttgtgttaacttacgggaagactaacatctggacaatgttttgcctgcccttgcttatgttgattcagatttttgatgtccagtgagaggcttggttggtgtatcaggctctgcacagggaagctgtccattctgtggagttgttggtaactggctggtcctggggacagagaactggccctcgttcctgactgttaagggaaggatgatggctcttggcttgaaaagatcatctttatcatgttaacacagtttccttctgtttctaagaggtattatcagaaataacaccttggattttggcaaaggcattttcagcatgtagagaatggatttccctttttctctttgacttctgataggatgaatgttatcaatcagctttctaatgccgaacgatccttgcattccccaaacaaccttacttgatcgtgggacaattccttgttacatgcttttagattagatttggtaatattttattttgcaattatttcatctaactacttaaaattaaaattaatccacagtgggttttctttgaatctagctctgttaggttttggtctttggttcataaatgaattgtccaactcccttttggataatcaaaatgctcaacattttttcctttgcttgattttcagctaatagtgctggaccccccggtgagtatttgggtgccctctggcccatggctcaccccctggggtgcagctgccatggcgcacggataccagtgtcctccttggcctcttgtagagtctgtgtgcacttggaacagcactgggcttccaagccccacc

SEQ ID NO: 181411 - DNA, 1447 bp, Homo Sapiens
aaaaatcctctctttctactgccagaaggactggctcactgtcattcccccactcccagaatcagtggagtgcctgccaggcctcctcctgaacaccctggaagaccctaggtcagctggtccagagatgcagagtccaatccagagtcccccacccagcccagggacagcacttacctcttctgggggaatagggcacagcacaggggggttgcaaataccaggcagaagcccaccagtcccacctgcaggggtgcccccagccaggggcggcgctgtggagagacagaaagacaatggaacggcttgtgtcccctgcctcactgtcaccccatttcacccaccatagctctatcccatcagccttgccttggagcccttagacctgtggccgttttctttctcccaaggcaatgacagggctgggacctccagatcacgcccttccactccagccaggcctgtctgctgatcaccctccccggcatcccatgacctctcacctctcagaattggttgccatggcactccctggccctttttttcttccctcacttcctccaggagctgatttcttcaggaaacctcctgtgaacctccacttacctcttcccatcccagtggcatgaatctgaccctttccaagcacatctcttcctcggcactcttctcaatttgctctggccacagggaccaccaacctgttcctcaaatgtgcaagcccctcctactgcagtgcccttgcactgactgttttctgtaccccaaacactcttctctgcgttatttggctctctcctcatcctttgcggcattaaagaccccttctctgatcatcctatctaaacagctctcccccatgaatctcaattacactacccccattgctttcctacaaagcacatattacactttctaagaatgtatttattgggtgcctccttgtttattggtttctgcatcagactataaacttcatgaggacaggggccataaccattgtgttcagtgccatctcctcagccctaaaacatgcctggtgcatggcactcaatacatttgtgaataaatgattctgtgaatgagccagagcttgttcctgtgctttgctttcgtgtcctgttcatgtctgtgtgtgcgtgttcacccgtgtgtacctctcagtatggaggcactagggggtaaaagaatgagcatgagatcaagcatgactatgacagtccccttctgtgtgtcagaagccactggagtaacactgatgaagttggtttccttcctttgtcctctcctcctgcccctgcagagttccttcaccccagcccagttcattcttgctgaatgaacgaaggtggaggaggcggtgcaggggtcaggagaagggctggcaagtcttagagaatcaggcgaggctggaaagagagttggggcctggtcacttctcccccaa

SEQ ID NO: 181412 - DNA, 1266 bp, Homo Sapiens
  misc_feature (59)..(68): n is a, c, g, or t
  misc_feature (149)..(180): n is a, c, g, or t
  misc_feature (259)..(269): n is a, c, g, or t
  misc_feature (1058)..(1070): n is a, c, g, or t
ttggggactttttaagcaagaatatgaataggataatgactgctgacattcaaaccccnnnnnnnnnngagactgagtttgaatttacagaatgtaacactgtctctgaagaatacaaaaagtatacatcccaataattatactttcannnnnnnnnnnnnnnnnnnnnnnnnnnnnnnngatcactttgaagatgatattggaaggatgccctcttggttatatattcaagctctttggatacagtatctatagttgnnnnnnnnnnnaattggttattgtgacttctgaaataaggtttcctttgtgtgaaactcagcatgaggccagaatgtgttagtcctgtctgcttgccatgtaatacctggccaacacaacaacccatgattgatgggtgaatgcttgaggcctaatagtgctaacgtgaagtactgcctgaaaaaggacagctgtgtcctctctccccgtttgttttaggattttcgcaataaggtacatcccccaaatggtttctgctacctttttaaaaatcaaatgtttctacgtgagctgtaaatttttgagaatatgttttgctgtatcagcccttgcctgacaaggaataacatgaactagcttatgtttcatgatcatcttccaagtgctgtggcaactgagttggccacttcttgttggcagttcttggcaccagtacaattctaggttctgaacttgcaccatactcttatcgtcatccaaattgcagtgttttggttcagttggaaaatcaaggttacagtttgcgttcacagaatgaaatttcccagcagtgttctgtgattgtcagagtgatgtaatttgatatattaaaaatcaacaattttttcctcagctttgttttttagactgaaaatgatttggagttttggtgaacctttatattttgacactacaggagccagccacaaggccaaatgtgtcagctgccagtgtttgcttgacatacaggagaacattaaggaactctcaggttgggaggagggaagtgttgaccaggacatcagacggaggtttcttgnnnnnnnnnnnnnaaacactatttttaaactctttaagtagagggactattttaatattctaggtatagaataaatagcttttataacagtcttagttctaaatgaagcagaacccgtctttgtaaacactgagaactagaccctgtattgtacaagcaaggaaaagaatagacaagtttacttggtttatcagaagccataaaccttt

SEQ ID NO: 181413 - DNA, 1379 bp, Homo Sapiens
  misc_feature (91)..(128): n is a, c, g, or t
  misc_feature (864)..(872): n is a, c, g, or t
ttggggcaggtctggaacctggtatgagatgagcactcccctaggttgcaaagtttgagggttactataaagctcattaatcaagatactnnnnnnnnnnnnnnnnnnnnnnnnnnnnnnnnnnnnnntttatgttggataaaatagcgaaatcttacaggatctgacaggactgagattaggaggagggaagtgaggctgaattgaataagtatggggatgaatccttcttatttaaatttttgatacattgtccatcatagactttttacattaattgtgattttttaaaaatgttgcattaaaatagtatttatcttggttactgggttttttggcactccttaaattttgtgcccaaggtgagtgctttgctcacctcaccctagttacgtccctgtttctgtgatttgaacactagcgagaacaccactgtgtgcgcctccacccccatcacacaccaaacaacaggtggctcagacaccctgaatttgcacagctcacctagctttcctaatttaggccttcatatcatagaatggtggcctggaccaataggaatgaaaacagaccaggggttttcccagagaataaagccggaaaagttttgattctccactggactgctgtgtttggatttgatctgttgttagattctagttaacacttttgtttttaaaaactaaggacaaatgaacaaaaaaccttgtatcatgtttgtttttatttataagttagccaatcccaattccgtttgctttattttcaaataaaaaaagatggaaattttgaggggtggtctaggggtgaatatggtaaaatggggctttaggccttatagctttttattaagaaataaattannnnnnnnnatttgggagggtaactatttattgaggcattgaaaaacctctccattctaaggatgagagaccctgagacaatggatattttttataggagatagtgaaagtttgttttgcttcattctttcggggagggtcttggtgggatggggggaggtgaaggaataatgcctgggaaattaatatagattcagcttggtttgtggtattttgggaagatgagggaatagaagaggcaagcccatgtcgttactgggttggggagaaggaaagaaggggcatatggcctgcactcgaaatgggcagaaaaattccttagttaaggaggggtgtgtgagtgaagggggaaggtagaccctttaaccccaagtgagggatgatatcatctctcaggcttaaatttaagtgcacttagttcctttaatccagggcaactggggtacctactgaagtttttaatggacaggggagattttcagggttcttgtttttccctttttgatgttagactgt

SEQ ID NO: 181414 - DNA, 867 bp, Homo Sapiens
ttggcaatcttttaaaattctacttaacataggtgcccagcctaatggtggccatcttttagaggaggaaataaatgttcagagaagtcaagttccttgtgcaagcgggattcgatacaggggacacaaccaagagacctctgagtccctccacacatccatgctgtgtgttgacttgcttacaagagtcccctgtgtcagaggctgcctggcagtggggacatgagcctttcccttagagggaaacatgagattgggcaacaagggtagtcctcaaggttctacctcgagactccaggacgctggacattggaaatgaggccacaccctggaggagcattgtcggctaaagccaaacaccattagcgtctgaaggggatgtgggacccatctaaggtatcacatccctgatcacccaccatggggtctgcagctggagagggtccccccaggaggggctggagcggggagttctctgccctgggaggcaggcctcctggcccttcactggagtgatctcttcttttctgatgtcaaatcctgacctaaagggaggcatcttccttcttatggcatggccatgtctcctgtgttccttcctcaagccaaatccttttccacgatgccttcccctctgagccctgtataacccaatagtgcaaatattcccacatcccctacccacaacaggggtgagcacattgcaaatgttccgccggcgaatcagcacctgcctggaggtgttcttggtgtctgcgtcctgcctccagtacagaggacctcaaatccatgatactttcacctggtgctccccaggaaagcctggcagaggacctgacgattcccagcaagaccaagcactgctgt

SEQ ID NO: 181415 - DNA, 1492 bp, Homo Sapiens
ttgggctgggattacaagcacgtgcctactatgcctgtcttcaaaatcacattgttaatttttatagccacaattattaatttgataaaacaaataattttatagaagcattaaagtattatcagaacaaaatcagagttccaaaatttggggagtattttaagattgtgaaatgttaccttttggatgcaaaccaatgatacaaatctttaagaaagaattacagtgggactcctttgaaactctgattttgaaaatagaacaaatacacatttcatagccaaactttgtgtgggacttctattgttactaattgtaaggctgtaactttggttgacttcatccaaatccaagaaacagagtcacagtagtgagactattctcattgcttctttggagcattagctgaagctttaccatatcacataccttacaaaatccctatacatattgccagttttaaaagaatgtaattatgcatgttacaaactatatatatctttttggctagagaagtgactattttagaataacagtatgaatgtaaaaggcaataattttttttaaatacacaaaacattgccattgcccttttttgtcacttccttttttcttctaaaaattttcatttggtgtatctaactttgtatcacttaaattattcagacttactaagataaaaaatactttttttcagttctgtgctatattctgtcactctattccattattaatactaaatgactttccttgtgaaatgatacccacatactacaacatcaagctcctttttctcttaaatttcctaattatcttgatttttgcctctgcagtcttcttcccatcttggccaagtgtgggataaattctgtctcgcccgtaactcctttcactgtaatgaaatgaattcaacactgaacgcactccagaatttagctctggtagtgagcataatttaccttggcttattttatttgtaaatggaaatgtatcaggagtgcctggaacacttttccctcttgataggagttggagaacactgcctagccctctgccaagaagtaagtcaagcaaatgaagataccagttggatcagagggcctaataatagtctaaaaccaagcttcagaaattgcttcgtgactgttgtaagatcaatattgtgtttgcgtattagttggacagaaagcatgtgtggacattcatccaacctgaccccaggtcattcattctccatccaaaaagggttataggtatggtttatggtctttgtttcagcaaaacgtcctacagcttggacttggggtggatttatatagtgtagcatttgtatataagattcaattatggattcatgctctgtgaacattgttagatttttaataatctaaagtaggtcacattgaatgtaactgatattaaccctattctagagaaaacatttgtcatttgcaagtgtttgacttttttattgatatgatttagatatgcc

SEQ ID NO: 181416 - DNA, 1501 bp, Homo Sapiens
  misc_feature (312)..(350): n is a, c, g, or t
  misc_feature (1094)..(1105): n is a, c, g, or t
ttggtaacgttataagttttatgagccagatatgttctaaacttccttagtttttcaaagaaacagttcgtagaatttatatctaggagggaccctcgatagttcagtcacctcattttgcagatgtgggaactgaggtcctaagaagctagaaaatggcagaggtggccaagcccagatctttaagactccagggtttgtttccccacgcctcatagtctcttcaagtaaaaaggatttctcctcattgctaagaaatagtacacaaaaatgtcatcgtttgagccactgttcatggactcagccatgctnnnnnnnnnnnnnnnnnnnnnnnnnnnnnnnnnnnnnnnacagcaatagtttcccaaaggggctgcatttaggtcatagaaatttgaaccataatatgtgtgcttcagatttcctgagatttcttgatgccagctgtggggctcctgtggctgtctttgaggactttggacagtgaagggttgcatagctaacacgtgcatttctaagtcacctgtcaccatagagcccaaattatatcacaaaagcagtttccaaccataaaaggacagaggacagctctgggtttttttcctttactcctacatcacatgagtcagtggtcactattcaaagaggcaatacatcaagatatgggtggaaacttcaatcattgacccttcgaatctcagaattggaaggtcatctgttccaccagtatctggtgcatgagttaattgaaagattctgcagaacatgtagcaattgttatctcttttgtctccccagaataggaccatgccagcgggaatctattactggtctgagctattgtctaagatttagtctgggaaagaggaatgtggttagaggacagtgactgtcacagggctgtttcatctacatgtagtgctctccaatgagagcagaataagaagccaaaagacataaactgtgtcagtgcaacggagtaagtctaagatcaaggaagaatagccagacaggactgtcccacccagtctggaatcctgagacagactatagaatttcattaaaaatcttttaaagcagagttttgtgggggnnnnnnnnnnnnctgttctcaggtatcatatcagtgtagcactattcacagatcggcacaaaggacaaggcgacttcttattattttcctcaaccatgtgaacactaaggttttcattctgctacctcttgggtttgtacttcatggatctcatctattcaataagcaatcaagcactttgcaatgggtccagggaaggttagtgtcactttgaccctggcccacttcccactggcaccatctagaacccctgctaaacttgtcaagaactgatactcacatagtaaaactagtgacttctgccctacatctctaagagcttttacatactccagcatggtttgagaatttgactttaaactcaccttttatccagcaggaactattactgaacctgcccctagcttt

SEQ ID NO: 181417 - DNA, 1452 bp, Homo Sapiens
  misc_feature (721)..(788): n is a, c, g, or t
tgagccaccacacccggccgataggtagctatcttaataatgcccttttccatccactgattatcttaccaactttaacaatgaaaaaagcatcaacgtatatattgggaccgttatagaagtttacgccaaaaatgttaaagagatgttttatatatacttgacacagtcatattatagtgagcaggaaagaacctttctatttaatatttgttctcccaggtcatgtgtttgctgaaaagccatcagttaaagcgaggcggccaggtgcactctctaggtggagaaattaagagcctgttgctctctttacagtgattttagttttgtgaggtttcttgtttcttttaaaagaaagagaaaaaaatatctttgtcctgtaggtataaagtcattatccagactaatggggcattgaactaacaggaggtacaaagtggactcttttcaaacctttttattgaatccgtttcactgtcaggtcaaacaagatgtgattaaacttagccctcgtccaccaccacccccaccttacccctctgcccttaagaaatgttttcatgcttaggaaatggcaccacaaaagaacagtcatgtgcttctgtccactggcaatttaccaagtgaaataagctgaaagtaagagaaaaagagagtactactgtggaatagtaaagctgcttgagaaagatgtgtaaatacaggacgataaaggaatgtnnnnnnnnnnnnnnnnnnnnnnnnnnnnnnnnnnnnnnnnnnnnnnnnnnnnnnnnnnnnnnnnnnnngactttttgtaccagagctctaagagttaataatttcaggcaaattacccataaaaatcccgatggtggaagggtggaacaagagaacttgggtcaccacacaactctatgacagtcattgtagatggtatgcacagagtttgttgtgacacagcaaccctgataagtaaacaagaaatgaaagccttagctaaatgtttctttataggattgcaatttctagttttatttaataaacacagttataagaaccaatgcagcactgaacaggacaagagataaatgagcctgtctctgagtatgcatcacaccctataccatgtttagttcagaacagccaaggttagcaacctcctccttcaaatatcacaattctatgtgcatccatcactcagcagcaataacgtttcttattgcttctaaaggcaatgccatacacttggaaagctgtaatttcactgcaacacatacatgcacactacacacaaacacatttatatgctctctcgccagtctggtgagcagcaatccttgactcaagtcttcagtctgcaccttcgaaagtaccagaaatgtccctttaggaagacagttcagatttaactttcattacatgtttcccctcccttgtattccagggcaagagaggaaagataatagaaaa

SEQ ID NO: 181418 - DNA, 906 bp, Homo Sapiens
ttgggtctgttcacgtcctttgcagtctgttaatgaggtttccaaccttccctcatttttgtaatctgtaagaactttttacagactagcgatataaatccttgtcaaatattgcaaacacttttctcatttcatctggttttaatctatcctggtttttaaaaaatgtgtctgtggaagtttaatttttatgtagtcacatctcagtttttttccattgcatttattctcagaatgcttctccctgccctgagattagataagcagtcatttgttctttcttgagttattttgagatttcagttttaacattttcttctataatccatgtggctgggttttgggatctggctaacccccgccatgccagtagcctgaggggcccagccccacttgttgaacagccgctctccccgccccacccaccctgcctgcctgcccacccgccctggtctctccaggaatcatgttcgttcaggaggaggccctggccagcagcctctcgtccactgacagtctgactcccgagcaccagcccattgcccagggatgttctgattccttggagtccatccctgcgggacaggcagcttccgatgatttaagggacgtgccaggagctgttggtggtgcaagcccagaacatgccgagccggaggtccaggtggtgccggggtctggccagatcatcttcctgcccttcacctgcattggctacacggccaccaatcaggacttcatccagcgcctgagcacactgatccggcaggccatcgagcggcagctgcctgcctggatcgaggctgccaaccagcgggaggagggccagggtgaacagggcgaggaggagatgaggaggaggaagaaaagaggacgtggcctgagaccgcctactttgaaatgggg

SEQ ID NO: 181419 - DNA, 1548 bp, Homo Sapiens
ttggatttccatatacatgtattaatcatttattatttttttattgcaatcctgtttctccctgatatgctctgagttgctcctgaaatgaagtttagtgacaaatgacctatttctgttctgcttcagcttcatctcagccacagctattaggagggcaaagggtgcaagttcctaacccggtgggattccctgggacatggcctcttcctggttcccctctacccatggcatgcccaggcatcatgcgacctggctctacctccctgcctgagactcctagactgttccctctgcttcctctgagaccactaggtcccggccgcatggtctcccacaccccagcccctcctgcaagcttccctgtgccataccttccaggggacccaggtgccccatgctctagtgtcctcccaaccactggcatcttgactcctcacccaggacctcaagattcctggaaagaagccccagcccccaggggaaacctccagaggaacaaggtcaatgcatctttccctacccactccctcgcacattcaccaatgaccacgttctaattccttggaggattcagtcagtccttccccttctcagactgtccccgccctcctcccacttactcttctttcctcagaaccctcttctttctctttccctcttacacacatacaccagtctcctcacttcccagtttcccacactcactcttctgtctccttgttcactgtcattcctgccactccccaaaaccagagccatggagtctctcaggttagactcatgtctttccttctgtctctttagctgccagagacatttatgcccccagcaccaattactgctccagttatgagcctcacccctgagctacaagggattcttccctcacagccccctgtctccagtgtgagtcatgctcccccaggagttccaggagaactcagcctgcaggtgacaaggacaatgtattcccctcccttgggaaaccttccagccctccttgggtgcacgtcatggtagatgggcctcattcctcaaggcatgtgctgagggagactgggggcaggtaccaggtatccttactgcagagaaagggaggctgctcatctccccaactctgctgtaatgggaacagtgtgactgtgagtcactggggactagtccttagggaagccatgagaaggacagcttgcccctctggcctttctccctgcttctttatcagcagcttcagcacctgccacctgagaagatggaaaggaaggagctgcccccagagcatcagtccttgaagagcagctttgaggcgcttctccaacgctgctctctgtctgcaactgacttaaagacaaaaaggaagctggaagaggcagcccagcgtctggagtatctatatgagaagctctgtgaggggacagtaagtacagctagctgtgctcccactgcctcctacacttccaccatcaccatggccaaaggaagcccagtgtcttttcttcccatagtgtcactgacctgggttccccacaaaatacgtgcatcttg

SEQ ID NO: 181420 - DNA, 897 bp, Homo Sapiens
ttggctccaatgaggcctcacctgcagcgtttgtctggtttactccgatgaggcctcacctgcagcgtttgtctggtttactccgatgaggcctcacctgcagcgtttgtctggtttactccagtgaggccttacctgcagcgtttgtctggtttactccgatgaggcctcacctgcagcgtttgtctggtttactctgagcctcacattcctttcagtcgctccgtgaatcactgtctttggtgggtcaggaggaatccactccctgggcctgggcctggaccagtgctggtcagacctgctgtgtggggcctggggacgcttgcaggtgtggactggcagctcatcaggaagagctggggaaggcgtgagaccaagacagcctccggcctggagaaggcgtgaggcctaggcagccacatggctggggacagcgtgaggcccaggtagcctctgagggttgggggaggcatgaggtccaggcagcccctgagggctggggaggcgcaaggtccaggcagcctcaggactggggaggcgcgaggtccaggcagcctcaggactggggaggcgggagggccaggcagcctcaggactggggaggcgggagggccaggcggcctctggtgctgctgcgttgctcctgtgcagcctcggggggccccagggcatctggaggcatctgtgagcgtgtgggctgtcccagctgacgtgggtcctttgctccacaggccaccagcttgggctccccacggagggcagcaagtgggacttggggaacccggctgtcaacctgtccacggtggcagtgatgcccgtgtcagaggaagtgcccctcaccgccttcgccctggagctggagcatgccctcagcgccatctgcccgaccctgctgct

SEQ ID NO: 181421 - DNA, 567 bp, Homo Sapiens
  misc_feature (445)..(458): n is a, c, g, or t
tacaaaaaagttggtgcctatatgccaaaaattttatcagggacttgaacaaagacctcactctttttcacttgtcttatgtcgagagaaaaggttattggcagccacattcctaagactggggaatggtgtgtccttttaaatttgaagataactttaggtaattatggaaactcctcaaagaggagaaagtaatttttttccagacatttttctcattctgtgtctttcacacactagtttccatagttcgagaattctgttttttaccattgggctgtgaatgttcacaatatcagtcctgttgaattcctatgatgtaatcacaatgtgtatatgttcattttctaggtatgatacaagaatgtatggctttttattctgtggaagtaaaatcctgaacgtttacaacttttccttaacttgtaaataaaaaattgtaagnnnnnnnnnnnnnnacaaaaaacttaccttgtgtaattctgttagtttcagatttctctcctgtttttgcaaattgtgggaaagattgacaatgcaaatgtgtcagagacatactgttgggtg

SEQ ID NO: 181422 - DNA, 1217 bp, Homo Sapiens
  misc_feature (982)..(995): n is a, c, g, or t
actttgtacaaattacaaagcatgttgtatttccgttcaaatggtattgtattataaaattacagttacattttcctttctgtgatcttcagcataatttcccagaggcccctttttcctccctataggccatcttattaacagattttaaaatttatagtaatgacaaatgacttatcagtgttcatcatctgaaagctaagtggttcgttcaatcactttttcaaagttgatagtagattgcatggtttcatgtttcctcatattggtttattaattctatttaatcaaggaaaataacttcagattccataaagtttcagtttatttttagtttactactaggtgagatagcacattacatacttttactatcaaatattattttagcagcttcccatagtaccaaatgatttgattccctactctcattttttaaagcatataaatatttatgggcttaaaaagggggtttttaaaaactgaggatatcagtaataaattgcagaatattttgcaaagctttcttttggaaagcaaacttttgtgcctgcctatatgcaaagtattttatcagggacttgaacaaagacctcactctttttcacttgtcttatgtcgagagaaaaggttattggcagccacattcctaagactggggaatggtgtgtccttttaaatttgaagatgactttaggtaattatggaaactcctcaaagaggagaaagtaatttttttccagacatttttctcattctgtgtctttcacacactagtttccatagttcgagaattctgttttttaccattgggctgtgaatgttcacaatatcagtcctgttgaattcctatgaggtaatcacaatgtgtatatgttcattttctaggtatgataaaagaatatatggctttttattctgtggaagtaaaatcctgaacgtttacaacttttccttaacttgtaaataaaaaattgtaagnnnnnnnnnnnnnnacagaaaacttagcttgtgtaattctgttagtttcagatttctctcctgtttttgcaaattgtgggaaagattgacaatgcaaatgtgtcaaagacatactgttgggtgcaatattaaaattttaaatgcaaatttctttggataaattatttctatattctgtaaatctgagatttaatgtatattttgtttaaaaaatgatttagtaaaatctttgaaaa

SEQ ID NO: 181423 - DNA, 1194 bp, Homo Sapiens
taaaaatgttggaatttttactcttgatatccttccaaatcaactctctcaatgttcccatcctcaaaactatcatatggggtaactgaggcagtcagagatttactgactcaatgtcactcaattgattctgagttcactgctgattacatccgaccaaactgctttttctgaagtctactccgtttaatcatgctggtgatgattttgtgcggctctgggacaaactccacctggctgaagataaagcaaatctgcggtgacttagtcctcctgtcatttcccatcagttccccactctcctcctctgcccctccacagtctcccatgcaggctgacaccatatgacggccttaatggagtccaccgagtatttcaggttctctcctgggccacttgaaagtggatgtacccatgggatttgctttgacccaggagatgtgcgtggaagtgaagcgtgtcacctcgaggcaaaagagttgggagccattgagacgggccactctctccttcatctcttagagcagctgacagctcccatatggaggctgctcctttattctcgtggcaggatgagggcatgtggggcacagggcacaggagagccatggaggatgtgcagcatgggcaggaaaagagccttcagtggtgtacatttccatagtttggggctgtttcttacctacagtgatacctagcccatcctagcaggcatgcaccatctactccacactctgtgatgcagactagcctgccgtcagaacacgaactggtggtcagacacaggtaggtttcagttccagctctgcctcttattgactgcaacctcaggcttaactttcagtctctgagcctcagtttcaactctgtaaaatgaggtggctataccatctcaggttgcagagagaattaaatgaaatataagtgcatgtagagcattgaacccagggcctggcacacacagtgagtacacaatgttagccaggtagcttcataatgcatactgattgtcaatattcagacaatgcagtaaagtgttaccaaaaataaaagtaaacttatttgcatatgtattctttcaatctttatttttaaacagggtaaaactatgcatattctttcatagccagtgtttttctcttcatagtatattgttaaaataattttacttggaccgggtgcagcggctcacac

SEQ ID NO: 181424 - DNA, 765 bp, Homo Sapiens
  misc_feature (280)..(304): n is a, c, g, or t
ttggggcaatgtcagcaggtaccctgctgactacaccccagcacacggcgattggggcacaccctgtctccatgccaacatatagggcccaaggaacccctgcgtacagctacgtgcccccacactggtaaagcctgcagcccatccaaatctggagtcacacattgtatgcaactactcaagtcttacaccggtgctggagcagttccctagcagcaccacctctatttgcaagaagagacaacggaagtgcaagggtcactttatgcatctttaatgnnnnnnnnnnnnnnnnnnnnnnnnngtaaaagctgctttttctaatctcctgcctctccccaactgtccccctcttagcccctgcccttccagctctatccccttcctcctacctgaccaggccatgtcctctctgctcttccctaagtgtcctgtccctggggatcccagtctagaggcaagcagagagtagggtttattgcagtggttcatctgaaggctggattccatttgaagagcataaacagatgtggtccagggtaggaactcagagctgttgagcaggctacatctctaggggagtgttctggttgttttttcttaagcaagattagttcaggacattcccatgtcccagacacaaatgaaatgtctcctgagaaccattgcaacagaccaagaacaaaaccacctgagtatgtaggcgtgttattagcagcttaataccccaggctgagaacctggggaaaaaagtctttagaattt

SEQ ID NO: 181425 - DNA, 1247 bp, Homo Sapiens
  misc_feature (278)..(368): n is a, c, g, or t
ttgggttgagaaacaactgggaaactataagtttttatggtgggatgggatggggctttcattttatgatgatagctttcattttctatatattgattgagcttgggtagcttgagatgcataagtgatataacttggttgtagttcatgatacatggtagccatgcagggttgtagtcagactctcccatcttttgtgggcagcgcggggcggggtgggggtgtgcatagaaccagctagagtgtaattttgaatggaggacacttacctaagactnnnnnnnnnnnnnnnnnnnnnnnnnnnnnnnnnnnnnnnnnnnnnnnnnnnnnnnnnnnnnnnnnnnnnnnnnnnnnnnnnnnnnnnnnnntcgattttgactaattaaaattgaatattcaaatgtaaccattctaggaaatatctgtacctttgaaagtattaatatttcttagtactttggcaagacatggtctgctgtatttcatatggtgttttactatgtaacttatttactttgtacctaatctaattgtttcacattacctattttttttcttctttccagctgttaggcaattttcttcagtggtatggcattttctcaaataaaactctgcaagagttatcaatagatggtttattaaatcgatatattctcatggcttttcagaattcagaatatggagatgacagcatcaaaaaagcccaaaatgtaatcaattgtttccccaaacaatggttcatgaatctgaaaggagaaaggactatttctcagttagaaaacttttgccgataccttgtacacttagcggatacaatttatagaaatagtatcgggtgttctgatgtggaaaaaagaaatgcaagggaaaacataaaacagatagtaaaactccttgcaagtgttcgagctttggatcatgctatgtctgttgcaagtgaccacaatgtgaaagaatttaagtctttgatcgaaggaaaatagatctatgagactgaaaacctatttgcttgattaccattcccatgtgtaaattttgtatatatgtaaagtttctttaaactgtaaaatagcaattcttgttttatacaaaaaacattatattcaatactgtgtccttaaatgatattttcttcagaatgaaaggaattcagaattatttctaggagtcaatgaatgttttcctttactggctggtcatactttgtttactgaagtattttgtaggtcatttaaattaacccc

SEQ ID NO: 181426 - DNA, 1596 bp, Homo Sapiens
  misc_feature (297)..(314): n is a, c, g, or t
  misc_feature (388)..(485): n is a, c, g, or t
ttgggtatgtttatcctatcaaatgaaatctatcaaaagcataggtaacttagaagcttttatatatcctatgtattttagatacagagatttgcatcaaccagagttactaagaatgaaactgttggctctgaataggtgtgaataaatccttaggaagagatttcctacctgccctttaggtgccatgtttcttactgacagctgtcaatattttttaaaaatgagcatgagattttggttctttgcatgaattgcatttgaattatgcaattttggggggttttctttgtgggnnnnnnnnnnnnnnnnnngagacggggtcttggtctgtcacctaggctgtagtgcagtgcagccatggctcattgcagccttgaccacccannnnnnnnnnnnnnnnnnnnnnnnnnnnnnnnnnnnnnnnnnnnnnnnnnnnnnnnnnnnnnnnnnnnnnnnnnnnnnnnnnnnnnnnnnnnnnnnnnccacgtattctttccttaactgtttgaagactgctgatcatagcatcaaaagcgttttttatttctgttactatgtttgtatatttctaggatttctctttgattctttctcataatctcttcactgaaattacctattcgatcttaaacgttttatatcttttccatcaacccctttaaccatattaatcattgttattttatttcatacagttttaacatttgaactgagtgtcgtacctgaggctggtttaatgattgctttgtctcctcagattctgtttttccctgaatgcctgtaatttttggagttgctatagaaattcaaacaatgtagtctattgcattgacttactatcacatggaaaatattggattaaatttctaaaattttaagcacagtcctatcctttggcatttcataaatttaaagactttggatcttacaaatgcaaaaccagtatgtatgtatctaaccagtggtatgtgtctaagcacaaacttaatcttgtttttcctttaatatatattgaatccatccttatttccaaccctgtgactctaccacctgcctttagttcaagctcctgccatttagtttagtttatgtcctgccattacttcttaatagttctagacttgtttatctcactgtttaaaatctgttagtgtttccccaatggttacagaataagatctaaactttatgtgacatctaacaaccttctttatcaggcccccacctccctctccagctcaatctcttaccacttgcataagcacattttacactccagcaacatgaactgcctgtaggatcctcaaacaccgaatgctgggttttttgtttgcttgttttcatctttgtgctgtagatcttgctgctcactgttcccaaataccctttcctgcacttctgtttgttacatatgataatgccattatactggaactttgcacaatgctgagttttgtagccacaaaaatattagagtgttcattgggtagataaataccattagattgatctagacttacttttttccattgtagaaattatgtatatcacatctctaatgggggtgtttttcaaagttatttgaacatttcc

SEQ ID NO: 181427 - DNA, 1037 bp, Homo Sapiens
ttggctccatcgtctccccgtcccaccttgtactggtttccaagggtagtcgtttaaaagtaccacaaaaactgggtggcttggaacaacagaaatttattgtttcacagttctggaggccagaagttcaaaatgaagtgttggcagaaacatgctgcctctaaagggactgggaaaggatctgttccaggcttccctcctatcttctggttgttccttgccttctggctgcgtaactctagtcttcatttggtgttctccctgcatgcatggctttgtgtccaaatttccttttttcatgaggccatcagtcatactggattagggacccactctactactgcaggatgacctcaccttcccaaattacatctgcaacaaccctatttccaaagaaggccacattctgaggtactgggggttataacttcaacatgaattttttggaggaaacaattcaactcctaacacatctctacccaacctctgtaggttccctcaatccaccaaaattttttggctccactggattatctagcagttaggaaaccaagatcattaaatgaattcaccgcaactacagtgagactgactaccttagcttacctctgtgaaaggagttaagccaaaggaatctgtggaattttggagagtttgggagcatttgggggcaggaggcaaatgttcttcctttaaatcacaacacttagttctcttccatttataagactcactcctccatcccaacccctgcaccacaggacaaggaagtgttcttggtcttcaactttcatccctgatggtgaaagcagttgctcctgacctatttgcccaccagcttctcctctggagcctgaggcttctgatgcctgcctggctggttctcagtaagaaagtcaagttcaaccagacggagatgctgatgcctttcagtacttaaatatgagttcagaccctggggcctggacataagatttggggtcccctggatataagatttctgaaaacactcagactgtggagacccctgctgaagg

SEQ ID NO: 181428 - DNA, 2141 bp, Homo Sapiens
ccaactttgtacaaaaaagttgggtaagtctatcctttgttctatatacatcataagttagtatatattcttatttacagaaacatgctcaaatcacattcagaaagaacaaaaagtcatgggaaattttttattttacaacaaagccctgctttctttctggacgtattttacatcattagagagactatctgcacatacatctaccataatctttttccttctttgccaactgttcagtgcacatgtgctgcatcagaaatggcacctggatgacagaagctcaaagagtcacatatgtctctaaaatagagttcttttcctcttgggctgtctgaactggtgtaaatagaagctcagttgatcttggttttaattaacttattactctattaatataaccttggaattctattctaattatgttgttctggctgcttgtagtatcagttcgcccctcttgttagggagatatgtaacaatctgtcatttaattgagcagtctttttcacataacagtaatagcaaaaatcctacctactcagaatcatcttcttaggttgtctcctaaatctgaacaatacagttgttttataaaattacattttgtctcttgagatttaatcaattagaactctttagggagaaaataaataatagaagaaaatatatgcctcatatttcatatgtaattatctgttgatataatttttcaatgtattttgtatttgtgggagcataatgacctgtacattcaatatttttactggtaattcaatttttaaatatgtttttacaatgcttgaacacataaaccttagaaaactggaaaatacgtgtccacagaaagagttattagctactaccttatgtaaagatgcatagaaaatgaaattgttggaaacatgtgcacaaagtgttttatattatatacattgtatttatgaagaataaataaaatattaagattgttttcctgctagccaagagaagaaatccttgggaaatatctaaggagtatatggggctttataagcactgtttctaaaagatattctctggtacttttgcaaaaagtcgactgtgactgtgtagcattatgttctgtagaatttttttcaagtagcataatttatttcattggtgtgaaaacagccaaaggttccaatatcctcacaaatcatttatgccaaacatctgagggcaaaatttagccggtgttatttactagattcttccctttgaactcacagactcaagagacagaccaagagttcttatatactcaccacagcggaccaatccaagtggcatttttaggaaaggttgcagcatttaatgccatgtggtatgtctgttcgtcaagtgggtggcaagggaatatccaagctggcattttggatatgatgggccttttactttcctgagtgacatgccacatgtcaagaaatactgctccccacccccccactcccatcacatttacgtgaacaattttcatttagttatttcccgttccatatggtgttaaaacagtcgtattaaataaagattatttctagttttcagtggtaatttaaatgagaggatatgtaataattgcttattagatacttatccaaatgaaatataacagagtttacagtacttaaaatggctggttatggtcttggaaatgtttgaaaattcattatcctgaaaaaaactttaccattctgttttacccttgaggtattttttggggaaaaatgtttttgataactattaatctaaatatagtataattataggcaaatttcactgcctagttttattgatatcctgagtctacagctagtccattcgtatgactgattgatttatgatagctccagagaaccataaatttcaaaggctaaactctctgattttagtaaatagtaggtaaagtgacacaatatatgtttacacaacactgttttcatgaaatgcaaactttgcaaaactcacattaactgggaagcagccaaccctctgtagagaaatcccagattgggagtctggtttgaatctttgaagacagaaaggtgatatccggcctgctgttttaaagggaccacacttttgaatacctactggtgtttggcagaaatctgagactg

SEQ ID NO: 181429 - DNA, 947 bp, Homo Sapiens
aaaataaaaatttccccatgactttttgttctttctgaatgtgatttgagcaatgtttctgtaaataagaaatatatactaacttatgatgtatatagaacaaaaatagacttactcatcaggaagtgatggaattatacacataaattggcaatgacatttgaaaaatttaggatctggttcccatttcatctaaatgtaccatgtatagggtggctgtcaaagcagaaagatatataaaagtatccagtagcacatactatactgcattgctaggtaaggttcttttcctgacatcctatgcaactatcaaaaatcatatgtctgcaaactgaaaatattagcagaaagaattaaagatgttacagtttcagtattgaaagttttggtcccaaaaggtgctttcgtaaagttatttctctttcatgcattgattgttgcttagctaatcttcatcttggtccagatcagggtcaacatccgtggtgagtctttatgcctattgctgttttctttgcttctgcttttaatttggttgctcgtaaaataggtttagtttttttataatcctgtttaccaatttgttttctgtactgatcaacaggaagttttatagtagcagcatcttttctacccatctttgatctccaaaatgcctgcttgcgttgtgtctttgatgctgccaagtctaaactctggagagctgccaaggggtaagatgtttccaaagccaaggtctttagttaggtagcagtgcttgcattcctggcaaattcaattccaaataccaaaaataatattcttggtgatttttcttactcagctctgccaaggcaagggccgacaaacttcgtgtcctgtgggaaatgttgctgtccacggttctgtcactcaggggcaggggcgggacaagccagccgcacacccctactcccaaagggtgccaa

SEQ ID NO: 181430 - DNA, 1671 bp, Homo Sapiens
ttggcaccctttgggagtaggggtgtgcggctggcttgtcccgcccctgcccctgagtgacagaaccgtggacagcaacatttcccacaggacacgaagtttgtcggcccttgccttggcagagctgagtaagaaaaatcaccaagaatattatttttggtatttggaattgaatttgccaggaatgcaagcactgctacctaactaaagaccttggctttggaaacatcttaccccttggcagctctccagagtttagacttggcagcatcaaagacacaacgcaagcaggcattttggagatcaaagatgggtagaaaagatgctgctactataaaacttcctgttgatcagtacagaaaacaaattggtaaacaggattataaaaaaactaaacctattttacgagcaaccaaattaaaagcagaagcaaagaaaacagcaataggcataaaggaagttggccttgtacttgcagctatattggcactactactggctttctatgctttcttttatctcagactcaccacggatgttgaccctgatctggaccaagatgaagattagctaagcaacaatcaatgcatgaaagagaaataactttacgaaagcaccttttgggaccaaaactttcaatactgaaactgtaacatctttaattctttctgctaatattttcagtttgcagacatatgatttttgatagttgcataggatgtcaggaaaagaaccttacctagcaatgcagtatagtatgtgctactggatacttttatatatctttctgctttgacagccaccctatacatggtacatttagatgaaatgggaaccagatcctaaatttttcaaatgtcattgccaatttatgtgtataattccatcacttcctgatgagtaagtctatttttgttctatatacatcataagttagtatatattcttatttacagaaacatgctcaaatcacattcagaaagaacaaaaagtcatgggaaattttttattttacaacaaagccctgctttctttctggacgtattttacatcattagagagactatctgcacatacatctaccataatctttttccttctttgccaactgttcagtgcacatgtgctgcatcagaaatggcacctggatgacagaagctcaaagagtcacatatgtctctaaaatagagttcttttcctcttgggctgtctgaactggtgtaaatagaagctcagttgatcttggttttaattaacttattactctattaatataaccttggaattctattctaattatgttgttctggctgcttgtagtatcagttcgcccctcttgttagggagatatgtaacaatctgtcatttaattgagcagtctttttcacataacagtaatagcaaaaatcctacctactcagaatcatcttcttaggttgtctcctaaatctgaacaatacagttgttttataaaattacattttgtctcttgagatttaatcaattagaactctttagggagaaaataaataatagaagaaaatatatgcctcatatttcatatgtaattatctgttgatataatttttcaatgtattttgtatttgtgggagcataatgacctgtacattcaatatttttactggtaattcaatttttaaatatgttttt

SEQ ID NO: 181431 - DNA, 1304 bp, Homo Sapiens
  misc_feature (1055)..(1117): n is a, c, g, or t
ttggccagaagataccctgtaaggtaggtattcttgtctaatttttatagataaggaaagcttcttaacagtaagattaagttcctacagctggtaatggatccatgatttgaatccaggtctgactccaaagctaagctttttccattatgaaacattgcctttaacaagcatgatcttttctttttgcttctcctattgcagacaagggactatcaggaaaacgcaccaaaactgagaactcaggtgaggcattagctaaagtggaggactccaaccctcagaagacttcagccactaaaaactgtttgaagaatctaagcagccactggctgatgaagtcagagccagagagccgcctagagaaaggtgtagatgtgaagttcagcattgaggatctcaaagcacagcccaaacagacaacatgctgggatggtgttcgtaactaccaggctcggaacttccttagagccatgaagctgggagaagaagccttcttctaccatagcaactgcaaagagccaggcatcgcaggactcatgaagatcgtgaaagaggcttacccagaccacacacagtttgagaaaaacaatccccattatgacccatctagcaaagaggacaaccctaagtggtccatggtaaagactatgctttctatttcatgacaggggaaggatgaaccaggggaagaagacggttggggtgactgtaggtcaaggtacacggcccagcacttactcagatgaggtgatactgagataggagcttcctgtgggcggttaaaaatacagtgggcacagtcagcctagacacgtctttctgtcatgtacactgttgtcacataggtggatgtacagtttgttcggatgatgaaacgtttcattcccctggctgagctcaaatcctatcatcaagctcacaaagctactggtggccccttaaaaaatatggttctcttcactcgccagagattatcaatccagcccctgacccagggtaagagtgggccctctcctttattgtccatataccagaatgacctcatgaattcnnnnnnnnnnnnnnnnnnnnnnnnnnnnnnnnnnnnnnnnnnnnnnnnnnnnnnnnnnnnnnngtaacacccatgagggagggaatgtggccagagttacctgttactattacccagtactctatagtgcttgggcacctggtaaatagttttgaacgaatgactgctcgccttagtaccatgtaagatgtacctgtgcctggcacaactttcctgttcaagaggggacattaaaaaactaatccttccc

SEQ ID NO: 181432 - DNA, 306 bp, Homo Sapiens
ttggggctgtgtttccaggttttgccacaatctcttcctaccataacaagcacaacgaatgtgagccttatgttttgtgctttttgtcctgttattttctacctatagaagaaacaaaatatttgaggacattacatatgtggcttcatcattatgtgtcagtcatgtgctgccacatatggaacagatgctgtgtgacttccaaaagttgtgtcacggcacaattagaaatagccctttggaaggaggtaatggtatttttttaaaacgtaagtttgctacactttttaatattatattcatata

SEQ ID NO: 181433 - DNA, 1712 bp, Homo Sapiens
  misc_feature (146)..(182): n is a, c, g, or t
ccaacctaatatatgtgtgaaacagagaaaaggatgtcaaactacttaatttaatttctgtaaaataaacttctgaaatttgaagcaaacattttgcttgatcaaaatgtgttcttcttcgggttgtttgatccccattccatgcnnnnnnnnnnnnnnnnnnnnnnnnnnnnnnnnnnnnnccagaaagtgttactacgtgggaaataaggcttcaaatacctaaatgactttgaaagtaggtacgaggaaaaataaaataggccaagcttgggcggaaactgtcccccaaccagccattgccatggcatgtcttacaaaacgatccttttatccttggtctcaaaaaatcagtaccagaaagactctcacctctggcacataaattcctgctacaaaaagataattatacttcagcaagttatgttctaagcttagctttctccaggctttataacgcagaactcaggttgaagctttctataaaactctaaatgacactgttatacagcaccttgtgctttgccaattaaaaaaataaaagaatctaaaattaaatattacagaactaatggataatacaatagcatacgtgttagaatccaagtgctagcctctgggaatttttcattatatttattttctcccaactgttccttttttttaaaaaagtattgttttagacagtacatatacataaatttaggtagggaaatctgttaaatatctctctggcacctgatacctaaagaccctgacttgaattaatttataaattgtacctaatccatgttcaaatgagattaacagtaaattatagaaaattactgagtctacagactaaaatttttttcacatcttttgtaatccaccttattttcacagcttgactaacaaatacaggtaagtttgtcctccatcaaataatccagaataataactgtaggcctgtcattcataagaaactataatttgttatattctgacactggcacttaataaaatgttaacaactaaaatttctctaaaaatttcaatacattacagtaaaggagataaacaatttaagactgtttaaatctgttactgtggaattccaataattatcattttatatgcataattgaattcttaaaattgtggccattttccaaagacaccaatctatattatgacaaactcagaagagaacctatctccttcataagaatgttttttcccccaagctaaaaatttccaacatcctaaacccaattactcttagtaaatgttttggtgactcacactactgaaaaaatctgaagcagagagtcaaaaagaatggaaaggatctcaaccaaaggtaaccacatattcttacactctgcttaagcaaacacttagaaaagtcaaagggatgttttgaacaaatatagattcaaggttatggtacaattctgattatattaaggctttcactatcatgatctcttaaaagtctctccactttagtgttctccttctgattcatatggtgaacttaaggggttattaagggccttgttttggcttctcagtggggaaccactctatcatctctgaatgttaaaggtgatcccacagagctcaaagagaagaggcaatatggtaagaaacaattttaaagtttgcaataccaagacaacaatgatcaacactttgaagcaagatgaataaattaaaattcttgccaa

SEQ ID NO: 181434 - DNA, 1259 bp, Homo Sapiens
  misc_feature (276)..(286): n is a, c, g, or t
ctagaaaataccctgtatgcccattgaaacaagattgtttaaattgatacagccatgcaagggaacatcctgtcatcattaaaaaaggtgttcactatatattaaagtcacaaaatagaatttatggcataatcccatttttgtttaaaaatgtacttatcccatgcatacaaaagaaatcttccaaaagcaaatgtgcccataacaattgttactggtaagattactgaggacttttaaaaaaaatttccttatttgcaaactttacagtaaacnnnnnnnnnnnacatattagaactcaatgaagaattatttaaaagagaggaaaggcagtgcagggctggaggtcctggagggtggcggcgggtcgtcctaactagcaggctgaaaggtgctggaggggatgccttcactcagaggaagttcacagccacctgccttggaacatgtacctgttcatcttttcgtaatgttagtattcattttgctatcttcctgttgccatttccaaacagtgtcagtatgtttttgttaaatacgaacatttaaaacatatcgtatctgtaagcctatttgggtgtcttcatttcatgcccgcactgcaccataatgagtaccacacaaagccagaggatgacacttcctccagaggtctcactgcacatggagaggttagccctggcattaagggtccttggaatctctcagcagtcatagtcagtcagatgcaccaagggcagctgagtcaatctcctttttgtaacaacaggccgttcctgcggttctcagtgctgccaacctgggcatactgaagagcctcaaccaatactggctctcagggtactttcctttttaaaagaagttcaacttttgctattcttatgccccataacttttaatttgcacaagatcagccatgcccactcactgaattctattatattacccacacctctggaaattcacaaagtctgaattcagatctatgcataaggatgcaaacggattagcaataattgctggcactgccatcaacacctcctgtcgatctcacctgatctgaggataaatgaaggcaaagaatgtggccccagcccctggattggagtggaggcaaggagggtggcgagctgtcttcagcagtcggcctcacctctctgctcctgtatcaacaagtgccatttcatccccacttccaatccccaacatttataccccgtgaatcaattcttcttcagcatgccagttgctggagccaa

SEQ ID NO: 181435 - DNA, 1557 bp, Homo Sapiens
  misc_feature (333)..(343): n is a, c, g, or t
  misc_feature (619)..(627): n is a, c, g, or t
  misc_feature (976)..(1019): n is a, c, g, or t
ttggctcattatggtgcagtgcgggcatgaaatgaagacacccaaataggcttacagatacgatatgttttaaatgttcgtatttaacaaaaacatactgacactgtttggaaatggcaacaggaagatagcaaaatgaatactaacattacgaaaagatgaacaggtacatgttccaaggcaggtggctgtgaacttcctctgagtgaaggcatcccctccagcacctttcagcctgctagttaggacgacccgccgccaccctccaggacctccagccctgcactgcctttcctctcttttaaataattcttcattgagttctaatatgtnnnnnnnnnnngtttactgtaaagtttgcaaataaggaaattttttttaaaagtcctcagtaatcttaccagtaacaattgttatgggcacatttgcttttggaagatttcttttgtatgcatgggataagtacatttttaaacaaaaatgggattatgccataaattctattttgtgactttaatatatagtgaacaccttttttaatgatgacaggatgttcccttgcatggctgtatcaatttaaacaatcttgtttcaatgggcatacagggtattttctagnnnnnnnnncctcttagaaaataatacttgcgatgactttccttgtagctcagactttttcacgtctgttgttatctctttgggaatgctgaatacatacatttcgagaaggaaatgactgttaaactcttaagacttcaggttcatattgctaaactgcccagcagggagggattttttcaattagtgttctcactggtgaggcaaacctgatgccttcccctcttcctcagaaccggctttatcacattgaaaacctttgctcctccgacggatcgagtctgctttccctgtggatgtgagcattgctttgtctgctggtgactgaacatctctaccatgtgtcaattggccattnnnnnnnnnnnnnnnnnnnnnnnnnnnnnnnnnnnnnnnnnnnnatgattttctaattcctagtcatttttctattgattgttttgcaaaagccatttacatcttaaggatattgataatcttttgttatatttgatgcaaatatttttttccagtttataggttgccttttaattttgtgtttcaggtagataaaagttaaacgattttcttaggttagtttatcactgtggtttctgaacttgttatgtgtagatcttttccaccccaagagtacataaatattaatccatactttcttatggaacttgtatggtttcgttttttacatttaaaccttcttccccgtggtgtgtgttgtggaatctgtgtttgtgtgaggaggggcatggtgctctcagaacccacctcctgtggccagagagccctgtcctgtgagggtggttatcacagtggcagggttcaattcagaagaccttgagggcaggctgatgtttcctgaatgggcccctggttgttgcttgtccctgactctccatttccccatctgagtggatttggacctaatagggcactggagct

SEQ ID NO: 181436 - DNA, 444 bp, Homo Sapiens
ttggagcagcttttgcacacatgcgtgggattagatggaaaacaagtggattgagggtctgccaatgaaagcgacccatactgaagtccactggctctggttgagacccagaagagtcatgcatcagaataaaggtggacaggaaataccctggcctttgtagggactgagcctgcaccgacgacctcaattgcagcctgtatggaggacccctgaccatcccccagaagtagactcccatctcttctgcagcaagataacatgctactaggcctcaattcattgctaaacattttttaacaagtatctcacatttaacaaaaaaagatcagtcatatggcagcaaaatacaatgtcatatgaccaaaacatgaaagactgtgaaaatgaatctggaggtgacccaagcattgaattcaacaatccaggctgggtgcggtggct

SEQ ID NO: 181437 - DNA, 1420 bp, Homo Sapiens
cacctgctgagcagcaacataattctcaaagagggattagtgaaaattcctgtcctgcaatgtctgaaacaaagcaccctccctcagggccatagacagggcttgtgctatgaagtgaaatagacaagttaatccctaatgaagctggcagctctaaggaaccaagatttctctaaggttctgtgcttggtgacaataagggacaaaaaaagatacccccagttagttttcctggctgacagaaaattctctgcatcagtattctcctctctgtaatatcatttgaatctgggggtgcggaggaacccatacaacttacttgtcccaaggcctcaattctccaggtggtggtggcacagagacgtcacaacacaaactccaggtgggcgaggagacaggtctgcactagactcaagttaaattcctagctattgtgcagagaacataagccaaggaaaaatcaaccccaaataaaccaccagaattccttttaggactgagccaaaataggtgagtcactgccaataagataagaatactcgtggcttgatctccttgcttctgtgtttgggcgggggaggaaaaagcctcaaacacttcagtacgaaacgaaacgggaaatcatatagctccagttaaagaaaagagcaaaacaaaaaactgcaaggcacatcccttgaaaataaaatgacccaacacagattttcactttagactaagtaaggtttcccagatttacattaaaagtatggtaaatatccattaccctgagaaatagaacactttcctaagctagtagcatctagacatcagctggcattccctgagttctactaactctacaaaatcttagagaaacgcataaaatcaaggcagctgttattcttcaatggtctgtgtgagtgtgaacttcaactttctctacggcttgtacatttaataagcagctatttaacttacataaaagttaaaaaataaaaacaagtttaacaattgctcaaggctaaaagctcagtcaataccccaactgccttccctaaatgatgcaatgcatttgccttgttctctctctcccctcattctatatactgccatcactggtttactctaatgcttctgccagattttgccaaggctcaaaagcctcacacagatccaagaaaacacacatttgcctctgagaccattggtatacaatgcagccatatatgagaaggcctcaggatgtggtttgtttgtattttgcctgccctgatctgggacaagagcctggtcctagtcatcactctattcggctgctaagcatgggacacacatcagacattttagtctattactgaataactgaacttacagagttgcgcagagttcattccaaaccacaggggaagcacatgggcattcctgaggacagagccaa

SEQ ID NO: 181438 - DNA, 1509 bp, Homo Sapiens
  misc_feature (248)..(292): n is a, c, g, or t
  misc_feature (320)..(349): n is a, c, g, or t
tattctggggaaccattggttcctcaggaccttagaggtgttaaagatgtataagtttgttgggattggaaggacctaccttctgtggtcaaataagttttgggagaaacaaattgatttcttgattgcaggacttctcagagcctttaatttgctaatgtgcattgtgactccccaagggagagttacaatatgcaatattccttggattcctttgaccaaagaaatcttttcaagagcaccccaannnnnnnnnnnnnnnnnnnnnnnnnnnnnnnnnnnnnnnnnnnnncctaggcaacagcaagaccttgtccctnnnnnnnnnnnnnnnnnnnnnnnnnnnnnngagcagctcaagaaactataggaaacactttggttaacacaaatctgttctctgtgctgccttcaaactaatctataagaaataatgaagtccatgttagggaacacagataacttttctcaaatgagaaatctcaaatccctgtactttggagttaaaaaaaattattctagcttttccaacagtagagacattaggaaggccaactttggtgggcagattggggattttcctttgcttctgatgactctcttgtgccctttctcctctcaggtgccagatcggctagggatactcactcacctgtatagggactttgataaatgcaggtttgctgggttttgccggaaaattgcagaaggtactggaggtggggggtgggttttatctggctttgttctccaaagatccccagttgggagattgagtggggttcagacaggactgacaacaattttcctctcaccaagtgacctcagttctctgccaccactggccttggtggtggtgggccttggggtggaggcagaagggcacgtgggtcgtgttgacagttttgtattacctgtgtttttttctttaatagctatcatggcttgcttaggctgtatgcctgtttctgaggaatttatgaagcagttgtcctttggacaaatctataactttcttttcctagccaattatactcaaagaactaggggattatagagaggttaggcatattttgttgggtgtcaggagatgctgaacagagggcttgtatatctgtacattgctctttctccactgtgaggtccatcctgccttaatttgggttcctgcagcctcagggcattctagggctctcttagatcctgctggactgagtcccctctaaaaaagaagcaggaacaggctaaccaacagcagactgttagaagttggtggagggcactgacaggagtaccagccagctgttcagctaggatcctgggtccccagagctgacagcctcataggaacagacttacagtaactcagtgtgagctggatgcatactagtgccagtgcattcctttagtgggtgctgccctcccttcctgagttgggggcctgagtgagcacctctgtacagggcacccctctacagaggggaggtagctggtatgtttggcagtgga

SEQ ID NO: 181439 - DNA, 1237 bp, Homo Sapiens
ttgggagattcttactttacatctggcatatttcttgtgttacatattataatttcattgaacatggctgtctgtaaaactatgtatatgatccggaagagactcaaactaaattaagttttaacagccatcaattcattttaaaatgacacaggcatgaaaaatgatctatcaagatttgtaaatcttattctgttagctattgctagagatagtctaaaggtattctacttggaatttgagatcaagacaaagattttctgttagtaataatattcagattatttttattttgatgtataaatttaaaattcttagaatattttcaacaatattttccatttctaaatttattttatttctaaacaaatgtaattactttatttattaacttttattttcagttcaggggtatatgtgcaggtttgttatataggtaaacctataggtaaataggtatacagattattttgtcacccaggcattaagcctatgcgcgttagtgaaaaatgttattgctttaaatatccaaattattcagctgcatttgatctcattctttagtccaatgtaagtaagagtaaaacaatgacatttaaggccaccaggctattctcatttttggaaaaatgctggattacattaccagcatattaaatgagaatatcaaggtgtaatatctccctagaaattgtctcaccttcaatactattgacatttttggacctgataattttgttctgggctctagcctcatattataggaggtttaccagttttcctgccctaaacttaccggatgtgaatagcacactccactacctacagcagtaaaaactaaaattgtctctaaacattgacaaattgtccctggtagtgaaaatcacccctggttgagaccgtgttgttgaaaataaaacaaaaactttcacatcaataaatatgttaggctgtgtatgttaaggattaacattaagacaatatggagcaagcactacatgaaagcagtgacgattgggaattagtggcacattatcctaatagttaatatagtgactgtaatatctaaatatcatcctatagagtttttcttagattttttcattagtataacagatgttgtgtatgttacactgtatatactgttattttgagagacaattttgggagattttgccaacgtattttcaattataatctttaatacattctagcaagtgggtctcaaaaatgggaa

SEQ ID NO: 181440 - DNA, 969 bp, Homo Sapiens
ttgggtatttatcattttttaaaaagtataaacaattctgacttattttattccatctaagtggtaaaaggcaacttattgagaaatataaatatctatatatgagagctctatataaagacacgtgtctgcagggcgggcccgccagcggattcgccacagcctgccccggtgctatctcgtccccaggcccgcgcctgcctccacccgcttggtgctgactagacgctgacaacgccgaaccccgttctcggaaacgccgcccggccggctcccccgacgcgctgctcccgtaccaaaggcaggcccgtcgccaccacattcctcggaggcctccccgcggcctgagccccttcctgagcgccctggcgcctgccctgagctcttcacctttaccccggcactgtgaacccccagactgttcaccctccggggcgtgggttgcgcccttgcatgtgaaggggcctgcgcggtgacgcagctggccatgtgctgcgcgatggtgctgtgaggacggcgcgggcacgttgaacaagtgcatttacttttgtatttctcggctgtccatggctcgcagcatgccctgcgatgcggggcaggcctgtcgtgggtcccttggtgtttctgtacaggagagagtcacactaatgagtggcagtattttatagagatgtgatgagaatttataaatttcatagatttgacagcttttatttttagatggtataatgcacagtgaagaggaaagaaaagcgaggggaaaaaaccttatttattcaaacagtgcacaaaatggccccagcgtcagccccgaccctagacccctcagttgcagctcccagcagcccagacagagctgccggcgcccctgcctgccccacatcccttcctgtcagggccacgcctggcacccatcccttggagcctgtgctggttctcccagctgctgtgggtgtgctggggccaggg

SEQ ID NO: 181441 - DNA, 1676 bp, Homo Sapiens
  misc_feature (480)..(491): n is a, c, g, or t
  misc_feature (837)..(855): n is a, c, g, or t
ttggcacaaagaaatatctccctttgctccagttaattgttcttgtatgtaagttgctttctattccagtatatccagagtggtgaaataacaaggccagccacgtagccaaaggtcgctccaagcgtacaggagatgggccatacctgaggagagaatgtatgagatcaaaaaagaacaaatgttttattattacttgagcacaagtgtaacctaaatatttctatattaaagcttaatgtgctttcttaaagaatgccaaaagtgtaataaggtcataactgcatttatcatgaacactaaaaatgtacacattttagttaatgtgcattaaactgtaacaaggcttctggcaattgtagatttagtttgacgctccccaaagtgcatgagacacatgctaaaattacaaattaaaattttgggtcagactttgccataatgatagactcaatttagctctctgaactagttggtaannnnnnnnnnnnaattcccactttggctgtgtacatcaaatgaaatgagaagtgtgtatgctgaccaaaccacaagaaactttctttaagttgtgttaaagaggaaagacctagaatccaagcgtgttacatgaaaattgtaacagagcagctgcttccacctttcagatatagatgttggaaccacagcagaagttatagagcgacaacttatatacacacctagaatgtaagttaaacaaaataccggcttccagagaccccttttctccagccatattacatcaggctagaagtaattaatgttgatttatttcatctacaagcagttggtccctaagtgaaaggctctgcttgnnnnnnnnnnnnnnnnnnngttggaggaaaattttcatgttcttctgtgaagcttatttggtacactggagccatttctaatctttctctggggggaacaggccacagaactgtgttagaggtgaaccatcttaattactagttctattacctaattcagcttccttgtttggtctgctgtggatctgccttattgcatatgccatgcatcagataatggatgcatcagataatggtgttagacaaagcttcattgtgaacaacctaatgcattttagagaaacaatctcatcacattttttctagcctttcctacatttaaacttgctgttgcccaaattataattttttaaatgtctttggtgggcttctgttaattcacatgacttgagcttatagctatgtctactgcacagattgggtaatggaacactaaacttttatacttgaaaatgacagccttaaatgctcatatcagtcacaaatctaggatgtactgtcttgttgtatgtgagctttgtagagatttttaaaaatataagcatcaccttcccattgaagagtggagagagtctactggatgactggccaggaactttctctctgaatcggacatttggatgtcttctttcttccaagaaatggtggttcacattaaagtatcatggccttatgtatgctcaaatggaatcttatgtaactttcttatttaattttggtctgcttatttttagataaaattgaaaggaattgtataaatcaattaacatattagctgagttgtccaacacatggtataaacgaattacaacagtaaactattacacatttccaacttgc

SEQ ID NO: 181442 - DNA, 960 bp, Homo Sapiens
tacaaaaaagttggaaaaatgtcacttatgactttgtgtgtgatagtagtttctgccatacaggcatatttcattttttatgtcattcaattatttcttcgaaaatcctgttgtttttgtgttgcgttttctgttttcttgctgagtttgaaagatcttcaagattataaagattccaagattaaaaatattttcctcgtttcttctgttaatcctgttacgtattttttccattttattttggctattattttcccatattgtgaaaattagcttgtatggtgtcttgttggctccactccacctcatacaagttttgcatatttcttgtttagtttattcttggattatctttttagttgcaattgtaaatgcagctaaacagactaaaagacagtcttttattgtcttccatttgatagttgatatgtatgaatacgtatgtgttttaataactgttcactctgctgaatttttactgtttgtgatagtgtttagctgattttcttgtgttttcaaattcttatttgccaatagtgatttttctccctccttttctaatgaataggttttgatggcactttatttgactactttaatggttatgaagatttaaaaaataagaaagttagatttgttggacatgctaaacagagaatacaagaggattatcttagaattttaagatacttcaggtaagaatttttaaaaataaaaaatgatagttttaatatcatgactagagcataacagtggtcatacgaaacccacagcaggtcagtgtacaaaatggtgacatcccaaatgtctgtctccagtggagacctagcaccctatgacttatgagtgaaaattacttagctacttcatattgtattttcattcccagaacgcacatatactttatgtcatctttcctacaattttaagtcatctttttaaatgtccatttttcttttt

SEQ ID NO: 181443 - DNA, 688 bp, Homo Sapiens
aacgcggaagtctcgagggacagggagggggcggggccggtggggctggaaaggatactatcgggccagcagctctgtcacctcctccttggtcatgacgacgtgctcagggactagctcgtgctccgtgatgttgatgagcagctcctgctgcagaaactgctccaggatgtacttgggggccatgtcgaccagggactgcttggcggagggtgtcatgccctgctgcaccacgatgagagcccgtgtgatgttctcctcctgcatgcgctggcagtacaccttgatggtcttgatgcccaccttgggctcctctgcagacagagagtgtgctggcctgcacgagcctgggccctcgtggccctcgcccacccagagcccagagcacccaggttccagccccattccacacaggtgtctctcctgctcgggcctcggcttccgcgtttgcaaaacgaggcctgagttgcaggatcccaggacaggggaagagagggctgaaacctctcattcacccggagacagggacagggggctgacacccctcagtcacccagagaccagggagaagcagagaccttcgactctgagaggctcccaccctgggcagttctggggaggcgggtgactcagcaccaacctctccaacaagcagacctcacaccccaggacgctctctttaagccaa

SEQ ID NO: 181444 - DNA, 1817 bp, Homo Sapiens
  misc_feature (604)..(616): n is a, c, g, or t
ttggatttgagttactgtctagtgcccttccatttcagcccaaaggattcccttatgcatttcttgcagggcaagtctaattgtaataaactccctcagcttttgttttatctgagaatgtcttgatttctcccttatttttgatggataattttgccagatacatgaatttttggtaacagtatttttctttcagcactttaaatatgtcatcccactaccttctgacttcatggtttctcatgagatattagatgttataaaatttgaggattcctcattcttgatgagtcagttctgtcttattgcttttcggatttgctcagcttttgtcttttgacagtttgattataacgcggctcagtgtgggtctctgagtttatcccacttagagtttgttgagtttcttggagtcatagatttatgtcttttatcaaattttggacatatttggctattatttcttcaatttttttcactgcttctttcttttccttctgaaatattcttaatgtatatgttggtctgtttgatgctgtctcaccagtttcttaggctgtgttctcttttgttcctcagacttgattattgcagttgcccttcnnnnnnnnnnnnncaagtttgttgattcttctccctgttcagatcaactgttgaactcctctagtgaatttatttcagttactgtacttttcagctccaagatttatctttggttcctttttataacgtctgtgtctttattgatattctcattttgttcatatgtctctttcttcctttagttctttgtccatgttttcctttagctctttgggcttatttaagacaattgtttaaagtctttgcatagtaagtccaatgtctgtgtttcttcagggatggttttcattattttgttttcaatgagccatactttcctgtgtctttgtatgctgtctttttgttgttgaaaactgtatgtttgaacatcataacgtggtggccctgaaaatcagatattccccccttcctgagagttagttttatttttattattgaagattgtagcagtctattgctacatgtgcagtcatttccaaactatttttgcaaagactgtattccttctgtgtgtcatcactgaagtctctgttccttagtttgtgtttaatagtttgacatagatttccttgaaaggagttaaaactagcagaaaaatctctctcccagtctttccagtctttgtagattggttctgtgctgggcttttccattaatacttagccaggcttgtactgagcctaacaatcaggcccaaaagcgtagggtctttgcagatcttgtctgagcatgcttcttgctgtgtatgcacgtagttttctaaatctccctgtatgtgctgttgaatattctaatttcccaaagaaactcctttgcagctttttctcacagaacatagatggttttttggatatcttgaccatagtctttcgacccaggtgtttgcggttgttagttcaccttacacttttttcaagcattgcctactgcttacgatgagtgctctgtcaatcctttaagtagccccagacaggctaccagagacttaaacaagaatttgtaagttctgctcagcttcctctagaaatggggatcagggtccaagacagaatgcagttgctgatttcaagactgctgcaacaccagggagcttgtgggggaagggcaagcagaaatgtcacaaagctttcttgccattttaaagttgcctgttcttgactcagcatttgcttcattgctataaactttttactgtttttcagagttctgataaa

SEQ ID NO: 181445 - DNA, 1370 bp, Homo Sapiens
  misc_feature (269)..(277): n is a, c, g, or t
ggggggaatatggagagatttgttagaagatacaaaattacagctatatgggaggaataagttctagtgttctatagcactgtaggatgactatagctgacaataatatatagtttcaaatagctaggatattaaatgctcccaacacaaagaaatgatacacgtttgaggtgaatatgctaactaccttgatctgatcacaatacattacatttatcggaacatcactatataccccataaatatgtacaattctgtgtcaattaagnnnnnnnnngagaaatggcctcagcaggcccccgacccactctgcttggttagctttatgttcccacaggccctgtatgtcactggtataagcacttatcactctattgttactctatttttctgtctccttcactcgattccgcttcttcaagccaaagaacagattctcccaagtaagccctggtattcaggcttcaaaatcctgggaaacaaaagtagtccggaggcagcttcccgaaaaacagggcttttgagaggtacagaaggatgctgggatttttgaccaggagtaaaacagagcagaagctctgggatctggaagagtgaagagcctcgaactgctggggaaggggaggcctctgtagaccatgccactagggtaccagctttaccagtgtgggagggctaaggaagggtggattacgcacaaaattaaactatttcacaataaagaaaaccaaatcaataaacgaaaggcgaactattcaccttattaaataatcacaagcgtcccttcaagtagcatttcgtttagtgtccatttacagaccacgaaatatttaacacagggaagaactacaaaatgaagctttccaagactgccaattagagataaaccaatacactttaatagaaagcaaacgtaaaattctaactaggaaaaccccgaacacttaatgtgcctggttaaatattttctcatactgccggagagaaggctccggttcagcactgagatcaggacgggcctcctctccccgggccccgccccggccgcaccttcaggtaccaccggaagtcctcgcccacgggccggaggttggtgatgttctccagcgtggctttgagttgcagcgcgattttctgagggggagggccagagcgactgcgtcagccgtgcctgcgcagccccacgcctgcccgaccctcccgcattcccagccgtgggtgccacagggagacactccttctgcctcctgctccttcagcgcgcacccactcgcttcatctcctcctggcgcgagctgttgcctcccagaccctcgccacctcccctccgtgtccccgcggcgggcggcctcccctcacccccatgccaa

SEQ ID NO: 181446 - DNA, 1157 bp, Homo Sapiens
ctcgaagaggctaaaacgtatcctggaactaaatatttacatttcttaaagccatgtgtgttttctttggatgaaaggataacaaatgatttgtatcgttggataatataaaaacacttcaaaaagttaaaattgaaagaaaggcaggatcttctacttttctttattttcctccccagttacccaacccacttggcttccaggagcctgagaagttgaagaagtaaacagaggtttagttcagctgttaaccatgctaggaagttctagctatctggtaataccatggaactcaccagaatctttcatcatggaccagctgctttttacacttggataccagtaccctagatggtgggagagactggaaggatcgttcaggtcaggggtgatggacttctgcagtccctctcacatacactgttcaagttacctacagtagctacgcacggaaagtagggtgtgagtcattccatgattgacaaccccagtggaccacaggtgactcccacctgggtggcttcgggaactcagttcagaggctgcagcaggtgggatattttttggattatggagagctgtttgatttcacatcagtgggttcttccctcaaccttgttcagatcagtgcctgagtaagttctaatatattaaccttttctgagagaagagatgtgaggatgagggtggagggtgtgaatcttgttttttcaccatcctgttactcttctgcatgcggtgtccccttactgaggaacagaatagaggagctgtaagttggggtatagtgtggcaaggtttgtgagagacttaagaacaaagggtgtttatcataggtaattatcacagtgttgttagagtgtaggcagagcagctttctaaccaacattacaagtttattttgctagtgaaaccttttatttaccaatgaagcattagaatttcagagagttaattgtttgtgaactttgttcatggtctttctgaaactttcaactctctgtttagttacaataaggctcattttatagcctttattgtcctcttttgagaagaggcagtatatgtagataggaacatgggcttgggatcagatagactgggaatagaaatccatgcctgacgcttggacaaattgtttaaacttctgaatgtta

SEQ ID NO: 181447 - DNA, 1325 bp, Homo Sapiens
  misc_feature (309)..(322): n is a, c, g, or t
  misc_feature (343)..(398): n is a, c, g, or t
  misc_feature (958)..(975): n is a, c, g, or t
attgtagcgaaatatacattttttgcctctatagcttctggattttgaattaatcaatgtggagaaattttttttcaaatgtcttgcatagttttacattttcttcctaggtatttgtagttgcagttgtaaataaggtcttattttctgctatgttcgtatatatgaaggttcctgatttctctctgttaattttgtattcctttatgttaccaaattctatgtagtagtttttcatttgttcttttaggattttcacacataaaaatatattgttaatttgcaataatacacagaataaaacgcagnnnnnnnnnnnnnnaaatggagtcttgctctttcnnnnnnnnnnnnnnnnnnnnnnnnnnnnnnnnnnnnnnnnnnnnnnnnnnnnnnnngttcaagctattctccaaaatgcagatttttgtaaacctctttgatttccattttgtatacctgtgactttctcttttccgatgttattgctgttgtttatgttatcgctgccaccaccatagtacttgtcattaagctaaaagttggcattaggggaatgttaactccctctttaaattgcaagatgtaaatatctctaaaatgtgactagcccatgtttatactaagcaaaagatagtaagaccctgtctcaaataaataaatactgaataaacagcggatcaggagaccctaatttaagtcattctgcatcacttgggtgactgcaacccatcactttactaaactctctctgttcctcagttttccctttattgccccctcatatcttttgacaacattgcaaagacaattgatcacacccttgaagatacctcatgcttcagaaggaagttaccatataggcccaaagtatgcaagtatacatctttattattgccctaaaggtgcatgagatggcaaaggagctttcatatagttgaagtcatttcagtccggnnnnnnnnnnnnnnnnnngatcttttaaagtaatcagtttttcttaacagacatgcagaatgtttctgtgagcaaatcagattattaacatttttatagatttgtatagaaccaagttttcctctgcttccttattctgctatgagagtccatttgaggaagggcaccataaaaacagattacttgcttccaggcattctcatttccatttgttaaaaagactatttgccattagggaatcgtgacttctcttgttcagaggattctatcagtgtataaggttcatctagtaagcttcctcgccacagagtttatttgagaaatgtcatgtgagtaatggagagggactgattggatttcatcctccc

SEQ ID NO: 181448 - DNA, 938 bp, Homo Sapiens
  misc_feature (617)..(720): n is a, c, g, or t
tacaaaaaagttggcccattatttgtgatactaagtttgattgcttggttgagaggagtaaggtgaggtatatttttctcactgcagtcagcaagtaatctgtggcatgataaattagcactgtaatgctagcctgttctccagtgatcttttacctaatagttgtggtatcttttgctgatccttgtcaggctaacttttaaatttcagtgttaataaatgtttgttggtctatagatggaaacaaatcacaggaattaaaaaatatccagctaggttaatcagaatctgattttgtggattttaaagattttaacaaagtattcaaagtatcgtttgttacgaattttataagaaacctggcttgaaaaatgggaataactcaatgctggtcttctgtactcttaagaagtgcatttaaatttttcttagataacatctactgcacaagaataacccagaaatacaatataaaggaagggtggatctactaaaatacattttgagaaaattgtctattttctgatgtaatgggaggaacactggattgagagtcagaagatcattcctaccattatatgaagtttaagaattacaaatttttgagctgggctgtnnnnnnnnnnnnnnnnnnnnnnnnnnnnnnnnnnnnnnnnnnnnnnnnnnnnnnnnnnnnnnnnnnnnnnnnnnnnnnnnnnnnnnnnnnnnnnnnnnnnnnnncaggaaaaaaagaacgataaatttttaaactttactgcatgttcttatttcatagtgattgctttagtaaacatttatgaataaagaatgaatttctgatgagatatgtttgtagtgaacttcatttttatgaagccagttataagtaaatcaaatgtatgtaatacaaaattgaacttaaaaaacctttcctcttattctcaaagtgttgtgtgaga

SEQ ID NO: 181449 - DNA, 905 bp, Homo Sapiens
ttggattagaaaacaacaaaaaccacttcggttactcactgtcctcatgctttgatgtcagttgttctcctaaattttaaaattttgttatgaagattggatgtacactgatttggccctttaaatgacattataccaagaagttggtataagggagtaggagatgagaaaactttttgaaaaatcatttggtgcatgctaaggtagcttgtaggacatgtggttttaaaaaattcatggattttgaagaaggatagggtggaagtaaaatttagctgatagcatagggatcatttgtgatttatatagaaaataattatatttttgagtgagaagcatcagacttaaatttttttcttctattttggttattaccaaaaggaacagagaaactctcagaattctttgaatcatagaatgttagtgctggaaaggactaggaagtgacttgtacaaccccttcattttacaaaggatcagagagaattggttagtagagtcccaaatctgcttttagaagtaatatggtgatcatcagtttagattcactgtaggaagggcagccctgttaaagtttgtcaggagaaaaagggaaggtatcactttttgtatgttcacccagttgcttctgtagttttcatacccctgttttctcaattttcttagaactgtctttaatggcccagctctaccagggcttgttgtctaagacattaacttgtgctcccctcagggatgggtttactactagctgtcagaaagctattgggtatcctaatgtgttaatagctgaaactcagctgtaatttctcctaaatacttcagcattttgcattctgtacattgtggtgctttttccaccttgtattgttgtaactgtaagctcctacggggcagcaatttgg

SEQ ID NO: 181450 - DNA, 1244 bp, Homo Sapiens
actttgtacaaaaaagttggcttcattttacccaggatcagagagaattggttagtagagtcccaaatctgcttttagaagtaatatggtgatcatcagtttagattcactgtaggaagggcagccctgttaaagtttgtcaggagaaaaagggaaggtatcactttttgtatgttcacccagttgcttctgtagttttcatacccctgttttctcaattttcttagaactgtctttaatggcccagctctaccagggcttgttgtctaaggacattaacttgtgctcccctcagggatgggtttactactagctgtcagaaagctattgggtatcctaatgtgttaatagctgaaactcagctgtaatttctcctaaatacttcagcattttgcattctgtacattgtggtgctttttccaccttgtattgttgtaactgtaagctcctagggggcagcaatttggtcttaggcgtgtaccctgtttagtgcctggcaatgccatgtttatatcaaggtcttaatattacttttgagttatttctcccactcttcatggaagtgatgctccagccttgctaaaacactgagggtcctcccgataagccaggcattgtgattccttggcttcaagtgccttctgtcttccccgaaggtccactgagatctacaatcccccctttcctctgatctcttgccatgtaagtaattttttaaaagatcagtacaagagctatattttttcctaagaaaaaatttcaacaggaatggggagtagccccgttttggggctgatctgtccagaatttggagtgaggaacaaatccattctcatctactttccacattttccctcttgtttgaggtcctgttccaaccttcatttctgaaactgttctagagcactttgtctttctcgtagttcataacttaccccttcagtctagaattagaattacattatctgttttactactttactagactgtaagctcctagaagataaggactagggagttcatctctgtattccaccagaaggtacagtgactcataactagagtctttagatgaaacttactgagttgaataacttaatatatttctgttttcattcccaagggaggccatgtctggagatagaccttgaatttaataaattttggcactataccatttcagtggagaaaattgttggggaatttgggggggatggatatataaagggggaggagtccactgg

SEQ ID NO: 181451 - DNA, 850 bp, Homo Sapiens
ttgggtatatgccttcctaacccctcagggcttaaccgccagctctattctcagctagctaatgctgatttcctcacctttgcctctttccatacattgagctactgaagcatagatgaagcactggaagcaagtttttccagaatgctcttcacttcctagtatcctactctatatttgctaacacctaactacactgccttttacttaatctgtgatttcttctctcaatattttactagcaagaggagaggatgttcctcacccttgaggggatattgagttaaacccctagcctgcctcccctcttaattgctgcagggatagagaatggaacagttggccaaggctgcagctagttttgatcactgaaactggcttcctactccagcatgtttttcaaattacgtggctggtggtgcttctacctttaaaagtgggtgtgtgtcactctggctgattgctggacagaggtccagctttctctttttcgcttgttcaaccaaggcccattttatctgaggcttaaatgtacctgcctatctgtgtggctagtcctaggtaggttcgtctggtttgggttgctatggctgatagactccaccaggcagcaccaaagccggtaaactaacctctgctaatatctgtctttctcaatagccattcatgctttatcttttgctgctctaccatgtgctccagcatgagatcaaatcaccagcaggttacaaggcctcagccccagggattggtagatatatgttctggcccattgttttataaagggctcaagagaccaaagcttgttgcctacttaccttgacaactctaaagtagctctgtgaagtag

SEQ ID NO: 181452 - DNA, 1501 bp, Homo Sapiens
  misc_feature (750)..(818): n is a, c, g, or t
  misc_feature (823)..(883): n is a, c, g, or t
ttggccaagagtgagcgtcaagcagtgcaggctctattcaatggcattggagaagtaggagcatagcatggaattggagaagtagtatagcttgcaaatcaccttctcagctactgagaaccaggaagttacaaatatagaggatctttaatgaagggaatgagcaaggtgaggaatattcatgcttttcttagtaagggatggagattttcctagaatcaaggagtcacctcatttctgtcctttcttggtctcttccgttcattgtcacagtgattgtcaactgtcatgcactgatgggagtgctatttagcatggaaattggattataataaacctagatgtttttcagaggttgcgtaagctgccatcatggatttcaccagcttcagctggtttagtcccaagaagaaacttctgaccacagacatcctgtttcttaaaaataagcagagttaaaggtgagtaagaattcagccatgtcacataggcactgcaatggccaacaacatctgggtaggggtccaggtaagtcatgtaggcagtgcaataggcaacacagtcacagaaatacctatgaaaagctgtccttttgtcagggagattagcatgtgtagaggaagtaaacatcaactgcaaatggctttctctgagaccttcttatctgctttatctggatccaggtaagattaactcacaggaaaaggaaacaaaagatctcatgcttttaaaggtctgacaggaggattnnnnnnnnnnnnnnnnnnnnnnnnnnnnnnnnnnnnnnnnnnnnnnnnnnnnnnnnnnnnnnnnnnnnnataannnnnnnnnnnnnnnnnnnnnnnnnnnnnnnnnnnnnnnnnnnnnnnnnnnnnnnnnnnnncggtggaatcaaaggattttgaaattgtagtgaatttttagagaatcattttttgtagcctccatattttatagataaggcctaaaaagatagcttaaggtcatgaaactaattgcaaagttttctttgtatcatctaatatatatcattattctagcattagatagttgttttcataggctttacttctttgctcacttataactctaaattcacttttttttgtttagatttattctctcttcagttcacctagtcttgtatctttccacttgtctaccacctgttgaattgactatgctaaatgttcattatgagtttgcatacctgggtgtgcatttgtatccaagggggtatatatatcatgtctataagtgggtcggtatttggaaagcacatgtggttttgtggatggagttgcttgaaaggatatgtgtataaatatgtgtgtacaagaatacatagtaagtcttaaactgaagagcatttttttaacccaactactttaagctgaagtattagttcatagatattactatcctgtagtgaaatttgtagatgatttaatccacctactttgcagcaatcaacatattttaactataaaattaaaggaaa

SEQ ID NO: 181453 - DNA, 1539 bp, Homo Sapiens
  misc_feature (525)..(590): n is a, c, g, or t
  misc_feature (601)..(616): n is a, c, g, or t
ttggggatccgcgggccggcatctgaagcgagcgggacgcagcgcggccagggcctccgggcatacgcaggctggtccccaaggcccgcggccgccgccatgtcggtgctgggcgagtacgagcgacactgcgattccatcaactcggactttgggagcgagtccgggggttgcggggactcgagtccggggcctagcgccagtcaggggccgcgagccggcggcggcgcggcggagcaggaggaactgcactacatccccatccgcgtcctgggccgcggcgccttcggggaagccacgctgtaccgccgcaccgaggtagcggccctcggcgccggccgccctgtctggcgctgtcgggtcgccccgagtccctccttctcggccccgctttcccagcgtcgtgagcttagtgctttaggcgcccacggggtatatgtcttagggtcttcaccactcttcccactcaccggcactagaaattggctagatcattggtttgactagtcatttttgattgtcctnnnnnnnnnnnnnnnnnnnnnnnnnnnnnnnnnnnnnnnnnnnnnnnnnnnnnnnnnnnnnnnnnntgaaatcatcnnnnnnnnnnnnnnnnaagattatcttgagaatcaaacgaaggctctgttctgtaaattaaagtggtatacgaatgtgaggtattgccaaaacttccttcctctcatgctgtatatatagttctccaaggtcggggtgaggaggaggggcatagcttcaaaatccccacacccgtggcaactccgttatttttgtcattatctttaagttcagcagtgatcactcagttggaagcttttcttgaagctcattgggaagatctttgtgtgttggttctttatcagtgtttatcttgcagggtttatgcatgggaaatactttgttggtatattctaagccattagttcttaatttggggggcacaaggacccctttgataacctaagcaaagtaatcttgccccctccatcaacacatttgcacatatgcacatcctttggagagatccatggatcacggaatcccaagttaatatatactagtgtaaaaccctgcagtgattattctacttccaaaaactaacgatacactagatttgatcataaaatcttactttagggtaaacatttaatgagaacttgctggggttgctgaaggtgattcatccgtcggaaatccatctgcagttctggtgtgtgttccaagccagcatacttttaaggctgaaagatggagaaggagagaagtggttgcaagagaatatttttaagtgttcttttttatcctgatgccacgttaatgtatgatgttagagttagttattcttagtagtctgttttcttttttgcactcaaaatgacaaagaggagataaggattgttatttctatattttagttagagaaactaaaacagtatacttaagtgacttgctcacttaagttacaagtaaatcttggactagaactaaaagtctcacatcttgcccattgccttttta

SEQ ID NO: 181454 - DNA, 2064 bp, Homo Sapiens
  misc_feature (682)..(713): n is a, c, g, or t
ttgggtcaagattgtttaaaaatacatatttgtacacattttacagcaaaaaaacttttgtggctcagctgcataccctgaggacttctgctgagccccagtgcatagcagagcatagttggaaaatcacagctctagcctcatccacagatgtgaagagtgaaacagcacttggttggcaggaaatcctcaatgctgagtagtagtggctccctgaggtactgtagtctgcacttccaagagtggggatgcctctggtcagaagggaaggtagtgagtccaaaggaagctgagaattctccatgagcttgagttctgttcgcaactgctcccttccttcagcaaatccaagtttcccccagagaatcccattcccctagacagagcaggtggttctcccgcgaagagagtcagatacaggccactgagggggtcttcctggctagctgaagcagagcccgccaaaatagcttcttttccaatgaaacatttctgaatataacaccagaagcatctatacaattggaaaaaattgcgtgaattttaaggattgaacatgtattgttttaaacataggaatttataggtgccttaaaagcatacacatccacattacactgagtagatcgagtctttttctcctttgcctgccttcctcaccaacctcctgcctcttcacacnnnnnnnnnnnnnnnnnnnnnnnnnnnnnnnnggagtattggcttaatttgagtttttgtaaatagcatttgcttggagccaaatgcagaactaaataatagagtaaaatcctttgccttgttctaaatcctgagagttcacttgccttaccctaaggcccccgactctgtgcccacccacacccctactccccagtggcagcagtcaggccccagcccccatgctgtctcttttctgtgcctctgtcctggtgccagggctctgagctgctgagagcttcgctttgtgagatcacccccatggcttccttcagcttcaagggtgtgggtggcctctaaatcactctatagtgcgaggagcaataacccagaaagtccatatgaataatacttggtcctcttctctgagtctttaaccaaaaatgaagtccactgccctggccagaattcttccttggctgtttgacaaaacttaattccacaactgtttcctcccagaggatgactcttagtgtaagcacatccctctttgagaatctgactgtttctgggaatcaaaaatgtgggtttatatttccgatacttctggagtgccaggttgtttggttttgttttcaacaaaatgtttggccctagaaatgcagcaacttgctctgttgccaggagcttccctgccaagtgtcttgtgcacagccctctcctgggtgagctcctggacaaagcctcatgccctggtaaaccctgcagactgcagccactattctggcctaggtcatagtcttgagcaccagctctgctagggctactcaggcattgcacttgtctgcaggtgttaggaatttatgttactgaagagtgagcaatgtcattgtgagagcatgtgcaagagcaagctttcctgcaatacctaaagaaaagcaaggggaatagtaggacctgggacagcagtcctaggcccattaattccccttgcccctctgacagaatttcgaactcagtattcttcgaatactcagatgccagggttgccattgtaacagaataacagtggctgggggacacccattcagtggctcttcagaaagaacaaattcactgggtggatataacacttaaggaaaatgctcaataagccacccattgagtctcagagcaacctgaccaacaaggtgaaaaccatttaaaagacacattgtcttgctggagaaccttcctcccctgggtttcaccatggaacttcagcattacatgactaatgggcacgtaaattaaatgttactaagcaagagactattctcacttcttgccaccctgagcaggcagggaagccagccagcagtcacagtgatggggacagccttaaaggcccatagtcacttggaa

SEQ ID NO: 181455 - DNA, 712 bp, Homo Sapiens
ttggctaagacctttgtaaactgccattttgttaggtatggagtttggtatctagggagtaggccttatttagcaattcaaattttatggagatgaatgatcaaagtgaaacaatgtttggatgcaacgcagaataaaagaatataagaaatagctttttgttgcattaatgtatgatattttgaaggacagagcctttgctttttgtattctttaagaaaagcacaaccataaagtattttaaaaaaagaaacacttggagcaattgaaatatgttattctgactagatggactgtagaggttttgcatttctcagccctcctggggagattggcctagatagcattctttaacacttcctctgcttttgcctcagtagcaaggctttcctaagctcctgggcaatggaacatttattagtatttattgacaaaaatttagttctctgaaattttaactcatatatatgaaaaactttgtattccatctcttctttttcatttacttgtagagccaaggaaatggaattgaaagatgattgcataagtaatgatgccatccttctctctggctgtagactgaggcttttctcttgcttcaagtcagagcagtatttgttgataacctctcaataatgtttggtttacatgccagtaattaaattaattcaacatgaagttgaatttgatgaagtggtcatctatccaagta

SEQ ID NO: 181456 - DNA, 650 bp, Homo Sapiens
ttggcacttttgtcccctctacccagcagccagagtgagcatataaaatgcagttctgatcctgtcacctctctgcttaaaactcttcagaggttcaccatcgcttccagaaaaagatcaatactcctgacgtggcaacctgtcgagactcaggaccgctaggaaatcagctcttgtttacccctctatccattacactacgatccagctgggtttaggcatcacttcctctgagcaatcctccctgatgtcatgaggcagtgctgagtgccttctctggaccctctgtttacttgcctgttaaatcctgaacatctggaagggagtcgtgttcagcaacatatctacgccttgcagcacggtgcctggcctgcagctggtgttccgtaaacagctgctgactgacgggatgcatcgatgtgtttcccaagacatccaggagaggatattggcgcaaacagtgagtcatcactctccacccaccttccagactccctcctccatgcatatccagctcttctcaacctggggctcccttagaaaatccagacaaaacaattgccacagagccaacatcttccttttccctttgtcttatggtaaaaacatatttgtagaagcaaatccaataataaaagattagcacataa

SEQ ID NO: 181457 - DNA, 1063 bp, Homo Sapiens
ttggggcatggttacactcttgttcctgttttctgtaatagataatgagctaacagggagaggaaggaaagacaattgttctccttggatactccctctggtctctatgtagacagagaacgttctcctccagcctctgttgatctctgaaggtctttaattcaaaatgcacgttacatcagggaccactattttggggtaaagttctctgcactccttcagtttcacatcttctgccggttaagccaccctctgtctctctcctatagtagcacttgtgattccatttaaggtacacctggaaaatcagagctattgctccaccacagaatccttaaacacattcccaaagaccctttttctacatcgaggaacaactacacattccagagattaggaccagatacctgtgtaagctattatttagctcaccactacatttgatatatacttgtccctggcccccaatcattagattataaagaagggctgtccaattgtcatctgtcttcactgtggttccaaccccagagctccattgttattaacacctgtataatcctgagccccaacatggtttcatccacccacagcagggcagacctcatcacatgggccatggggcattgacctactgtgtttatcggtgatcagttctcttcccatgatctggcctaaagtttctggaaaacagtttctatgcataattatcccagctggatattacagagctataaaaggcagaggtcctgtcctggccgtgtgtctaagctagagaaacatttatttcaggttattctgaggcttgatgggaatgagcctggctcctggtctaacctaatagtaaacatgttcccacagccaggctctgagtactccttggggcctgagctaacctcagttttgggggactgttctattttgtgagtcactttaccaggcacacaggatctgaacttcttttctcctctcttcgttccctctcttcctcattctccctctcctctctcactccattgatctttttctatttcctcaatccccatttgctgtcctctacttt

SEQ ID NO: 181458 - DNA, 1121 bp, Homo Sapiens
ttggtgatttttaataaaaattactttactttttcctatgaatttaaaacatttgatgttggcattttatacaggcaggttgccaaatttaattatgttacactaagttaaacacagcacttaattacctcaaatccagatttctcttaatctgtgtgtacataaaaggaataagtccaaattaatttatagtttagtgttgcactataggtaatattcttttgttatttctagtttttatggaatccttttctttcaagattctaaataataaatcgttacctctcaatagtggtaatagtggtaatggtttattattagctatttcaccaattgaactacattcttttggagacattcctttcttttttgatgttgatttgcaaaggagaaatgcttgttaatatacaaactctagtcagttacctgtgaggatgagatgtgtcagaggactcagactttggtatagttagaaaaataatatttttctcacttgattctgtgtgaatgtctcttctgatactgttttttaatcagaaagttacagagcaactttcccacaaacaaaccaataaaacaaaaccccacaaaaaccaagagcatgaagaaaagtttaaatccctaattatatactcttttggtttttaggtagaaactggagctatcaatattttcatgtaagtatttcaaggagtagctctttaaaaatggtttctaaattagattttaaaaattcattgtcatctaaatgcatgtttagtcacaatgtatcagtattgtgtttaaaggtgctcagcatcactttttgaaaactatgtttacatatttaaaatgtttaattattttgaaatgtatagggtattaaatacaagcttctaaaattttcagtatctatattggctttctctaacagctctacagcaaagtttgacatgttttttgtgtgtgtcatgtattgtaagttgtaatatctgtagagtgagttggacattctaaattagcagtaaaaaattcacaattacagctcagcttgtttattcattatagtttccacatttccaacttccaagtgaactttatatatactacagtgaattatagataaatacagccatggtgga

SEQ ID NO: 181459 - DNA, 1120 bp, Homo Sapiens
ttggctcggatgccctcatagggagccagtgaagccccaagtgccctgcctgcctgggggctgatgggttcccggcggggtcgagaggcaagctctgtgccctgcgtgttgaggcccccttgctggacacggctgatggccacactgccctgtggtcatggcccacagccgaggggctttcagctgctcagatgtcagcaccaagctgggcaggttagtgtagacggtgcccacctttgagaccagaaggaagttggaagcaggagtgattgtgatgatgtgaggccttcagggaatgtcctgttcactcctcccccaagaggctgtggagactgtggccgctgacccctgagggcagttggccacccgtgccctccagggacatggcgtgcctggcggcgtagtgcaaaggtgccctctgcttgcccctggccttctgcctcaggggcccctgggacacaggccttcctgggcgagtccaaagcccaccgggcaaggagaggaggactgggagccaggagccaaggcggaggctgtggccagggctggtcagcctggcgggtcaatgcgggcacctgcgggctggacaagctatgctgggtctcttaggagatgagctgcaggtagggtggctttagctggactcggctgtgtgtctcctttggaggaaggctggagcttggccggcgtgtccaggtgtcaggctccctggtctgtcacggggcacgcccgtcgtctgttgtggttagaggagctggcactatgcctgtcatggtgctggccccaggtggcgtgtgtgctcgtgggaggcctcggtccccagcctgggtgagtgttgggctcccccaggcgcgatggtaacctcaggccgctcttcccgctgtgcccttctgcaggtaactaggatttctacctcaaccgcgagacctatgcaaggacggtgtggaccaactcgcgcccgcggcatggtgcccgccggcctgccgggctcccacccctggatgcagaagcaagacggacgggagctccactgtgaatcggcgcacgcgccgcagagctgggactggtccagtttgtactgtcgatagttttaataaagtatttatattttttaaaagta

SEQ ID NO: 181460 - DNA, 2049 bp, Homo Sapiens
  misc_feature (491)..(508): n is a, c, g, or t
  misc_feature (580)..(712): n is a, c, g, or t
  misc_feature (1095)..(1104): n is a, c, g, or t
  misc_feature (1722)..(1780): n is a, c, g, or t
tttgtacaaaaaagttgggtccttggaacagccctatatactcaagttcaaaggccaaaacctgagaagcggtgggctaagataggtcctactgcaaaccacccctccatatttccgtaccatttacaattcagtttctgtgacatctttttaaaccactggaggaaaaatgagatattctctgagatattatttattcttctataacactctatatagagctatgtgagtactaatcacattgaataatagttataaaattattgtatagacatctgcttcttaaacagattgtgagttctttgagaaacagcgtggattttacttatctgtgtattcacagagcttagcacagtgcctggtaatgagcaagcatacttgccattacttttccttcccactctctccaacatcacattcactttaaatttttctgtatatagaaaggaaaactagcctgggcaacatgatgaaaccccatctccactgcnnnnnnnnnnnnnnnnnntaagaaagaacaaaacaaaccccacaaaaattagctgggtatgatggcacgtgcctgtagtcccagttactnnnnnnnnnnnnnnnnnnnnnnnnnnnnnnnnnnnnnnnnnnnnnnnnnnnnnnnnnnnnnnnnnnnnnnnnnnnnnnnnnnnnnnnnnnnnnnnnnnnnnnnnnnnnnnnnnnnnnnnnnnnnnnnnnnnnnagaaaggaagactgaaagagaatgaaaagctggggagaggaaataaaaataaagaaggaagagtgtttcatttatatctgaatgaaaatatgaatgactctaagtaattgaattaattaaaatgagccaacttttttttaacaatttacattttatttctatgggaaaaaataaatattcctcttctaacaaacccatgcttgattttcattaattgaattccaaatcatcctagccatgtgtccttccatttaggttactggggcaaatcagtaagaaagttcttatatttatgctccaaataattctgaagtcctcttactagctgtgaaagctagtactattaagaaagaaaacaaaattcccaaaagatagctttcacnnnnnnnnnnccttaaagacttcctaattctcttctccaaattcttagtcttcttcaaaataatatgctttggttcaatagttatccacattctgacagtctaatttagttttaatcagaattatactcatcttttgggtagtcatagatattaagaaagcaagagtttcttatgtccagttatggaatatttcctaaagcaaggctgcaagtgaagttgtgctcaagtgaatgttcaggagacacaattcagtggaagaaattaagtctttaaaaaagacctaggaataggagaaccatggaaattgaggaggtaggcctacaagtagatattgggaacaaaattagagaggcaaccagaaaaagttattttaggctcaccagagttgttcttattgcacagtaacacaccaatataccaaaacagcaggtattgcagtagagaaagagtttaataattgaatggcagaaaaatgaggaaggttgaggaaacctcaaatctacctccctgctgagtctaagtttaggatttttaagagaaaggcaggtaaggtgctgaaggtctggagctgctgatttgttggggtatagggaatgaaatgaaacatacagagatgaaaactggaannnnnnnnnnnnnnnnnnnnnnnnnnnnnnnnnnnnnnnnnnnnnnnnnnnnnnnnnnngctgagtcaattccttggagggggtcttcagactgactggtgtcagcagacccatgggattccaagatctggaaaactttttagatagaaacttgatgtttcttaacgttacatatattatcttatagaaataactaagggaagttagtgccttgtgaccacatctatgtgacttttaggcagtaagaaactataagggaaagagctaacagtcatgctgtaagtagctacagggaattgggcttaaaaggcaagctggttagtactta

SEQ ID NO: 181461 - DNA, 1243 bp, Homo Sapiens
caaataatccttctgggattataggcgagagtcactgcacctggcctagcggatttctgaagcattaatctgttctgttactttccagctaaaaaccaacaagtgtctgaggacacagtttaaactccaagatgatagggtcctccctcacctggactcccacctaccctcatgacctccttttgtgaaatgctgaagggctctgcagctggttgtctggtactgctggcctttgctttctatttagcatgttccttctcccacaaaacaaaatcacattctcactatgccctgttcattcttcaggactatcttctgggaaacttttactacatacccctctccccctaatctgagtgtctgctttgctcaggtaacatgtgttcactggataaatccttgattcctggcactgaggcagggtttctgttcccaggaagcagaggcatactattctgtgaaggattgactgagtttctcctaataccaagcagtatctgagggaacagatgtctagcttaaaatcctccctagcacttgtcatagcagtgctacgtattgcctgtgaaggaagtttaataactgctgaaaggttcgattagctttatttcatcaggatttgtttgactttacaaattgatttgggttatttcaacttttaggtctagtcttaagtataactggtacatattccttcaagcagccattacacctctcataaatttattatacacctgcatttttataactattatgctttttaattgttggccaccatttttagtgcttctgaattgttatggttctcaagcagcagttgtcaccttggttttgaattaatgctgtgacgcttgcttccaggacccctatggtgtagccgtgggtggaactgtggggcactgcctgtgcacgggattggcagtaattggaggaagaatgatagcacagaaaatctctgtcagaactggtaagtcttgaaaattacaaatcagataacattttagaatcactgagagattaaagggtgttagctttgattatttaaatttctgctgctgaagtatacttggtttttctaattacctaccatctcttatagaggtattaatcctgggtattgcaaatacggacttttttcacctgtgtagaagttagcaaaatacaaagtcatttttatcgaattcatagtagcttctgttaacatattatcttagtaaacaattgtcatttggaagtatgagaa

SEQ ID NO: 181462 - DNA, 2030 bp, Homo Sapiens
  misc_feature (73)..(91): n is a, c, g, or t
  misc_feature (1184)..(1193): n is a, c, g, or t
ttggaaacacatcttgaaagatgtagaagtccctctatagtctagtatagtttacaatagagttgtaagaccnnnnnnnnnnnnnnnnnnnttcaaactcgttattcaggaacctgcttataaaatgtcagctgggattctttgcatgccaatctgatgcgttggaatggtccatgaattaaggctttcttgagcagttcttggcccagaactctggcattggttctagtttgatgaagggcatgacctctataaatggtttcaattgctaaaatatttacctgggatactgggtcagccattttgactgagcagactagtggatttagacattgtttttagttattttgtttttaaccaaatcaaccaactgcctccctgaaataagtcaatgaactcattgtttcagcatcacgtggccaaaggtcatgtgattgcaaatctggatttcaagggaggccaagccagcttcctgggtccttccatcctcttccctagcagacactctcctttttcttaacagatagattctatatatttactatattatttatacccagatgaatattttgatagatacctaagacaatttcacatctaaaagatggacgcctcaatggaaaaaaaacaatctttctctggaaaccttataggtttttctttttattacaatataaaagcaatgtgtgtttgccttctctgagtaaactgaaagggttgtctcagtaatttttacatacattttgggtaactggataatggatatgttaatgcactttgtacactaacaggttctaaataaaagggtctaaaactcagcttctgagtttttaaaatcacggtctccaggtaccaataaatgctacagtttgccttatgatgttaacataaaacacttagtagaaggacaatatttccatgaaaataatgtttttcaatattaagaagttactactcaaattttcacagtaagccatttagggtatgtttggctatttttataaggacatgagagattatgtcataattttgttgtggaagtctcactcttggctaacttaaaagcattgtggatagtagcagttactagttccaggttgtcatatttacaggaaaatatgtatatggtgaaaggccaccgtgtttaattactataatgatgtagaaaagattcccgtgtgaannnnnnnnnngaaagtctaaaaaatgtatgctgtaaaaatttgctgcagtgtaattttgcattctctttaaactgattgaggtcacagtattttattatttggggtcctcaccacaggaaacactgcgatacaggggcaaaagagatggcagtgccaattaaattaatacaacaaaatcaatgcagcaccaaccaagactgccaggtctggtgtcatgggtatgcccagagcccaggagttcagaagggccctaagcctgatttaatgctctgctgttgatgtcttgaaattcttaacaatttttgaacaaggggcctgcgttttcacttcgcactgggccttgcaaattacatagcgagtgctcataaaagaactcagaaacgtggtacctctcttcctggtggatacaaataaagaaatctggatccaaagttgaaagttgctggcgatatcattcaagtaggactctaaatagtggattaagatgagggtgggcctgggtgaagattctttccagctttaaaagaaagtgacttcaaaaactgactgcaaatattgacgatggtttctgctggaggaaaagaaacagcttgaatacagacaggcttttttattacggtactgatatattgaccttaaacttgctgaggaactgaactaacgtcctccagtgaccgtggaattccatctcagctccaggaacatgcagatacctgcaaagagacacgcatatatgctggcatacatgtgcatttggtgttgggaagttgaccatctggtctatcttaataaaatggtaaaaagcacaccaagacaatgatgggggcaggaggatgtttttgaaaa

SEQ ID NO: 181463 - DNA, 228 bp, Homo Sapiens
tacaaaaaatttatagccagtcacaagaaatggcaggaagatggaccctcctgaaaaagaagtttatctttctcaattatcttaagaaatgtcacatacctttttaaattttactagcaaattctaatagactttacacaagaaagggggaaagaaaagctcatgtcagcaattttaatacgtattgagttatttatctttgtttgagacagtctcactctgtcccaa

SEQ ID NO: 181464 - DNA, 1610 bp, Homo Sapiens
  misc_feature (266)..(303): n is a, c, g, or t
  misc_feature (1162)..(1217): n is a, c, g, or t
  misc_feature (1300)..(1343): n is a, c, g, or t
ttggctcacatcccatcaaccatacctagctatcaggagggcctgaaaaaatagtttttgtggccattcatctctttaaattcaaggattctatcaataaaaagatgtggacagtgggtattaggggcagtgtcattctgagttacatgctaacaaaaacattgtttcaaagtggagttttcaccacagacttgtccaagtgatgaaagatcataggactttggggtatgcctaaatccattatccaattcttttcaagtaaggtnnnnnnnnnnnnnnnnnnnnnnnnnnnnnnnnnnnnnnaatattcaaaatatgtgaagtatcatgaatattaaatgattctacagtggactgtggtcatctgcaagagccagtgaaacattttatagtagaagtccctggctttaatctggcaggaaggcttacaaaccccccaggatttgtcttgcttgcatcctaactcaaaaagatctcagactcagagatctatgatgtaagaagtgtgttcttagagaaatgcctttataaaaataaaattaaggttttgaatgagggatgtactcaatacatgaatcataaataacactgacccagaacttcaaaatttctcagaattcttggtctattctgatgtagtttagacatttactgtagaaaaatcagtaagttttttttaagaagacacttagattctaattgcattcagatccttgcccacgtgtttcttgtggccacaggtacttggaggagatgagcacaggctacacctcagatatttaatacatgcacatacgttcttagcctacctgggccctggccctcctaccccaaacctaatgcagtctctgatgagctcagctcagagaagtttcagtccagttttatcacaccggccatgtggaagtagaaagaagcaatccaaagagagtgagaaccttaaagagatgaaccctgaagagatgagagagcccacagaagttaaagctttaactttttctcccagtacactaaaagcttctcccacttacaaaaagtttaactgagttgggtaacttgattcagtcactttgtgtcttttcctccttgaggatgggcttgggtaggggtaaggagaagatgggatggaactttcctctccttttctttctagagatcagcnnnnnnnnnnnnnnnnnnnnnnnnnnnnnnnnnnnnnnnnnnnnnnnnnnnnnnnngtctattctgatgtagtttagacatttactgtagaaaaatcagtaagtttttattaagaagacacttagattctaattgcatnnnnnnnnnnnnnnnnnnnnnnnnnnnnnnnnnnnnnnnnnnnncatagtgctataatttgtctaggctgggtgaggaagttcctatgaagggtctcagcagcataggtttccagggaacaggaggaagccaagattatgtgtattatggactgggaacttggtttcactagcataagccagcagtccagtccttagtgaccaagtggatgtggttgggattggttcacgaaagtgttggtacctgaagagatttaatttagcacgaggtttgggccactagaattgtagataacagtgagatttagagtc

SEQ ID NO: 181465 - DNA, 940 bp, Homo Sapiens
ttgggttgttaaatagtagtaaactttgacctcgagaaaggtaatttaattgctctgaactttatctcctgttcttctaaaatggggataataagttttgcatctgaacttaataaactgtctaacaaaagtctgagtagtgaacattagatatacacaatgtaaatatataagcttatataagtacttaacagctctaaaattatggagggtttggggtaagacagaaatgctaagttttaaaatgacttttcaaggatgtatggcaacacattgtccttggcgtgctggatggcaatgcttaatgcaacttagtgtgctgacttaggacctctaaaaggacattgtattaattttgaaacagaagaattacattgcaacagaggttgaaaaaaattataggtgtcaactgagaactgctctctaccagaacctaggtattaattggccaactttgctagttattcctctgaaacctgaatgaagagaaggtagtaaaggaaatcatttagtaatggaaaaaataaacacaagattttagtaggaagaaggtactaaaagccctgttaaaagagtcctgggagcttccttgactggcatttgaaattaatcttatattttcctcataagcagttgttagcatagcagaattttgatttgtttagaagtcaaatgtgatttactaattcaatccctgtggtttgagggagaaaggagtaggtccctattagaactgtgaaatcagtacagtttgctctcataaatgctcatacacaaccctcctcacttcctctttttcttgtggttctttttagtccccaaagtccagcaaccccttttttccccttgaccaatttaaaacaaaccatttgaatggaatcgtagatgattgcaatttagtgtggatttagttgcattgaaaaatgctgtcacatgttgg

SEQ ID NO: 181466 - DNA, 1100 bp, Homo Sapiens
ttggccactttgtacacattaacactacaggacataaaatgcagaggccctgaaattgctgccctcccatattggaaggagggtctgcgatggcaagggtcttctatatcaccagaaaaagtcgcgcaatgagtcactgccgttgccatctggctgtaattttctatgttatcaaggtaggagggagtgtttctcttctagctgttagataaaactgataaaagcaagtgtcctacagcatttcccaaatgaaggcattaggaaatagaaaagcacggtctttttggctccctggtctagtcacattggtactagggtgacctttcacccaagggacagctgctaaagggagtaattcagagacatggagcttctggttatgggtttgttttgggtttgtttttaactcctgcctccacacatgttcttgactgataactgactcatgtccctgaattaaaatgactgacctatgacagcatcaagcattctttgtaagcagagtgatatatctgagagggcgttgacctgttgtgtagaatacatatcctttcccccttcagaatcctgtctcgcctcgtaactgggagagaggctgtgcctgaaactaggggcgatgtcaaggaagctagaggcctcgatgcaattattactgactctggggaggaagacagagaataaggggacaccaactgcccagtccactggccatttttaagggtccccccaccccaagccaaagtttggtttgttgctgttaagacaatttttgttgtatgtatataaatattttagttagaggagcggggaatgggatgcgggctttcacagttctagggaatgggggcagggaggattttgcttttgcttttgctttgagggagaactttagctgactaaaaaaacagaagtttggggtcatgatcacaaaggggccattctcaaaagatggcaagccacgtattcagtggagactaggccaaattctaaatggttttatccatagcacgggagaataggagaatgagtttaagagtttttctcttcttttttcctagaaagaggtaaacgataatgggaaaggtagagaagcggctctc

SEQ ID NO: 181467 - DNA, 1336 bp, Homo Sapiens
  misc_feature (1081)..(1120): n is a, c, g, or t
ctaaaattacagaggtttcaatccttacagatcaacacattgttaagttgatcaactcattctagtggttttcagtagcaatcccatttggttaaaggagattgaatccttaaagccaaaaatgactgagctagagaatgttaatggaatcaatattgaagaaatgcaagcattaagagataatgttcataatgttaacaacattgaaaccaagaaaggcaaagcatgacatttattactcagaaacataaccactgatatttataaccaaaaaggatttaggtccattcataagcagaaaaggaataatgtaggactcctttgaaaatagcaatcaaataaaatgtagccattctaaggaataaatgagaaagtagctgattatttcacctgacttcaagaaacatccgaatggatttatttattttcctagactttattcaaattctacataaaagataattacccattatgactttaaaattaatctgttccccaaaaagatccttcacgttgctgataatggcctttctcaaatacaacatcgaccttccatgtcaaaaatcttctgcattcagaataaaattgtaatttcttcaggttatacaagacttcccacatgctatggctccaacaaaccctttcgattttatcctcctctagtacccaaccccacattccaaagtacatctaaatataccagctgttgcacttgttcttttacagttcctcttcctatacatcacgttgcttctatccaaatcattcttccttccgacaaaatctcgattattctttaatagcagactaatatgttcctcatctgtgaagcttttctggacttcaacttagcttggtttctcttttcaattgtgtccccatagttttgagtacctaaatctacagtatcagttataaaacaagctgtatttgcatgtctagccatcagagttcttcaagaataaggaatgtaatctactccaaacataatggctgaagatatagaaaatactctgtaggtggccaataaataatttcaaagtagtcaaagaattctaagtgcttgccatgaaaaaaagtnnnnnnnnnnnnnnnnnnnnnnnnnnnnnnnnnnnnnnnntatttcaaatgagttaaaccctatactaacctttcagattttagtgtgtaagcaactatttcaggcagttttattatcatacaatataactagcattttattatcaaacaagatagcttttcttatcaatttgctataaatgtttaatttagccaccttctagtgacacttttactacattattaaacaaaaagtaccccattgaacttaacccaa

SEQ ID NO: 181468 - DNA, 954 bp, Homo Sapiens
  misc_feature (78)..(88): n is a, c, g, or t
  misc_feature (122)..(132): n is a, c, g, or t
  misc_feature (224)..(233): n is a, c, g, or t
ttgggaccaggtgaagatccttaaaggccaaacctaggagttgctgttttattgtattagcattagggaagttcgacnnnnnnnnnnnaatggggagtaacacaaccaggtttttttctttnnnnnnnnnnnttctaacaggttaggttaggatggtgatttatggttgcatgatacgtagttgtgttaagtggaaggatttgattatggttccaaaagaaaannnnnnnnnnaagtggcaaagagcaatgacaatgcgaaaagtcttacaagaaatcctggagaagaatccgagatttcaccacctgactcccctcaaaaccaagcacatcgctcactggtgccgctgtcatggctacaccccaccggaccctgagagcctgaggaatgacggggactccatcgaggacgtgctgacccagatcgacagcgagcccggtaagccttcagtggcactgtccagagcgcctggcagcctggaggcatttgctgaggtagagagagatgaggacttggaagagttgctgtagagaacgagagcctttcctacctcctgccgtgtccttcgtgggaccgtgcagtccccatgttgctgtttgtagccaggtatctcaagtgttgtgccccagccacacatgttccggcctgtgccatgcagcaggcacacactgtccactcaggagtccctgctcggcatcatttcttctttgaagactcctaatccatctcctttcctgcagattgaagcggctttcacatcttttgtgaccttagggacaccccccatgccccagacaagtttgtgctacttctgtgaagatgaggcctgtgtctcatctgttactttatctccaaacccagctcggaggacgccacccagtgcgggaggcacttgtgaaaactagtaatgttgcaggtgaaatgaattgtttcacgagaaaaaaacagacccaa

SEQ ID NO: 181469 - DNA, 889 bp, Homo Sapiens
  misc_feature (379)..(427): n is a, c, g, or t
  misc_feature (547)..(631): n is a, c, g, or t
ttggagcaaatctcgggatttcgaaagcctggctttgttttctctgtgtgaaaaaatattccagattgtaacatgcggtcgcttcaaggagtttttagcagcttccttgatacatgaaaatcttgttctctgaaagcttcaggtgttgtcttcccagaattggtttcactatgtgtgatgccctcgctttcttcctttgggcttgttagttccttcatcattaggtgtgagacgtgttatttatagatgcttcgactcctgggatggctctttgaacacagccctgccatgtcaatgcacagaaagcacccgatttgtttctgagccgtcttgataatctctaccgtgcacagctatcctatggcttatttgtcaattnnnnnnnnnnnnnnnnnnnnnnnnnnnnnnnnnnnnnnnnnnnnnnnnnttggcgcgatcagagctcacttgtaacctcgaattcctgggctcaagcgatcctcctgtcttggcctcctgagtagctgggacgacaggcgtgcaacaccacgcaaggctaatgtttaannnnnnnnnnnnnnnnnnnnnnnnnnnnnnnnnnnnnnnnnnnnnnnnnnnnnnnnnnnnnnnnnnnnnnnnnnnnnnnnnnnnnaagtactggggttacacgtgactggcccatgtggcttatttaaatcgcccaagaccctgacctgtttctggctcttggtgacctataaatattttacaacggcagtgagtttgattttgttgaccctagatgcgcactgggggtctatacaaaatggtgacattgttaataaaagccagaaacaaaacctgctttatctagagtttcttgaatagcccttcatttattttctggtggaaaaatattaaaccctgattt

SEQ ID NO: 181470 - DNA, 1309 bp, Homo Sapiens
  misc_feature (98)..(142): n is a, c, g, or t
  misc_feature (982)..(992): n is a, c, g, or t
ttggggaagagaagagaattcacagagtgaaaagaggagaaagagtgctctaaaatatcaccaatggactgcaacatgtatgtatgtacacataagtnnnnnnnnnnnnnnnnnnnnnnnnnnnnnnnnnnnnnnnnnnnnnacatacaatgagaagaatgagtgaatttggagagaaatagccttcgttaaagtacaataggaataggcattcacatttcagtccagagttttgcgttaaaaataggcttactagtttagtgttaagtcctatgataccaataaaccaaaatatatcatggtacaacagaaagtttgatcaatttggagtcccacattctaaaacctggcttgccctgaagtgtattttgagataacctcatcaatcaatagaattataataaaagaaatgacttgtacattgtcattataaaaaattattgtataggcctaaaaaagaagttaattttatcataaataaaagaagctacttaagagctcattttaaagattctaattgctattggaaatgaaatagaaattaccagtaacagccaaaacttgtgtacttcattaacctacactattctgtgtgcttaattttattaatctataaaagataatatactgtctattcacatcaaataattaaatgtattttgttagtgaggtataaaagagaaactggtgataatttccagctttgccaaacagaattcatcctggctgttttgcacagaaggtatgtgtatatgttggccatagaagatactgtcattgacattctcacaggggatatctggtatcaactttaaaatatttgtttaggagaactaatttttaaacatcaatttttgcctcctattcgtaggctaagtttaatttctaatgaaaatcaaaacagactctttaatctttttaaatagcagattttctctttcctgaagtgcctcagattaatttcttaatttttgtgttcagnnnnnnnnnnnctagcatagctctattcaaactttatgcttctgttacaaaattgttcattattaagatcaccttgaagcaaagatatcttctcatgtcgtcttttaattacttgctactttgcctatctggttgtaatttatcttcaaaccataccccgattgctctgtagtaaattttggatttcttctcacatacagtcttttttttcttggtaaaattatcccattggccttcttaaacatagtaagcactttcaacctgttactatttacattggtttgatatctttcacttattttcttgctgtattgtaattaatgtcttc

SEQ ID NO: 181471 - DNA, 1749 bp, Homo Sapiens
  misc_feature (1394)..(1423): n is a, c, g, or t
ttggggaagagattatcattttgtgacttcaagagagcagatggaaaaagatatccaggaacataaattcattgaagctggccagtataacaatcatctatatggaacaagtgttcagtctgtacgagaagtagcagaaaagggcaaacactgtatccttgatgtgtctggaaatgccataaagagattacagattgcacagctttaccctatctccatttttattaaacccaaatccatggaaaatatcatggaaatgaataagcgtctaacagaagaacaagccagaaaaacatttgagagagccatgaaactggaacaggagtttactgaacatttcacagctattgtacagggggatacgctggaagacatttacaaccaagtgaaacagatcatagaagaacaatctggttcttacatctgggttccggcaaaagaaaagctatgaaaactcatgtttctctgtttctcttttccacaattccattttctttggcatctctttgccctttcctctggagtctttcttgagtactgatttcatgttgaattgtatcccacacatcatggtctgcagcttctttttcacatgtagtgtctccttcaagttacatcgtgtgtattatttaatgtcactattggttagtggccatttttcagaactgaagatggaatggcctgaccagctattaagaatgtggggagacgcagaaattgtggtaaaattccttaatgtttaagggaaagtaactttaagagatttttggaaaagctttatatacattcttttcaaatttcagtacaaatgaaaaagtggttttaatcagtgatttagtagactttgagcaactgtgcacgcttcagtttaatagcatggtttggccagtgtattactctcaagtccttttctcaatcaacttctatcatcaaagcaattgtttcattatagataaataaggacattttttaatttaaaaattcatgtctgagttgactttcataagggatttcattttttcctcaacattcttaaagccttttagtatttgacggttcttttttcccaggacatttgctaggaataacaacgtttcaatgtttttaatctacttgagcaacactatcgtgtcttacaaaagttgttcatatgtaaatgatcatcacatttcgtgaattgaggccatgttcaggtgctaaggaagttcgccttttacacagaagattgagaaaatttcctagatataaatacagataaatcagacgttacagtggtgacgtagtaaccatcatggcaatggaaaggagtccaattcatagcctaaaacttcaaatgtattcttaggagtcagattttactgaatattttacccacaatagctgcctattttgtnnnnnnnnnnnnnnnnnnnnnnnnnnnnnnaaactttctttaaactgtaactatgggaattattttctttacatagttgcgcacacacacaaacatatatatatatttaaaatatattttgtttcttttgccacctactcctaactttttgtttggtttttaaattaaatattaattgaatagacttatcttaatcatgtgaactgaaaatgggggcatggtggtcatgaggaggaaacatttagggaaattagattataagtaaaagtgtgggcatattctcctcttttctacaaaggttttcaaatggttcctgaggttttttgttgttgtccgtgttgttactgttgttcttg

SEQ ID NO: 181472 - DNA, 1536 bp, Homo Sapiens
  misc_feature (870)..(887): n is a, c, g, or t
ctttgtacaaaaaagttggataggtatttatttctagggtttcaagacgttaaatgccatcagaattgagtaatgcaaaggctgctgtcatggatagtaaagctttttagtcaagtgctgatagacaattccccattgttatcgttgggtattttacaattttctgggcaagaaatgtaatgaaaaattaagtaagttttaaaggccttcgtctttgagactggatacctaaaacaatagtgtttcctaaacagttaaaacttatttaaccctgaagctttcgagacacacaaatatatacaaatatatattgtatatttcttaaaccccacatagttccactgatctaaatcactgggggcgagaggcaaggatagacaatctatgacacaacaccaggtgattcataagtttggtaaccactgacatttgattatgcagttgccatattccttagtaagaacctggtcacaattttcactcactaccccaggcaattccccctccccacacccccctttttttctgagaattgcagtgagatatacaaaagtttcatttaatcctttattaattccagactttatatatttttattaggatttaaaatacatttcaaaaagatcaagtgagaacagaaagataaaagtaccaagataaaggcataatacaaacttagaaaaatacatgttaagcatactgcggcgtcctggtagccccttgcttttgttcacttttttctcttatgtacctacataaaatcccaaatagtatcttccaggatgacacacttgctgtctgccccacccaattaaaaacagattttttagttattaggtattgtgctgaatctaccttattttattgccnnnnnnnnnnnnnnnnnngcttttcaaagcttcatccccaggaaacattttcctgcttttacacataccttatatggctctactgagagataaggcctaagcctgaaaagttaatttaaagcatggaggtaggggtgagacagaaagacaacagggaaaagttgagtttataaggtaagtatatatcttccttttaacagccacctgcatggcgttcggtaaataacctaattatatgtgggggaaggtagtggtcaacatttggtcctggggactgagaataagagcaggaaagcaataaacagctaactatgagagtgacttaatgtaattatattacctgtcaatcgctacttttcctttcttaccaaaattcacacaggtatgaaagcaatatgacattcaggctccattatgtgtatttgtgcacatcacttcccacgataagggagaagaaaagaaaccactgcacattcggataaaacatgctgggaatacagcagtaaacagaatagaaaaagtctacattttaattagcagataagtaaaaataagtgactaaatgtatattattcaggggccatatgtgcaattgctgttaagtaaagcagaacatggagtggagtagggatgacagtttcatcagttaatacttgagcagagagct

SEQ ID NO: 181473 - DNA, 945 bp, Homo Sapiens
ctttgtacaaaaaagttggcctttcacgcacctatcatagaatttagcaagtacttcatattggctccaccattaacatggtcaatggcttctggatactcacagttcaggcacagtttctcctgaagattttttacctctcccatctttaagaaattgtctggatgtccatgaaagatgctgacacttgtattaattcattaaaaaacaccaccccctccctgaaataaactaaaaagtaatgaattcatagaaaaaaatttcaccaagattgaaactagagaatatacctagacttgcactttgagctttgagaaatgtgtacctattcaccattccaacgtgaagaagctctgcagtaggaaaaataattaacacacttatagtctactgcccatgtaaggatcagctccggctaagaggccaaagatgggtgacatcgttatgctctgcctttattttttctttcttacccacttagcttcctaattggaggaaggaggcgtggtaaaggtatatgaagactatggtttaattagaccagaaaacactgtcataatctctggggtcatcagaatgtccagttttgtctttgggccaagataagggcagtgggatttatgatgtgttgtttatagtctgaaactactctggtgatcaccaaggtcagtttctttaatgatggtttccaactggcctaatacattaagtaagactggctgataacatgaccagacagacataaagaccctgttgggaatgacattgaactctcaaagtcaagatttcttacacaaatctatcagctggagaaaatgaaggcagtgtggtatatgtgtgcaaataatgacattatgaagcttaaatatggaatgtctcttggacccccgatgtcatctgtattctctttatcttcttgtactatatccatttgcctgtaaataa

SEQ ID NO: 181474 - DNA, 1470 bp, Homo Sapiens
  misc_feature (416)..(430): n is a, c, g, or t
ttggatgtttaccttcaatatcattgtaatggttaaacatatcctgttataggaagaaatgatgtataattttaaaatttcttagtgttggacactgaggctgttggcattttttcatttcagtgaacaatttacaatgaaaactttgctcctgtgcttaattatttttttactgggttaaaggtaatggacattttgagggtttggccttaaatgttcaagttggccattagaaatattgcagtatttttccacagtagtaggatacaagtgtacccctctccctacgccttcactgaggggatttttttcttacatttttcccagttccacaatggcaaatggtacctcatttcagtgtccctatctttgacactagtgatgtcagatatctttttcatatgtttaattgatcnnnnnnnnnnnnnnngtgaagtatctgtatattttcttggctgggaagttccttttaaacacgtacattttaagcagaattgattaactattggttagcagaaggcttgaacagacctctctaatagcaataactgataatgcctatttaccaagggttttattgtattttaagaactttctcatacatgatcacattttattatgtttgttgtagcattagtcaggtctgtttggatgtgtttttgcagaagatgcaatatttgtgtatgcagtaggtgctcaataaagagaagataagttgacctttttttctgttttgtctttgaacaaaagcacaaaagaacaatagcacaataagattacaatacattgtattttcttcttttttgtcctgaactatgaaaactgacaacacttagggccttaacatcactgagctttgtaaaacaaataaacaaaagactttcttggagggaggggtttctgtggtcctttcctgttagcaggtgatgacaggtctgaagatcacaggaagggccagttcccctctctatcagaagagtcagtctcatcccctttccattattttttcctcatctttccctcttaaacaggtctacttggagaaccgaagcccaggcaaatcagagtgagtaccaataaatctgcccctcccttcttacttgtctccccagccccagctctcagtctgccaagtgatcagagattttgacagaaaccaaagtgaaccattctagtctcaacccatactctgtgtatggtgggttttttccctaattctactttttaacttttttctgattataaacattattatataggcatgttgttaaaaaacagaaatatccaaagcagaaagtgaagtacttaaaataatggtatttcaattgtgaaaaaaattaacaataatcaaaaatagtttgaaaggctgaatgaaagtccatgtttaataaatggtcattacagttaactctgagccagccacagtgctggagcagttaatctgctcaagtcatttagtcctcccttcag

SEQ ID NO: 181475 - DNA, 1104 bp, Homo Sapiens
ttggagaatttatatttccaaattgtatgattataccgctactttttgatacatcaattatttattgacttcctactagaaagagtgaaattttgcccatttatactgcaccatttttccagtatatgaatattttactctttgtacatcagaaactcagtattttcattattatgactagagtttttttgtttgtttgtttgagttctacttgtccaataaggatgatgattttcttttagatgtaaatgttaacttcaatagcaagaattcaaaaataatattctctttgagattgactgtgaatgttattgaaaagtgtctaaattagtctgaggatcaatgagggtcaattcagttaggaattgaataatgaaacgtgtctctctgaattcccccggcaattgttttagtcatttatcaggccaaaattaaaatgtttttgtactacaagatggaagtataaaattattggacaagtgaaatcgtatcagtagttcctgactgacagcttctggagccacactagagcagtgattctcagtctaacattaggttatcatgatgacgtatgagtaaattcttaatggttaaatgtgagacagttcacatttattcccatagaaatgtcattctcatttgaattcagagatacttctttgctggaagttggaattatagctttacaccaaggagtgacacgtagactaatctggcaagccaaggtagtgtttggattgcaatgtcatgattctattttaaattcttgatggtagaaacatttttaataaggaaggtaaaaatactggaaaaaagtgaatagtgtaggttttgtgaggaaagttaacatttgtcaatgacaagcattaaggccacctaataaagtgtagacaaagtgataaatgaaatatacactgatgatactcatttcaatatgctaaaatacattaaatttagtattactcttaatctatttctacttagtcagtgctatctgattacctgttaatagcatctgaactgggagctggaaaaatccacttttttatgaagcagtaattatagaagtactaaaaattacaatgtattagtaagtttaatatt

SEQ ID NO: 181476 - DNA, 795 bp, Homo Sapiens
ttgggttattgaaaagtgtctaaattagtctgaggatcaatgagggtcaattcagttaggaattgaataatgaaacgtgtctctctgaattcccccggcaattgttttagtcatttatcaggccaaaattaaaatgtttttgtactacaagatggaagtataaaattattggacaagtgaaatcgtatcagtagttcctgactgacagcttctggagccacactagagcagtgattctcagtctaacattaggttatcatgatgacgtatgagtaaattcttaatggttaaatgtgagacagttcacatttattcccatagaaatgtcaaattggcagagatacttctttgctggaagtatgaattatagctttacaccaaggagtgacacgtagactaatctggcaagccaaggtagtgtttggattgcaatgtcatgattctattttaaattcttgatggtagaaacatttttaataaggaaggtaaaaatactggaaaaaagtgaatagtgtaggttttgtgaggaaagttaacatttgtcaatgacaagcattaaggccacctaataaagtgtagacaaagtgataaatgaaatatacactgatgatactcatttcaatatgctaaaatacattaaatttaggtattactcttaatctatttctacttagtcagtgctatctgattacctgttaatagcatctgaactggagagctggaaaaatccacttttttatgaagcagtaattatagaagtactaaaaattacaatgtattagtaagtttaatatt

SEQ ID NO: 181477 - DNA, 970 bp, Homo Sapiens
ttggagaatattatatagctgatgtgtctttctcaggatataacatctggagacacacaatgtccatctaacatgaatgatgttagagagtacttggtgaaggagttacctagtttctactgtataatattttccccttgcaactaagaaacaatccatggaaagacattttaaaaccatgcaaatatactaacccgtaaaaatttccccctagatttaacatccatgattgtccttgcctgatccaatctttactatgttggttgcaaaatgctgatttttccattgctagcacttcctctacgtttaccagtcaacactcagcattctgctttaagccatagccctcatttctccttttgttttttatataaactcataaattcccccctcccatggttcataattaattactgtgtaaagtagaggatttgattctggggtgtgtcaatgataacttcaagaggtcagtgatcaccttgaaattgtgtgcaatcttctgtgttctggcatctttctagggagagtgttcctgtcatcagaatcttgaaagggttctggactcaaaagtggaaaacatattgaagggttagactttaagctatctgtaatacttacaatacatttgtatatccattcccctgctttttaccccaagtgataactgaaatgttagaaccgtattgtgtgtccctctgtagtacattctattttttgtcttctgtttttaaaccacaacttaaaatagtgctgtattttggttcctttaaattttttcctagaatatataataaatgttaagatcttcattgccaccgtagtagcagtttatggtgtatagaaccagtcttgtgaagcagtgaattaccttgatttaatttgaaattttaaaaccaatgttttttacactgtagttttattagctctctgggagtgagctacatgatgttgtgcactgaaaattacccaa

SEQ ID NO: 181478 - DNA, 1088 bp, Homo Sapiens
ttggcactactggtagtactgccagtggcacttctgggcagagtactactgcgccaaatttggtgcctggagtaggagctagtatgttcaacacaccaggaatgcagagcttgttgcaacaaataactgaaaacccacaacttatgcaaaacatgttgtctgccccctacatgagaagcatgatgcagtcactaagccagaatcctgaccttgctgcacaggtgagtttgtaattgtattgaaaaagactgtgcagtgtgaattaaaataacctaatcttgtaattgtgattttggcacatttgtgttgtgtatgatatcttaatacactagaaaaataagtaaactgtgtctccaattttttagaccgtgtgtttctttgcagtaaattaatacttcatatgtaattaaaacaactttatctctgccattcattgactagaaagaagtgcaggtttagtttgtttctacgtatgttgagttaggagacaagtacagagttctggaatgcccactcttttgaagataaactacttaatgaaatgtaaatcttgaaagcaattaagagcaatgttaatacatttgaaatacttttatttagtagatcactcagattataatagtcatgctcagaatggcagttgtaaaatagcatttattaaagacgggaatttgtcagaacaatgttctccttctttcaactattgattcccctgctgaaaatcgtatacaggtcccttattaatgtattcctttttctaatttgtttctaaagagaccacagctaagaaaattggggatcttaatgctggctgaacactcaggatcacttgggaagctttatagacagtaccgatggttggggcctcatccttagagattttgagataattgcgtctgataaccctttctccctcaagttgcctaggtactatctagttccataccacagggcttgaaaaccacggagaatgtgaaataaaccttgataatctgtagtttatatttgctgttcgttaaaatggcttctgtgtgtcacgaatttggagactttatagttaatctcatcccttaaattttaaaagcttt

SEQ ID NO: 181479 - DNA, 1640 bp, Homo Sapiens
  misc_feature (917)..(926): n is a, c, g, or t
ttggcaacatcagtgatagaaccatacctcagccccccattcttcagctttcagtggagaagctgagcagagatggagctttcctcatggatgcaggctctgtactgatgctttgggttggaaaaaattgtacacagaattttctcagccaagttctaggagttcaaaactatgcatcaattccacagcctatgacagaccttccagaacttgatacaccagaatctgccagaataatagctttcatctcttggcttagagagcagagaccatttttcccaatactttatgtaataagggatgagagtccaatgaaagcaaacttccttcaaaacatgatagaagacagaacagaatctgcattatcatattatgaattcctgttgcatatacagcaacaagtgaataaatgaatgaatgaagaaatttgacttatttttaaggaatgtcacgatagtgcagaatacctggaaatgtgtaataccttctttttctattatgtttgtggactaatgtgatgattgagatgttctcactgtgatttcaacaacctatagcaaataaaagaccacagcagagaatcaaacatgcaactctgaaatactgtatttttcaaatcagaatatagctacgtatgattggatacttttttcttgccaattatgtttgagttgttatggattaaaataagaatattgcagaggcaaagtacattttgtaaaataaagatttctgtgttctacatgtatatttctcatttttaatttttctgaatctttggctgctacatttaaaacctcacaaacctaagtgttgcagggaagttacaaattgattggtagtgatgtttttaaaataaaaacaatggaaagtaaatataatgtaggaaaactagaattcattccccacacgtgtcnnnnnnnnnnctttgttaagggaaaggatcatgttgactaaaactaaactaattctagtatagcttgagaaaaatatgaagaaacacattcaagctttaaaatctgtcagtattctttatgcttgaagaacaaagtcactttgatttgaagtgagaactatcattaggtggttttctgatttcctgatgaagagttggacatactgtcttaatctatagtgaaaagaatttgagctgtcttcataaacactgggactagcaatgataatagggagataagaaactttaattatcttgatcccttaagtggattttatttggtgcatttctgctctgggtatataataaaagtgggggtttttggtgaaatgagtgaagaaatgaaaggtttctaaagtgctatccaaatacatcagtaacatttttctaaggagtttaattgttaaattggaagtcattcataagaaatatttatgcttgaatatgaaaatctatgaaagcataaatgctgctgtttgatttggtggatattaagattatacacatccaacatattaaagttatgaaagaaacttgacttctgaaaatccttaagagactgctttcttgattcagctagagaaatattatagtcaaaactattgagtgaattttgtttacaaatacgtaaattatacatttgtatatttaaagtgctgtgacatagtatctttaagagtttggc

SEQ ID NO: 181480 - DNA, 1033 bp, Homo Sapiens
ttggatttagagagccacagaaagtattgagttagaatggatattttaactgccaccattgtaattttgtcatcttgaaacttaaaacacatccttggagtcctagagacgatctttataaatgtagatttcagtttgtcactgaccacaaatttcgttatttctgttacatctttttctagatcttgagcacatgaacacttggttacacatcatcctaatcatgactgttcatagactacttccttctcagacatttcttgatagcatttgtactatgtcttatgtaaaatacgttttaacttaagtaaaatttgttgttttagagatttttttcccttatctaataatcttcttgtttcagtgtgtggtgacatccatggccaattttttgatctgatgaaactttttgaagtaggaggatcacctgctaatacacgatacctttttcttggcgattatgtggacagaggttattttagtatagaggtaataatcataaactgtcatttgatttgctgttaagtgttaacacagatgctttcacttaatcctagttttcacaagtacctgtgttaggtttttttaataactctgcatattctgaagtttttatgaaaagctactatttattcctgttctgtctttcaaacaattcaaataaatttctttgtataactctgtttatataattataattgccatttttttcccagtggaatttatgagctgactgaggggtctttattgccctgttaactagtggccttaaaaatttagtgctatttatctctcttgcccctaaaggcattaaaccatgtgaaaaaagattacttgaattctgtctgattaaataaagtatattgtgatttttttattgcttgagccctagtgcttctgtttctccttgtgtagctattaagactcaagtatatcctatggaatctttgtgtatttggaaagtattaatttgtttttaaaaacttgaggcattaaaatgaccttttgattatcacttaacagtagatggttc

SEQ ID NO: 181481 - DNA, 1132 bp, Homo Sapiens
  misc_feature (584)..(594): n is a, c, g, or t
ctttgtacaaaaaagttggctccttttccttgtgtagagctttttatggaaggtagaatttgtaaaagttcgtatgctttgcctctcaactgcattaacatgccacaggctcagactgtttttgtgtaaaggatgtcaaagaacggcactttttctaaagagaagtttgatattttgtatgcttgttaagaaagtacagtattggaaattaaaggtggacaactgataattgaggagtatgtcaattaattttttatgtatattacctgtttacttgtacaacttactgtacaaattacatgcagcttcattttcaaatgaatccttaaaataaggaaatctttttaggaaaacatttaatttttgtatttttgattttaaaggcatgagttatgtcaattttcagtgtattaatgaagattttaacttttcatcaggttgagtgttttcttactatattatctgttgtgtatgtagttagcatattgtgtcactgaactgtttaaaaatctagcatgtagagcaagcctgttttgtggaaaatccttattcattaaaaaaataatcatggcagattttctgcnnnnnnnnnnncaaaagcatttgcaattcagaatactgatttttttaattttatttaaagaaaggtattttgcttgcaggaaaaaaatactacagattcattttaatgagaatctttgaaatgtatttatctttagggcatctgggcatctttatgctgtttgtcttctgtctttcttgaaataaaatgtacatacgttacctttacatatgctcttgctcaaaattgtgaacctagttacatttctccctgctcccttcctttttatgctcaaacagcgaaacccaaaacttaaaagatctgaactttcagcatgcattctgattgctgaaagatttcctgatttagtgcattctcaaaagggctttcccataatctaaagggaaatgtaagcacctatactcttgtgcctgtgggcacttcaataataaaaaccaactttttaaactaatcatcttttatcaatgataaagttgttttcagtcccacactaggagagttcctttaagtcagctgatcaagcataagatacttccgtaaagaaataaa

SEQ ID NO: 181482 - DNA, 932 bp, Homo Sapiens
ttggcttggcttccttccccggagggtggtgctgttctcgttggagggggcggccaggcgctgggccacgtgtgcatgcagcccctacagagttgctgccccgtgggggttgacgtgggcctcctttcggaagctcttcctggcaacactgagtggggcaaggggttggcagcagagaggcggctggatttggggccccagtgtcctgggcggcagctagggaggggccggctccaggccctcaggctgtgtcagggcagggcgggcacccccacttctccctgtcagccgagggagccaggcaggggcagcctgagacatcctgggacagtgctggtggggagaggcccctcagcctgtgcctccctcaaaggcccttcccgggccctgctctggctggggggacggtgtgacccactttccctttccagccccagcttggtgaccgggtggctccattcaccctgggtccctcgctgaaacggtgcctgggaccagagcagagaacacgcttgccagtggtaggagatggaggcgacgtggactctgggaggcttcttttttggggtccatccagaggccgagcctctccaagcactggtcagcctccatgccacccagtctgccgaccctcctctccaccatcccctcgtccgagcagtggcgatccctcccgagtcaaggctgggcacaagcacgtggggacaggccgggtaggctgcctggctcagtgctccctgcacagaggcgcagacagggagcccaggtgccccaggcctggctgccaagcctacttccctctcctggtgttcccgagtcctgcccgcccctttctgtgcgtcccgtgggggcagtgctggttgggggtcctggcctgtggggggcttagatgagaacccaggagcctctctgcatccgtggcctctgaggga

SEQ ID NO: 181483 - DNA, 966 bp, Homo Sapiens
ttgggttcttctagtcttaatttctgaaaaaaaatttcaaattattgattctttactttgtttggtagttgctcacatcttctcttgtctagcgatctcatttctcatcttttctgttcctgatacatgttcttacgttagggttctccagggaaatagaatcgttgggaaatagataaaatatgaaggagatttattatgaggaaattggtttatgctattttgaagactgagaagtcccgtggagtgctgtctgtaagccaagcctcgggaaagctggaagtggaattcattctgcaggtctagaaccaggggacccagtggtgtcagttccagtccaagggcaggagaagactgatgttccagctcaggcaggccagcaggaagaaaaaggggtaaattcctccctcctctaccttttgttctattcaagcccttgacagaatggattatggccacccacattggtgatggcatcttctttgttcagtctgctgattcagatgcacagacacacccacgaacagtgtttaatctaggcactctgtggcacagttaagttgacacacaaaattaatcatcacagtttctatttcatggcttctgtcatttgctcagtgttagatagtagttttcatctacttaatgagcctgtttttgaggcctgctcctgcctgtcagaacatctgtcacattgttagtctttttcctcctcaagatactttcgtatgttgtccaaccatgatgcttccagacccatgtaaatgagaggattccaagaatgctttcctagcttaagacctctctgggtagccacctctgtcatactttctgagacctgccgccctcatttctgcctgaatcctgctttcctcaccctgtggtcctgtcctggtcagtaagattgtgtactcagaagggctttgtctttctggaagaaaggtttgctgggttttgcacagtccc

SEQ ID NO: 181484 - DNA, 930 bp, Homo Sapiens
ttggggaaagctcttttaacgatagtaactgtccctactgaaggccccaggagtgctccagccaggtgtggaaagctggtcacgattctatgctacttggttcattttctacacagcaacagaagagccctcctgagattgctattaccatacccgcctgtcaccttgccaaggctggccaatgtgtgttttgtcataggctgtcatggaggccatgatggaggaaaaggaaaggggaggcagatgttgaggccccagaggccacagtgagagcagtttagttcctggggtgccaggactaagggggcattgccctgtcccccggattacagtgagccacatgtcaagcccaagagccaggaggtattcttcctctcagtgttaataatcaaagcatcctgacaccagcagccagtttttatggcatcctgatcattattaccacagtggagggctgacctcatagagaggctaccctccttccttagtcacccaaagttgtgaactatgattgtcagttgtgtgtgggccatctgcccacttaggatgcaatttttgatgtgacagacattccggatgtccaattcccctgtgatgaggtatgagccttgtccagcccttttcctgagggaagcaatgtcagatgaaagacttagaattgcccaaactggctagccagctgccacatgcacagtattgctgataactgagaaaggttagaacatcgtgttgcattttgaatttctaccattgttggaaccaggtctagtattataagcccctgacccagcctgtgtgtgaggcctaaacaaagcctgagcacttcagctaagaccacccaccaaaggtgacacctttagcctcacgcctttgataagctggcccaggtcccagtaactccattgtcagaaaagaccccatcccttctag

SEQ ID NO: 181485 - DNA, 1383 bp, Homo Sapiens
  misc_feature (673)..(851): n is a, c, g, or t
ttggattcaattagcattgggcaaaaatcatatgaaacttaaattacaccactaaagtcaacattgtatcagtttaactaccattaaacttcccaacttaaatggccacaaccttgcaacatattcttaccatttccatcctgaatcttaatattttctataaatacagatctaacaccataacaatgaaataaaagccttgatgcctctcagttttccataaagtcaagtctaacgtctaagcctagagttgaaggccattttctatcccatataatgcatctttctaacctcatctcctctcacaattttacccacaacccatattctatagttcagctttgcctgtctttatcgccattgtgtgtgctcttaaatacctttcctcatgttgtttgcttgatttatgatgccggataccttcctttctctgcctgataaattccttttcatgattttagtctaattcaagtgtactttcccctaagtcacattctttcaatattccataccctgtcagaaattcttttttctattctttactccctgaatattctggtgaggcctctattatagcattcatcatctgatattatagctggttttatatatcctgttctcctcctagagctaccatatacacatattgcccaggcttttaaatcacttctannnnnnnnnnnnnnnnnnnnnnnnnnnnnnnnnnnnnnnnnnnnnnnnnnnnnnnnnnnnnnnnnnnnnnnnnnnnnnnnnnnnnnnnnnnnnnnnnnnnnnnnnnnnnnnnnnnnnnnnnnnnnnnnnnnnnnnnnnnnnnnnnnnnnnnnnnnnnnnnnnnnnnnnnnnnnnnnnnnaaatatctcttgcttttgtaattccacagttacctaattctgcttcccagaggttcacccttctatatcagttatctattgccataataatgtggtataataaatagccacaaaacgttggtggcatatagtgataaacttatgtttagcacataagtatatggggcacagcttacttggggtgggcaggccctatttatacatctgcattcaacagctctgcagacctcaggctaggcctgctcacatgtctggcagttagctggctgtcagctaatctaggatggtctcatctgctccactggggtgatctggctctgtcctgcatgtctcttatcatctgaaagatatccttcttctggcagtttcagagggcaaaagtaagcaaacccagtcacataagtactgttcaaacctctccatgcatcacatttgctaatatcattggcaaaatcaagtcatattgttgaatccagtgtcacaatggaagggcactgcaaaatattaatacatggctatagggaagggggaa

SEQ ID NO: 181486 - DNA, 1446 bp, Homo Sapiens
  misc_feature (527)..(535): n is a, c, g, or t
  misc_feature (1056)..(1064): n is a, c, g, or t
ttggtgtaaaggtacttgtagactatatgtataaataactagttaacacttaatattctaaattgttctaaggaacagtggcctgaagccatgactagttttgtggagctgctggctcttttaacagtagctgacctattggatttaaactgagactgaaattgacatttgtggttaggttatctagctgaggcttttaacaatggagcagataatgtctgttcctgtagtggatccatttaatttcctatttgagtactctcacttaacaagtattatctattctgaacctttgtgttgggaatttaaggactattgtcaaaggctattaatggtaaacaagtatatgcaaaacaattcacatatgggtaaaaatttcaaattgtgggtttttgtttttgctttttagtttcaaagattagttatgtagcagcaatatcataaccaaagcaagtaggaagttgactggtttggagaatcttcaagtagttttaaatactgtaatgtatcagattgttaaccaggannnnnnnnncctgtattactgctaaatatattactatattaatgcacttttgtatatataactgtcttctgtacattctgtacttactacagtgtatataaagcctgttttccctgaagctgtgagggaataacaatagttgtatcataagtcgtttctattttgagttccttcttgtacttgaaagtagttcagtagtgaaatctaaatgagtgtgtatggttgtaattaaaactggcaatgtggcagagctgtcttttgaaactgaataccagaatgaaaagtgttgttttggttaagaactcttataatatattatttcttttgatgtaccctgagttgttacacagcccactcactgctgcttactactttatacttctgagtcagctcctttcatgctctatcccagaatatttaccaacagaggagaactgctcccttttctgtttctcacagtttggttatggctttataaacttttatttggtgaaagccccagatacccaaatgtcattggcaaaacttannnnnnnnnctggacagatcagatttctagagagagcagatttctagagagattagcattcatagtaagtgaaaattgtctaatttttttaatccatgctattactgggcagtaggtctaattttttttgacaaaaaatagatctattttccttatatattgatttagaatcttaagttagaattttatagaagaaatgtctgagcagttctatgtatggaggagcaattcagcttttcagcagcaactttatcttttgccactagagggagatctgtggttgctttctcctttggagaatagctgctttgcttttatttttaatttctaaggttggaatagaacttattctcacaattcctttagtgtgattaaatattttcatttatta

SEQ ID NO: 181487 - DNA, 1226 bp, Homo Sapiens
ttggctctaacctttgatctgcgtcttttctgttttgatttacataattcatttttaaatcaaaaagatgtgcgtatatatggttgtgtgtatctgtataacctaaagctataatattttgttgtcttgaaagcagatacactcttcctggagtctgttcaggtttcaggacgattgactataatgaaagagacagaatagggtaagggaagatgggtatgctatcagccattttctttgccttgtcatttaatgccataatttcagattctctatgtaaaaagaaggtctgtgtattgtcaaaataatatactctccaagttctcctgctcattgacccttgaaccaggattctggattgctagagctgcagaaattcacccacttgggtactcttagagctctacagcaagaatatgatagaatgtctgatctttgtgctgcagaaagcaaacttttgaagaattctaagcaacagaaaatgggttatgtgactcatctgctatttggcagccactattccttttttagactgcagaacggtactgcccctgttacctctagaatagcctgagtctgaggagtgcagagaaaagatatatccaaaaggagaatccctttctcttgcataactctcaatcctttacaagtaagtagcattatttcagaatgtctatatgcatcattttcaactaaagcatacctcatccttaaacttccactatttaacagctaatccatttcaaacttggtttgagcctagcaattgcagaactcataaaattgcttgtgaaattacacaccatattactagcatatacattgcagtgctccaatcatgctaacagataatagatttttctttaagaattttatcaaatatttcactatttggggaaattttagaggaggggaagcctgtattcaggatgatagagggagcagagacttactgtctctcttccacattataaatgaactgcctttccaggtccaacatgctgtcaggttgcttcagctcggtgtgaatgtaagtgtggggatcaaacacacaaacctatacacatacatattaatatgcagaggattttaaataattgcaaatgtcttgtggctgttttatttctacaaaattctgtaagatgtataccagaaaacatataaagataagctcagttcttcattgggaaaaaatatttttaaaggaaaatttagaagttttgctg

SEQ ID NO: 181488 - DNA, 537 bp, Homo Sapiens
ttggcagcgcccccagcacgccgccgagtcccgctcgccatgggtaagtcccgatcgggcgctgcctgctggaagcccgaccccttcccagggtgtagacaccgcccccacgctcccctaagagtgcgcgccccctggctcccccagggccgccccggccggataccgcctctcgggtggccagcccgagactgcaggcctgcggcgggggctgggacggggctcggtcgcgcttccttccatcttcctttctgccccggaaaagtggcccctcacttgctgcagcgcccactcgggcccaggcactctcccgggcgccctgatccgacagccccaggcaagtgcagctgttcctggtctgcagatgaaaaaatggaggctccgaaagaagcaaagcagttcgtcgattcactgaacacggttgtgccccaggcgctgttgtgggcctggggacgctgtcgcgaacgaaactgcgaacaaaacagacgaaccccctcctctggacgtgattctgcacaaaggggaaagagaaggaga

SEQ ID NO: 181489 - DNA, 1006 bp, Homo Sapiens
tttgtacaaaaaagttggctagactgagtctccttatgatatacaattcactgctttcattcttcatgttcactttacatacttccaacacaaaataattaaacaagttaaaaattagagcctgtattaactagaataaatattttgccataagctacaattgtcagggcttcaatttctgagttaatatcttcatgtttgagccattataaagggttagtgttagcatatacttagaacattttcttagtaaggtatcacttttctttgtttcagattttatattgatagagttatcataaatctacacaagtgctgaatgccattataaaatctttgagtgatccatacatgccatatttagtggaatatatgtgatattgggaaaggtgattgattatgaagaaaaatctgttttcctgttacttttaatttagacaatgtattccatccacaactccaaaatattaagagccacatagaccaaataagtattatttattatccctggagacagggataataaatagtagtctctgcattccatagctgctcctgttttgagcttatgcctccatgagttgggaacagcagtcaagagttttgcatatttcctagcagtaatatgccccatcctcgattcagatgtgatctgttttggaatattttatcatttatagtttttcaggatggtgtattgacttggtgattcctttttagtaaactttcatgtaaccaaattcctataatagggtacccaagagttatcatgtttcaatacttttttatcttacagttggcactacgagatgcacttttgaaaaagagaaaaagaatgaagtaacttccctggccagttttccatcctagaagaatgctaagtttgtgtcctttgctctgaaaattggtaaatcaagcatgtttgtttacattaaaaagtccagacacactgtattgtgaaaaactgctgaactggtgggcagcaaattttgtgttttttattttt

SEQ ID NO: 181490 - DNA, 835 bp, Homo Sapiens
  misc_feature (97)..(161): n is a, c, g, or t
ttggctatgtatccctgacaaccatccaggtcagcttgatgattaacacatttgttttaatagctacatagtattctataagtatgatttattcaannnnnnnnnnnnnnnnnnnnnnnnnnnnnnnnnnnnnnnnnnnnnnnnnnnnnnnnnnnnnnnnngaggatattcaggggttctgtccactacaacattttgtcacaggcaacagtgctgaaatgaaaacacttgaacacatatttttatgattttactttttatgattttcaaaagtgtgtttgcaaggtcaaagaatagatgtgttgctcttaataaatatcaaaagattatttactactacccaaattatactgtaatttcttcttgaaccgtttaatttgtatcctcctatcagtgaggttgagaaatattttatgcttactgacttttgcaatatttctttcacgaattattgccattttctattgtccatttttctgttaggctctatgattagcttattaggctttgtggtttatatgcatcagaaagagtaagacttaattttgtgtggaacaaataccctggtgtagcatgtttcattagaatttgtttatagagatatttgccatagaaaagttattttttattagtaaagaatgctttgtatttcctttgtggcttctaagtacccttttttggttattatacctttatccataagtatctttaaatattacaaaaattacatattcttttaaatattttaaagatttattatattcatttaggttttaatccacttttaattttttagatgaaaagtaagagaaaagtatataaatcatgagcacaa

SEQ ID NO: 181491 - DNA, 1834 bp, Homo Sapiens
  misc_feature (293)..(335): n is a, c, g, or t
  misc_feature (381)..(557): n is a, c, g, or t
  misc_feature (817)..(825): n is a, c, g, or t
  misc_feature (1325)..(1347): n is a, c, g, or t
  misc_feature (1617)..(1631): n is a, c, g, or t
  misc_feature (1637)..(1687): n is a, c, g, or t
tgtacaaagaacttgtgtgcttagacctgacgctgggaggagatgctgccacctaggttacttgtaggaccctatacggcaacctcctttgccaggaactatttataaacatcctgcaggaaaatgcagtgaagtagaagagacagggatatcccagaaggttatgcaaaacatcaagagaagatgagaggagtctatatgtcagaatacacatttcccaccttgcccaacagtagaaaaacataagaagagaaaaacattaaaaaatgacaaggaagttaatggaagtcagnnnnnnnnnnnnnnnnnnnnnnnnnnnnnnnnnnnnnnnnnnnatgcccttgtaagaagaggccagagagcttgcgcaccttcttcctnnnnnnnnnnnnnnnnnnnnnnnnnnnnnnnnnnnnnnnnnnnnnnnnnnnnnnnnnnnnnnnnnnnnnnnnnnnnnnnnnnnnnnnnnnnnnnnnnnnnnnnnnnnnnnnnnnnnnnnnnnnnnnnnnnnnnnnnnnnnnnnnnnnnnnnnnnnnnnnnnnnnnnnnnnnnnnnnngtgcctcatttactacataccatttatattattatataggctcctttcagaaacccatgttcaaataagagataagatactgaaacacataacaccttcactagtttttagtatacaaatattgagaaatagtttgttattaactatctcatccaagaaatgcagattcatgttgtttctaattttttatatataattgacaaaatgaagaaacttaacaccatcctagattttagctgcccaaagaatgaaaagaatgnnnnnnnnntctttgaaaacccacaagtgatatggatctaatttatggttaaatagatatagataacaaacagaatacgcctgtttaaaactgttaaaatgacattggttctaattatacttttatttaaattgaaagacaaggcatttatatggtatctctaaccatcacaacttttgtgtgacaaaaagaaattatcaccaaaatacacctccttaagtaagtgtctgatttcacacttccagaaaaagtgctctttctggtcaagccagcaagaattgagaaagattaagaaagtgcttcaaagatgtttattaaaaagttgtcataaaaatgtgaagtagatgtagcatcaagcataccaaataaagtaaaactgtcatcaagaagattctacagctatgaaaagagttcttcaaaatatgatatgtttttctagatgataataaaatttatcaattccaaatgtccacattagtctttcataaagacaccaatgagtcacaggnnnnnnnnnnnnnnnnnnnnnnnccctatctcagggaatcatgctaacaacctgatgtgttttcttccacatatttatgtctgcttataagtatttacaaacatatattcgcatatatgcattttgaattttttctgttgctgcacttaaatttttttcataataaaacaagactcctgcaatttgcttttttaggtagactatgtatccctgacaaccatccaggtcagcttgatgattaacacatttgttttaatagctacatagtattctataagtatgatttattcaannnnnnnnnnnnnnntgtgtnnnnnnnnnnnnnnnnnnnnnnnnnnnnnnnnnnnnnnnnnnnnnnnnnnngaggatattcaggggttctgtccactacaacattttgtcacaggcaacagtgctgaaatgaaaacacttgaacacatatttttatgattttactttttatgattttcaaaagtgtgtttgcaaggtcaaagaatagatgtgttgctc

SEQ ID NO: 181492 - DNA, 1531 bp, Homo Sapiens
  misc_feature (454)..(511): n is a, c, g, or t
  misc_feature (516)..(540): n is a, c, g, or t
  misc_feature (1125)..(1135): n is a, c, g, or t
ttgggtttagaaaagaaaaaatgaagaaggaaaactatataggagaaattcctgggctttggggtttgatctggtgtttgttttgagaaggcgaaggaagcgccacccatcctaaacctgcatgggcacagagccttaccctacagagataccacacaatggtctacctctaaaagcgtagagtgccctctctgacaacgcatgtgatccagtaggcagtgtctgtttttctcgtaagtgttttcatcactataaaaagtgatttaaaatggaaagggatattggaggcaatcctctggtttcacacttccttttcaggcaaacagggccctccttagagttatctgttcaccagaacaacccaaaagcacatgttccttttttcctgtcatgttgtagctcatttgggggaaaagaaggccaacttaaaacagtcccaggggaggactgcttnnnnnnnnnnnnnnnnnnnnnnnnnnnnnnnnnnnnnnnnnnnnnnnnnnnnnnnnnntctcnnnnnnnnnnnnnnnnnnnnnnnnngccgtcccagaggaagtcctgctgcagaaaagatgatagaattggtcacccaatcaatagctgtgaagacttccttattcctgctgaacttccttccttggatatcttcatggataagcctgtgtctgtggacagagtggggcccaagtgctgaggctcgaaagacaggttttacaatcagccaattaaacatcttaccagttgctgtaccccttgccaaggggatgagctgaggagcttcttttctttaggtccaacatcaaaatgagtccatctaagctagggctttttgcaaaggtgattaaaaatcaaggctggagttccagccaaatagggaggagaggtaccacaagttcatcttaaacttgcttccgggctgggtagttaaaacaggaagatcccaaggggatcttaccaggcaaatatcagcaggtaactgtggaagaaaggaaatctcaggacctaatgagttcgttgtaaaatattcctgggagtagatgggggatctactcccagttttttactttttacagaatattgttgctttcctacaacaatgtacatatatttgcagttgtatatgcnnnnnnnnnnnccaaataaacttgtcaccctgcatgcccttggcaaataagtgaagcagaaataggaacacagtccacattcaagttgaggaacagtgtatctttaagagctgacctttgggtgacctggaaagggggaaagatggctaagcatggagagaaacgaggcaagagacaagctatgatacaacaccgcttcagcccctgccctcaatagcacacaacccacatatcagctttctgaagagaaggaacctactgtttagtgctcctcactttgcaatgtttgtgctacgccagaatttctccagtttttttcattatcatccccctgagaaaaaaattacatggatttaaattttccctaataagagaaattaaatatgaaagaataggatttggttggg

SEQ ID NO: 181493 - DNA, 765 bp, Homo Sapiens
tacaaaaaagttggcccttcctccctcttccttcccttccatcccctgggaggtcttcaagagctggtactcatctatagagcctgagaagttgaaatctgttaacttgccttgggtgcttgccagtacttaaagacaggcctggttggaccactgcattctttgtctttgtaggagaagccatatttgtttgcatgtacagcgtcaagaaacgtttcctgtcgactgctttggcctggcatttccattaacactttcaattgggagatggtttctctagcttagctggcagaggacccagttttacagcccatctgcttctctctgtttctcagccattggccccagttggggcaacctgtaactggaatctgtggcctatagattttaactgggatactttttggaggggaggcaggtcggggtggggaaatcctttcatcctgacattattggcgtaaccttttttttcagtacgcttccatctttgaggaggagatgacactctgggctcttccttgctctcctcccgatgttttcttatgaaaaattttaaacatacagcaacgttgaaagaattttttagcaaacacctgtatgcccgctacttagattctgccactgacattttaccatgctgttttatcgcatagctgtccaactgtctatcactctgtctacctttttgggctttttcagtgatgtttctccagcatttcaaaggcaccatggtatgggtagttaggaatatgtgctgtggtgcca

SEQ ID NO: 181494 - DNA, 1667 bp, Homo Sapiens
  misc_feature (699)..(762): n is a, c, g, or t
  misc_feature (792)..(848): n is a, c, g, or t
  misc_feature (850)..(867): n is a, c, g, or t
ttggcaaaaatggtttggttgcctatacttctgagatcttatgcaagaaatctttgtgcacgccagtgacctagggtttttccccaatgttttttcctagtagtttcattgttccaggtcttagatttaagtctttaatctattttgatttgatttttgtataaggcaagagataggggtctatcttcattcttcgacatatggatattaagttttcccagcatcatttatgaagagactgtcctttctccaatatatgttcctggcaccttagtcaaaactgagttcactgtgaatgtatgaatttatttctgggttctctattctttttcctttgtctatatgtctgtttctatgttaataccatgctgttttggtatctatagctttgtattataatttgaagtcaggtaatgtgatgcttccagctttgttcttcttgttcaagattgctctggctattctgggtcttttgtgactccatataaattttaagattttgttctatctctgtgaagaatttcattgatattctaatagtgattgtattgaatctgtagattgctttagacatgcgtcatgtctaaacctgcatcatatctaaatgcatgtcagctacagacatgcatcatgcttggataatttttatttaaacatttaagcaatattgattagtccaatccatgaacatggaatatnnnnnnnnnnnnnnnnnnnnnnnnnnnnnnnnnnnnnnnnnnnnnnnnnnnnnnnnnnnnnnnnggtagagtcttgctctctcaccctggctgnnnnnnnnnnnnnnnnnnnnnnnnnnnnnnnnnnnnnnnnnnnnnnnnnnnnnnnnncnnnnnnnnnnnnnnnnnncagggccaggtagccattgtggagagagcacacttaggaatcctgggatgttagtgttaaaagaaagctcctggagccagtgattctcaggtttgtcccagaacccttttttctaagccccatataaaaggtagattaaaaaaacaaagtagcatgagtgaaattgagagagggacaggtaatgccttccagcccctaacttctaacaatctggaagcacaacgtgaaaatcacgtagcccaaccctatcatttccatattatgaaactgagtccaggtaagtgaatctgtccaaggtcacccagcaaggtatcagtagccctgagggtaaggactctgataaggctcgggagggtcctggaaagcctgaggcggcaggaagagtgtgcagagttgagcgtgtctggaaggctgatccactgctgggcccacatcaaagcccccatggggagcagacccgactgcacatggctcttttgctggaagaagagcatggctgcgcagaggactaaaatttcatctgggaaggcttcttttgactgtcagtagcaggatgtcaccagatgagggtgctatgggaccacagctgtctttgttcccattgcaactcaaccctgcaggaggccgcctgcatccctgagagccttctggagcctacagaggagacattggccagccaaaaggaaaggagtggccagggtacgacctggagtagggaagggaaaaagttcccggaaagaagagaattggatgagaggtctcggtggaaataaaggttttctggcgtttggtcaaggaaa

SEQ ID NO: 181495 - DNA, 933 bp, Homo Sapiens
aaagcccagcctggatttcatcccaggcctcccattactgcagtttattggtctccttgcccttccaatccaactgaggtaagatgctaggccatgctccttaaaattgagtcactgctctgcttaaaaacttgtcaatgcactctggaaaagggaaaactgtagggacagaaatcacatcagtgatggggcttaaggaggggagatgttgactgaagtggctaaggaaactttttgagatagtagaaattttaagtctcaactgtggtagtagttatagaacttacacacacttgtcataaagcatggaaatggtatatagaaagagtgaattttattgtatttatatcataccttaataaaccttaatactttaaaaggaaatgccaatggctttcagtgcttaccacatttggattacatcctacctagcggtctcacttccagtgacatatatactcttaaatctacccagggtttcccaatgattgcaatcctactactagagcacattatttgggctgcttattccctttattcaaattctactctcttcacagcccagctcaaaacctatctcttccattgagaggccaatttctgtgacttatgtgactacctcctaggattagttcatcagtagttgttaagcttttatgggagagagaagggatgtcacagacccttcaaaagggaaagaaagccatttatttgctcattaagtcccatgtttggaacttaatgaattaattaagggtaacacaagacatagtggaaaacaagtgagatgacagagatcttacctttatggaacttacaaacacatgaatttgccttttcattttgggaggtctgtggaccctatcccttccccaaccatcagggataagtatatgagtctcatctcagctcaaaaccttgctctgtggccaa

SEQ ID NO: 181496 - DNA, 254 bp, Homo Sapiens
  misc_feature (86)..(100): n is a, c, g, or t
cacgtgctaggattacaggagtgagccaccatgcccgacagttgctcaggatttttatctctgcatcactcacatcgttaatgccnnnnnnnnnnnnnnnctatttgagacagagtctgactctgtggtccagcctgtgagtgcagtctctgtttcttgactcactgcaacctctgtctcctgggttcaagcgatttttgtgccccagcctcccaagtagctaggattacaggtttgtgctacaaagctggcta

SEQ ID NO: 181497 - DNA, 954 bp, Homo Sapiens
tctcattatattgaagggatttctgccctccaatgttaccagttaccacccctttccatggtaatgacctggaagttaccatccctttcctagaatgttctaaatagcttgcccttcaatttacattaacccacttcttacttttgcacataattgaaagtgggtgtaagtgggtacaaatacaatttccaaattaaactcattttctgatagcaaagaataatatatgctgtattggtcagggttctccagagacacagaaccagggggatatatatttttttaaatggagatttattatgaggaattagttcctgggatcatggaagccaaaaagtcccacaatttgccatctgtaagctgcagacccaggaaagcaaggggtataattcattctgagtttgaaggcctgattgagaacgaggagaggtgagggtatagatcctagtctgagagcaggagaagatgaaatgagatgtcccagctcaagcagtgaggcagggagaaatgagtcaaattcctgcttgctctgactttgggtctatctagggcctccatgggttggatggtgccaccacactgaggaggggaatctgccttacagagcccaccgagctgaatgctagtatcttccagaaacaccctcactctcacagtgtttaatatgggcaaccatggccagtcaggttgacacctaaaattaaccatcacacatgcttattctagaaaacttgagaaatatagaaaagaacaaatatcaatcactcatcattccccaccctagctgtgagcacatttgagttcattcctaaaggagggtgggaggaaaaccaaacagactttgaggtttctgatgttggccatgatcaccccacaggttcaagtatagagtcctggaaagtggctattggcgttaattctgacaaatgtgtagaaaatatcctgactttttgg

SEQ ID NO: 181498 - DNA, 1188 bp, Homo Sapiens
actttgtacaaaaaagttggatagactttccctaaatccattaatcacaaattaacaactcctgctgttaaagatactacaggctcttgaaaatttccctcttagttctggtctgaatcactaacagtgggttaattttcaacccattgattataagcatgagccagtgaatttttaaaaattaaatgaatattcataattacaaaagaaatcacatgttcccttagagtatttctgtaatttgacctgtatttctgtaatttcatgattttatataaggtaaatagatgcctctgcctaagttctccattggcaaagtacagacggcaccaactgctacctctaatcacaaaagtaaagatgtgatattaaggaagactgaaaccgaaggcaacatacaattgcaaggtgttctgtatatagttacacacagtttatcatgtatcaactaggccctaaggtgaagccaggcactaaagacaggaatgaaagtagacttcacatacagtaagtaaagtggcattgcctgagtgctgtgagactcagatcacaaaaggcattcttctcaacatgaaaagtagtagtattggatatattctattcttaaatgcagcctgaaaagtaatagatactacatagtactaatttcattttcactgtattactgccactttcaaccacctccacctcgggtaaacctatgaagcttacattgtggtaacaaggaatttatagaaagattccaatgtaccatcaatttaatttgttatgtgtcaataagctagtccatgaatatattctggatagattttctcccttggatacttcagaacatttctccactcattagtaactgtgatgaagaaatgaagcacataagcatctggaataaactggtaaaaggagttaatggcaaaagagaggatcactattgactcaacagattttagattctgtgtatttcaaacaggaatacttcctatgttgtgttagcggaaaaaagtcttgacaatatttttattttttacctcatataagcatatttgatggaaaggttgtccacactgggaattatcacacacttgatcaggaatggtaccgtcaagttgataagcataacaaattccacaatccatagtaaaatccttcaaaagaaaaatatttataaaaagcgtatgtgtctcacta

SEQ ID NO: 181499 - DNA, 1770 bp, Homo Sapiens
ttgggttggtgccgtctgtactttgccaatggagaacttaggcagaggcatctatttaccttatataaaatcatgaaattacagaaatacaggtcaaattacagaaatactctaagggaacatgtgatttcttttgtaattatgaatattcatttaatttttaaaaattcactggctcatgcttataatcaatgggttgaaaattaacccactgttagtgattcagaccagaactaagagggaaattttcaagagcctgtagtatctttaacagcaggagttgttaatttgtgattaatggatttagggaaagtctatgaatgccaggaacttagtatgcattatttttatgtatgtctattctggggataaagaaaatgcgtaattcttatcagattcttaaaggggcccataatctggttataaaccagtggtttaggccttcaattccatgttgatttcccttgttactcaacatcttaatagtctgctattggctcaggaaatacatcccttactcttgcaaaacaaaattaagctaagtcttctggaataaaaacataatgcacttaaaaacaaagggaatgacatttggagtatctgtaatttgtaatcatgctgacgcttctcctttatcttttaaaatttgcagtggctgagaggactactaactagtagacagagttttaacatcatatttggtgaatgtccatattgtagtaaggtaagcaaattgttaatcacatctcataaaatgtgcctagctttcagtaatatgttctagaagatagatctatatagtatatcagtttatctaaaacttttgaaactcattctctgtatttctatttttcaaattctctgatcaaaaacattaaactccttttctagatttcctaggtgatctgaaacttcagaagtgttttccaaactgtactatgacactattctatgacactatttctagtacaaagcaattttattttttagagtgtccacaaactttgttaaaatatgttctctttttaaagccaattaccttaaaaatgtctggaaggaaacactgaaataagaatacaacatttcggtgaagagctggaaacttaaaaaattatcaaaaggaattttggtatcatcttcagagaaaaaataaagcaagaaatactaacatcaaaaggacaggtatgatgatgcgataataataaacatctgcgtttgtctcttcactaagagtaaactgggaaattgtaggccaaagtccagttgaactttctaagtctgtgatccccgtgctgactgtggaagtgtatttataccaagatggagatcttgacttcttgaatatatctggactggtaaaatcttgatgaggctcataaaatgagtttgggaattgtgtatagctgattttttgtgggaaactgtttacttcattcaaaggttcttgagactcttgatatttctgtcttctccttgtgctttcctgagctgcttcattgttcatcaatccaatcagtttctcctctttctgcactttccatgttgcacaggactcagcgcttctctcactgtggacttttttttcgattaacctattgtgtgccttgttgacttgctttgttgcagccttttgtgaatcaactttttgactgtttggagtatggacatttatactctgtccttttgtggaaaagtccagtggtcctaaaggtattccatgagggttcaaaattttcttttagggcttgatagtttccaacttttttgtac

SEQ ID NO: 181500 - DNA, 914 bp, Homo Sapiens
ttggcttgaaacaaatccttcttattaaactgttttgattttgtatcaaaagtatttagtaagcagttgtatcttttaaacataccacattgtttcatgagaaactcctttgtttaaaaactgatttttaaagtcagtgatggcattacttattatttagtgaaactatatttaagctaattcctataaagggattaatatatgaaatgctgaattcagagattggctaaaagttaaatgtggaaaaacatcatttgtaccttctgttttaattctttaaaaatgtgtaaaaccttttcatactctgcctaattaggtctccaaagtttttaataatatttaaaggtaatctcactaaattacaaatagcactgcatttaacttgattgctgcagcaaacatgaaattaagattttcatactaaaatattatagacattttgtataggtccaatgttagctatatcatgtacattaatatttattaaagttgtgtgtacatacatcttgtactcattactattgcatacgtgtagtatatcaagcattataataaaaaaattatgatttttaaaaaaccattctttctcaggtgtatagtctactgtcaataaaaaagaatcctgtaaacgctgtaggaagagatgtgaagcagggagagtcgactactgtttactggagtctactttgtagctaaaatgaaacagcttaaaatttctaaattgagtgtattttaagtaaaagattatctgctattggtagagtaccatataacttattcaactttcatttttttcacagagctccttaataagcatttatagtcagtttttggcagcaatagaatcactaaaggcattctgggatgttatggatgaaatcgatgagaagacctgggtacttgagccagaaaaa

SEQ ID NO: 181501 - DNA, 897 bp, Homo Sapiens
ttgggttgctcttcacagaagctccatgaaagcgggcttcgcttttgttcatgcagccagaggctcaacacatgacctcgaagccgccaaggctttatcaaacggatttctcccaaaaacttcgtttccttccgcgacgccctgcaagaaccctgtattcctgagtccctggctcagcgtctgctaccccgatgctgtcaatcagatcctgctaatctgagcggccgtggctccgtcccggctccgcgtccgctgacaggtcaccgctgtgagtctccggattaccagtccaaacgggacggcttgaggtccccgcgccctagggacctgcggggcccgagcgcagggcgcgccagagaactacatttcccacagagctcttgggaagccggggccgccgagacccacggcccggcgggcgggctcgcggggagactcctgggagttgtagtccattccgccggcctttgtctgcgggcacgcgccgctgcggtgctcaggaacagcccatggaagaatcatatgaagaggtggtgactgaggtcgtaagcaggagtggacatgtttggatttccaacagctaccctgctggactgtcatggaagatatgcccagaatgtagcgttcttcaatgtgatgactgaagcccaccacaaatatgaccactctgaggctacaggatcctcaagctgggatatccaaaattctttcagaagagagaagctggaacaaaaatccccagattcgaagacactacaggaagattcacctggagtgagacaaagggtctatgagtgccaggagtgtggaaaatccttccggcaaaaggtagtctaacgttacatgagagaatccacactggtcaaaagccttttgagtgcacccactgtggaaaaa

SEQ ID NO: 181502 - DNA, 808 bp, Homo Sapiens
cgaatactgccctgcatctgagctcctggtgcactttaaatatgggtccattcatcaccattaacagttttcttggtgtctgtcactccagggtaatcttctccttgttcccttgccttattcagagacagtgctgagatttaagctgctcattcattctcagagactacttcaacgctacctccatatcaagatggttctcttgctctgtttctactattacttctaactccagctcacaggcttttcttataaccctaggaacagcaagctctaccaaagcaaggtctcctctgcttcctcagactgccgaccagtgctgagaacagggacactgaatatctgtgagctgagcgcatccagccatcaactgactcactcactgaagaacgctacattctgggcatatcttccatgacagtccagcagggtagctgttggaaatccaaacatgtccactcctgcttacgacctcagtcaccacctcttcatatgattcttccatgggctgttcctgagcacctgagggagaaaaacaaacagaaacaaacaggaaagggcagaataattgatatgtgagaaggaaaaagtcaacagttgttgagacataagtgaatgtaagaaacctagattgtttgacataatgtcagttactaaaatatcactgcaaaatgggcccaaaggtaccaggaccacacacaaatgagtctaggaggaagcaggatgtgggaaagcagagaacacataaacatatatctcttcctgccaatcccaagttaatagtcactcctgtttacactttggccaa

SEQ ID NO: 181503 - DNA, 909 bp, Homo Sapiens
ttggcctttcaatgacacagagcagctggagtttcctaaaacaagactgtatcctgtccttcagataaggatgtgttctaagacctctccttctcgtcatcttttctctgtaggtggaagaaaaagaactttccaagttattcataatttatgctatggttttttagtcaggaaaaatagaccagaatcataactctggcttgaaaggagaatttagctctgaaatccttataatgttagaatgcattgagttccaggacatgacattggtttctatgtggtaaatttgttacatcttactaagtagggggatttgggcataatcaagaacatagacataataaccatcacaatttgaagaaattagtgtgaggtcaaagctaagactgaacaaaaggaaatggagagcagtgtgccctgtgtgggtgcccacgtgtgcctggtcttgcccacttacagatggacttagccctggcttggggaagccttttcctctagaaccatatttgctcacgtgtgtctcctaattttactattcttctgccttgagattgcttattcctttaatattacaacttacagcagagtttccaaagtgtgactgttgttcacctagccacatacatcttttaaaatgtaggggtggactccatcttcatatctgaagtaaatgttctaaaagatggttcggtaattatacaattatccaaggcccagaaacccagtccttgactaaattagtgatgtgctaataattcccctgtgtcaaaccaaatatcaagaccatcctctcattcggcatgcccaggtaacagtgcctccacagctgagcacacagcaggcctccagtaaagagggaggttctggggccacctgccctgagatctcggctttcttgaggcacctgct

SEQ ID NO: 181504 - DNA, 1546 bp, Homo Sapiens
  misc_feature (876)..(884): n is a, c, g, or t
  misc_feature (1446)..(1454): n is a, c, g, or t
ctttgtacaaaaaagttgggttagctgttcgagtcaaaaactactcactaaaagcagtgtgttaggatgaattgaggacatgggagtacagtactacaatcctgattatttcacatcagttactatacaatcccccaagaagaaggaagattgcattggagccaccctcctttttccataatggtttttaatagctcaactctgtctacttgggtaacttatgttagctacaactttaagataaaaatcacattattgcagaatcttactgctgaaagagagattggaaatcatcgaaaccgaccctttcctttcaccaaaagtaactgaggccccaaaatcttaagtgaccctccagaacaggtgatggcagagccagtgccttctaactgatgttcagtccagtctccaaatttcccctttgtataagaataccagttgtatttgattagggcccaccctgatgacctcatttgtaaatacttatctccaagtaaagtcacattctgactttaaaaccacatcctgggggttaggatttcagcatatgaatttggaagtgggggacagagttcagctcataatacttcactctctccccaccagaatacatgtccttcacccaatgaaaatattccatcccaacaaccccaaacgtctttcaaacatcaactctcaagtccaaaatctcatcttaaatatcataaaattgggtatgcgtgacactcagggtatgagtcatcctgaagcaaaattgttctctagctgtgtgtgaacctgggaaaccagacaaaaagttatctgcttccaaaacagaatggtgggacaggcatagaatatacattcccattctgtaagggagaagttgcagggggnnnnnnnnngaaagaatcatggttcccaagcaagtctgaagctagcgggggaaattccattccattttaaggcttgaaaataatcctctttggctagatgttctgtcctcagggctcacaggggaggggatgcatagccctgccttccaggcacagggtcacaggagccccacccccacagccctgggcaatagttctaccctctacaaccaaggaggagccagtcgctgaaccatctttgaagccattggtccttcatttcatcctgtctctgtccctttcagtccatgctgtcaatgtttctgctggtataaaattctcaaaaaccttattggcctcccatgcaagtcatgggggtccaagcagtcagacaagagggcactccgcggatctttttcagataaccacctctctatttctggcatctactgtggaggttgattggatccgtgagtcacgtacctaatttcgttagcacatggctgtccagccacacccttggcattctctcccaatctgaggtactgagagttaagcacttcgatgtagcagtttggcggggtggagcgcnnnnnnnnnacacaattcacagctgaaatatttctttacttaagctaagactttatcccaattttggtatatctgaccagtcttactaaagctacattttg

SEQ ID NO: 181505 - DNA, 1363 bp, Homo Sapiens
  misc_feature (228)..(282): n is a, c, g, or t
ttggctgggtgtgacccagcctctttcagcccccagcccaaacagcagaaataggcataatttctgctgtgacaccccctacccacaaattggagagtatatcttgctatactctataccaagcctctttctagaatttttccaacaggttttgttttgttttttggcttaactcagaaccatggtgagcgttctgctttgttttgttggagacagggtctctgtcannnnnnnnnnnnnnnnnnnnnnnnnnnnnnnnnnnnnnnnnnnnnnnnnnnnnnngcccaagcagtcctcccacatggtgagctttgaatgggcatagacagggttcccagcccaatagtcgggattggggtataggttctacatgggaaagtatccagtctcttgctttactcagtgtcctgtgaccaccagaggcatgagagggacaacacactcttttcgctctaccacaaggggtgactagaagatgagcaagtctaataaaaagatacggccttatttgttatttgtctgacaaccatccttacgatggtaatcctgtgagtgcctgatggacatctatctttgtgtttttctcaaaccatggaaggttgagaggaatatacagtatctgggggctgacttactctactagctaggagcatcacagcagagagataggacagagaccagagtcatgccagcttggggtcttgggaagagaggcagatggttactctgttctggaatgggactctgcagctctatgcagtggccaacattctgagcactttgtgcaaatgcttgtagagctcaagaacgtctccatccagaaccccttccccatctgcagagaccatgtccaggcctttcttgtgtctgcagaggtgaagtgcacatgtggaaagggatcaaatgtagcacagtgtaaagaaagacagcaacacaggtagagggacccagtgtgtgctgggaggtggctgtggaaggtaagtatagacctacatctctgttggggaggtggtcagggcagaatggcctgggtgtttagcagcttctaggggtgagggtggcaggaccccaaaaccaaggccctctgcatcgttgttgtaataatcagctctggcatattcagctgcaactgtccctgaagaagaggtttctgagctggctgaccccatgtaggagggtgttaccttgtagaaaaagctggagggacctggtgggacagtgcagtgaggcagggtagaaatggtcagttgtttagggccagtggccacatacccaaataccaccaatgtgcccaagggccaaactgcctttaattctgagtgctgtgtgttctgcaggtgacagtttcctgaggagaggggtg

SEQ ID NO: 181506 - DNA, 1537 bp, Homo Sapiens
  misc_feature (1287)..(1341): n is a, c, g, or t
ttgggttagttcctgcctgggtttcattacctttaactgaggaggttgaaatagatgatttctcatgtctcttctactcctaaattctatgattttagggagaaaatccccttcaacattcctgggatatatatctaatagtcccatatattgtgaaacttccctattgacgataaagagggctggggaaggctacaagtaagtatatcctattttctctaatctttaaaggttttcccagcagagaaaagacagtaatcaatgatggcttttacaaagtttgaggaaagctgatcctgcaacttttcagctgcaatttcgtaatgtagacttcagcaacagcaatttcaaaaccactgcagttttaaaaaatctgagttatatactttgaagatttatcttcctaaatttctcttttatcgcaaaagtaaaaattgccatccctaacttgtgtctctgtgatatcacaaatgaatgtaatgtatgcaagggtgtgaaggaatgatatagttgacagtagcaccttgcaaatggattttttaaatttagtaacccaaattaaacacaatgggtagaactttcccgagtattttgaatgaatattctgggttgtctttactcactttgtctagctcactaaaaaataaagtatgtgtaataattactgcaggtgcacattattcactcactccttcacttttgaaatagactccagactattaccttttatttgtgtatgttgaagcttgtgagtgtttgaaatcaaaaacttcaaactacagattcagatgactgcatttctcgttgagttgatgtaatattcttctactcatccataaatatggacccgaaggacaagtataatacagatggggaaggtgctatgaagttcataaatttatctttccgtggaagtcatttctgaactgagttgttcaatattttagcgatatcagtatagaatagatgcctgtgggccaaatttttttcaaggaaggagccattccctgctgtttgacaccacattctgtattgttttgtacactgtgctaggttcctataaatgattatcttactgaccagttgaacatttctatgaatataagccagggagtttttttcttgctttttccctgactcttacctgttttcataggttctctttgtaaagaatccttttctggtcaagtttcttcttcatcactcatgccacttactccattctggaccctccttcagtcaaatgttcctgtgcttcaacctccattacccttggaaatgccaccnnnnnnnnnnnnnnnnnnnnnnnnnnnnnnnnnnnnnnnnnnnnnnnnnnnnnnngcggaagatggtgagatccaggaggtagagatggaggatgagggaagtgaggagccccctgccccaggaacagaggaagatacccctttgaaaccttcagcacaaaccacagttgtaactagccagagttcagttgattccaccatctctagttcttcttccactaaaggaataaagaggaaagctacagaaatta

SEQ ID NO: 181507 - DNA, 1374 bp, Homo Sapiens
  misc_feature (491)..(857): n is a, c, g, or t
  misc_feature (1067)..(1075): n is a, c, g, or t
tatatgtgtgtgggtgtgtattaggaaaagtagtaaatctaaatctagactttctcattctcacctaggttcttatatttttaattatataactagttacataacattatttatataatactagttatataactagtgctctattattttccttctattttaatttttctgttaaaagaaagtttaagaacatatgtatccatatatgtatatacacatgcagaaatatatatctgtgtatgtgtgtgtgtttatgagtatatatattcaaagttctgaaacgtttttcaaagcaatgctggcaatggaattctcatttctatttatcttttctgtggaggtttaagtatgatttatttgggaattgctacattatcctgacaaaaatataacagtagtggcaatatataatcccccaaaaatgttatatctccagataacttttaatgagttggcattgactagtatgagaaatacaaggcacagagagnnnnnnnnnnnnnnnnnnnnnnnnnnnnnnnnnnnnnnnnnnnnnnnnnnnnnnnnnnnnnnnnnnnnnnnnnnnnnnnnnnnnnnnnnnnnnnnnnnnnnnnnnnnnnnnnnnnnnnnnnnnnnnnnnnnnnnnnnnnnnnnnnnnnnnnnnnnnnnnnnnnnnnnnnnnnnnnnnnnnnnnnnnnnnnnnnnnnnnnnnnnnnnnnnnnnnnnnnnnnnnnnnnnnnnnnnnnnnnnnnnnnnnnnnnnnnnnnnnnnnnnnnnnnnnnnnnnnnnnnnnnnnnnnnnnnnnnnnnnnnnnnnnnnnnnnnnnnnnnnnnnnnnnnnnnnnnnnnnnnnnnnnnnnnnnnnnnnnnnnnnnnnnngagagtctacacatttctttatataagatatacttgttttctgtttatagttagcaattacaaagtttacagtaaaatttttacttacattcatataacatttaagttattctcaaaattttatgcaaccattttagatctaaagtggactttgtttttttccatagaataagtattttgtaggacttctcttcaatattggtgtgtagnnnnnnnnntgtgaacttcaagtttcaatcaattaaacttttgcttaaactgaaaaaccatgccaacacacaaaaaggtcatctggggtgtgccattacattaggattacatactggtactacacactcagttgtgtaggacataagaatggattatacttaaacctctaaaggatggcctgaattaaagtgatagaaaatgggagttaatattgctagtgttaccatgtaaaatttaataattatttgcttaattattgtcttattaatttaatagtttctaaagagaaatttcattaacaaattaa

SEQ ID NO: 181508 - DNA, 1435 bp, Homo Sapiens
  misc_feature (157)..(168): n is a, c, g, or t
ctttgtacaaaaaagttggagttaaaagacctaacaaaacataaaatgactagtaccaggaattgtgaccatggtttgttctggtaactgtggcatggcatggtttgttccaggaattgtggcatggtttgttcatgtttacattctgatgtcctannnnnnnnnnnnaatttctatgtcctttccttttccttggtggtgtcattgttctgtagctgtatgaagaaactaaacttttctccattttcaggaaagcaatctaagaatcttgagtgcctcttcctttgttaatttctcttaagatgtgacttttttaaactactgcatcaggaaatattgtaaaacagttttgccttgaatatttgtgatgaaatctacgatgatcttcaagattctcttaattttgctaatattcagctgatcagaatttgtttttaaaatgtctggctggtgggtacttcccactgacaactgcttattgcttacagtatgtctgccttgtcaatgaatgaggttcagggtgcttcctagggatcagagtcagtaccatttttctctttcatctacagctgatcagatgtttattttacttacattaaatgaatgatggagatccaaagtgaatattatagaatattattctaggatcaacatcttttgctttgaaaaatcaacatctcttggcttttcctcagccaacccagcaaacagagattatcagactctgttgattttttactttcatttggcattggcctttttcttactgaaattaaaaaggctaatgatttgcctggtttctgtctctgacctttgcaggtctattttcttaatttttagatactatatatctgaaactttttttaatgtgtcaactttttaatggatagaaaatagacacgaatagtgattatgtgttcatttttcaattttccagaataactgaagtgaagtgatggactccgatttggagagtagtaagacgtgaaaggaatacacttgtgtttaagcaccatggccttgatgattcactgttggggagaagaaacaagaaaagtaactggttgtcacctatgagacccttacgtgattgttagttaagtttttattcaaagcagctgtaatttagttaataaaataattatgatctatgttgtttgcccaattgagatccagttttttgttgttatttttaatcaattaggggcaatagtagaatggacaatttccaagaatgatgcctttcacgtcctagggcctctggcctctaggtaaccagtttaaattggttcacggtgataactacttagcactgccctggtgattacccagagatatctatgaaaaccagtggcttccatcaaacctttgccaactcagttcacagcagctttgggcagttatggcagtatggcattagctgagaggtgtctgc

SEQ ID NO: 181509 - DNA, 549 bp, Homo Sapiens
ttggccttaatttaaaaacacttcattacaggcgtgagccactgcgcctagccgtcacatttctaaacaagcatgaaaggggttcatttttgtcttcttcttgcctgccgtcagcatggtggaaatggctctgcctatgctcatgcttctggtgcccaatgccttgcactgtgccattcaacactatgaagagaaacaagtagccacacctcaaaataatgtggctgtcaactggcctaaataaacctacacaaaccagtacttgccttttgctggaaacattgattatgtgctcctcacgtagtagaaagcggtatcctgattagtctaacagttgtgttagactttagggccagtattgtcagcatttatttatttatgtacctttgttatgatgggatatttttcatttgaaacttgttcataaaaatgtcaatgacattgatgactgatttgtacatatttttcatatagttttgtttaaaaaataattcatgcaaaatcttgaagtcatttttgctattgaaataaaccttaattaaaatattt

SEQ ID NO: 181510 - DNA, 1269 bp, Homo Sapiens
ttggcgtggggccactgaccgccactttgcagggccccattttgtggctgtgaacaacaagaatgaaattgtagtaacggacttccataaccattcagtgaaggtcagtgtcttccctccctccgtgaccactgtcccaacatcctttcctcttccacaagactcctctctattttacctcctccttttcccctttgagatcattcactcaaacaatacacatttacacatttatgcatggctgctttgtcccaggcagtatgctagaagctggagatacagtgatgcacaaagcaaatgtattctgtgtcttcttgattatagtctagtagggaagagaaaaaggtaaccaaaaaattacaatatgatgtaatagattctgtgataggaaggtgcagggaactgtgggaagggatacagaagtgtatgattcaggaaagactatatgaggaggacctcaagcacaagtgggaattaaatggaaggcagaggaggacgagagtgtttgagacaaaagacacaggaagagccaagaatgcaaggtgggaaccttaatagtgtgttcgagaaatcacaagtagttcagactcagcttgaggaggggaccgtgaaagctgagagtgaggcttgtgtgcccccttaaggggcttgctctcctcccaagagctatggggagtcacaggattgcaggcaggggagtgatgcagtcctgtgtgtcttagatcactcaggctgaggcaagactgagacaggaagatcaatcttttgcagtgatccagatgagaaatgatgtgagcctggaccgtgagaaagacgagacagtgtatgcatagggtatagacttgagagagggatttgagatggaatcaagagttgtgttaattcattggcctatcaaacagagaagaaattggagtcaagagtgactcatggccagctgggtggcaccagtcattgagatagagaactaagagaactgatttcccaaagaaaatgagctgttagatttgatattcccaatggacatcagcaagagatgtctactaggcagtagggcacatggatgtgaagcctatgaagcagatttgggctgtagctgtagatctgggtgggggttctcagccctggggcttcaccctatcctcctccaaagccctaccctctgcctgaggccaggtccccagtccctagccccttcccccgccaggtgtacagtgccgatggagagttcctcttcaagttgggctcccatggcgagggcaatgggca

SEQ ID NO: 181511 - DNA, 879 bp, Homo Sapiens
  misc_feature (589)..(610): n is a, c, g, or t
ttggttttatctccaagtctaatgtgcagactgtaacttctgggccaaacctggcctgccacctgtttttatacagcttgtgagttaagaatagtttttacatttttaaatggttgaaaaaaatctgtggaataatatttaatgacacataaaaattatatgaaattcaaattctagtattcataaatttcattggtacaaagccatgcccactcatttacacaatgtcaaggttacttttgtttttctacagcagagttgagtagatctgatagagaccatatggcctgcagaacttaaaatatttgctgactggtcctttatagaaaaagcttgccaatccctgaaacagcccggatacagaccaaattgctatatgtttgaccaagttatcaaaagccaagagagatacactaactctccaaagagtaacacacatacttaaaacaattttttgccaagtctattaaatattttgatatactaatgagagcaattaccaccagttcaataagtacacccagaaaatgagaataaaaatcttcaacaaggcaataaaccaccatatcatttatgttatagtttatannnnnnnnnnnnnnnnnnnnnncatttacttttgcagacacagagattgactttccttaatttgattttattcattcagaacttaggatacttttcacctgaagtattcttttgcactgttaaaaaagttacttgtttagcagagaagggaaattagaggaagggatctgcaacttgttgagtgccagcttcattccagtcagtctgctaggcacttacatgcatttgctcatctgtcccgtcaaccccaccccaataaccctaggagatgggcttcactatctccatttt

SEQ ID NO: 181512 - DNA, 1506 bp, Homo Sapiens
tacaaaaaagttggcagaggaatgcccgccacggatgcgtgcatgtggtttctcttggactcggaggtggcaggtgctgccagagctgtagctgtgttggttcacgttccccccgtctggagtggatttcagcagatcaggggattattctctgtctctggaacccctgtcttcccatcttgcccagtaagaaaagcagatcaaaatggcgtgagcatggcgggggccggagcgttgcctgcctggcaggctcccctcccaaagctggctggttgtctccccggaagatttgaagactcttgtcctccgttgtatagttaggctggagactctggggaagccagcagtggtgggccggctcactggctcgtagaaagaagggcaagggatctgctagcggtaacagcgtttgcccattcccatggtgtaaacacccttactgtggcctgtttcgtgctgccactgggaggctgctgggaggggcactgggaagagaatgcatgattggctgtcatgagccctttccctcctgagtcaggtcctctgcggttgtcacccttgggccatcgtaatcccatgggacaggcagtgaccaccgtgaccttcctgagcatagggcttctctcatcctccggtgcccggaaagcctggagtgactggtgggtgaggctggcagcatccagtctaggaagggcctgggtccagcactcggaagatgccatgcaatgaccgaggcacccagggcaagggagaagcctggactgggaggggagctggtgacatggggcaaggcctttgtacggccgcctactaggtattcggacctgtttgttctggcaccttccagtacgttctcagaaccattaaaaccaataaaatgacaccagctcctgctgccctgtgacttatctctattaaaaactactttgactgcagatacggactcagaggaagacgaagaattcctgaaggacgagtggcccgcccaaggcccctccagctccaaactgacgccttccctcctgtgtagcatggtggcaaagaacagcaaggcagctggtggccccaagctgaccaagaggggcctggcggccccccggactctgaaacccaagccggccaccagcaggaagcagccgttttgtctgctgcttcgagaggccgaggcgcgttcctccttcagcgactcttcggaggaatcgtttgaccaaggttactagctccaaacacaaaataccttccgtgtttcctagcgagagagtgcgtgcgagtgagcgagagggaagcgagtgggcgcacgggagagatggtgggtgaggaggcccgtgcggatggccgcaagaaggctgccatctgggttcttggcagcgtagcctgctgttatcagccgaatgattttgatttttgctttgatttgtactgtatcattgtgataatatccccggctggctctttttgagctgttatatggactgcttttgagtctgcgtttctctccacttgccc

SEQ ID NO: 181513 - DNA, 1651 bp, Homo Sapiens
  misc_feature (199)..(217): n is a, c, g, or t
  misc_feature (1186)..(1246): n is a, c, g, or t
ttggctttccttctcatttaccttgttggcttagagtattagtaaagtttagttcacacccattttccttttcagttctttgctgacttgattataatttattttgtttttcctcaaaattctataaactgattctgataactgttcctatattccagcatttattttagtttacactatacattctttcatttcctcnnnnnnnnnnnnnnnnnnngcttcaaacattctttttctacagaatctgttgggaattaataggtgaagtttaatgggagggtaagaagaaatacatatcaagcatctactccgtgcacccaacattataatggatgttacccatacattagctaattaatatatgttacgatcttatgaaatcattatttttatagaacaggaaactgggtcagtacatttctacttacctttttattgtaaaaatctaaatgcctttaacttactttataattgttaaatgtcaagatttccttgacatttctgagatcttttaaacaaatgcagcatatccgtagttataatttttattatcaaagacaaatgccattaaatgtctgctttataagaacaatattgaatgctataatattaaatctaatgattctttttccattacaagtttaagaaattagtgtttgctttattttgtgtttattttctgtttagtcagttattctcagtcaacagtgtagatactatagaaacgtttatacattttaaaaagtcttcagaattagagacattagtgtgtagttgttataaatccacagtatttagctgtgtctatcttggttattgaagcatacatcatgcaagaagtcaaaaagaacacccttcaaatactttctgccaggcccagagttcagtgcattaatacttgcattagtataacaagcttaagaggtaggtactaatacctctttcgacaaatgagaaaagcaagttcagtaatgaaagtttactcagctgttttaactcctgggaatataaatgtagaggtaagattgcaatcttgcagcctaactccagagcccactgtagtatactctttcctaagtccagagttttatatgccataaacaaatattttaatacaagcttgtattaagggaacaaaatgagattaggaaaattgttaatgccagatatatttgtagatattttnnnnnnnnnnnnnnnnnnnnnnnnnnnnnnnnnnnnnnnnnnnnnnnnnnnnnnnnnnnnngtgagaaaaatcactcctgtataacctggcattttatataaagcaaaatacttatgtctctgatcaaatttcttaatatttcaagtgtgattaattttttacaaacaacaaatatccattaaatgtttctaaaattgctgttcagttatttgcacagtgatggcatgtttaaaatttatgtattatctgcaatatcaatgtttaatgtcatatttatacctataagccacagttcaacatcttctcaacttatttcaagtatgaaagtgtaaacattttaaaaatatgctgaaatttaaaaagtaattttacagaaattaaatttaggggtgttagtcatcctgtaggggaggggtctcaaatatgtttgctttttaaaagcttcaacactcagtgcagaaaata

SEQ ID NO: 181514 - DNA, 1529 bp, Homo Sapiens
  misc_feature (50)..(84): n is a, c, g, or t
  misc_feature (135)..(145): n is a, c, g, or t
  misc_feature (1169)..(1177): n is a, c, g, or t
ttggcgacgtgttggccaggatggtccccatctcttgacctcatgatctnnnnnnnnnnnnnnnnnnnnnnnnnnnnnnnnnnngcatgagccactgcgcctggcaaatgttttagtttttatggttattattannnnnnnnnnnggtggggggagggtggtgagggcaaaggatttgtttttcaaattatgtgtttctcaggttaacaaagttattttagattctctgccatgccagcaggtgttagagagagcctgaagtgttacatatggcagaaaataaatgtctctgattactttgctacctttaaaaaaatctatatgtgtttgcaaaacagcctagggggatctaccacctacacagcatgaattattcataagtcataggtgcacatgtatgagcaagttatttttgagaaagaaactgcctataatataataaacctgtcaggtctttgggtattgtttaatttgtgtgttgttgctgttttatctggactgcatcttggggggtactgggctctgcttctggtttttagtttgcctttgaatttactgagctactagaaagacaaaaaaaagctatttttatggtaatagaatacagaatgacttaggtgtaaaagtacacgtgaagaccatcgtagaatatacagctttggagttttcttaagacacagtccttcctactgaaaaggcttgctcacctttggagaggattgtttatattttcagcctgggttcctttatgcagtcccaacttagaggggagcttcggtttatttacactttgctttgcacgataacttgtatgcgaagacctctttatatctttcagtaggtcagagggctctttgtcctggttgaagtcccaaagtgtcagtgcagctgagaatgtttctcagcctccccctttacagaggaagggtcctggattttcataaatccagaccatgcctgcttcctataaatccatgtatatgacattgtactgtatctgatttctgtgccagtcatctgacctgattctttaaaccccataaaggtactggctatatgtagtagttgtatcctaggtaaatatggtgattaaaatacttctcttctaaattataaagataatgagttttgcattttattaaagggtcctgttattagtgacacaggannnnnnnnnaatgcttcatacatatagttcttatctaaacttgttcagctaacttcatagatcagttacttagcaaattcatactgagtcttattttgggaagtcttcctgagggaagctgtacaaaactgaggtggtcaggttcatctcttcaaagtaccagttatacagccatctaaatagcataacttatggcaaaattataacaattttttttctttgcagtaaatgatacctcatctaagaggctctaatacctaaagagtttatccttaaaagtaaaagtgactttgtaccataaataaccccaaagccactctctagggttttaaatttcttctttctttgtctttatcttttc

SEQ ID NO: 181515 - DNA, 1323 bp, Homo Sapiens
ttggcttttttaccttaggtattggcatactccacacatctgtaccattcttgagtgatcgcttaggtaagttttaattggtgacagtataatcttttgggaaataatgattacagttcagatgatgaatttaactgttcaactgctgaatgataacgggcatgaactaaaacttaattctgacagagctggatatggctgtataataaactggatcttaaatttatacttgggttttagttttaataactggaaatgtatcctttctaaatctttaattggtactttctataggaatgaatgtgatttgaactcattcatgttgagaggtaagtaaaatatttaacttataataatcaaggactcaaaagatgaaaaatagaaattacaccatcccagtatttcaggtataacacagaattagtaagatactggcaaaaatattacaatgtatatatttgtatagagaaggaaaatgaagagactgcatgtctatacctaccaaacgaaactacctgtgttctttgcatcattattcaactggcagttacacatatttcatcctaaagtcacgtaaacctgtgtggatatgttgaatcaatagggatatgaattacataaaaagaattttgtgtaactggcagtttgagcaacaatgagcttgacgtttgttgtctgatctgttaagttacatgtatatattccatctttaagttttatagagagactgggcaaagattaggcaaagactagagttgtagcttaaaatgtagttaatgtagcttccttattacagtgacaattaggaaaaaagctcaaattattgtacttgttaaaggaatttgagaggtttgtgaaagcatttctcagcaatattgcaaatttgggaatacgagttgtacagttcagtcataattgcactgcatggtatctgcactcagcagtttacacctgctagggtgttcaaaggtcagtgctatagaaattcagtatctggcatcgttggttttcttggctttgtgcttgttaaacctggtatttctactgatacagtatttgtgtaggtttctcagagtgttcagtttgatatactctaaaatagtaagcaatgcttttttttccagggtgtcaaattgagaaccaggtagatccccaccacctacagtaaaaaggaccctaaagtaaattggttgaagaaattagatcccaaagattcttggtgaattttgaagtcttcatcagtatatccatattaaaacgagatgacagaagccaaagtaattatggccagtaatggtttttatcttaactataagttatttg

SEQ ID NO: 181516 - DNA, 975 bp, Homo Sapiens
  misc_feature (258)..(489): n is a, c, g, or t
ttgggctgactactctgctatgtagtgcattttgggactgcacttatgtatgtttttgtttaacgtggacaaagacttacagataggtgcaaaaaataaatcctcttttgcaacccagaactcattgttcagtatgagttttgatacatataagaagggatattatgatacctgagacagttgattgatgggagtattgatagccataaaggttggttccaggccaggtgcaatgggtcaagcctgcaatccccacannnnnnnnnnnnnnnnnnnnnnnnnnnnnnnnnnnnnnnnnnnnnnnnnnnnnnnnnnnnnnnnnnnnnnnnnnnnnnnnnnnnnnnnnnnnnnnnnnnnnnnnnnnnnnnnnnnnnnnnnnnnnnnnnnnnnnnnnnnnnnnnnnnnnnnnnnnnnnnnnnnnnnnnnnnnnnnnnnnnnnnnnnnnnnnnnnnnnnnnnnnnnnnnnnnnnnnnnnnnnnnnnnnnnnnnaaaaggttgattccaggcctgtagaatagataaacagcatgggatatgagggaaatcctcagcagtattaattttgcattccaatttcatgttgatgatatacacaatggctttttgttttaaaggcttttatcttgagaacatggtgtctggagttaaaggtattggcatactccacacatctgtaccattcttgagtgatcgcttaggaatgaatgtgatttgaactcattcatgttgagagggtgtcaaattgagaaccaggtagatccccaccacctacagtaaaaaggaccctaaagtaaattggttgaagaaattagatcccaaagattcttggtgaattttgaagtcttcatcagtatatccatattaaaacgagatgacagaagccaaagtaattatgggctgacaggacaactggatcagtttcattaaaaagggcaaacttgaagataaatcttttgactccagctctttaaagga

SEQ ID NO: 181517 - DNA, 1525 bp, Homo Sapiens
ctttgtacaaaaaagttggcaatattgcaaatttgggaatacgagttgtacagttcagtcataattgcactgcatggtatctgcactcagcagtttacacctgctagggtgttcaaaggtcagtgctatagaaattcagtatctggcatcgttggttttcttggctttgtgcttgttaaacctggtatttctactgatacagtatttgtgtaggtttctcagagtgttcagtttgatatactctaaaatagtaagcaatgcttttttttccagggtgtcaaattgagaaccaggtagatccccaccacctacagtaaaaaggtaagattctctgtttctattgattctgcttgtttccctctatcagtagcactgccagcataacaagaacttcgtacaaatacactactaagctttaaagacttttacaatgcctcattctagagaatgggcactgttgatcatggtgtccaaaaatagttaatgtggctaaattgagacaggttatgcttccatcacagtatgcatattgcagtggtgacaatgagacctgtaacattttgctatgtttatgagtaaaaatgtaggagaaaaatgttgacttttcaatattagaaataacatttaataaggaattttcagctcttataggaccactttttttatgtgctgtatattgactgaaacattgtaatgtggtatacattactgtgtcttggatcaggtgtcaaaatataactgtactttgtacaattcaacttctaggaccctaaagtaaattggttgaagaaattagatcccaaagattcttggtaagttaattcattacttaaaaggccatgcaggttattttgttgaatactagcttttctccaaatgttattttaggttatttatttatctagcaatgctattgcaacatctatcaccacttaggagtaaaaaaaaggactaggcttacgttattatgtgtttaaacttcattattaacgatgttatgatgatgggcgaaatgttcaactgctctgaaggggctgaatgaaaatggcctttctgaacatccatttacattaaatattgcattgtatttcagaagattataaaagctcaaaggtaaaagttaccagaaacatgatcatagagcaaattcggatatgaatgggcatgggatcattgatttttaaaaatacctattagtttaaatagctattttaagcatagaattttcaataccttacttggggtgccgggtttcaggatactttggaacctaagcaacctcattcttgaaagatagatttctgtacttaatagtaaatataaatttgaaatacacatttttccacaggtgaattttgaagtcttcatcagtatatccatattaaaacgagatgacagaagccaaagtaattatggcaagtaatggtttttatcttaactataagttatttgctcaaggtgtaatggtcattaccaagcttttagaatgcagtttctcatttgctgtggacatgaccataaaaaa

SEQ ID NO: 181518 - DNA, 1094 bp, Homo Sapiens
ttggctggatgtttcaggtatctgtctggagaaaagaaaaacatattacttgacatgtcattaaagtttgttaaattccatggtgtgaataagctcaacccgcgctcttcatgaagtctcaatttctatctggtattttcatggtgttttgatataattaggaaccctgaatatagacgtctcattttaaaagagttctgaaaatgttctgtttcaaaaatgaactgaagttaggagaagcctccatatgtttatcctaagtatggtaaactatttaagaaacagttattatttcttactggattgtttgttaattcataaagttaggtcataaagttgttaattctgtattggattgtttgttaattcataaagtaaaaccatacagtgggaatttggaaaaattacctcttattttcttcacaaaataccaattattttgttttatgtaggctccttgaagttcgtggaaggctgtatgagcttctaactcattgtattcctcctgagataataatgaaggtaacccaatttcagatcttgaactttttacagctataaaatttggacgctgggtgtgtgatcatagggctttttgcagtatcaagatatcacctctttctctccagcgcattaattgcacgtatttactgaacctctatggtgtgccaggcactattagaggaatgctgaagaaaagaagggagggcctgcctaaagtgaagttatattctagtggtgtgaaaaggagaacaaataaagaagagaatttcagagtgttgtaagtgctgtaaaggaaataccaaggtgcagggatgataatggagggtggggctacaaagaaaaaagtgaagttccacccatccgttttcacaaaggtaaccacttttaacagacctcttttctattcacatagaaacaagtacgtgtatatatgtggtttcacaaaacttctcagttttccacactttagtatggatgttgtgtcatgaccatatgtatagatttacttcgttctgttaatggatgaatggttttctgttgtgtgactgtatcatagcttttccgaatatgacctccattggtggaacttt

SEQ ID NO: 181519 - DNA, 924 bp, Homo Sapiens
gaaagaaatgtgttttccagggttctgggtacttaggaatttggttgcttttgcaggtggaagtggaggtgactaggtaacagctgagtgattttgccccagttggacatgagccaggttgagcagaaagccctgggatgcggggaggggggtggcggggaaggaattgaaagttggttgtgtggtttggctttggcttcatggcatgctcacaccttgcttcgcatagcatgcttagactacagcaggagcatcaggaagtggatttctgagctcaatacaaaaagttataaataccacctataagggcaataaagatatatagttgattttcttctttgcaaggccaaatcttataggaacataagagcgaatgagttacagcctgggaatttgagccttatattcagagattttaggttgcttctgattccgctgtctagacaaaaccatgagaggatagtgtctagaaatgagaggaagctcttccaatgcagaggctagaatgtgtcagcctgtgctgcgaggcctgggatagatgtttctgaaaagtaaaaggacagctttcctactggatacttgatcctcaggctctagaaaactctgctttattaactttgttgacttcctaggcaccacatgggatccttgttcttcctccttgtaagcagtaattgaaatcagtttggcagcctggtttacagtgaccatggtggcttgtctcccgtgctcttacctcactctgttgatgttgtaaaacctccagctaacttcatggggtggctgacccacgttgctcatttattcattcaacacatattcattgaccatctactctatgccaggtattgttatcagcactgggaatagatcagtgaactattgatctatttgtctaatgggacaaattgacaaattgggaaa

SEQ ID NO: 181520 - DNA, 800 bp, Homo Sapiens
ctttgtacaaaaaagttccatgatactggctgagtttgcaatagcaggtggaaccctaactattgagggagtttgcagatacctcaggattcgtgacaatgcctttaaagatccaggagagatgttcagctactaggaactgctagcaagtatagcgcgaatggctccgagctcagacactctacagctgagagtagacacttgtggtatgtggagtacagataagccaggggcaggccacggcacgctccatgaaagctaggagggagtgaaatatcagtgatcatcgcaaggaaggaggcagacaagagtaaggcacacctgactcttaggactagcagtcagaaccaggaggaaaggttttattgctatgcgggtaggtaagaacagattttacttacatccatatagttacttaaagtccagttttctgttaaacatttttcttaatatattgagccaaaactagtccagttaagctgaacttggtttttctggagatgaattgttttaaattgacaccctattgatggctcccagttgaaggaagtgagcacattatttgtactgtgaatataaatttttgcccttttatttatcttcctttgacccatttccttaaaataatggctcaaagtaatagacttccccaaatggtggggggatgggtgggttattaatgggaggtatggggggtttagcttgagatgggacttggtcttagagctagttctaaaggttgtttacttttctagggaggagtctgctactagtcttatcagctcttaaaaacaaaaact

SEQ ID NO: 181521 - DNA, 889 bp, Homo Sapiens
ttggtgcagacatgctcctgggtgttgaagcactgcagcactgcctgggggaaactgaggggacaccctccccacagctgtggtcctcacctctgctcctcgccctccagcaggcgcctgtaggtggcgatctcaaagtccaggccagcttggagttcatcacctcctggtactccctgatcaggcaggccatgtcctgcttggccttctgcagggcaccctccagctcggccagcttgcagcgggcatcactgagggccgcctcaccctgctgctcagactgggccaccgcggcctccagcttggagttctgggaggcaagggagggttattaaggatctctgttctggcttcagggtcagaggccaggtaaccactgaccactgactagcagaagaaaaagaggccttgtctatttgttaggccaggggttgcaaattagtgctcccaggcatgtttgcacagtgtcttcaattttggaaatttaacacaataattgaaattcttggcttctttcaaaagatcagaggatctggccacactggacctgcatttctgcagggcctgcctcagttggatctgcctagccctgccttttgtgctttccagtttaccatagtccctatcatacccaagtgccttgggaacagcttgcttgcttcgctcatttactaaccccattgatgtctgaatgtgtgatcactgatctagaacaacaggccagagaggttaaatgcctttcccaagtctcatggcaaactagtggcagagcttgtttgagagcccaggtttcctgccccttagactggtgctatttcctctgccccactctgcccttggaagcacctcattccctccatattgccccaatgcctccattcagcgagaa

SEQ ID NO: 181522 - DNA, 1143 bp, Homo Sapiens
  misc_feature (334)..(381): n is a, c, g, or t
  misc_feature (704)..(719): n is a, c, g, or t
ttgggggtttttttcctttaaagagaatagtgttcacaaaatttgagctgctctttggcttttgctataagggaaacagagtggcctggctgatttgaataaatgtttctttcctctccaccatctcacattttgcttttaagtgaacactttttccccattgagcatcttgaacatactttttttccaaataaattactcatccttaaagtttactccactttgacaaaagatacgcccttctccctgcacataaagcaggttgtaaaacgtggcattcttgggcaagtaggtagactttacccagtctctttccttttttgctgatgtgtgnnnnnnnnnnnnnnnnnnnnnnnnnnnnnnnnnnnnnnnnnnnnnnnngtctgtctcgcttgctcgctctcgctgtttctctctctttgaggcatttgtttggaaaaaatcgttgagatgcccaagaacctgggataattctttactttttttgaaataaaggaaaggaaattcagactcttacattgttctctgtaactcttcaattctaaaatgttttgttttttaaaccatgttctgatggggaagttgatttgtaagtgtggacagcttggacattgctgctgagctgtggttagagatgatgcctccattcctagagggctaataacagcatttagcatattgtttacacatatatttttatgtcnnnnnnnnnnnnnnnncctttcaaacagagcattgtgatattgtcaaagagaaaaacaaatcctgaagatacatggaaatgtaacctagtttagggtgggtatttttctgaagatacatcaatacctgaccttttttaaaaaaataattttaaaacagcatactgtgaggaagaacagtattgacatacccacatcccagcatgtgtaccctgccagttcttttagggatttttcctccaaagagatttggatttggttttggtaaaaggggttaaattgtgcttccaggcaagaactttgccttatcataaacaggaaatgaaaaagggaagggctgtcagatgggataatttgggaggcttctcattctggcttctatttctatgtgagtaccagcatatagagtgtttaaaaacagatacatgtcatataatttatc

SEQ ID NO: 181523 - DNA, 853 bp, Homo Sapiens
  misc_feature (67)..(112): n is a, c, g, or t
  misc_feature (435)..(450): n is a, c, g, or t
ttgggtggcattcttgggcaagtaggtagactttacccagtctctttccttttttgctgatgtgtgnnnnnnnnnnnnnnnnnnnnnnnnnnnnnnnnnnnnnnnnnnnnnngtctgtctcgcttgctcgctctcgctgtttctctctctttgaggcatttgtttggaaaaaatcgttgagatgcccaagaacctgggataattctttactttttttgaaataaaggaaaggaaattcagactcttacattgttctctgtaactcttcaattctaaaatgttttgttttttaaaccatgttctgatggggaagttgatttgtaagtgtggacagcttggacattgctgctgagctgtggttagagatgatgcctccattcctagagggctaataacagcatttagcatattgtttacacatatatttttatgtcnnnnnnnnnnnnnnnncctttcaaacagagcattgtgatattgtcaaagagaaaaacaaatcctgaagatacatggaaatgtaacctagtttagggtgggtatttttctgaagatacatcaatacctgaccttttttaaaaaaataattttaaaacagcatactgtgaggaagaacagtattgacatacccacatcccagcatgtgtaccctgccagttcttttagggatttttcctccaaagagatttggatttggttttggtaaaaggggttaaattgtgcttccaggcaagaactttgccttatcataaacaggaaatgaaaaagggaaagggctgtcagatgggataatttgggaggcttctcattctggcttctatttctatgtgagtaccagcatatagagtgttttaaaaac

SEQ ID NO: 181524 - DNA, 1323 bp, Homo Sapiens
  misc_feature (599)..(612): n is a, c, g, or t
tttgtacaaaaaagttgggtgatattgtcaaaccaaaaaaacaaatcctgaagatacatggaaatgtaacctagtttagggtgggtatttttctgaagatacatcaatacctgaccttttttaaaaaaataattttaaaacagcatactgtgaggaagaacagtattgacatacccacatcccagcatgtgtaccctgccagttcttttagggatttttcctccaaagagatttggatttggttttggtaaaaggggttaaattgtgcttccaggcaagaactttgccttatcataaacaggaaatgaaaaagggaagggctgtcaggatgggataatttgggaggcttctcattctggcttctatttctatgtgagtaccagcatatagagtgttttaaaaacagatacatgtcatataatttatctgcacagacttagaccttcaggaaacataggttaagcccccttttacaaagaaaaagtaaacatacttcagcatcttggagggtagttttcaaaactcaagtttcatgtttcaatgccaagttcttattttaaaaaataaaatctacttataagagaaaggtgcattacttnnnnnnnnnnnnnnctttaaagaaatgaaagaagaaccctcttcagatacttacttgaagactgttttcccctgttaatgagatatagctagatatcggtgtgtgtatttctttattattctctggtttttgatctggccttgcctccagggccaaacactgatttagaaagagagccttctagctattttggcattgatggctttttataccagtgtgtccagttagatttactaggcttactgacatgctattggtaaatcgcattaaagttcatctgaaccttctgtctgttgacttcttagtcctcagacatgggcctttgtgttttagaatatttgaatttgagttattgggccccactccctgttttttattaaagaacgtgagcctgggatactttcagaagtatctgttcaatgaaaaaaagttggtttcccatcaaatatgaataaaattctctatatatttcattgtattttggttatcagcagtcatcaataatgtttttccctcccctctcccacctcttatttttaattatgccaaatatcctaaataatatacttaagcctccattccctcatccctactaagggaaagggtgagtgtatgtgtgagtgtatgtgtatgtatgatcccatctcacccccacccccattttgggagtcttttaaaatgaaaacaaagtttggtagtttggactatttctaaaagcagaagga

SEQ ID NO: 181525 - DNA, 251 bp, Homo Sapiens
gtacttttagtagagatggcgtttcaccatgttgggcgccctggtttcaaactcctgacctccagtgatctgcccacctcatcttctcaaagtgcagggattaaaggcatgagccaccatgctcggcctaaatgaagtttttgtcaacattgaagatttggggtatatgtctagcagctcctttgcaacatggggtacatgtcacttgtcttcacctttggggctttgtcttataaggttctgtgacccaa

SEQ ID NO: 181526 - DNA, 675 bp, Homo Sapiens
ttggcaggacataagtctaggtgtagaaatcctttcctttatcatagaggatatggtttacattaccgtttgttttcattgtgattgcccctatgtaacaatcatgaatattagattttttaaattgtagaatatcctaatatttatagccagcagctgttactttgtttgtaaaatttgcaaaaaaacaaaacctgaagttggtttattgaaagaattataaggatagcttctagggatattagtaatagattgccatgatcctgaagcctcttctcagaacactgtgaagataatactgacagtagaatcagtgaaaacagcctaacaaaacctctgacatcagtatatcaacttttaacagcccactcactggcttttctaaactaccaaaaaccacctgtaggatactgcattaagtcagcatctcagaaacagtggtgtgagtaactgagtcaaattgtcaagtactttggatatacatagtgtcgagctttagattggtatgaaattaaacagcaatgcaaatagatttaattcctatttactttaagaatgaaaaacaatgttcattttcctacctaaacagggtggttcaacataaaggctgatgttgtgtccgttttgtattttatcttttgttaaagatacataaatgacaatacttaactgtga

SEQ ID NO: 181527 - DNA, 1103 bp, Homo Sapiens
  misc_feature (361)..(448): n is a, c, g, or t
  misc_feature (785)..(795): n is a, c, g, or t
ttggctgaatttgtcatcagatgcaaagttctattccctaatggaatggaaggaacacaaaacttaagagtgaaatggaatactaagatgtttttaaataggcaggactatgctactcacttgaggctggagtgccaccactgcaaaatctttttaagttttgtaaaaaggagcatcttgaatccacttagataaagagagactgtgtgtgtaggtggatttttcccaaaggatttgggaattgtaatgttacaatgaactgtatggatatgtttgtcatgtacattttcaaacaaaaaggaaaactgaaagtagtgatctttgtatacccatctcttagattcagtgattttgctatatnnnnnnnnnnnnnnnnnnnnnnnnnnnnnnnnnnnnnnnnnnnnnnnnnnnnnnnnnnnnnnnnnnnnnnnnnnnnnnnnnnnnnnnnacacacaataagatatcttggagatgggacccaagtttaaacacaaattcacttgtttcatatataccttatgcacatagcttgaaggtaactttatataacattatttttaataattttgtgcattgagaccaagtttgcataccttgaaccatcagaaagcaaaggtgtcattatctcagcaactcatgtgggtaatttgtggttggttgatgtcaccatcattcctgactgaatgtatatgctaccaataagcagttattttcttatacttattcatgcataagtacttaacagtaaaaaatatgacataactcgcacaggaacaaggagggcnnnnnnnnnnntttgacacacccctgatacagggaaaaaataatgtggtcagggtagttgggcaacagtggctccaccagaaacctgtatcagctgttaaacggcacaacaaatggcgggctttcagtttcccacttaaggatgctgtattttaaaaggttattgtatactgtaattttatttttgtaggtgaagagaaacagaagcagctgaagggccaggaagtgggtttttttggggatggggcattttgcgggagggctttttaaaaggggttttttcctttagggggaccgaataaactgtgttgggccccggc

SEQ ID NO: 181528 - DNA, 982 bp, Homo Sapiens
  misc_feature (239)..(326): n is a, c, g, or t
  misc_feature (663)..(673): n is a, c, g, or t
acaaaaaagttggcaccactgcaaaatctttttaagttttgtaaaaaggagcatcttgaatccacttagataaagagagactgtgtgtgtaggtggatttttcccaaaggatttgggaattgtaatgttacaatgaactgtatggatatgtttgtcatgtacattttcaaacaaaaaggaaaactgaaagtagtgatctttgtatacccatctcttagattcagtgattttgctatatnnnnnnnnnnnnnnnnnnnnnnnnnnnnnnnnnnnnnnnnnnnnnnnnnnnnnnnnnnnnnnnnnnnnnnnnnnnnnnnnnnnnnnnnacacacaataagatatcttggagatgggacccaagtttaaacacaaattcacttgtttcatatataccttatgcacatagcttgaaggtaactttatataacattatttttaataattttgtgcattgagaccaagtttgcataccttgaaccatcagaaagcaaaggtgtcattatctcagccactcatgtgggtaatttgtggttggttgatgtcaccatcattcctgactgaatgtatatgctaccaataagcagttattttcttatacttattcatgcataagtacttaacagtaaaaaatatgacataactcgcataggaacaaggatggcnnnnnnnnnnntatgacacaccactgatacagtgaaaaaataatgtggtcagggtagctaggcaacagtagcatcaccagaaacctgtatcagctgttaaacggttttctacaatggcaggctttcagtttcccacttaatgatgctgtattttaaaaggttattgtatactgtaattttatttttgtaggtgaagagaaacagaagcagctgaagggccaggaagtggatctttctagggatgtggcattctgctggatggctttttaaaatgggttttttcctttagggagaccgaataaactgtgttgtgcacctgc

SEQ ID NO: 181529 - DNA, 772 bp, Homo Sapiens
  misc_feature (411)..(498): n is a, c, g, or t
tgagccaccgcacctggccagtttactttaaatgtggtgtagtctcatggtaaactgaatttgtcatcagatgcaaagttctattccctaatggaatggaaggaacacaaaacttaagagtgaaatggaatactaagatgtttttaaataggcaggactatgctactcacttgaggctggagtgccaccactgcaaaatctttttaagttttgtaaaaaggagcatcttgaatccacttagataaagacagactgtgtgtgtaggtggatttttcccaaaggatttgggaattgtaatgttacaatgaactgtatggatatgtttgtcatgtacattttcaaacaaaaaggaaaactgaaagtagtgatctttgtatacccatctcttagattcagtgattttgctatatnnnnnnnnnnnnnnnnnnnnnnnnnnnnnnnnnnnnnnnnnnnnnnnnnnnnnnnnnnnnnnnnnnnnnnnnnnnnnnnnnnnnnnnnacacacaataagatatcttggagatgggacccaagtttaaacacaaattcacttgtttcatatataccttatgcacatagcttgaacgtaactttatataacattatttttaataattttgtgcattgagaccaagtttgcataccttgaaccatcagaaaagcaaaggtgtcattatctcagccactcatgtgggtaatttgtggttggtttgatgtcaccaatcatttccctgactgaatgtatatgctaccaataaagcagttaatttttc

SEQ ID NO: 181530 - DNA, 2129 bp, Homo Sapiens
ttggccccctcccaggatccctgtactcacgtgccagtctcctgactagagcactttactctgtttcctcagccctgcagcccctgggagcacacactgggtgcagccctgggccaggcacgggaggccctgccctgtgctgcccaggggctgtgtgcaccacatgagcacatttccctctggcctggcggcctccaggctggctgtggaaacagttcctgaggaaattagagattctatgaattgtaggagtattaaagaccaggctgttggcaccagaacttaaagcgatgactggatgtctctgtactgtatgtatctggttatcaagatgcctctgtgcagaaagtatgcctcccgtgggtatacgtttttaccttttttaaaaaacatttttgtagaaaaaataattaaatcccctttttggaaacttactgcaggttttgtgccttgacaacctctccctatgtgaggtttgtaaaaagtgtcctgtgacttaacacagaaacgcaataaacacacacaaaatagtttcatgagtgatgcttcagatgcccttcccaactggttagttgatcaagaattttgggggtgggggttgcggagaaatcaagtttaaaattccttctgattaaaaaaatatagtggaatacaattgtctgccgtttccccttcttaatgtatatattgtgagtatttattagattcgtaggtcatattacttatcaactgagccaaatgtctgtgtgcaattgtgtttcctttaccttgtaaaattttgtacagcataaataagtaaaaaaatcactgtttttctcaactttttcaaaatcaaggattgtaaatattgtagattctttttctgtgtgatgtgtcctactgtttcataatgctgtaacttgtagaaatattgtatatttattttctgcttatttaatgtcttaatttctgaaaagtattaacatccctgtctcccactcccctgccgtcccatgaagttaactcctgagagttgtcgggggtgactggagagctcattgcagaccacgtggtcctccagggtggctctccaccttcgggtcctggtatttccagtcaagtgggtttcaattcttgggctttgccgcccttatgatgaagtgtgtgtttgatgccagtgagaaactcagtctggcaggctacaaaattctactccaagaaatacccagcaaccttctgtttgttccaaagcaactagcttatcatgcaagcaaattttgctgactccaggctttatctttaggaaaacaaaaaaaccaaagtattatcagcaggtgggaaagatttttctattgaaaatttatccctgacaactcagcgtttagaaaagaaataaaatgtgccacttccagaggtgctgcattgcagttgttcagggctagggccaggcaggacaagtgaatgggtgggacaggtggctcctgcctaaggaccacctcaggccactaaccccttgtggacaactgtgagtagctgggttttcccccacctgctgtgcaacttcctgtgctttgaggttggactaacttgtcttcaggagctaattaactgtacagccctccccacgccccacccatacggtcactgcatttggtcagcctgcttcttcaggtcgatgccctccttctgatactccatctccttcaggggaggttggggccccactggactgggtgtcaagatgtgaaagcttatgggagctttaaggagacttcatggtggttccatgcaggtggttctgccatccctgctgatttagcctggtgcctgtgtgtgtccactcacgtacacgtggggtgggggaaacgtgtctacagatgacgctaaatcagttggggtctactctaaacagcattgtgtgtaagaagcatcctcaagctcccagttaagtaacttgactacttttatttgggaatttcagactatagaagctctcttatgttttatgtccagattctgtgaccactagttactgtatcagaactcatcaggtacccacttataaaatagcactgatctggctgtatactgatccatcactaacctgttttctatgacccaccgtatgtagatttgtattgcagttttcc

SEQ ID NO: 181531 - DNA, 1324 bp, Homo Sapiens
  misc_feature (444)..(453): n is a, c, g, or t
ttggcaattacaagtattttcttcactaatgtcagactgtgggcctttgtatatacacttttaacaaactttttggaagtgcaatacatatcgcaacaacttctcaatgctgaatcatagtattggaagacattttaagcaacaattaaactcaacttatttactaccaataatgtacataagtcagctgaagtgaggataacatgaatagcacaaatacattatgattgctgcctggccaacagtaattataagaaactgtcagttttgagatgtgtcttgatttcagagatgttaaaaaagtttgtaagttaccattgataaaatatgagtttgcttccacaaatattctttcttctgtccttctggaactcaagagtaaacatatattagattttctcaccatttcatgcatgctggttcctaggctactctctgagtcannnnnnnnnncttatctgccctccagttcactagttctgtcattttctgggtctgatctgctgcaaatgcaatacattgagttttaaatttcagtcattgtgttttcatttctagaaatttcatttgactctttctcaaattacttttccattttttttgtagtttcctatccctggagatattttcaatcatgccatttaattttttaaatacgcaagtgtagttttataatttgtgtctgataattctaatatctgaagtcttagtaggtctgtttcagttgtcctgtaattatgcatgtttttgcccatgttgctttgtttccttgtatgcttggttatctttcttactgcccttgcaaaattatttggagagtcctggaggcttaaatgaagataacttttaggaataatttgcatttgcttttgccgaggatcttgggatcatttcaaccaaaatcttagcttgaaattccgcaatcaatcaaggtgatgagaacctggtcagtaaatcctaatgagggccaggctgtggccaaagatttttagacagatgtttccctcctttgccatttctcttttctttcctcctctgctcctcttagtgtccagacaaccttcatggaagtccttggggtgggtgggaaatgaggacggcaggtttcattctaggtatagctctttgaggtctaacttaatgcagagagagttttctggtctatgtgccaccttacatgggatcttgagccttgatttctaaaccccttgcctttgatgtttcagatttgaagcttaaatttgccaacaggcaaatgtcctcaagcaaattggcttagtgttcgatattcttcttaccagaaggtaaacttgggtttttactt

SEQ ID NO: 181532 - DNA, 1378 bp, Homo Sapiens
taaaatgcaaaatgttctcagaataaaactgtgtaataatttttatacttgggagtgctcgttgcacagagctgtcatttgccagtgagagctccgacggggcaggtactgtgcccagggcagctctgaaattatggatattcttatcctcctggttccttcggtgccaatggtaacctaataccagccgcagggagcgccatttctcctaaagggctacaccactgtcaacattatcctggactctgtgtctctctctgttgggtcttgtggcatcacatcaggccaaaattgccagaccaggaccctaagtgtctgatagaggcgatgatcttttccaaagtcagtacttacaaactggcattcttacaggctgcaccatttcctagtatgtctgctttaagcctggttcaacctctcatcgaatattaaatttttctttgtaagaaaaatttgaagttgtagagcatggttttttgttttcctttgtcttaggaaagttttaagatgaaatgtttttcctttttggtcccctccccatctgaaaaacacacatttttgtgtccacaggaataacacatttagtttctttagtcttatgtttttcataatctcacaaaatgtaaatggcagctatgatttcaccgtcaactggcagcgagaacctcactaagaaccatctctgctcagcctatggactccgacatccacccagacagctggatctcgcttcaccatgtggcactttccagctctatcctacgaagtttcagaattgggcgaaggccaggcgtggtgggctgtgagggccacgttacctctcggtgcagtctcacctgtgtgagatgggaccaggggcaccacttgctttcctgctgaccctgctatgagaaaaactggagcagtttcaccttgtgtacttctcagcatcgtaagtgtctttgccaattgcatttcctagaaaagttgtactgttttgataggcagctggctggtttagaaaaaccagttagccatagaactgacatcacgcagagagccccgactccctgattagcccaccccaactcaaaatctgactccagggatgttttgttgaaaatgttatttctctaaaacagtatttcttttcctctcctggggactaggagggcaggagacaatgaggagcaggcctgggccctggttccaacatcaagagtgacagggtggtctcagggatgtcctgtgagggcagcctgagccactaaacaggtccagtagagatggtattttatctttaaaaaataagtattggatctgatgttaagttggcttatcagtagaagcatgaaaccacttctgagtggcgggacatggttggctggagaagaatctg

SEQ ID NO: 181533 - DNA, 825 bp, Homo Sapiens
ctttgtacaaaaaagttgggtcgggattaggtgaaagtacgtagttgtctttcgtaagttaaaatgataattgggccgaaacttactgccttacctaaaaggcagcgcagtcaggatattggtaggtcgggggcggctttggaaacccttaagtttacaagcatgcgcggacttgagtgctcattaggtcgccgggcgtccacgtgcagccctggaccctgaaccccggcgtgcgtgggccgtgggccctcggggaaaggttccgtgcactcggggactccggtgaagcctgttcagccgtctgtgtcatgtggccatcttgagtctactctgtcgctcttgtgccctagcaccccgagaactgtcagtttgagccagatggtgagtaataacctgtagcagtttggttgctggttaattctggattgtgaatctccatgtatctttgggacctgtcagccgtggcagtctcccttcctagccatggaagagcatatccttgtttattggcaaagctgtcaccatttaattggtatcagattctgacttgcacaagtaacattcactgttaaaaacctagagggtgccgggttattgggcaaaatttctaaaccgttgttcaatgtttctaggaagctgagctgaacacattacgatggatgatggaaacataaggtacatttcttttttgatatttctgagttaatctgaaacgccttagcggcaggacgttggaaagctaaagttggcccgttttgctggcttttgtagtttgagttaacaaccaactgaattagctgataagatctcaaaacagtgacgtaa

SEQ ID NO: 181534 - DNA, 1655 bp, Homo Sapiens
ttggcatgaaggttgctattcaaattgatcaatcattttaattttacaaatggctcaaaaattctgttcagtaaatgtctttgtgactggcaaatggcataaattatgtttaagattatgaacttttctgacagttgcagccaatgttttccctacgataccagatttccatcttggggcatattggattgttgtatttaagacagtcagaataatgatagtgtgtggtctccagaggtagtcagaatcctgctattgagttctttttatatcttccttttcaattttttattaccattttgtttgtttagactacactttgtagggattgaggggcaaaatatctcttggagtggaattcctgtgttttgagccttacaaccaggaaatatgagctatactagatagcctcatgatagcatttacgataagaacttatctcgtgtgttcatgtaattttttgagtaggaactgttttatcttgaatattgtagctaactatatatagcagaactgcctcagtctttttaagaaggaaataaataatatatgtgtatgaatttatatatacatatacactcatagacaaacttaacagttggggtcattctaacagttaaaacaattgttccattgtttaaatctcagatcctggtaaaatgttcttaatttgtctgtgtacattttcctttcatggacagaccattggagtacattaattttcttaatctgccatttggcagttcatttaatataccattttttggcaacttggtaactaagaatcacagccaaaatttgttaacatcaaagaaagctctgccatataccccgttactaaattattatacatccagcagattctgggatgtactaacttagggttaactttgttgttgttgataatactagattgctccctctttaattcttcttctggtgcaaggttgctgcttaagttaccctgggaaatactactacaaggtcaaattttctagtatcttacagcctgattgaaggtgattcagatctttgctcaatataaatggattttccaagattctctgggccatccttgacccacaggtgatctcgctggagtatattaacttaacttcagtgccagttggtttggtgccatgagatccataatgaatccagaacttcaccattgcttagatataagagtcccttggaagaataatgccactgatgatgggggtcagaaggtgtattaactcaacatagagggcttttagatttttcttcaaaaaaatttcgagaaaagtattcttttaccctccaaacagttaacagctcttagtttctccaaatatgctctttgatttacttatttttaattaaagatggtaatttattgaacaatgaaatccgtaatatattgatttaaggacaaaagtgaagttttagaattataaaagtacttaaatattatatattttccatttcataattgttttcctttctctgtggctttaaagtttttgactattttacaatgttaatcactagtaacttgccatatttctggttctatattaagttctatcctttataatgctgttattataaagctggtttttagcatttgtctgtagcaatagaaattttactagtctctgttctccagtaag

SEQ ID NO: 181535 - DNA, 1457 bp, Homo Sapiens
ttggcttcctgttttgcctcatgtatttggaggttctgttgttagctgcataccctaattagtaggatgtttacaacttcttgagaattgattattgtattatctattatctctcatctctgatactatttcttgttctgaactctgttgtgtctaatatcaatgtagtctttccacagctttattttagtgtttccatgatatggcattctccatatcttgatgataacctatttatatctctatatatttggagcaagatgtaaaatttagacttgattttttaaagatttttcaagatgtaattcttatttatttttgttctatttgacattctctgagtttcctatatctgaagtttgattttctgtcacttcttttagaatatttttggcagttattttgaaaaatatttcttttgctccgttattttttcctcttttctttttggaatttcagttgtaactagggtaggtaatttcatctcagtgttatgcaggtgctttttctcagggtcccaggaatgtagccttctcacacttctgttcttttcctggctgtgttggtgagctcagtggtattcctccttcaccttcaagagcagttttgtttttcctgttttcatactcccagcatcaggagtattctaagtgtggcagtttttgttgccttcccctacatgttaagtggaatatcttggtctatttggactcttataaaaaaataacatgaactgggtgactaaaaaacaatagatatttcttttttcacacttcttgaggctgtaagatctcaggtcaagatgctcacaaattcagtgttgatgagagcccatttcgtggttcatagatggggcgttctttctacatcctcacatagtggaaggcacacaagaactccattgagcttcttttataaaggcactaatcccattcataagggctcggcccccaagacctggtcacctcccaagtgttctgctctccctgatctgtatcatatacagactctcttggattccttaccaattgcttgagagatcacagtgggttttggggaaaaagttttcaagatgatggatctttcccaacttctgcagctgtcagcggtctcccaatctgaccggccccactttgtcttcaggaatttaatgattattccagctttacttgtcatactggtgtctatttgcatctgtcctatgtaagtgcatctgtcctctttctccttgcaagtgcttgttttccctcacattttgactcagttcttggcaacctggttgctataaaaataaagtcatgactttgaagttagttgggttctttcattgttgtaaagttaggagccctattccatcccagctctccaaaacccagaattttttgggggttgaaattttagctttctctttgaattgtagttttatcttatttcagttacaatttgcattttcataa

SEQ ID NO: 181536 - DNA, 1238 bp, Homo Sapiens
  misc_feature (425)..(445): n is a, c, g, or t
ttggctcttctagaactttgtataaatggatacatgcagtctattttttgtgtctggcttttgctcagtataatgtgttgagattagttcttgttgcatatatcagtaattttattgctgagtagtattttgtatgataatactacaacttgttaatccattcaccttgggtggacattgggattgtatcaagtcttgggctattaggaatacaactgctgtgaatattcttgtacaagtcattttgtggacattttttcccttttgggtaaataccagatacatttgctgagtcgtagggtaaatgtgtaactgtataagacactgtcaaaccattttccatagtagctgtagcattttacacagccatcggtactacttaggagattccagttgctccacatcctcgctagatattgtcagtnnnnnnnnnnnnnnnnnnnnnagttacattgaatgtataatggtagctcatggtggttttactttccatttccctcatgtacatgtcttaattcattgtacatctttagtgtgtttattggttatttttatatcttttgtgaagagtatcttttggccacttaaaaaaaatgccaggtcatttgagttgtaacactttatatattttgtcagatgtaagtataattaatattttttttagacttcagggaaactttagttttcaaagcaatctagttcaaaaatgagtggaggttaacagagaggaaaatatgaaaccagagagaatcaaacagacagaataaggggggactggcagttggtcaggggcgtctgtgacagatcttctctctcttggaaatgaggtcctcacggattctggtcagttcatcattttcttcacgtccacggttctgcttcttcctcaggctctcctcgaaggccaagacccctgtggctccaacttgagtgaatattttctttaggtttctggtttacctttttattttctgaagcatctttttaaaaaaggctttagtgtgattgtctattctatcgatttttctccttttttgcttaatgcttattttctgtccaagacgtattttgcctaccatggccacaaaaatttttgccagtgttttttcctagaagttttatagttttagttttcacatttacgtctataattcatgtagaattaatttctctgtgtatgatgtaagatagagatttagagtcttcctcaccccagaaaccaaatccaaataaagtga

SEQ ID NO: 181537 - DNA, 704 bp, Homo Sapiens
aaaatgcatctgatccttgaggcaagagctgtgggggcatggctccctcacctggatttcaaagcgtgttaccagcagcctggggacccaggctctgcctctggatttacctgcatcgtatttgcgcttcgtggtcaaagttgttaagaaaggggtgagcttctggctacctaataagttggtcttggccacctgcctgcgacacttcctggaggagccatggattattggtggaggctgcagggagctggcgatggagccactggtgtcagcagcagagagggaagaaaggaaaggaaggggccacaaatggttgaagtgggcaggtgggcacccagggagttaggggaccccgccttccagctctgggcatagaagagttagtcacatacctgaggatcctgaaacaagggctgagaaaacctcattgctccagctgagaggtagtagtggatttgccatttttaaacagttgcctaagaaaaaacgttgaagaatatgcagcagacactatatgtggcctgtaaagcctagaatatttactaaaatatttacagaaaaagtttgctggtccttgtgagaacaatgcagttcaaaaaaggatacagacagaagcatcctcttaaatcaggaatgtagtttccatttgtgggcacgaaaagatggacaagagaagtaaccaaacttcaatcttaaaatatttg

SEQ ID NO: 181538 - DNA, 860 bp, Homo Sapiens
  misc_feature (76)..(117): n is a, c, g, or t
  misc_feature (594)..(622): n is a, c, g, or t
  misc_feature (635)..(643): n is a, c, g, or t
ttggatttgcatttggtgggaaattcaggtgagtggattggctaccagatgctgcagtggtgaaaactctgtctcnnnnnnnnnnnnnnnnnnnnnnnnnnnnnnnnnnnnnnnnnntagagatttcgtatctgtcattctattggaaaatatttttgagcaattcaagaaaaaaagagttcaaaaatcttttatttaaaaccattataattagtacctcttctccctttactcacaaccttggatacaatgttaaataagttcatttttaatgtagtaaaatgacactacagaatcttctatgcactatatttctaatatcaagtgtcagtggcaaccctgtgggtctacgtctgccaggctccaatgcactcatgttcttggggttgcaccgggactatccacagatgtttcacattgatctagctgttccagtgcaacccttactcccagttatacaagttctctttaaaataagttttggatctcatgatccaatgtattttagaatgtttctttgttataactttttacaacatgattatgatgacatattgttagatatttctattgttcctggaggctaattattannnnnnnnnnnnnnnnnnnnnnnnnnnnnatagtaacaaacnnnnnnnnnctctttacagtgccattgataatagtaaactcaattgcaattgtgttacttttattatttggatgaatatcagtggagaaaatggagactcagaagaggacatgccagtagaagttattactttggtcattattggaatatttatatcttagctggctgaccttgcacttgtcaaaaatgtaaagctgaaaataaaaccagggtttctatttatctg

SEQ ID NO: 181539 - DNA, 959 bp, Homo Sapiens
ttggctttggggacaggcctggcttactggggcctttccttctgtccccaggggaccgctgagaacccaggtatcaaccagcgggccctgcagctgctcttctccgaggtgcaggagaaggcgtctgactgggagtacaccatcaccgtcagcgctgcggagatctacaatgaggtcctcaggtgggagccccagggtgtgcggagcaggcctcaggggcagctttggggtcctccggggtggtgctggaacgaggtcctcaggtgggacccccagtatgtggggagcaggcctcaggggcagctttgggatcctcaggggtggtgctggagcaatgggggataggaagtggggtcttcctgaagggagtgtagggaccagatgaggccgtcaaggtgaagggagtgtagggaccagatgaggccgtcaagggacctggctgcaagtcctgactcagcccagtgggttggatggttctggggggaggaggggctctctctgagacccaggcaatccttgcccctacctgtgggctacaccaggtggccatgggtgagagtgggcagctaggggccctgccaacaggggctcattgtattgtggagtgagatctccacgtcttcagctgaatgcggtggaggagctggaggaggagagatgcactcagctgatggctggagaaggcttcctgggttgggggaacattcctggctggggggctgggtgcagtgcaaacagcagctggaaatgggaggagggggtgactgtctcacctgcccctccagggacctgctagggaaagagcctcaggaaaaactggagatccggctgtgcccagatggcagtgggcagctgtatgtaccaagctgactgagttccaagtgcagagcgtggacgacatcaacaaggtgtggaggcgggagcccctgaccacagccacactgctctagaggacacaa

SEQ ID NO: 181540 - DNA, 1265 bp, Homo Sapiens
gaaaagaacgacattaagggaagtccactcatgaagttccactcatctactctgagaaagggcagtcccaaccaacccaactctatgcattagagtcttagttcccaaaggctcagaagaacttcaagaagatgagggaaagcttttggctagagagagttggatgattctctcttagtgtgttataaagaggagtacctaggagccagaagacctgagaaataccccatggagaacatatattaaacaaggtaggccaggcatgcaactgaaattaaagccaaattcttctgtctgagcctcagactctgcaaagagtgaagttgctcaccaccactggtccctctacagggcaaggtgtgcgtggaatgacttacccttggtaatcatttacttaatcctccagcaaaaatccactacttcacagggttaatgtgaggctcaaatgaaatagcaaaaatatataatgaagtataaagccctacccaaatgtacattattagaggaggggttgagtctggtccacattcctttgtcttggagaggaagccaagagtttggagcacactgcaaacaactttattccaaagtggcagcaaagcctttgattttatgtctattaacccatcaactaccaggtagaaccaaagagtcctgaggttggttctgaaagcagaaatgataccggatgtgaaaacaccgctaggtttagaagaatatggttccatgtagtttatgaaaaacgaaaatgcagaaggtgcaatgaatgttagttcttttcattctatggttgactgtgttaagtcccttccctactgtgtactaattagcctacagccctactggtatggaggatcacacattttggcttcataaatttatacatttatttggctttatacatttatgacttaagctttttgaggacttggacagtatattaatcctcttggtattccccagagtctggcacattgcaggggcttcataaatgtctattgacctttacatcaatcaaaagactgtttactactgagtttctatcatatatgggaaacagaaatctaagacagttactggcctcagggagtttataattaaattgggaggtgggggtggggagagggaagatctataaataagaaacaaactactgaagacagtgattaaatgttcaagtgccatagactataagtgctacagaagtttagatgcagtcaatatatgtttatgaaagaatgaatagtggccgggcacggtggctg

SEQ ID NO: 181541 - DNA, 404 bp, Homo Sapiens
tgtttaataagaacaattgatttgaaagtttttgctgcctatcaatcaagtttaaactctcaatagcttatagccacaaatatttatttcccctctcatagttctatagattggctgtggttctgctgtgcttggctggaatccactgggcttgacttcagactgctgattaggttcaaagctgctctacatatttcctcattctccttggaccagtggctaccgcagacatgttcttctcatgaagggtcactggagtcttctgaagttctttctgtgagtgttcaatcatacgaactagattttcattgtaaactttctaggcattatatccatgctgtgacattagttccagagtctcagttctaactgcttgctgctttaaccaacttttttgtacaaag

SEQ ID NO: 181542 - DNA, 1472 bp, Homo Sapiens
  misc_feature (1073)..(1090): n is a, c, g, or t
ctaacacgatgcttgtattcattaaattcagaaagactatttaaagctttatttttcaagtatacctttttctgtaaatatctcttcctttctcactctgtttatgtatatacatgtgtgaaatattacttgtaactttttaagcatttaatttgtcttgatgggcacagatttttaaaaaggaagtaagaaagattacctagtttttttctgaactatattaatgataaagcatctcagctcattttacagatgctgaaaacccttcgcgttttgttctgaaggtttttgtagggcatactgattttctatgaagtatgtggagctgtcaattttattcttttttccagagatttcagaaaattttcatttaactaaagatttccatcctggtcagctgggtctcatttacctgattaaaataggtttgcatggataaagtcttaaagcaaattctccttaccacattttgtgtgaattttttcctctttaatactaattttagtttgttctcattacaattgcatatgtaaaaaatactttttgataaagcaactgaaactttgaagttgataatttatcacaatacttttttccccattatatcaacacttggcaaactacagactgtgagcctaatccaggttgtatttccttctgtgagtaaattttcaatggcggagccatgctcatttatttacttactgtctgtggctacaatggcagaggtaagtagttccatagagactatctggcctgcagagctgaaaacttttactctctgggcctttactgcaaatgtttgctgattcctgcattactgatatcattttcataacagtcttaaaaacttggcatttttaaacttaaatacttttttctttttgtcgctttcttctctaccctatctctgccagcagttctttgtgaattaccattgtgatcttctaaaggcaaaaaaaatggtaggtagtcaatgactgatagctatagacctatgaaactaacatttcctatcttgtctcaatattctgatgtatataatcattttaaaacataataaatttaggccnnnnnnnnnnnnnnnnnnaacacaagatatgccactaatgtctgacaagcatttaatctagtggctttcctgcattttccatggatcagatgcattctaatcctctgaaatgattattaaatacagattgccagcctttatataatgcctgctaaatttaccagttgggatctgcacatatattggtaaagagtgccctagcagtttctgaccttctgtctgctttcagaatccacatgagtcaaattatctccttttatgtataatcttatcaaggactattgaggtggcacaggtggggatggaatcctggatgtgttcagaactcctttcattttactaagcttcctttatactaccagaggaatccacttccagtctcgagtcacttagaagaggg

SEQ ID NO: 181543 - DNA, 1109 bp, Homo Sapiens
tcattgtttttattttacaaaggcagaaaatgaaacaccactaggtaaaagaattaaaaatctaatcctttatttcttaaataaaacgcttgtgtaactcgtatcatgaaccataatccattctgctgcaaggtgtgtgtgcttctgtaatgtgcatcagtccatcggcaactgctaagtagggggtgataccagtataattcgaagtcacattggttcaacatgactctccccagaaagctgatgtgctgaagcaaccagaggcaaatgttcacacacctagagagaaaccctaagggatatatgaagatcttatgaaaaaggatgaaaaccctttaaatgcaaggagtagctggcttagtggcttcaaaaccacctcattcctgctgttatctgagaagctgcaagtactgatgaaaaaactgagaagacatttcacctggcaattagaaaaaagcgctgactgatagatacctctgtatcattctttcaatattgatgaaaatgctttctactagaagtgactgatttcaaggatctgtctctcaaaggaagaaacaaaaacccaaaattttgactgcaaaagattgactaattctaggtgcaaataactggaaatttaggattgttattgtactacacaggtcacaaagttccaaacctatttcccttgtaatttttagtgcatgatttttcagaatgcagtttctatctttttaggtgcaatattaagaactgattaggtcagaacaatttagtttctccagttttttctacctaagttacatggaggaaaaaaaagcaatagtaactttaaggaagtatgaaaataaagtcttggagcagtggaaaggtctggggctggtaaatggcttaggcagaagggcatgcaccggccaaacctaacagcctgtctctgaactatgtcctcgtcaaggctgggatgcacgctggcttctctacacagtctggcccagtgtaagtgctgtgaattcagtgtgtcactagtgtcaccaattcattcatcacccatcattcactcatttcacaaacacatgagggtaagacattgagacagagtacacaaaatgaaaagctctcacataatt

SEQ ID NO: 181544 - DNA, 1341 bp, Homo Sapiens
ttgggtaatcacagtttaatgacagtttatgtatatatataattcagtattccctctgataacatagttgccagtgtttaatacacttgtaacttggatttttaccttataggctatatgtatactcagttttttaaagcatttttttcagagatcacttaattccccatgcttctgcaatgcatataaaaactataaatgccgagtggtagaaactcctctttcttcatagtcctcaggctttggttacatttgcatatgccatttgaagcctccagcttttaccagtttaacatccaaagttcacagcatcagcattcatggtgtaagaacagttttgcagtataacacgatctgataatcattcagttattaaattgtaaataattattgggatggtttcttggctttaagtccactgaataaaaactatgaaattgcactctgtgtcaaccatccactaggatagaataccgaaatctgtgcatgcaaaaataggagatgggcccatttgcacacaattcgtagttatgcagtctgctatataaatatgttcacatgcactgtgtgtatgaaaatagatggtctgtgttcagacaaaagtaaaacatttttttcaaattgttatatttaaaggttttctgggagaaatttatgaaacgcaggctgtgtctatttgacatcagaaatttccactttaaaccaaaataataagaaactttaatctgtatatttacaacctttgttgagtacacttcccccttatttatacgtctgcatttccttccgagcttcacatctttctaaaatgcagcttggttttaaaataaaagaacattcattttgtgattctaaacaagcttcagtaaataccaccagtatagtactggtgaatttctcagcataaaatcgacatacctaaaaagttaataaaattcagctcttttccaatttcattgttatgcctattgaagtattaattgccaggtttgatttttagtgaagcttggagtccatactttgagcagaccaagtgaagggaagaacagaaagaaactcaggagtagagtaatatcacttctcacttacaccactttcaggcacatccaaagagttcctagatacttggaaaatgtctgaaaatttttaagtaaaatactaaacttttcagtgtttagctcaactttttgttcatttggaagtttctctccatcccgagggacttaaacccaagttttgagatttgtaagccctgagtacatacacttcctgggaggcatcctcactgctgtttgaagcaaaggatatgcatggggtggaaggacggcttcgaacctggga

SEQ ID NO: 181545 - DNA, 343 bp, Homo Sapiens
acttgtctcaaaataaattaataaataaataagaagtggggctggatgcagtggctcacacctgtaatcctagcactttgcataatttttggtgtacattcagtggctttagtgagcttgctgggtgataaaatcctggtagcactgtttctggactatgcagaaaatacccaggacttctaaaacatggtagccagcccagagttgcctatggaagttttgcctgtacctcagatgtttctctcaagtggtttgataattgaagatattaatcatccccactctgcccaagatttattcctgggtgatcttgccaaactactgtcactgatttttgtgccaa

SEQ ID NO: 181546 - DNA, 979 bp, Homo Sapiens
ttggcaagccgggcgcctcttgcaatggagacggtcatttcttcagatagctccccagctgtggaaaatgagcatcctcaaggtaagtttactgaagaaaggaaactgggcatgaaaacaatagcctgaccctaacaatgtcttcaacaatgcttttgaatctctcccctggaaaaatcaaagcagggccagataatgtgccaaaccacaaaaatcagtgacagtagtttggcaagatcacccaggaataaatcttgggcagagtggggatgattaatatcttcaattatcaaaccacttgagagaaacatctgaggtacaggcaaaacttccataggcaactctgggctggctaccatgttttagaagtcctgggtattttctgcatagtccagaaacagtgctaccaggattttatcacccagcaagctcactaaagccactgaatgtacaccaaaaattatgcaaagtgctgggattagaggcgtgagccactgcacctggcctgtagcaaataatttttaagcattctcaagatgtatgatgttgggtttaacatcatatgttcacagtgttttaaataagaaataatctgtctttagtatacaggatggttctttgtttgcctgaaaagtataagaatacaatttacttttcccaaactctttttccttatttttttctttcaaataactttaattatttaatcccatactgattaaaatatgtctgtctaaagggatctactactatttgcttttaaaaaagtgttccctatttatttaggaaaaagtgaagcaagcaactgaatttatatgtaaaaataacatttagacctgtggatcaaagattattttcaaaaatgagatatcaatttggtatcagtaaaaagtgtcttttctcttagtatataaataattaaaatgcaaattaagagtgtaagcagttgtgagtcattacaagcagtctgggataacta

SEQ ID NO: 181547 - DNA, 921 bp, Homo Sapiens
ttggtttgactttttaatctcaattgaatttattttgctgtgtattatgtatcgtaaaaagataaggttttccaaagacttccaactgttccagtcctctttttgatttttttctataatgtaaacaactaattcagagtctgtgaaaatttgccttgaaacccattaaaatgaatttattgtttccaaaaatattaattagacaagctctgaatatgaacaataccattgaatagcttctaaaagaatgagtatttccagatgttttaaattaccttttgtctttgaagctttccttattttccttgcgatatcctattttctcttttgtgacaaaaaaattagacaaacatgttgaaaattggttataattcctaccatcacatgctatttcagatagtgactaataaacacattacatcactgtaatgtctttcccatgtagtcctgactgttcttgatagaacagattcaccatccagatcttatctatgcattgatccctcaataaaggaataacccaagatgaagttggcagtgggtatacacacagctatgtcacaccaaacttgaaatactttttagaagttttaaatgctgataaacaaactcttaggacaaatcactaatgagcatggaattcccatcttcttcagatttattcatcataaatggttttcacagattttatcataaaaacataatcttctctttcattcatagtttataattcacatgatttattcacattaaccagctgtgattggagaatcacgaggagctttgagtcccatattttataaatgcttctgagaagtaccatagttaatgcccctttcaaataaataattttggatggttgtggtggctcatgcttgtaatcccacctcacccaggctgcatctctttcattgactgccc

SEQ ID NO: 181548 - DNA, 1233 bp, Homo Sapiens
ttggtgcaattatagatgctcagctagtaagtataatgcaaatattccaaaatccaaaagaaatatgaaattcaaaacatttctggtcccaagcattttggataagggacactcaacctgcagtaagtcatagggtcaacatgaatcaggactcattatccctttggtcatcctccagcattctgctttccataactgaatattttgccaacttaaagagtctgagccaccgcacatggccctgagttgttggtttgtttgttttttagttaaattgaattaaaatgcataggagaaatatgtaaccaaacctgggaaaccagagagacttcccagaggagatgatgcctgagagctcgaaaggttgagaaagttacctaggtagaaggaatgtggaagtggaaggcatttcaggcaagagcagaggtcaagggggaagtctgctatgttctagaaactgctagtcatttggctgcagtttagggttcatgagggacagtggctgcaggaggaggccaggtcatttatttgtatgttcattaattgatttggtagacactgatacatacagtgtgctgagtcctaaaggtgcgagatgaactggacaacccttgctcttcaggagtttgtgaattatctagaagatgctttatcttagatggagagcttctgaggagtttaataagggatagttgggggtaatgataagatatatattctagaacactaggacagtgtgtctcaaatcatctgtggtgaaggacatttttctattttatttctaaaccatcagagactgataaagataataaaattataaagacaaaatacaagtccatgtttcttcatattagattcaacagcatacaattgctgtaaaattgttacgtaagtttttcagtgtgtactctcagtttccattctcatcatagaccaggggtaagtgtaaacagcactggtttgcagactatcctttaagtagcactgttcaaagagatcacgtcttagctgcagatggagaattgattggaagcggattgaatgtgggcagagatcagtagcgaggctatttctctgatccaggcatgtgacagtgggtacgccgacggagaagtggcaatggagacagaaattttgggaggtaaaagccacagatttggtgaaggggaggagtcaaggggaaagataggattaagatgcctccaagtttctggcttgagcagctgggttggg

SEQ ID NO: 181549 - DNA, 1187 bp, Homo Sapiens
ttggcaacatgtgtctacttatgtggcatccaactgcttggagctccacacttccctttcgcgactcaggctctggtgctgttgccaatccttgcttggcaaagactgttcgatcatgtggggtccttatttacaagggaaagctgggccagaaggctagcaattcaggtgttaccgctattgctgtaccttgtgttaggacattgtgtttgtgcatggactgtgcctccaaactcagtagttcctatctaaatataaagtatattagaaacctgaaagtacagaatctcaaccttacagtctttcccttagtcctgtggccttcctaagccagctgttaacgtgttgattccttccacttcccccaagtaggcaggcaacagatatgttgattgtcttagaaagtaatctggttcctctgaactccattgaattccagtttgacgcatactgcctggaaccagactgtttgcttacagctttttaagaaaaatctgccttgtctgcccccattatggttggtcttggtagctcctgggcactgtgggcgtgtaccatgggaaagtgattcaacacagtgaaggtgattgtctcctcaggcctcctgaagccacctgtgcggtgggacttcacgtgtctcggccaaggcgagcatttccacaatgccgtggatgctgcagtcaggccagattgaaccatgaccccatttttcacatgataccaattttgtcttaaaattcactgagaaaaatgagactaaattttttttaaccctcaggagcacctgaagcaaatatttatccgtatttattgaaaattcattttgtttctacttgaagctttaaccccttccattcctgcaagtgtgccttttgagagctcccatggcctagtgacttcactggtcaccttgtccatcttacttaagaattttagtctctccctaccctcttggacagagcttcctgttctcttatttcacaggttatgcagcagagcgggttttgtgttttcattcctatttccacccttcatttggttgggtggactccacaacctcaccctaccctacactttgggagcacaaatttggtgttgaaacaagcttaaatttcattttagggcatactgggcttactcttctcccagctgtctgtggattgatttgaatttaatgttcgagtttt

SEQ ID NO: 181550 - DNA, 913 bp, Homo Sapiens
gatttactatattgcaattattttctgactttctttcttttgagttactatatatctttcaagataaacctcttggttaacctttcttttcatctcctgtggtgttctttcaaggttaaatttgagaaaatggagtagcgtagaacatagtatgcagcagttctctactacaagttttaggggccatgctagtcaggatgttgttggttcctttgttttctggtattagtttttagaagcccctcattaatccatactatctttaaggatgttagtaacctcatcgtatagaatttctgcattctaaaggaaacataagcttgtttcagtacactcacgctgtagattaattctgatattacatatctccatcagactttgtaccctctctcttccatcccttacccttaccgattaggttggtattacctaaaaatccatagaaaatgtccaggtgaattgccttatgctttctaccccataaggtataattctagaccagatcggttatgagaggctctattccagtctgcacctgctaagaatttgaatctattttagtaccaatcttggagttcttgtttggctctactcttagccaaccccacagagtctaaaattggatctgaatccagtatttgccagccagtgacagacataaactaggttctttataaatgtttcatgaattgacctgcatccctgcattgattcaggatcttattgtccattgggaaggaagatttacttagctaggagtaacaattcccaaatttgccctagttgcaatatttttttaccaagggtacatacaagtcaggttcacttctgaaagtaaggaaacacaggatagcattcacttgatgatcataacacagtctgggtatacatatgtgtttgtgtgtatacattt

SEQ ID NO: 181551 - DNA, 1217 bp, Homo Sapiens
  misc_feature (265)..(275): n is a, c, g, or t
  misc_feature (771)..(838): n is a, c, g, or t
ttgggcttgcattgcacattctgtatactaatgtaaacatttgttctacctgaaaatcaaaagcaagatgtgagctctttggctaaacctgtattgatatgtcaggcagcaaaactcagtgtttgagattatcaaaagccttctaatatgcccttataggcaatcctgaagcattggttatcatcagggagatgtgccactgcgtgtctttcctgctccccctccaatctcctttatcaccccaccccactcctcagccctcccnnnnnnnnnnnaagttgcctgtctggaccaggcaagaggtgcctactggagggtcttggtgaagcggtaactccattcctttcccttgggtcccccaaaggtaataaaagtacctggaggagaatagtcaggtgattgacctctgcctgtctctctgacggtgatgtaggtgcagacaccgcctgcctgccttgtcctggggttttgtaactgcagctttgacacaggcattcttcctttgaagcacacagcttgcttttccagcacctagacttttacctctcttcatgccttagacttagaccataactgggcttgaaatgctcaccccttcctgggtctggtcttggcacctaggctattcctttccaaactgaagtgagtccagtttcagaccatctcttttcctgtctccaaaaaccatttttgtttccaaacctagctcccccgaaattttaagactatttacctagattcggagatggtcttggagagttccaaaagggnnnnnnnnnnnnnnnnnnnnnnnnnnnnnnnnnnnnnnnnnnnnnnnnnnnnnnnnnnnnnnnnnnnnctaatatttagactaaaccatggtaaatgtacgcacccagtatccttttcagttagcatattctttcttaaactcatctcagtacttttcatttgtttgcttcattatcttaaacaggttaaaagtgcctatgataaggacttaattatttcctaaagaaaagcaaaaaatgtggggaacagggtagtgttatactatcatctcaggtactgcctatgttcaagaacatagacctggtatggtgagaacaaaaggttcctatgccaaatccagatggctatatcatttgttggctacaagtgagcctgactgcaaggtttgcttctgctgagaaatcccatggtgagagtagaactcatgaagtgctgagtcacatttg

SEQ ID NO: 181552 - DNA, 1249 bp, Homo Sapiens
  misc_feature (265)..(275): n is a, c, g, or t
  misc_feature (771)..(838): n is a, c, g, or t
ttgggcttgcattgcacattctgtatactaatgtaaacatttgttctacctgaaaatcaaaagcaagatgtgagctctttggctaaacctgtattgatatgtcaggcagcaaaactcagtgtttgagattatcaaaagccttctaatatgcccttataggcaatcctgaagcattggttatcatcagggagatgtgccactgcgtgtctttcctgctccccctccaatctcctttatcaccccaccccactcctcagccctcccnnnnnnnnnnnaagttgcctgtctggaccaggcaagaggtgcctactggagggtcttggtgaagcggtaactccattcctttcccttgggtcccccaaaggtaataaaagtacctggaggagaatagtcaggtgattgacctctgcctgtctctctgacggtgatgtaggtgcagacaccgcctgcctgccttgtcctggggttttgtaactgcagctttgacacaggcattcttcctttgaagcacacagcttgcttttccagcacctagacttttacctctcttcatgccttagacttagaccataactgggcttgaaatgctcaccccttcctgggtctggtcttggcacctaggctattcctttccaaactgaagtgagtccagtttcagaccatctcttttcctgtctccaaaaaccatttttgtttccaaacctagctcccccgaaattttaagactatttacctagattcggagatggtcttggagagttccaaaagggnnnnnnnnnnnnnnnnnnnnnnnnnnnnnnnnnnnnnnnnnnnnnnnnnnnnnnnnnnnnnnnnnnnnctaatatttagactaaaccatggtaaatgtacgcacccagtatccttttcagttagcatattctttcttaaactcatctcagtacttttcatttgtttgcttcattatcttaaacaggttaaaagtgcctatgataaggacttaattatttcctaaagaaaagcaaaaaatgtggggaacagggtagtgttatactatcatctcaggtactgcctatgttcaagaacatagacctggtatggtgagaacaaaaggttcctatgccaaatccagatggctatatcatttgttggctacaagtgagcctgactgcaaggtttgcttctgctgagaaatcccatggtgagagtagaactcatgaagtgctgagtcacatttgcacctctggtgtggtggcagttcactctcccc

SEQ ID NO: 181553 - DNA, 2018 bp, Homo Sapiens
  misc_feature (984)..(994): n is a, c, g, or t
  misc_feature (1490)..(1557): n is a, c, g, or t
ttggggaaaaaaatatctctctcccacctccttttatccccatgagacacagtttcccactgtaatcagggtaatatgcatttgtaagttctgatatgtgatacatttatgtgatggcaaagataagtctgtcttgcatgcaggtactagagttgtgtgggcagggtcatttgaaactcaagcaactcagaggaatatacaaggggcttggggaagaaaatggtgctcccggagcaagtgttggatccattttgcaaaccttcatgttagcagagaaagctagagtttgtttaaacaaaaatagggctgatttcattttggggactcaggagcaacatggtttgtaggcagtcccctcaccccagctgcagggccatgccacagctgtggggacttcacacacctaggctagaactagaggtgtctaccacatcaccctttaagatttctttattaactatttaataatgccatacatttttataaggttagatgtttgtttgaaacatttgtttacattccatattccaataaaatcttattggtattggtagcagatcctactctaaatgtagattctatttttgtcgtttggtctgtgggaacttaaaatacaaatgaaactcttctcttattatagagttgagtttatagagtaaaaaataaataagatcccaaagccaaggaatgcattcagttaaggttctcataccaatgctgcctgcttgcattgcacattctgtatactaatgtaaacatttgttctacctgaaaatcaaaagcaagatgtgagctctttggctaaacctgtattgatatgtcaggcagcaaaactcagtgtttgagattatcaaaagccttctaatatgcccttataggcaatcctgaagcattggttatcatcagggagatgtgccactgcgtgtctttcctgctccccctccaatctcctttatcaccccaccccactcctcagccctcccnnnnnnnnnnnaagttgcctgtctggaccaggcaagaggtgcctactggagggtcttggtgaagcggtaactccattcctttcccttgggtcccccaaaggtaataaaagtacctggaggagaatagtcaggtgattgacctctgcctgtctctctgacggtgatgtaggtgcagacaccgcctgcctgccttgtcctggggttttgtaactgcagctttgacacaggcattcttcctttgaagcacacagcttgcttttccagcacctagacttttacctctcttcatgccttagacttagaccataactgggcttgaaatgctcaccccttcctgggtctggtcttggcacctaggctattcctttccaaactgaagtgagtccagtttcagaccatctcttttcctgtctccaaaaaccatttttgtttccaaacctagctcccccgaaattttaagactatttacctagattcggagatggtcttggagagttccaaaagggnnnnnnnnnnnnnnnnnnnnnnnnnnnnnnnnnnnnnnnnnnnnnnnnnnnnnnnnnnnnnnnnnnnnctaatatttagactaaaccatggtaaatgtacgcacccagtatccttttcagttagcatattctttcttaaactcatctcagtacttttcatttgtttgcttcattatcttaaacaggttaaaagtgcctatgataaggacttaattatttcctaaagaaaagcaaaaaatgtggggaacagggtagtgttatactatcatctcaggtactgcctatgttcaagaacatagacctggtatggtgagaacaaaaggttcctatgccaaatccagatggctatatcatttgttggctacaagtgagcctgactgcaagtttgcttctgctgagaaatcccatggtgagagtagaactcatgaagtgctgagtcacatttgcacctctggtgtggtggcagttcactctcccctggatgctgtcagctgggccttgcttttcatcctatccctgtaggcagggt

SEQ ID NO: 181554 - DNA, 1605 bp, Homo Sapiens
ttggcacgtgactgcacctcagtaactgaagcccacccccgccgatggatgcatacgttatgagttatttccagatttggctttggtcttttctcttacagaccatgttggagtgaagtatgttctgtgggatagtctaggtgcacctttggggctatccatgggggccaatgcctcggaggggagttgctgaactgaagggtggattgtcagccttgatgttgccaccagaagggccgctcactttcggccctcaacagtggtgcctggcctcttttcccgcttccttgttcctagctggagtgagccagctttgactttgagcagtccgctagtgagcagtgactagcatctcctttgcctttgatttgcacctaattaggaggcagtcaagcatttttcatgtttgcggcttatctgcctgtcattttctgtgaactgttcatatcctttgctatttttctgttgaattttctttctcttgtttctctgcatgcacagttgaaggttttgaattgtcaaagtagcttgatcagatgtgagtcttagacacggcagcagtgatgcgggtgctctgcgggtgatgctgctggtggcactcactggcctcagtttctgaagtgcctcaggcttctcataagcggaattgtagcttctccatgggggccagaaggcatttgatgtatcttgtcttcctgcatttttgtctctgaatagctgatttggctagagaggctgttaaacctcgatttcatcttagctactcttttaggctcagataatccttttgttgtgccactaattacaaatttgcaaaacgctttagtactgcttaaaccgtccctcaggacctggtatctagtggtgagtattcagtgcttttgaagaaacaaggccatgccctcacacactcctgacttcagagcagcgattttccctccgaggtaagttgattaaacatgttttgctttcagtgggaatttgtttttagtctttttgagaactgctcttttcattctttttaagtatgagtcttgctaacataaagctgacatgagtgtgatctgtttccctttgtgacatgcttgaacggtccagtgttcacgtcattgtagtttcaccacctgacattggccgtgttgttattcctgttgaatgcccaaaagtccatcgtcagtgtgggctgcttgtgggcatttggtgggcatttctgtgaaaatttctatagattagctcgggatattgggttcaagtttcttcttccactggacctgatggaaaatccacttctcagcgatgccccggaccgcacagcgatactgattctcggttgtctcttaggctggagaatcgggaagggagaaggctacgccgatctggaatatgccatgatggtatccatgggcgccgtcagcaaggagacgccggtggtcaccatcgtccacgactgccaggtcgtggacatctctgaagagcttgttgaggagcacgacatcactgtggactacatcctcactccaaccagagtcatcgccacaggctgcaagcgcccaaagccaatgggaatcacctggttcaagatcagcctgggagatgatggagaaa

SEQ ID NO: 181555 - DNA, 3365 bp, Homo Sapiens
ttgggaatatggcttgtggaaggactctctatttctggtcgacctgttgtgttgtggtgccatcctcttcccagtggtgtggtcaatcagacatttacaagaagcatcagcaacagatggaaaagctgctattaacttagcaaagctgaaacttttcagacattattacgtcttgattgtgtgttacatatacttcactaggatcattgcatttctcctcaaactcgctgttccattccagtggaagtggctctaccagctcctggatgaaacggccacactggtcttctttgttctaacggggtataaattccgtccggcttcagataacccctacctacaactttctcaggaagaagaagacttggaaatggagtccgttgtgacaacatctggggtgatggaaagtatgaagaaagtcaagaaggtgaccaacggctccgtggagccccagggcgagtgggaaggcgccgtgtgacagagccgaccctgaggatggcactgtccaaggaaactgttaacttattcatagtcctattggacagcaggagcagctcctacagtgaactattggcaccaccgacagtgacaccagggcacatggctggagcacagtgccgcggaaacctgattttgtactctcttttatggaaacgatctgtggctgtttagaggcagctggatcctctttcaggcgggaatgggagggcgggcacagggaggaggagaggaagagaaaaggaagaattcatttttaatttaggtttctttttttcttcttcatttcggagctctaaggtgtatgcagttgtgaccccatgtgtggggaagtgtagcaaggacggctggtggagggggaaggagggtgcgaggtgtctgtctgatgctttaggaaatgtctactgaggaccctgggacttaagaagaagggcggggagagtgccattgcctgtttgggagacaaaaatgaacgaaaacaggtgactttggaaagcaaagtcaaaacccagtttaggatgtagcacctgccccaggattcctgccctcggctttgccccagacccttattccagatgctgagagtgaccaggacagcagctcctgaggcccagtggtcttctttccaacaggaaaagaaggctgtgatgtcgctgtcaggatcatgccctgtggcacagcacaggtggtgggaggtggttttctgactgagatgttgcctgatggatggaaagaaatgtatttttaagttcaaaaagcattatcctgtggcattgcctggacatccactccctgacagcccagagcagcactgtctggcttcccttcatgcttgtggctttgttgtgtttgatcagaattttgggggaaatggaaagttttcctcaaggagcagctgggggcagaataggtagtatttaagcaaatacttaagtccaagcaaatcatccccattaaaaagcttttcctgtaggctagtaggatttctaaatagatgaattcaacagacttggtccccatagtccaagagtatgtatgtgaagaaagtgagcatgattcaacagtttcactctcagggattttaggatggcaaaatacttcacagaaactcaatgattaagttcccttccacacttccagagcttgaatgaacacaggtagccacctaaattgagcagtattgcaactcagagagaaaatcatctgaatagtaggacaagctcagaaggtacattgtgactgagggcttaaaaggagaccaaaacatggccccatcagggaagcttcttaatgcttggggggccagctaggtagggttgcttccaaaagctggagcccacccctgcctaggggttgtcagagagccacacctgcaggggaacaggtacctccgagggtgagagtcgtggtctctgggagttgttttctcacctctggcttagaagggtcaggcagaaaccacaggatgtggggtcacactcactgtcccaagtttgggaacctgaaaaagtctccattcagaacatggttgttctccctgtcccatgctatcttatcttcctaaatgactaatgaggaagcgggtgttctttttctgcactttgattcgccatctgggttctgtagggtgctctgaaggtgtgatctgccttctggctgatgtggaggaagagcaagcgcctcccaggccacagctgctcacctctcggcagatattttaggcaagcatccgtgtgtcttcccatcttcaggagaaaggtaaatgcaccctaagtgttcacttctggacctttttcaagttcacttgggactgtgtgacagaagggagttggagggaggatgggaatatttttaacactttgttttcctgtgcagaaacataataccagttttcgcagaaatgtgtctcaatctgtgactaccaaagccctcctcagtccttccctcagagggacacatttgctgtttctcctgcaagcagatgttgtggatgaggcgatagactccttggcaagaacgaaaggtgtgatgaaacctccctgctcggaagggtctccgtggaggtgtcctcatttcacatgctgggttttgcaagcgaggaagccaggcagtggaggaactagagagaggcaggcgtgtgtgtggacaagcgctggagccgcagccctcagactggcacgggaacgccagcgttgggtgttcagattccacgcgtatgtctgggctcactcacagcatggccgagtgtctgcagtgctggtcctgacccttccagagcagcagtggacagatgagataagactgtttcagaaacaaagatggccacagccttcctaacaagcaggtcatctggccatgtctgtattgtaactggtaaaaggcttcaagtcagattgatgatcaagaaaagtcaaaaccccagcccaagattgggaaagcaggtggtggttccaagcttttaaaaaattattgaagctctccatcctgttctgtgagtgtgtcttctctttctccttcacgtcatagccgtgacccaccgttcatctctgctcttgcgtaaagatgaccgatggagtccaaagccaagtggcttcaccagctgacaagccaccctcctgcagcctgagtttcacagtccactgggttcgttgtcacgcggtgtttgaatggttaagcccttgcagtatttcagatcgggcaaaaaatatcggatgcacatagcagaaccattggtggtatttatagctttgctttgtactcctcactgtttctgcctacgcaaaatatccatgtttcctctgagaaatctgttgtggactgaaagcgctgctggctgtgaaatttaataaagtgtgtatgctttgcta

SEQ ID NO: 181556 - DNA, 519 bp, Homo Sapiens
ctgtggaatgagacagcagagatggcgatgaggtcatcacgcaggaggaaatctcacccacacgaggtggacttacagggctgtgtgctgcctgggcaggctggacatgtccagggcggggaaaccctggatatttcactctgaagtggtttcttgaaagaaaactcaactgactcaggccatgagcatcttttacactgaagcaagcatctcctcacaagtgcctcctacaagtcactagagtcatattcaacattacaaaatgcagtgctacttaaattttaaagcactgagggaccaagaaatgggctgatcaagtccttggccactcactgttaagagccaggatttacagatcaatgactgttcctattgtccaagaaataattttctagcaaagcatacacactttattaaatttcacagccagcagcgctttcagtccacaacagatttctcagaggaaacatggatattttgcttatttcagaaacagtgaggccaacttttttgtacaaa

SEQ ID NO: 181557 - DNA, 905 bp, Homo Sapiens
ttgggaggccacgaaggcacaccacgccctggagcagctgatccgggactgcaataacaatgtccagagtatgcgacggacagaggaactaatctacctgagccagaagattgagtttgagtgcaaaatattcccgctcatttctcagtcacgctggctggtgaaaagtggggagctgacagccttggagttcagtgcttccccagggctacgaaggaagctgaacacgcgtccagtccacctgcacctcttcaatgactgtctgctgctgtctcggccccgagagtcagtgactggagtggcaggccagggcacaagaggggaaggggatgaggaaagaggggggtctgaaagggagagagaagggtcatgttcctagaagagcccttctcaatggcttaacccatagagcccaggtcatagcctagagaagagaaaaacaagcccaaagcaaaaaggggatcccatcaaactgtatcatgagaccacatagcaggacatgtaatatggtatagacacagagcaaaatgtagcaaattagcttatcacattctcacatgagtctatttgtggcttctttggactggcctcaacctgctattctagagatacttagctaattccagagcttaagtctctggtcttaaggttcttgggaaatgtatataaattccatctcttcacctctttaaagtggtaatgtatccactgcactagtgtgtggtttgccagactaggacaaatccctgaggaccctggagctaccatcttgggagcaagttaggaccatcttatggtttttgtgggaatttgcagctgtagatgtagggatttcgaaccccaacgttatgagggtaggtgaagtatggaaactctagaatcaagttgaaaaaatttgtattttg

SEQ ID NO: 181558 - DNA, 1461 bp, Homo Sapiens
atgcatttaaaaattacatacattctaggtatttagtaagtaaaggttgatggttgtaatcttgttaagtatttgtattctgttatttgtttcaggtagttgatgtcacttggcgatattcctgcaaacatgaagaggtgattgccagaagaactaaggttaaagaagcattacttcgagacactattaatgggcttaataagcagaggcaactgtttttgtcagaaaacagaaggaaagaacttctccagaggataattgtggagcttgttgaatttatatctcccaaaacccctaaacctggagaacttgggggaagaatatctgggtcagtggcttggagagtagcccgaggtgaaatgggtctacaggtatttaattcattctagcatgatgatccttttactttcctgcttcatatactatgctcttcctatactatcctccaactgcattgactatgacctttcagttaacttgagagtaattattttaaaatgcaaacatttgaagagaaccagtaattgatttacatagcattatcgtgtaagagttagcaaagcatttttaaaatgggacttaacattttttttaccttatgtaaatttttagtgcagtgtaacttttactgaagaatatacaggaaaatgcacaaattataaatgtacagcttaatgaatgtttacaaatttaacacccatgtaatcgccaaccagaataagaaatagatcactggaaccgtagaaacaagcgtgagtttctttccccactgccttacaccctcgaaagtaatcattattctggcttctaacatcatatattagttttgcctgttattgtgctttataaaatggaatcatatagcatgtactgttttgtatatagcttgttttgtgtaactttgtgtcagtgagatacatgttgcaacgtgtatggtatgttctcattgctgtataatttattgtatgaatgtaatttttcactgttgatggctatttgggttatttctagttttggctgatataaatggtgctgctctgaacatttatattcacgttttcagtgaatatgtttaggcattttgttggatgtatacctaggagtggaattgctaggtaatagagtatgagtatattcagctttagtacatattgccaaacagtttttcaaaatggttatgccagcttatactctcaccagcagtatatgaagtttttcgacatctttgtgtacacttggtattgtctatcttttcattttagcagttctggtggcgtatagtagtatcgtgattttaatttgcattttggtgatgactaattatggtgaatgcctgttctttaaacttttggatatcctcattctcttttgtgaagtgcttatttacgtcttttaaaatgagattctaatgcatttaaaagaatgctgttttacgtttttcctctccagatgaaaacttta

SEQ ID NO: 181559 - DNA, 1112 bp, Homo Sapiens
ttggcctccgcagagtggtgaagtagactggccctcttgggagccctgagtccgagaaaatatgtctgatggagtcaatctagggcttgtttccaaaaagttcagttactctgtgcagctaaatgctttaggaggaaaggtaggcttaggttgcttttcctctgagggttgattgaaatttcttcagtgaggaatagagaaagggcaggaccctcctcatcacacagctggtgtttcaggctgtgaccaatgcagggtgggatttcctaactgtggatgaggggatgaggtgtctctgagggatgaggtgtctcagagaattgagtccatggggcagtcagaatagccttaagagaaaatcatgaaggagaagaggtcctcctttagctgcctctacttggtatcttagagagggcttagagggctctcagtcttctgcccatgaaaagacttctttgagcctctgccttcatggctcttagggttctgatcttgatatcagcagccccaaccactttctttctgaatgtctagtcagtatttttccccttttggtgttttatgaagccatgtggtaacgaatgaatctgtatcatttttcctacctgagtggcccaaagccagcaccaaaccctgggagtccctgaagcctaacagaacaggtagaacttgcaaaaggaatttggctgagagctcacttctaatcctgtactcactgtgtctttgtagatagaaacaagctagctttaccaaagagaaatagtgtcatagaagaacaaaacttcatatagaaagttctaggcaagtatttgatggtttccttaaggatgtgagctttgtatttccacctagccttgtaaaatgttcctgtggtattttgtgtcacacatcctacctttgatgagtctcacatcccaccttcctataaacagctaaattaattttgtttcatcttccccagaccaaaatgtttgataatcttatcaacattgtgggaggtcttgtgcaatggaaattttgccatttctccaaaactggtggcataaaggctgatgcttggggagaaccccattgctcgggacaggcaactctgttcaagggatcttctttgg

SEQ ID NO: 181560 - DNA, 1231 bp, Homo Sapiens
ccaactttgtacaaaaaagttggctctgagggatgaggtgtctcagagaattgagtccatggggcagtcagaatagccttaagagaaaatcatgaaggagaagaggtcctcctttagctgcctctacttggtatcttagagagggcttagagggctctcagtcttctgcccatgaaaagacttctttgagcctctgccttcatggctcttagggttctgatcttgatatcagcagccccaaccactttctttctgaatgtctagtcagtatttttccccttttggtgttttatgaagccatgtggtaacgaatgaatctgtatcatttttcctacctgagtggcccaaagccagcaccaaaccctgggagtccctgaagcctaacagaacaggtagaacttgcaaaaggaatttggctgagagctcacttctaatcctgtactcactgtgtctttgtagatagaaacaagctagctttaccaaagagaaatagtgtcatagaagaacaaaacttcatatagaaagttctaggcaagtatttgatggtttccttaaggatgtgagctttgtatttccacctagccttgtaaaatgttcctgtggtattttgtgtcacacatcctacctttgatgagtctcacatcccaccttcctataaacagctaaattaattttgtttcatcttccccagaccaaaatgtttgataatcttatcaacattgtgggaggtcttgtgcaatggaaattttgccatttctccaaaactggtggcataaaggctgatgcttggggagaaccccattgctcgggacaggcaactctgttcaatgggatcttctttggtttgatgttcccattgttttctcagttctgggaagcctagtacattagtactaatgtaatcactgaaaccttttcttgaaataagggaagcagccaaactttgattaaagttgcaagttctggggacttgcgggggttgtcataaactgtaacagtgggttttggttcagcatgtaaatgcaactttgattttcttgaggaccgattgacctgtcatgtccctgtatcctcatgctcatcatctcagcaggcctgataggctgggtcagtttgggtgttcatcatgaggattgcttctgccatggagctgatggacatgggcaggttgctgagaaggtggggtgaaagtgagtgccgggggtgggtgagtgccctggtcttgttcata

SEQ ID NO: 181561 - DNA, 1577 bp, Homo Sapiens
ttggggtatgactttagagaaacatgttctgcaaaactattatttctcagatattccctgattgtaggcatccttcctagcatagcgcttttgtttatatcttttatcaaaatgttcttttcatcaagaatcagacttttcccaccagggttagttaaaggaaatgtgtcacctcttcctgcctgtgtgatttcgacctcgtgtgtgactagaacagtcagctgccccattgcaatgttagaaagcagtgttagaaatcaggaagtgggaatctaagggaacacgaaggaggacttttgtttcctctgaattgttgctctgcccaagcctgattttgtaggtgaccccaggcctggggtcgttttgtcaacatggctcacaaagctgttggcctgaatagcttttcttttgatagccacttaataaacgtaggcgaggaaggatgttcggcatggaatgtgaattggttctcatgggcctcatgtgtaataggcgttttgggagagaagacatttatgtcttcagactatttttggactaattatgaaattaaggctcataaatttaaaaagttcacatcatgagttaagccacagagagatgatgggaagtatctaggagttaggtaaagggcttcacactatttctagtctgtctgtgaaagctttctggatatgttggtgtttgagctgtatttcatgttttgttgtaaacatcctgtgatagattaacattaggccaccccaccatttataacaaaactaccattaatgtgcaaagaattaacattgttgtgtcaggaaaaggaaaaccaaagtgaattaggaagaagcagaaaactgttagtgtttgaaggaagatactgggtcccagatggagagaaccatcagcctggggtcaggttggagccacacccctgagtcaggcacatagcaggtgagtaagcaggtgcctgctgcagatgtgtgtgcagcccgtgagatcctccccacgcttccttagcagcaggcgtgtcaactgaaagacacttcactcggggagaatgactttcagacatgaggaatggttgtcacgtgagtccgtgaagtgctcacattcttttaacagcatactcaacaagtcaacagtttataccatttgattttaaagatttcaaatgaatactgagcatttcctggtaaaaggcactttttaatcaacataaaatgtcaaaaggaaataacttaaatatttttcaggatatgatgttattcatatcatagacaatggactagctttattttatagaaactggagaaaatggaaatgtatatttcataacactcagtgtcataactctccctattcctacacaggttatagtcttgccttttatttttaacaatctgatggtaactggcataatgtactcagtattctaagttgtatttgttgatggcgatatgtcgtattactaaagaaagtcttccagagttaaatgtctgtgtgtaagttaagtcaccatatatatacatgtttattttttctgcatgtatattaaagggatatttgtcttatttagatggagtgctgtaaaa

SEQ ID NO: 181562 - DNA, 664 bp, Homo Sapiens
taccttgttttaacttcagagctttgtattttacataattataaaacaaaattaaatttaagagagtaattcttaaaaatcacaaacaagatttctgcctccagccaaaaagctgtaacagggactagatttaccctcctgtcaaaaaaagcagacaaaatatataaaacagtggttttcagacgttggacagcaagccttgctgataatgatccctgaaagaaaggaaacaaatgagatgggccctaagagcactccaccttactgcctggatggaatttccaggctgcacacagaggctggagatgttgttgagttgaagaaacaaagttcatctttcaaggaggctgagatggcgataattttgcaggtcagagtactggagaggaaagatctgcacagagagaactctctggggagctgcatagacttgctcatgagtcagcagctgagcgttgatcagcccttttgtgtgaggagactactggaagtcagggaaaaaatcactggaaagcagcagacagaacagtttccagagctcacacagagaacattcatgttctcaccagtctgtatggaaatacctcttaacatgacaggcattgaatagagtccacagtaatgggatcaaattaattctatcacaagaactggaaccagaggc

SEQ ID NO: 181563 - DNA, 1006 bp, Homo Sapiens
gactttctccagcttgtctgatcatgctcgttgttgcccagctcagtaataagctttgcaggatccagcctgtctgacctatccctactgagtccccatagcattttgttccctcctgtggctcttaccttgttctcccttgcagagtatgggcatggagggcttctcttcctaatccttctaatggtaggatcctaacaggacaaatctgtgtacctatctttctatcctcctgagcctgtaccaactagattcttcatatgtatttgtaacagattaaattggaaagcaaacacagtattgattaagtctgtcttgaaaatagctagaaagtgttagacacatgaacacgttagataacctacttattacacaaatctcatgttccttatgtcccagttggacatatttgcttcagttactctgacagtttgggttaacttgctagttaagcagctagcaaatttgggacatgtattcaatatctcaaaagaaccaacagattacttctctgctgtgtcccctccccttcacaatttaattcctaaggaactgttcacctaatcagtacttttctatttaaaaactggctagacagttcataataaaagatatgggaccaacctaagtacccatcaaccaatgaatggataaagtgtggtatatatatcccatggaatattagccataaaaaatgtcttttgcagcaacttggatagtattggaagctattattcttagtgaagtaactcaggaatggaaaaccaaataccaaatgttcccactttaagtgggagctaagctacaggtaagcacacagagtggtataacagatactggagacccggaacagggaagggggaaggataaactacatactgggtacaatatatagtactcaggtgactggtacaccaaaatctcagacttcaccactatacaattcatccatgtaatccaaaaccacttgtacccctaaaagctatccaacttttttgtacaaagt

SEQ ID NO: 181564 - DNA, 996 bp, Homo Sapiens
  misc_feature (364)..(421): n is a, c, g, or t
  misc_feature (481)..(618): n is a, c, g, or t
ttgggaaaaagttttaccttaaatttttaaatttcgaggaaaactctgggacaatcttagcaaaaagtagtaaacaacttagttaagagtaaatgtttttccctgtagtatccaaactcagttgtcttagtctaccgatttgtgggatatatggtatgtattaattttttacttaagtgttaggttcccataaccttgaaaatactctattagcaatcatggagttaaggccatatggatggggctggactcgtttctgcctttatctgctatctatctttatgccctgaatttgggttagtagcaaactaagatgcaccacctgttaaaaaaacttctttttttccttttgagagctataacnnnnnnnnnnnnnnnnnnnnnnnnnnnnnnnnnnnnnnnnnnnnnnnnnnnnnnnnnnatctcctgggtttaagtgagccacctgaatagctgggattacaggcacattccaccatgnnnnnnnnnnnnnnnnnnnnnnnnnnnnnnnnnnnnnnnnnnnnnnnnnnnnnnnnnnnnnnnnnnnnnnnnnnnnnnnnnnnnnnnnnnnnnnnnnnnnnnnnnnnnnnnnnnnnnnnnnnnnnnnnnnnnnnnnnnccacaaaacttcttaaaatataatgcattgttgagtgtgggaaaaatttgtttctggaatcctaatactaattttcatgtatcattgattagccactgttttatctgggcttaaacatctttggcatgtttagggcattttgatttttcatgtagttatataatttactaatagataataggttttgtacagagtccacattaaaatagatgtctgataaatatggtataggtactcggaaagaaatactctccctgaacttcactgatgaaaaaggtagatgtttttctgtctctggctcatgggagaaactaaagcactgtttgtattgtcagccatagattaactaatcctgtgcttctcagataattgtttttt

SEQ ID NO: 181565 - DNA, 885 bp, Homo Sapiens
ccatgcacccgtcgtgctgcccgtgcatctgtaagcctttcagcacactggtgaaaagccacgtaactgcatctgcgagcagtgtccctgacagcacttgtttgaggagaggccagcagagctgtgaggttgtcctctggcaggacagagtatctttccaggccagggaattgaaggctgtaattaatagcgctgtacaaacatcctcatgcttcatcagacatttgcccaggtctgtaagctctgccatagctgagggggtgacctctgtggccatcatttcttcatcgtctccatctgctgggggagcactactgtggtcagcacccttctttgaaacacagcaaaccgctaaagcaagaaagcagggttactaggtgaagggtgggtatatactaccacaacagccacctcaggcccactgatcccaacctgtctctggccaggtgaggaaggaggaagatgggggtaccgtccaaggcacaagaattagcttcaccaatagaaatagaggcattctgatgaccgaactgttttggtccttcaagttcaactagctgagagaaaattacagaattctctgagagtgagtgactaggaaaggatgcttgatacatccctggtctactttgaatctcaaacaaacaaaatgacacagtaaaaataaaaagaaaattaacagcctccatgtccaagaatttaaaacatttccctattttgacaaaactaggaagttattcctaatgaatccaaattccttctgctatttttgtttccccatattcagcttgcaattcataaagtatccttaggttgacttaaggactgccttgcttctatctagttatttcttttggatctgtcagtgttgctacaaacatgaac

SEQ ID NO: 181566 - DNA, 1275 bp, Homo Sapiens
ttggagtaaatatgaaactagggtttgaaattgataatgctttcacaacatttgcagatgttttagaaggaaaaaagttccttcctaaaataatttctctacaattggaagattggaagattcagctagttaggagcccaccttttttcctaatctgtgtgtgccctgtaacctgactggttaacagcagtcctttgtaaacagtgttttaaactctcctagtcaatatccaccccatccaatttatcaaggaagaaatggttcagaaaatattttcagcctacagttatgttcagtcacacacacatacaaaatgttccttttgcttttaaagtaatttttgactcccagatcagtcagagcccctacagcattgttaagaaagtatttgatttttgtctcaatgaaaataaaactatattcatttccactctattatgctctcaaatacccctaagcatctatactagcctggtatgggtatgaaagatacaaagataaataaaacatagtccctgattctaagaaattcacaatttagcaaaggaaatggactcatagatgctaaccttaaaacaacgtgacaaatgccagacaggacccatcagccaggcactgtgagagcacagagcagggaggttgggtcctgcctgaggagacctggaagggaggcctcacaggaggatgaccaggtctcagtcagcggggaggtggaaagtgcaggtgcatcaggggcaccctgaccgaggaaacagctgccagaggcctccactgctaaagtccacataaggctgaggtcagtcaccctaaacaacctgctccctctaagccaggggatgagcttggagcatcccacaagttccctaaaagttgcagcccccagggggattttgagctatcatctctgcacatgcttagtgagaagactacacaacatttctaagaatctgagattttatattgtcagttaaccactttcattattcattcacctcaggacatgcagaaatatttcagtcagaactgggaaacagaaggacctacattctgctgtcacttatgtgtcaagaagcagatgatcgatgaggcaatcagttgtaagtgagtcacattgtagcattaaattctagtatttttgtagtttgaaacagtaacttaataaaagagcaaaagctattctagctttcttcttcatattttaattttccaccataaagttttagttgctaaattctatttattttagattgtgcttcccaaaatagttctcacttc

SEQ ID NO: 181567 - DNA, 1332 bp, Homo Sapiens
ccccacatcatcaagagagtggagacagttcctccagagagaaacacggtccaagggctcaagtgctaggagactggggtgcaatgccaaatattacacagattgattaaaaccaatcggacccaatacaaaccaccacacgcactgcagcaccatgaaaactgtggctgaagacctctgtcattctgatcctactcacttggaactcagtatttcacatgaggaatgagcagaattttgtctatggtaggatttgctggtcaaaataatagtgcaaagaaggtccagaaaaacttggcattactgtgaagacaagaagtctggaagttcttaattcaaaacataaaagtacttagaagttcttatttcagaacataaaagttaatatgattatgaaacctcttagaagtacagagagctgttctcatatatatcttcaatgagttcacagtgtaaatatggggcctctaattctgatttggcactgacttttcttaaaattcattggtagagtcttatcatatttattattaatctttagttatatgggaagtttaaaaagcctcttattacagttaattcggttttttctatacataaatatgacctttaattattttttttcaacaacctcttgtccaacagattgattcccaaaaacagcacactaccagtaaacaacacctgaaaatggaagatccaagtgagaaatgcgagtggcaacatttgattgactataaagtgcattaaaagataaattattacgattattatctttcaaacacagtatcccctttctaaggaaaagaacccatgaaagcagcatttaaagtttctgttatttttatgttagctaaaaaaatgggattaggtttcccagaggctttcataaacttaaatgcaccatctaaatgtaagggattcttacttcttcttcacttcacttcatgaatcattttccaggtggtcggtgtgacgcctacttaaaacaatcaaatatgagtaaaaatacgaatgtcctaagagcaggatgtaacattgcttctgaaaaaatggaaattcccgatataccttgaatttccacttacagagttactagttagtatacagtacttcacaaaatgggcaaatccccaggacgccagacactgggcagaatttttagggtcaggaggcttctgttcttcccaggaccctgggagaagaacaaagtgcacagagataacccttcagccactattctcaggagcggtcttgctctggttaccagctagtttaaaagagataataaaaggaaatggtattgaaagtctgagcacttaacagagccaa

SEQ ID NO: 181568 - DNA, 1303 bp, Homo Sapiens
  misc_feature (267)..(283): n is a, c, g, or t
ttgggtaaaatctcatttataaaaactcagatgagaagaaaattttctttgatggtgagactgttgtcttagttcaggaaattatttaataatcctttgttacctgtgaatgaaggaactttgtaattctgatttatcgtaaaacatgagcctttccagagtcagcttagacactgttgtcgcaaatagccatgctttgccttatgccaaggaggcccagagggagggcctagtcttcctctgttgctgtacatatattgaaatgcnnnnnnnnnnnnnnnnngcatttgttatctataatgagctttctgagccctgatattatgtgagacaaacaggagttattgatgttatacactcccttccattcaggattttctgcttggagggaaatatgttgaccttagagaattgtgaatattgttgcaattcttgaatatattaccatgtgaataatagagactgtgttgctctctagtataagctatatttatttttgatttatttgaattactagttataactggagaaattttgttacctctatcctggcttgcctgactggctgtataatagcagcagcctcttttagagcatcttaatgaaaacatggatgaaaggaattaatgatgatatctgcagactgcgtagaaaatggcttttgttcccagcgttaacattttcttctcaatcacatttcaatgtttgtggagagtggcagattcacaccagaaacactaggtgttcatatccatagcatggatgcagaataagcagttgggagagaagcttcttcctacctggtactcctcccattcacctcagcccagccccagacaggcgttagcattcagtgtgggccctcaggcagccctgaagcctggctgggtcatcagatgggggcagcctgtgacgggcaccagcggcctgattccagggaagagttcctggagggtgttggctgtttttgttagctcagtttttttctgggctccaccattcctaactccaggtagacaagatagatgtcacacacaacaattttaaagtattttgcttagtgcattttgtttatgattgctgtgtttgtttcttatttaataggctttttacttcattctattaaattttattgtttagaagaagcgggtactgtcactgtgtaaaatatgtaataatatcatatcctttcctttgtcatatatacaagaaaaatcataccttgcattcaatatacaatgcaattgactcatagcagacttgcattttttcagtgaacaataaaaagattgtctggcactcc

SEQ ID NO: 181569 - DNA, 938 bp, Homo Sapiens
ttggtgtaaatattaaccttggcatcaaataagtaggcatagagtgtgactcgccctctcttggtcttccctgaaacagcagggtcaagaactcctggtctgtgttagccacgtggcttacaaaaacaatgacacagaagagggaaaggtgggactagccaagtggaaggccagccgtttatctctcagtgtcctgtgtcttatatcctgagcagagcaaggtgcaagaccctggactgggcatccagcagaaacttccgagaaacttgactgtgaggaaggatgcttgcctagcaattggtcggatgaagggctccatttgatacttccttcactgtggaaggaagaaatttgtaaaaattatttccagaatatgcacacattaaaggtttataaacctgacctttctttagtagaagacagtaagagaatactgttggctctgggaactaaccatttgagctgtgggacccagggaatctctcttgtaagcatcatctttagtgggtgactcctggtggccctcccagctctggtggtgctgtggggacctgccttggagatgccttggtactagtaccttttttgtaccaggccatgagcctagggcacagggcctctggcctgcagatttcaggaaggcagctgtgttgtgtgaaccgatacagcctgccagcacttctgtcccgagtgactgtcgttgtcatcgttagcatgttgcctgaaaagccttggggtctgggcgctgacactgaagcttttttttcccttctggctctgtgatgtccagcattacccagaacgccatggaggaccagagcgccacggccgggactcccgcgatggctgggggggctatggctctgacaagaggatgagcgagggccgggggctgcctcctccccccaggtttgtgtcccacacccgacagtacctga

SEQ ID NO: 181570 - DNA, 1165 bp, Homo Sapiens
  misc_feature (212)..(242): n is a, c, g, or t
  misc_feature (247)..(315): n is a, c, g, or t
ttggcattttccccaattattatgccacttaataaaaggaagtgataatgccttgaggctttgaaatgtgataatgcaaatggatgcactgaagtgtgaatactcttcaaccatccaccctcaatacttccaaatgtctatctaccacacagaaaagagtttatattggtaaggtggggaatgcatgactcagcaatctagagcaagttggnnnnnnnnnnnnnnnnnnnnnnnnnnnnnnntttgnnnnnnnnnnnnnnnnnnnnnnnnnnnnnnnnnnnnnnnnnnnnnnnnnnnnnnnnnnnnnnnnnnnnntagagcaagtttctgtggttattttatctttctttttcactgtaagttaacaacatctaaaatgaaattaattccatttacttgatcataatctacctaatgcttaattttaaacaacaaaatatgaagtatgggcaaaactactaggtgtgttagtggtaggatgatacaaaactaaaagataaaagtgtaaatgtgtaaatataattatataccatctgccaaataaccctgctgccaaatttgaaataacttgtttcaatgtatgttgaatgctgccttaacatataatccacactatgttgaaaattgttttcattagacttgctaatatggcagtgctgagggacaaggtattgactggcagtgtttggatactgttttaaactcatgagatattcatttatttaaattaatacttttattcattcactcattctttcattacacaagcatttattgccaacctactctgtgccagacactggagatacaaaggcaataagacttagttcatacctttaagaagttacagtcattgtttacccagtgacatattaagctgttctccttctaattgaaaaaatggaagaactaagaaaagtgcaactaaaaaggtagacttcacagacactggtaaccagaaacagtgaagtgtttttgtgtttgtttgtttatatctccagtgttgcttgttggagacataatagggtgacagggagctttatagatttatacagaacttccaaagcagtcctaactctgtttgcttatactaaatgtctctttatcctcttttcttgttccttcccacttagccagctgaatcaccctttcagaaaaagagagg

SEQ ID NO: 181571 - DNA, 775 bp, Homo Sapiens
actttgtacaaaaaagttgggaaaattactcttggcgctggaggcacttaagaatcctaccttgcctcttcctgtcttctggtggttgtcagtaatccttagtgttccttggcttgtagctgcattactccaatctgttgctgtcatctcatggtcctcttcgtgtgtctctcatgatttgtcattggatctagagcccaccctaatcaaatataacgtcattttacctaattatttccgtaacgaccttatttccaaatagggccacattctgatgttctagttggacaaaatgaggggcagggctcagtattcagttcctccttcactctccaaatcactttggttcatgagttcagatggcatgggtgctagtgctggtgttgatgtgatgctaccaatgtaagcattagtttctttttataataacttgggcagtcagttctgggcactgacaaaattgagtttgtgatcttggaatactttgattatggggataaagtgatttgcctaaataattgtgacccttagagattctgaggaactgacagcccaataccttaatcaaagcctgtaactcataagaccctggtttactgcatcagcttggagtggcaggccccttgttctcctaaatgcaagaatcagaaggcacttagtgacaactacatatgctgagcaatgggggaaaaaaagatactgcctgctttcaaagggttgtctgtaatactaaattctgtgttcatgattcagtcatacccctgaacaaagttac

SEQ ID NO: 181572 - DNA, 1564 bp, Homo Sapiens
  misc_feature (567)..(582): n is a, c, g, or t
  misc_feature (601)..(613): n is a, c, g, or t
  misc_feature (676)..(685): n is a, c, g, or t
  misc_feature (1128)..(1142): n is a, c, g, or t
ttgggaaagcctcaagcaggtcctggcacaatgtttattgtgtcataaataaccaagaaatgggtttctacaaagatgcaaagactgctgcttctggaattccctaccacagcgaggtccctgtgagtttgaaagaagctgtctgcgaagtggcccttgattacaaaaagaagaaacacgtattcaagctaagactaaatgatggcaatgagtacctcttccaagccaaagacgatgaggaaatgaacacatggatccaggctatctcttccgccatctcctctgataaacacgaggtgtctgccagcacccagagcacgccagcatccagccgcgcgcagaccctccccaccagcgtcgtcaccatcaccagcgagtccagtcccggcaagcgggaaaaggacaaagagaaagacaaagagaagcggttcagcctttttggcaaaaagaaatgaactcctttccttcacctcctgcccttctcttaccttttcagtgaaattccagcatgcaagctcagaaccaacacattactctctgtgcctaatgttcctcaatgtggttgannnnnnnnnnnnnnnnaatttatagagcatttcgnnnnnnnnnnnnnaaacacacctaaacactttatctccaagttacaaaagtttgaggtgcagagggaaggccagannnnnnnnnnaatgaaattatatagattagatctcagtatttaaactgttcctcaattttgtgaggctgtgttggaaataacccgcctctagtgctgttggtatgcaaggcagcggtgcttaatcaatatttcctgtgctcaccagaggcaaaatgtaccaatatcctgacaccattctctctccatttacttctggtggttaccctgactcttgactcttagaagtgcccgagatggggctaacctttattaaacagatcgcatattatgatcttgctgcagccacagtgcagctccacattaactctacagaccaaaccatttgtatctggcatcacttactaacacacgacatgcggcttttctgcatcaactgctatgacggttaagaatgtcagtatacaagaaggaatagaaaactgatactgttttaaataatctgtaatttcaannnnnnnnnnnnnnngctgaaatacattatattgtacgtttgagataattctagtacaaagtataataaaactagatgtataataaaccctttaaatcattggtaagtgtacaagtggtggaactgaagcatttactggacaaagtaatgttactctaatggttacttgctcgtgcgttgccacactgtgttataatttgcttcatttccttgctatttgatacatagtgtgcatttctctgtcactgtaactattgtaatgacaaattttcatcttactgcacaatcaaaatgacattgataggaatgaactccagaggctgggcctgaacagggaggtggtcgctcaggcctggtgctcagtcgtacgacctgtacctctcaacttttgccctatctgttaaatatatgctatgtcattaaatgcttttaaattt

SEQ ID NO: 181573 - DNA, 1251 bp, Homo Sapiens
  misc_feature (154)..(168): n is a, c, g, or t
  misc_feature (611)..(619): n is a, c, g, or t
  misc_feature (682)..(695): n is a, c, g, or t
  misc_feature (713)..(727): n is a, c, g, or t
aagtaacctttagagtaacattactttgtccagtaaatgcttcagttccaccactggtacacttaccaatgatttaaagggtttattatacatctagttttattatactttgtactagaattatctcaaacgtacaatataatgtatttcagcnnnnnnnnnnnnnnnttgaaattacagattatttaaaacagtatcagttttctattccttcttgtatactgacattcttaaccgtcatagcagttgatgcagaaaagccgcatgtcgtgtgttagtaagtgatgccagatacaaatggtttggtctgtagagttaatgtggagctgcactgtggctgcagcaagatcataatatgcgatctgtttaataaaggttagccccatctcgggcacttctaagagtcaagagtcagggtaaccaccagaagtaaatggagagagaatggtgtcaggatattggtacattttgcctctggtgagcacaggaaatattgattaagcaccgctgccttgcataccaacagcactagaggcgggttatttccaacacagcctcacaaaattgaggaacagtttaaatactgagatctaatctatataatttcattnnnnnnnnntctggccttccctctgcacctcaaacttttgtaacttggagataaagtgtttaggtgtgtttnnnnnnnnnnnnnngaaatgctctataaattnnnnnnnnnnnnnnntcaaccacattgaggaacattaggcacagagagtaatgtgttggttctgagcttgcatgctggaatttcactgaaaaggtaagagaagggcaggaggtgaaggaaaggagttcatttctttttgccaaaaaggctgaaccgcttctctttgtctttctctttgtccttttcccgcttgccgggactggactcgctggtgatggtgacgacgctggtggggagggtctgcgcgcggctggatgctggcgtgctctgggtgctggcagacacctcgtgtttatcagaggagatggcggaagagatagcctggatccatgtgttcatttcctcatcgtctttggcttggaagaggtactcattgccatcatttagtcttagcttgaatacgtgtttcttctttttgtaatcaagggccacttcgcagacagcttctttcaaactcacagggacctcgctgtggtagggaattccagaagcagcagtctttgcatctttgtagaaacccatttcttggttatttccaa

SEQ ID NO: 181574 - DNA, 884 bp, Homo Sapiens
ccctgaaaggcagccctggaggggaggatgatatgccgcgcccctgatccagccacaccggggtggccaggggaacagctgacccaaggcggccgccattgggtcgcccaaagccctgtatttcatgctgaactgctagtgcttcttgggatcaaggcgatggccctctctgcttggtggctctgtttgtctgggccgaatcgagcctcccacctgcacctggattaactctagcattccctcgcagttgcctttcatcagagaggttttcatgggttctgcgctgaagctcgtcatcctatgccattttttggaggaagctttggcttcttaacaccaggagtgtagggcatggttgcgttcgtgtggtctctgcctcttcctagccacagaacaggagctgttgccttgaagttgacttttcaagcacctctaaatttccatgaattgctatttctgaaatggagggcctggggaagcaggtttatgtgctgatcaaagaggctgtgcttttcatttctcttctccttagacacattcgctaagccatcggagggcagtcccaggccggaaaaagcaatttgacctcctcctggcagaacacaaagcaaagtcccgggaaaaagaagttaaagataaagagcatctcctgacttccacgagggaaatacttccaagccaatccgggccggcacaggattctctgctagggtcttcagggagctctgggccagaaccaaaagttgcatcccctgcaaaatccagaccacccaactctgtacttcctagaccatcatctgcaaatagcataagcagcagcacatcttcaaatcatagcggccacactccagagcccccactcccaccgggttggaggtgacctc

SEQ ID NO: 181575 - DNA, 522 bp, Homo Sapiens
ttgggtctatgctgctttttcatccttgagaaacaacctaaaaatcttggactgtatttttttaaatgctaaagtaggattcagaaaacagatttttgtcatattgtctttgaaacctcattataaatcatttagcttttgctctacttactttcaggtttgccataaagagcacaagagataatatatatgaaagtgatttatacttttgttaagagttttggtcagtgtctaatgatattacagccttttgcctgactcagcttggcaatctagtctgttaacttcactctaagtaataatattaacttggtttttaaataataaatattttattgaatttattattttattgaaaattcctttgtgtattaaagtactaaaaccaaatactttatttcatttatatgaatttaattagcaattaccaaggttttttatggcttattttatcaaatagttctatattatatattgtcacataaattacccctgtaacttatttgctttaaaaaactgacc

SEQ ID NO: 181576 - DNA, 613 bp, Homo Sapiens
ttggcaggccgggacccttgaaagtgacctccgcttccacgcgtccattccccgccgctccgcgcggcttctcgcccgcccctaccccgaggccaggccggattccccgaggaaagagcctgtcgccgcggcggggacaggagggggctggacgcttccagggaaactgaggccctggcgcgcccagcgtccgcgcgtccgggcgcagaggggccaaggctggctgagggcccgggcctgccagaggcagggagggcggggctggggcaggcgcaggggtctcccctccattacagcagaaaggccccaggtccggcgtgactccccggccgggcgacacaggccgagtcacttcctcgcccgtgcccgggtgtcctcatcgggggatgggtgcgccttccacatcctgcccaggactgaaggagccgggcccaacgagctcccgggaggtgtgtggacatcagccctgacggggaaggcgagccaggagcctgcaggcctgaaccagggtgatgctgaaaatgatgaccttcttccaaggcctctagagccatcagcatgtgccaggcaccctcaacttgcctagaggcccccaaaagttgcagtccaatca

SEQ ID NO: 181577 - DNA, 1088 bp, Homo Sapiens
  misc_feature (946)..(964): n is a, c, g, or t
ctttgtacaaaaaagttggttgttaagtaccttgtaattgcacatgcacaaaagacttaactagctttacatttagcagtcagttggttagattaggtttcatagtaaatgaataggaatagaaagaataggaagtgtttttattttccagtagtaattccgtggattccatttgacccagtttactatcagttcagttcaggtagatttggttcaacttttggtggtttttggctctaggatattcttgactttaatatcctagaacttactgagtcttcccttcaataaatacacttctcacatacctctaatcctatgcttccttgaaacaataatgctagctgagttgtttactaaggattattataagggcctgaaggtgtgggagtggagattaattaaaacctttatgttctccaatataagggaaaagcaggttggtactacttctgattaggcagaaaacaccaggattccttaagtgatccttgaaatggttattgttttctgccttgtcacatttgccactgtgccctttaaaacgatgtggaaacctcaggtttgtggacagcacaggtggaatgacatcttgtgcttcctgaggctcccctctaccaggcacattagcttagtgcttcagatgtcagcccaagtccttgttacctccttttcctgctgcccagggaagagtgtgtgtgctggagctggagcgcttgcactcttcaggtgactattctcacctccatttcctccacatgcattaggtgaaactgaggtctaagcctcctgcaaggtctacattttaaggactcacacatcaggctctcagaaatgtacacaggtattagttctgtttgttctaaaggaaatgtgggtatctctcaggccaggacttagtgactagttttcgctagacagcaggttaatacctagatctcatttnnnnnnnnnnnnnnnnnnncacgattaaagggagctgatcaggtgtgttgagtattttagcctaattccaaagcatggaagagtgctctatgtagaaagaaagctttttctaacgatttgtagctaccctactgtgccctgac

SEQ ID NO: 181578 - DNA, 1096 bp, Homo Sapiens
aaattttaaaacaacaagtttcatgctttgttcaaatacagcttattttttgaaaaattcccctcttccactctcctaacttggtacataaagttaggtaatatttacattgaatttacagtctttttcatttaaaacagtatcagtatatcttgctgtaagatattaatttaagtgattgttgttaacttcactatacccaaacttagcaatatggctgtgagtcaaataaactttgaaaaggaacctgccattttcattaactcattctgactgtaatctttgaaatacatatggcagatacgctgaggctggcccgtcattttggggctacattttagtaaagtagctagtgagtgaaaactgaaataattatacaacatttaagagaaatataagtcttgcactaagaaaccaaaacctacatattatgtaacataacctttttaatgttgtttttgctaacacaaaaaaagttataccattatttatatttcaatcacaacattgctctaaaacacaatctataatccgtcttgtaaccagatctgaaaaacacatattcagactattcttagtttgtatctctggcaaaaagccaaagtaaaacggaataattttactttctcctaaacattctggcaagggggggaaaaaaaagccagatcaaagtaagatgaggattcaaaattggcaataaatccattatggacaaacagtggcactaaagtgaaatttcagaacatattgctttctatatatgcacgtgtgatcttatttgaacgtgagtatttacaaagattctagaaagctaaaaccaacttggtaacctaggctttcaatctttattgtgtcccccataataattagttgtcagaagtttcagcttagtatttaaatatctattgtgattttatatcttacttatactattcagtgtttgcaaaatagatttacgaatattttaagtgacattatatagaacattacttgtattttccagaataacgactttgactttgaataaaaactggagcatttgggctttaaaaacatttttcccccaatttctaagttgctctttttaggaagccaa

SEQ ID NO: 181579 - DNA, 1539 bp, Homo Sapiens
  misc_feature (718)..(726): n is a, c, g, or t
  misc_feature (735)..(858): n is a, c, g, or t
ttggatttgataatatttaaatgtcgttttgggagccaaagatttgttctttcgagcgcaatgggggttggtgggagataagtcttcaaagataatggttattctttaaaagctagaactttgttttcttatgagttttgtgccatactaattaaaatgctgatttttaataaatctagtcagaagctctcttgttatgctggtagaaaaacaaaccatgtaatcgtttactggaggctagaaaacatttatcccagacaagttctttttaaattaaatttgctttttaaaaaattgagataaagcatttatatactgcatttggcagaattttttagttttaaagtatctcggtatgtaatgtgatttttatttgcattcccctaattactaaatagattgaacatcgtgtcatgtatttattgtccatttctttctttggcatgtagttacccagttttctcagcaccatttattgaaaatgtgctgtcctttccctactgtaaggtgctgtccttgaaaaggtgctgtcctttccctactgtaagttcttggtgcctttgttgaagttgagttggtttataaacgggtggatttatatctgcattctctattctgttctgttggtctatgtgtctgtttttatgccagtaccatgttgttttggttactataggtttgtattggccatttctgtttcctgttctgtgaagtatcnnnnnnnnngagacagannnnnnnnnnnnnnnnnnnnnnnnnnnnnnnnnnnnnnnnnnnnnnnnnnnnnnnnnnnnnnnnnnnnnnnnnnnnnnnnnnnnnnnnnnnnnnnnnnnnnnnnnnnnnnnnnnnnnnnnnnnnacctcgtcttgaaatagccttttaaatgttcacctcagcttgcctcacagtggtaaaaataagcatttttttgttttgtaggatcagggagcttccaaggcatttgatacctttttgatgggaagaagggctctgaggagctccaagataccccaacctccaggcccttcattagggggtagttgggtttctgtttggcctttccccctgggccccataggcttaaactacccccacccccacctccgcctcctacctcagctgggagcactgtcttccatggggcttccacttctctcctcaacctggggaagaccacagggcagtgcctgcctcaggacctgccttccccaaaagctggcttcttgctccaaggagagagcattgaccctcctgccagagtcttgccttttgcccaaaggagcctggtcttcagggctgcataggatgcaagtgccttctctgcttctcaccgtgggtggcactaatttcctccttaaccagaactttgttccagccactgacccattctaactcttccccctctgactctcctgcgcagggtctgttcctggtttcccagatgcataaaggaagacatatccctcccctgggcagcaaggctacaatgggagggagggagaacatgggagcatgtgaataaaatggcattaaatactg

SEQ ID NO: 181580 - DNA, 1234 bp, Homo Sapiens
ttgggcttgtggggtggattataagcagtttgggggtgctgtttgtatagttaatcttagagcaccttccgtatctgcccggggaaagatattgtcattactgccatggaccctgctggaaaagaggtaaccaaatccattatttgtgatgcagatccatctgtttgacattgatgttcctggaaaaattacatttcaagaatctaaaacattgagtccgggtgatagtttctccacatttgatactcgtatgtaccagataagtttgcctctttagcaatctcagtagaagacaatcaggtatttatttcttttttgtctctctccgatttcttcacataacctaactgaaagaccataagtgagaaaggcagagaatcatcacagatctggaaagttcgggcttatttgagaactaaggatttgacacgattttgccctttgatttgattgtagcttcctgttacggcttccagagtatacctattaggctacagttgagtacctcccatctagataataagcattcaattagaatgaatttctcatctttactccgctgatgtaaatgatgtctttatgagatgaagtccaagtaggaatgagcttgtaaattatctctgtcctcaggtcctgtgttaatttatccctgtcagtgttttgtgatcattatgtcatggaggatttcccctgccacaccatgctgtagggagttaacttttcatttgtgcattttctgtttggaaacagcttactgcagagtgggtctgggcatctgctacgacatgcggtttgcagagcttgcacaaatctacgcacagagaggctgccagctgttggtatatccaggagcttttaatctgaccactggaccagcccattgggagttacttcagcgaagccgggctgttgataatcaggtgtatgtggccacagcctctcctgcccgggatgacaaagcctcctatgttgcctggggacacagcaccgtggtgaacccttggggggaggttctagccaaagctggcacagaagaagcaatcgtgtattcagacatagacctgaagaagctggctgaaatacgccagcaaatccccgtttttagacagaagcgatcagacctctatgctgtggagatgaaaaagccctaaagtttatgtttctaatgtgtcacagaataggacgatatgattctacaacataatcaactccctattaaattctttaatgaaga

SEQ ID NO: 181581 - DNA, 1360 bp, Homo Sapiens
  misc_feature (153)..(213): n is a, c, g, or t
ttggctctcattcacctgttgtgtgaccctgggtaagacccttccttgtttgaccctcagctttcccatctgtttaatggtggctttggccaaggcaatccacaaacttccaaattccccttcccatcattacacacaccgatgcacacacannnnnnnnnnnnnnnnnnnnnnnnnnnnnnnnnnnnnnnnnnnnnnnnnnnnnnnnnnnnngcactagttagtgccttggatgaggcggggcagtgtgtatatggacccctggacttgctaccttcagggttccatactcgtccctcccctcctggctctgctgtctggagtctggcaagcggggtgtgttcagaaggtcctaggcctgtgtcgcatgtccaggcactggcctgaccatccggctccctggcaccaagtcccaggcaggagcagctgttttccatcccttcccagacaagctctatttttatcacaatgacctttagagaggtctcccaggccagctcaaggtgtcccactatcccctctggagggaagaggcaggaaaattctccccgggtccctgtcatgctactttctccatcccagttcagactgtccaggacatcttatctgcagccataagagaattataaggcagtgatttcccttaggcccaggacttgggcctccagctcatctgttccttctgggcccattcatggcaggttctgggctcaaagctgaactggggagagaagagatacagagctaccatgtgactttacctgattgccctcagtttggggttgcttattgggaaagagagagacaaagagttacttgttacgggaaatatgaaaagcatggccaggatgcatagaggagattctagcaggggacaggattggctcagatgacccctgagggctcttccagtcttgaaatgcattccatgatattaggaagtcgggggtgggtggtggtggtgggctagttgggcttgaatttaggggccgatgagcttgggtacgtgagcagggtgttaagttagggtctgcctgtatttctggtcaccttggaaatgtccccttcttcagtgtcagacctcagtcccagtgtccatatcgtgcccagaaaagtagacattatcctgccccatcccttccccagtgcactctgacctaactagtgcctggtgcccagtgacctgggggagccctggctgcaggccctcactggttccctaaacctttggtggctgtgattcaagtccccagggggactcagggaggaattatggctgagtttctgtaattttcaaaagtgggctgggagaagcctctagaaggtccagaatattacctccagatcagcctgggggtta

SEQ ID NO: 181582 - DNA, 1950 bp, Homo Sapiens
  misc_feature (1651)..(1659): n is a, c, g, or t
ttggctatgagactgtatagaagcttctagagaactgaaagtcataatgccattcttaaaaatttcataggaaacctaagtagagcagcattgtcagcattcactaaaccaaagtcagtcaaatgtgttaaaacatccaaagttgccttcatgcataagacatagctctattgttaccatggcatttttaagaatggctatgagactgtatagaagcttctagagaactgaaagtcataatgcagagttgccttttctagtgcagctaagtggcggacctcaactgaagatatgagtttctttgggttcttggagttatcaaattgatcttgccattatattactttgcaaataactgaagtaaatgattcttacctaaataaccacaacctgtacacatttgctcacaatttatagtagttattttctatctacctatatttaaaattaggatgattaaaaaataatttatagattttgtgacagtaatgatttacatatgcccaatatatgccttatttttaaataagtcattctgtataaagtcattttgttgttgttcagaacaaaccaagatcttattcacaaagaaaaacattttataaattgatcgcattttctttaagtcaaaatgttaaactggaggcagtattaaactttgcaattaggagtttcagagatgccttggcataccacgaaaaacactgtcaatatccaactcattataaattgttatcagaattaacctaataactttaagtaaggacaagcagcatcctagcaacttgtagtagtcttgggttcccagcagagtatcacagttaacctctctgacaacttcatcagaatttccaagctgccaaataatcttcatagacctaattacagatttaaaaaaatttcctaggcgacgaaagtatagaaatgtgaatatgttgaatacattgagaagctgtactttttaattagttatattacttctggaagcacatatctaaggaatattttctaagactcagagggaaaaaaactcgttttcataggatcatctgaagatactttagtatatttgtgatcatttttatctattgcaaatacaaatgaattagataagtgccacatcctggatacatttcggaggggtagtgggcaatggtatacaaaaataccaaatataaaattttcatctgggggaatgttcaggttctaaatactaaattagatttcaatgttttgtgtttttttaaaaaaaatcatattgcaacttgttttattgtgattttctacaagtattaaatacatttaaagatctttttatcttaccaagaaataatttggaatagcattggtatatttgaccttttgagtgtctgtcatcctcagagaatggcccatagtgtgttgcctgtggacatagtgtccatagtccctttcttgtccttctgagatattttggtttgataacattttgttttttgtcttgatgcacagggacttttttataatatgagacttcagttggtattaataggagttacctatttaattctcccagtcatcaatgaggtaatcatcaattcctatagttcaaattagtcataaacaagagctacagcaagactgatagagtaaaaactatataaatacagtnnnnnnnnntagaatttatggtgtgaaatatgaagtatagcaatatataacaagaacatgtaagcacttgcttccacagcataaatgtaatttacatatgcattaaaggataattttctctgtgaataagagcaaaatggtcttcagagaaacagactgttcatttgaagccatttctgtaaacatcttccaagatagaactgtaatggattgaggaaataacacagaaaagacaaaacttttgatttcagcatgcaaagtgcgtgggcagatggacagttcccattgtgcattgccttt

SEQ ID NO: 181583 - DNA, 542 bp, Homo Sapiens
  misc_feature (173)..(292): n is a, c, g, or t
  misc_feature (360)..(416): n is a, c, g, or t
agaccctccctgccacccccatttgcacatgcagtgaactgggcctgaaggaacggggatggaagaagactggcaaaattaaaaaaaacggtagctacagagtgctaaggaattcctgctacagatcatgctatgcttataagatttagtggcctggcatggtggctcacacnnnnnnnnnnnnnnnnnnnnnnnnnnnnnnnnnnnnnnnnnnnnnnnnnnnnnnnnnnnnnnnnnnnnnnnnnnnnnnnnnnnnnnnnnnnnnnnnnnnnnnnnnnnnnnnnnnnnnnnngcatggtggcacatgcctgtagtcccagccacctgagaggctgaggtgggaggattgcttgagtccannnnnnnnnnnnnnnnnnnnnnnnnnnnnnnnnnnnnnnnnnnnnnnnnnnnnnnnngagatcctgtctcagagaaataaataaataaaataaaagacttagagaaagtacttggaatgtttggagatagagaggaattcagaatacttcatgtgggagcacaaataactggcaggtggcgtc

SEQ ID NO: 181584 - DNA, 677 bp, Homo Sapiens
gagcaatgcttttttataatgccaactttgtacaaaaaagttgggttatttatctttttgttgtttttgttttaatcccatagattgtcatcagacaataatagagtgattgagagagaaagatataaatgccacttctaactttttgataaaacttttttgagcatttttcaaaaatttgtatgtttgtggtaatggggaattaaacaccttttacagctgatgtatgttggaaatcattttatgtacatttaccaactggtacttatcttcaagttggaattttcacatccataaaagggagacttgcatcatatataattttcagtatactttgctgtccagccttttaaacaattacagtaacattttgagttctgtgatgaatagttctaggggaagggatggaactttcgacatgtaaagtccattgttttaaatgctaaccccatccccaatatttttgtggaacgtgaggctttatgaaaggtttatcagaaatagaatattctaaagtcacttttatggcttatttcaaaaactagtgtgaaagtattttcatgcttttttgtttctcatcttttagcaaagcttctttaccaagttttgattaaattgcaatataaaattaagttttttcacggtgctatattttgtggaatatgggtagcactcag

SEQ ID NO: 181585 - DNA, 657 bp, Homo Sapiens
ctgagtgctacccatattccacaaaatatagcaccgtgaaaaaacttaattttatattgcaatttaatcaaaacttggtaaagaagctttgctaaaagatgagaaacaaaaaagcatgaaaatactttcacactagtttttgaaataagccataaaagtgactttagaatattctatttctgataaacctttcataaagcctcacgttccacaaaaatattggggatggggttagcatttaaaacaatggactttacatgtcgaaagttccatcccttcccctagaactattcatcacagaactcaaaatgttactgtaattgtttaaaaggctggacagcaaagtatactgaaaattatatatgatgcaagtctcccttttatggatgtgaaaattccaacttgaagataagtaccagttggtaaatgtacataaaatgatttccaacatacatcagctgtaaaaggtgtttaattccccattaccacaaacatacaaatttttgaaaaatgctcaaaaaagttttatcaaaaagttagaagtggcatttatatctttctctctcaatcactctattattgtctgatgacaatctatgggattaaaacaaaaacaacaaaaagataaataacagaaacgtacttaaaagtatccaa

SEQ ID NO: 181586 - DNA, 1150 bp, Homo Sapiens
  misc_feature (844)..(861): n is a, c, g, or t
ttgggtaccttcatcagttgccactgtaaactctattgccccaataaatgcacgacatatacctaggactttaagtgctgttccatcatctgccttaaagctggccgctgcagcaaactgtcaagtttccaaggtcccatcttcatcctctgtagattcagttccaagggaaaatcatgaatcagaaaagccagcactgaacaacatagcagacaacacagtagcgatggaggtgacgtagcttcctccgagtggaactgcagcctggggacttgattaggtgctatgcatcagtagcattttgaatgcaagggatgatggaaagcagcacatgcgtttctgtggcagctgtggggacttgacagcaatgctcatctctcatgcttcaatttttcttttcttactgttaataggaaaaaaatcaacatctgtaaattaagaatacagcaattatctgtacagtactgcatatttgtaatacccttgtatatatgttacttgaatacagaaatgttcatttgtgatgctttgcacttgggggtggggggtgggagggaaatcaattgcaacaaagagtgtgagatgtgagattgtatagagatgaagtgtcatcacatcatgtgcatggtgcggaacctgctgttttatctatttattgtgccgtgtttacagttttttgtacactgtaccttcattggttcctgtgctgtagtaaatgtgttaggtagctgtggactccttggtattttgtaaatggtataacataacttggttcccctctgggtccttgagttttctgtgtatcatgtgaaaaaaaatggtgacatacatacagaattttacnnnnnnnnnnnnnnnnnnggcatcagtttttttaaaaatggggaatgtactattaaatggggatcttcctggtctactatcattaggacaagtaacaagctaaaaatgaagtctcttgaatctttccatccccaacttgcccacaaagctgtgggtggtttctggtacttaaagcactaatattatgttgctgctctgcgaacagcccagtagtcccatttccttccacaccaaaaagtgttaaatcaagtatgcaaatggagtccttacaactggagtttatgttgtcttgccctttttttagcac

SEQ ID NO: 181587 - DNA, 1452 bp, Homo Sapiens
  misc_feature (67)..(87): n is a, c, g, or t
  misc_feature (257)..(265): n is a, c, g, or t
  misc_feature (1055)..(1077): n is a, c, g, or t
  misc_feature (1363)..(1372): n is a, c, g, or t
ttggctcacgaatctgctgtaatataagacaacagcttttaaatgtgtatataacccatgatttcgnnnnnnnnnnnnnnnnnnnnncttgatggtttccctctccctccctctcttcccattctccttttaaatctctttgaatcacatttggtagtgattttgacttagtccagtagtcacatagctttaatatctagttcaaagctaaccatagtataattgttatattaaggagttattttttcttaaaacannnnnnnnngcttgttttggttctgttctcacttttaaaggatgctgagatggtaatatgactctccctattttggcaattctgagactgtatgaattttcaggtggaactttagcacacactgaagcaaagttgtgaagtgcagggcgggaggtgggcgtgagctttctattttgcgttgtagaagaagtgagatgtagtaagctaattaacagactttctagcagttctttttgtgatgtctctttgttaatctgagtctatctattttcggcaataaggtaaggacgacagtgttttgagtgtcctccttttctataagtgctttttttctgttgaaagaggtgatattataaggttttttgaaattgtgaattctaaaaaagaaatgttgtaaatacaattccattaactacatagaaactattaagaaagagagaatcaaaaatatttttgtgagggagtcggtcccaggcagtttgatgctctgtggaaggaggcgggaagggaacgttggccaagtcagttactgagatgaagatcgcccagctgccaggaccaccccaggacaagttagagcactgtttagctcctttgtctgtgtgatagacctaagaactgtattagtgttgtaccagcctattaacctcttgtctgtgcacagcttcaaatgttaccgtctagttagatttttatttaaaatatgaaaaactgcttttcccaagatgtttttttaaaaacaaagctacaattttaatatttaacatatttaaagtttcaaagcacacctgtttggctnnnnnnnnnnnnnnnnnnnnnnnacattctttttcagtcttaatttttaaatatttgatcattttctattgtccaatcatttcagcacctccaaaggtccctaggacactttgcctctcttctccccctgccccccaccctgctcccacatctgggggcccatgggccaggagtggataagcctgcattaatacaacctttctccattcactttctatttacaaattaggaaagcaaccttttggtttatatatatatttttttaatacctcagtgctgcaagtatcaccagagaggctatggaagaannnnnnnnnnatttattgtagatgtaacagaaattttaaaaataaaaatataacatcactgccctgtgactggtgggaaaaactgacagt

SEQ ID NO: 181588 - DNA, 1232 bp, Homo Sapiens
  misc_feature (238)..(292): n is a, c, g, or t
  misc_feature (370)..(391): n is a, c, g, or t
  misc_feature (555)..(563): n is a, c, g, or t
  misc_feature (848)..(870): n is a, c, g, or t
tgttgttgctgtttcattagaatgaaaacgggttttttctttctatctgagttagcatttgggagtctttagtttgaagatgcttttgccctaccatgtctgtgaatgtctacattagtctactttgttagtaaaatttataaaaataggagtgcagcagctctttataataaatgtcgcattcagtgtctcatactggctgtgccttaagtaccaaatttataaacgtaacaatttnnnnnnnnnnnnnnnnnnnnnnnnnnnnnnnnnnnnnnnnnnnnnnnnnnnnnnncacactacaatatgttttaatgccatctattgagttgtacttctacagttgctgttgccgacctattaccaatatttnnnnnnnnnnnnnnnnnnnnnntatccttcatcataagtatctttccccaaccgaggaccatatattataacagccaaatgttaaacatgtgcaaagaggaaactgtcagtttttcccaccagtcacagtgcagtgatgtttatactttttatttttaaaattctgtttacatctacaataaattnnnnnnnnnttcttccatagcctctctggtgatacttgcagcactgaggtattaaaaaaaatatatataaaccaaaaggttgctttcctaatttgtaaatagaaagtgaatggagaaaggttgtattaatgcaggcttatccactcctggcccatgggcccccagatgtgggagcagggtggggggcagggggagaagagaggcaaagtgtcctagggacctttggaggtgctgaaatgattggacaatagaaaatgatcaaatatttaaaaattaagactgaaaaagaatgtnnnnnnnnnnnnnnnnnnnnnnnaagccaaacaggtgtgctttgaaactttaaatatgttaaatattaaaattgtagctttgtttttaaaaaacatcttgggaaaagcagtttttcatattttaaataaaaatctaactagacggtaacatttgaagctgtgcacagacaagaggttaataggctggtacaacactaatacagttcttaggtctatcacacagacaaaggagctaaacagtgctctaacttgtcctggggtggtcctggcagctgggcgatcttcatctcagtaactgacttggccaacgttcccttcccgcctccttccacagagcatcaaactgcctgggaccgactccctcacaaaaatatttttgatccaa

SEQ ID NO: 181589 - DNA, 1684 bp, Homo Sapiens
  misc_feature (69)..(85): n is a, c, g, or t
ttggagccaagaggaggacagttcgctacacagcaatgcatcgaggtatgagctatcaactttcttccnnnnnnnnnnnnnnnnngggggagaaacctcagcttacaattgtttaccttgacagacatggattgctgtctgttttattgtgtttttctaatttggattcgttttttaaagcatgaccttgagattgctaatatgccacaccctaattttttggtagcaatttatgaaagttgagttgtgacttaaggcctcttacagcagtcaaaaggtaaggtacctttattcaaaggggcctttactgtaatgtacagtttttctgtcagtaaatttcagtttttaggtttttgtactgcagaaaaatgaccttgtcggtttagccattgctgcattgcaccattttacatacaaggcaaattttttctttgaagaatccaggatatctaaacttgtaactgagggccatagagaagccttgtagtagtaaattatagtaaatagacatatcagaaagttatatgaatgaaaaaatgtacatttaaaaacaaaatcacttaaaggaccctttgactgatgcctctcagtttatatttttatgtgactttatatttcttttgatacacttgacattttaggaaattttgatgtgatttatcaaaacctttacttgatgggtagagttcctgcatttatgaaatcaaatctgtaataacagaaaatcctggaatactcttaatatatacttctattttgtgtttgttactgtgattaatatttgcagttgtatattttacatttaaattattttaaggtttgcatttgtatgcttaagacattgatttcctgttggtagatgtattttatcctcacaatttagatgtagctgctttaaatttattgatgtatttcgacagagtcgtctggaatgctttatcttctgaagcttaaaaatgtactgtttgtgcaaatcatgatctgtttcacattccttggagtaccttgttagtgatgaagtaataaagcctctaagatgtttttgttgtatgacctctgtatattaatttttaaaagtacatatgaatgcattttttgatgtgttctttatgcattttcatattataaattttaaatcatgcagtttaacaaggatgtgattcattatgtggttttccttcccaatttttacttttctaatttttataaataatacacttttctattaggctagtgaatttgaaagttttgaacatgatgtgttactaatatgctgaattctatttattttatttgactaaaagcatattgagccttgctttagaaaataagttaccaaatttttttgcattgagttgtcacccagtttgtagtgctgtcttaattgaattgcccatgtaaattactagattaaattgaggacagaaaagttttttactcatcctaagctgtttttttctggaaagtaatgacaatttgaagaaatgagaacctccagatatatttggcaaattattaaagattcagcactaaaattgttgctcccttgagtgtatcatttgcataggtctcacatgggttttggctctcttatgcaaggtttgtggttaacatcattgatcagactgtgctttctaattctaaaaaattgagcagtgttggtattctttcagtatttttactc

SEQ ID NO: 181590 - DNA, 1568 bp, Homo Sapiens
  misc_feature (297)..(346): n is a, c, g, or t
  misc_feature (360)..(442): n is a, c, g, or t
  misc_feature (988)..(1004): n is a, c, g, or t
ttggctctagatggcggctgtgccttagagagagcgcgctctgctccctgcctttgcctcactttacgcaactttccctaactttcgggcagcctcagggggcccccgtagccccctgcctttcctagggacttactggggtcgattcgaacctttttttgggagaaaagcagcttttaggagctttcttttcgtgccttgttggaaagaagcagccgtactgagagcccaggtcgttgttttttccagcttagaagccatggcgcacctccatttttgtgcgctctcctaatgagnnnnnnnnnnnnnnnnnnnnnnnnnnnnnnnnnnnnnnnnnnnnnnnnnntgaccagttaacannnnnnnnnnnnnnnnnnnnnnnnnnnnnnnnnnnnnnnnnnnnnnnnnnnnnnnnnnnnnnnnnnnnnnnnnnnnnnnnnnntctactagtagataggactcttggtttggacatactacatggatcaggtaagttcacgatcattggtgataattttaaagatttatttgtttaagtttgccttgttttctgtaaatacgagaaattcttggatgacgcaataagatacagagattgttatttgtatctagtgtgctactttgagaaagtttccttattgatagtgatgcttccactgttcggtttatcctgttgttttttcttttaaggaaaaaatagaaatatttagttttttggtgcttaccgttgttgtgttataacaatatcgttaacatcgtcaggactttgttcctgataataaaaagcatcgatagaagccgggaccttacctttctttcaacttttgacagtaaatacctgggcacaggacttcaaagcaaacacagattccccctcccccttaatatttaagaattaaaagatgatgagaaataaggacaaaagccaagaggaggacagttcgctacacagcaatgcatcgaggtatgagctatcaactttcttccnnnnnnnnnnnnnnnnngggggagaaacctcagcttacaattgtttaccttgacagacatggattgctgtctgttttattgtgtttttctaatttggattcgttttttaaagcatgaccttgagattgctaatatgccacaccctaattttttggtagcaatttatgaaagttgagttgtgacttaaggcctcttacagcagtcaaaaggtaaggtacctttattcaaaggggcctttactgtaatgtacagtttttctgtcagtaaatttcagtttttaggtttttgtactgcagaaaaatgaccttgtcggtttagccattgctgcattgcaccattttacatacaaggcaaattttttctttgaagaatccaggatatctaaacttgtaactgagggccatagagaagccttgtagtagtaaattatagtaaatagacatatcagaaagttatatgaatgaaaaaatgtacatttaaaaacaaaatcacttaaaggaccctttgactgatgcctctcagtttatatttttatgtgactttatatttcttttgatacacttgacattttaggaaatttt

SEQ ID NO: 181591 - DNA, 1024 bp, Homo Sapiens
ttgggcagcttggatgattctgatgaacagccaggctgggagccattggccagaagctctgttgaccgactgcccctctctgttggctctcacagcctgcacagggtgtccaggtgcttatctggggggacctttctctacctagggattcctgcactcttgccttcgctggagggcacttccttcatccccttcctcctctcatcctgctcatcagagttgtgggcttgtttcactcctggcactggcaccagcttgctgtgtgacctggctcagtcacgccccctctgaacacctgtaggatgtcagggctggacggtagaggggatgccccttaaactatgagagggctgaagtctgactagaaaatgcagattcaactcttactcttcacactttcactaagcatttgccttgctcagggggcagggagagtagaacagccatagtggtgcaggctggagggtcccagtccattgagatgagactgcctgcagagctccctgcaaatggccagagggtcaggagctgcaggaggctggaatctttgggggctggcacactttgattccatttgctgtactccagggtcgtggatgtggattttggtttttttctctttgcacaagatagtgaatgaaatattttccctcgttactcaagatcaacttttctgagcattgcccacgtgtgaaagataatctacatccctttatgcatttgaaatccttctgtgatctcctcttccattttctgtggttgacttggggcaatttgaaggcattgtgtgtccagattttgcttggagtgttttagggggagctcctctttctgcatttaaacaaagagtagcatgggcctgttttctgagcgtaggcatctaagaatgggctcatgctctagctgagggcccatgtgagcacttgaatgtactgagatgacaggtgtggaatgggtcatgaaagcttgctatagggttttagggcgaagaatgcttgtgctgttttatctttatttgtgccaa

SEQ ID NO: 181592 - DNA, 1744 bp, Homo Sapiens
ttggagattttatttattcagggctcctttaagccagaggagattcctggaggctgctaaaatagaatgctccacctggatagttaacatctggattttattttgtttcaaaaagttaattacaaatagttcgaattccttctggtatccctctgagaagagtttcttactgggtggctcacaagcggggagacagaaagggaaaaaaactagattgatattgctcaggagaaacaggattgtggctacacgtgagccatgtatgcaattttgaattttcccatagtcatgtttaaaaaaacgaggaaaaagtgaaattaattttaatactaaacccaatatgtataaaatatgaccatttcaatatgtaatcaattttacacttattaataagatcttaatatttttaaaattaagtttttgacatccattatgtattttacactcatagcatatctcagtttggactagttgcgtttcagctacctgtggttagtggccgccatgttaatactacagcacaggtcaagataacatttgcaaaggcaaggcatcttcccctccccatttctagtttcatgaactgtgcacagggatatggggctgttcgaggtacttttgggctgaccaaggctcagaggctactgacagctttgctgcaagtaacttctaggccttgtgggtcccagtgcagggaacccatgtgcggtgacactggagaagccatctgatccaggtctctcacttgacagatggggaaactgaggtccaaagaggtacagcagcttggtttaagagatagagatggaactggaacaaaaataataaccatttgataatattttaacatttattgatttgtttttatatgccaagaccttttaaagcattatctcctttaaactctcataaccactcattgaggtaggcactcctatttctactttgcagatgaaaaaaattgggacttaagaggaattaaatatgaaagcagctactatttgttgacagctattttaagatctttatatacatatatacatgtaataaattctattctttactataaacatacatgtcagaaattattagtgttatcatccttgtcctcctcattccactttgcagatgaaaatactgaagctgagagagactaggtaacttacctagtatgtacctacatagtgaagccagatttgagccggacctcctgactccagagtccgagcaatctcaccaattctgcccacggtcaccccactgcatgatggcagagctagtatttgagcaggtgtgtctgttctgtggtctgtggtcttcaccgccccactagacagcctggatttttctgctcttgagtctcaacactttctgccttactgtgccactagtaaggaacagaacagggaggtttttgaccccagcactgattgaagggcccaggcaaagcaggctcgtctcctctggcttggctggttcccaggctgccctaacccatgaagccagattcttggccaagttaagcagggtgggaagaacacttgtccattccgtcttcccagttgggcgaggtcagtgtacccagttggaaagtggtatgtgtctaattgcaggggcgggggtaggggggaggcccagaggattaacactctttaaatagacatcaggaaaactaaagaatagccttgctgcctggtaatttgatgggcattcctgactacagggccacacactcagtaaggtg

SEQ ID NO: 181593 - DNA, 1124 bp, Homo Sapiens
tattttcatattcctataaatctctgactttgctctctgttgtagctaaactgcttacaaattagtttgattctaccaggtcttgcttttaagttttgtcaggaggaaccagggaagaatttattctaaggctaatttggccccactactgagggaaatggcttccaattagccttacttggtgcttcacgagttacgaagttttccacgttggccagtgagaacaggaactactcctggccatgtatagatctgagaattgttgactgtgatcttcttggcaactgctttttccagctctggtagcctcttcattcacatcctgaattcacatcagctaaagattcaagagggatcccttggtaaattgccagagttctctctgtatgtgagctctctcttcttcagtatgttttcttgtatagtattgccaccttagccactgtggacttccagtttggtctcctcaattcagacagatcagcaggctccacctgatgtccccctttctatacaaggttgggaaactctcccaaggtagtaagctgggttaatcacaaggttcacctcatttgttttccatctctcagggatcactgtccttcactgtctgatatctcatgtcttgaaaactgctgttacatatgtttttgttcagttttttagctgtttctgaagagaggtaagtctaatctctgttctttcaccttggccagaagacaaatttagtggtaatgttttgaaaatattaaggaattttttgactttatcaatatataaagtttagccaactctttttggttagattaaacacccactaggagagaggcgatctacaaataccatttcaaataacttgtgagcaattcaatctactttcttataaagtcggtttttcaagttttgttgtgctttccttacaatctctttcctaaaaagataaatcatgtcacacgcacagttcaactaactgtccttttgataatgcccacatctttgaagcaccaagtcacagtctattttacataaatatttctccaatacaattatttctatccatgccactgggagtgactaggcaacagcaatgagcagtgaattatctggaaaagcagaagagccaa

SEQ ID NO: 181594 - DNA, 893 bp, Homo Sapiens
ttggagataacctcagggtaaaaaactgggccttggaaacatcagagaggtgcagattttggcagtcattggacatttccttctctcttagcccaagaaacctattaaattcttgcctgacaaatcatatgctcccactgcagcaggcggaaaaataggactccagtgtctctctttggagagttctttcatagcaaattcctgtaatgcccattctaatcattatgccttatactggaaaacattcttgctggtgtaattgcacctgtcctttctgtttcatacatgtacacacataaatattcacacacagttttctttcaaatccaaaaagtacaagcttaggaaatccttttagaaaaaaattatttctaaaatctgtcctgcctcttaggcacttccgtatcctcagatggccagccactcgtcagatagcaaagttgtgcaagactgaagcacatcaactttgtttttctcctatttcatatattaaaaaatctgtgataaatgctctgttaccctcagagtctgaaaaaatatgtccctcctttgagatgcaaatctgaactttgattagaaacagagtctgcctccttgacagccacagataacctctcttaacaagttaaaaacaatttttaaagcagaatggtgtgttctgagcttatgaaaaagttaattcatagggtttttcctttttagctcctaatggaaaatgccagcccctctcataggcacaaactgacctattatgcccttgtctctaagggatggttgtgcgagctgttacgctggaaagaagatccttctccagaaaacagaaccctgtgggagaacctctccatgatccgaaggttcctcagtcttcctcagccagaacgtgatgccattta

SEQ ID NO: 181595 - DNA, 925 bp, Homo Sapiens
tgtccaaaaaagttggtccaggcgttaatagttcttcctgggaaatttaatataggtgcagaatcctaaataacactgtgagatgtaatcttaactgccctcaataccttataaaactgctgcatttaacccagtgtgcatttaatgagtggctggtcgttgatacactcatcttagatgctgaaatttctgttttctccagcccttgtaaaagtgggtttcttgatgaacgcgtgctcccaatgctgaagcaaaagatttgcatttaaggagagaaatacaccctgaaatttgagtttgaaagattagaacatagagggtctctacagtgtttttctgcaacaccaagtagtcaaatctatttatagaaactctgattacaacagaaattttaaaatgaaattttccacatcggtattttgtaggaaagctcttataatcaatgcttaagctgctttttgaggcttttcttgtacagaggttgcagccaattacattttaattggtaggctgctgaataatgtttttgtatgttttaaaataatatttattttaataggttttttaacattatgcaaatcccaataaagaactgacacgttccataggccattgactgggaaattttgtgaaacacagcctaaatacacagtttttacaccaactaatttgtcttgcctttaaaactgattataactcttctttaagtacaacttttataaagaaaaaatacaacactaagactgtatgttctgtaaattatagtgtgatgacccatgcagaaccgctgtctgaagcttactcagcgattcatagccatctccagccatgttttatcaatcacacactaaaaataaatggaaatgctacagtgaaaaaccaaaagttacagagcaacataagtaaaatgactagcagtttctta

SEQ ID NO: 181596 - DNA, 1497 bp, Homo Sapiens
  misc_feature (257)..(288): n is a, c, g, or t
ttggcacatggtaagtgtaaaatatacaacttgacataattcattacctcccagctccaactaaagctctgttttctactgatgtgtgtgtcaataactattagacagtcagtcccattcgttgaatagacatagtgtttacagcattgtgttcgatggaattttaaatttcagacaaaaggagtttataattcagtcaaaaaattatactatttgcatactcatatgtccctgcgtgtgcgtgcatgcacacgtgnnnnnnnnnnnnnnnnnnnnnnnnnnnnnnnntaacttaagaattaccagaatgacaaatgttcacacatagttggtagcgttcgaagagtcaagaggagcggacgtattctctaaggagccaggagaaagtctgtttgcagtgtgttcattttctccctagtaggtcttgtcattgccaaccaatctggtgaactatctcctccttcccaaacccagaagctggattctttccggtatacctttagaattttaagccttaggcagaaaggaaaaacatccctcagtgacatgctattaagggagaggataaaacatgtgtagagtttgtggtatataagagaattaaggtgacatgtgttacagatcagtttgactttcactatggatgacactattgggcttagtctccatacttcatggtattatactgggggctaaagttacaaagatgtatttaaagaatagacttcaaccatatgtcagaagactgggaaattaatgtatatttatatattttaagttaaaattaaattttataggtgtgtatcaacttgtatcattctcaaacctaactgacttttgtgatttacttgcctggttaagactggctgagttaagagggccattactattagtatacatgatactcagcttagttgaggagacaagatatataaacagaaaggcaaaaatacaaaatagcttctgataaatgttgagtaagtggctcacacaataagcccaagtaagttcagagatagaagggtcaacttgggccacagtgacagaagaggattttgtggctgaggcaggatcaaaggtgaactttaaaagtaaagctttattgattacctattgtaactgaagtcatctatgctaattatatatgtggattgatggggaatgtggttaaaagagaattctatacttcacactcattaggataagaaacaaaataatataaataataataaaatgcagtatattccaatattaaaaccctttctagagcattcaattatgggagccttggttaaggctcgatcttgtcttaacactgtctcaaggtttttattgtgccccatttttaaagaaatgctgcttagctttttggactagaatggtattttagtttaattctcatcagccactattagaaagaatacagatgtgaatatatgaatgaactttcagcatctcatctgtctttcagtaacaggagactatactctttctcct

SEQ ID NO: 181597 - DNA, 1111 bp, Homo Sapiens
  misc_feature (93)..(149): n is a, c, g, or t
ttggcaaagctcttcagcatattcttctaaaagattattttattctaagtgaatttactgatgttaagttgtagaaagtgttgacttctatgnnnnnnnnnnnnnnnnnnnnnnnnnnnnnnnnnnnnnnnnnnnnnnnnnnnnnnnnntggaaagagaatgtcagttaaaggacatgaaaggaaaagaagtctagggaggtaaagaaagaccaccctctaactctagccattagtctcagtttcaccagtctgtgtaattcaatccaaaatcagaaaatggagatgcagcttctatttatgcagttgaaattattagccatgtagcccccctgcccacacagatgtaattaggatgtcagaatgcaggtatgtccaatctgcattttgtatggatgctgtagaagttgctttgatgtctctgttctttatttttatacttctctatttgatgaatatttagtaataaacctaaagtttaaaaacttatttgctttctgttttgtagtaattgtgagtcgtgtatttttataatgttaaacgtatgtccaagactttccaagaatattgattagaaatctgagatatacaaatactattttaattctaaaaggagcaaaaattttaaaagctgataacaatttaaatcagttgcagatctcactttttcaagaaatgaaaaaaccaaagcattgttatattaaatctttttaacagctatgaaagcacagaacaaaattggtcatttaacatgtgtaattattatatatttatattcttagctctagtgctattttgagaacaagcattattttcctctcaattcaacgaatatttcttcctcactaatgttataaaagatgctaatgtgaggattttggatttggactgcagatcacatctcttttacagtttgaatccattcagaattaatggtccagttgtcaagaaaacatttctatttcaatttcagcgatgaagaacgatacagatacagggaatatgcagaaagaggttatgagcgtcacagagcaagtcgagaaaagagaacgacatagagaaagacgacacagggagaaagaggaaccagacataagtcttctcgaggtttg

SEQ ID NO: 181598 - DNA, 957 bp, Homo Sapiens
acaagatcagcctttcaagtttggccagaatggggtctgagtcttcttaagctctgattctcagttttgcacattttaaagtactttcctcacaagaggacaaaatactcccttaagattcacatctgtcttggaaaattccaggtgcactggcacaattctggtatgggacggtcaaggtgcatcggaatgcaccagcccaaattctctttggagtcaccctgcgatgaccagggttaattatcttagtgaaacttgcctcctttgaatgtttgttctgcaggggtgaactaaccccgggaggtgtctgggaagaagagtaaatagcttgggctttgtcccaaataagaaccagggctaatggctaggactgggcctgtacccacccgctgtaggaaacctggggtgtgcagatgaacatgaccagcagccatagcccaggggagctctcagctgtgtccgagagagggtggcacaaacttagcatccttgaggtgggattttgtgttacccttcatgatctcagactgccctcctgcctctacctgtcctggaaagcagcacaggctttaaatggcagagtgagaatgtcacacctgttgctgctgcatgtttctagtaaagtcagcatcagaggtggcagctgaatggggcatgcactggaggaagcaggccgggggcttagagcccaactccaccactacaaagtggatgcaacccaggcgagtgagaccccaatacaggttcacctaaactatccctgcagctgagaaaaaggaatctggagccggaaccagctggattccacacactgctgcccctggggcccagtctagccttctgtcttaaacccattctccagcttgaggcagggcaacaaaaatgctggaggctggactagttagcattctcagtctttatcagattaactctttggtgagaactgagaaattccaa

SEQ ID NO: 181599 - DNA, 583 bp, Homo Sapiens
ttggattagtttaatttttcccttttctttttaaacaaactttatacttgcaatgccaaggacagcattcaccaaagcttggcatagcttgcacttgttttcttttttcttgccttaaaaaataatagtcgactattaggccttcctattggtaataatacactactgtattattgtgaactttcttaattggaaatattcagtttgatccacttgtttatcagaaaccttcacttactgaataatgttttaatttttagagatgtggtgcaattgctgaacaaaccccgattttgttgttgttcctccttaggaattctaggaaacaaggaaaggtactgtgctttacctgcttacaaatcaatgatactgtacgtgccttgctcagaagtattgaatttaacataaaagcctgttgtttcaggaccttatttgagaatactatagagattcaagactttgcttgtctctacttagagtcagttttgtcgtctgttagctgtactggaaatgtaaaacaagttcacgcaggaattttccacttacacaggtatgcattgagagccccaagaaaaggccctta

SEQ ID NO: 181600 - DNA, 940 bp, Homo Sapiens
ttggatcatgtctgcgagccaggattcccggtaagaaaggcatttgcaagagattgtggctgcttattttgccgcccccttccgacgggcccgccgggggtagctgagaggcccaccagggttgcgggagaaaccgaaccgggtggggggagggtccgacttggaggggcgagggggaagacccacggccgacgcggccaccaggtcgaggcggagggtagggacagcccggctagggtcaggcgtgcgaggtctgttacgaggcctcgacccgaggcggtgccatgcgcgaagccccggcgctgagtggcgagacggggtcgcgacctggcgtgggaaagaaaggtggaggcggccgccactatgtgtggcccagagccggcaggtccggttgcctccctgtgccgggggagggacggcgcgcggggttccggagcattctgacggtaccactcgcgagaggcgggggtgcctggtccttagatccagtcacttcgtcgcggctaaaacacgggtcggggagaagaaaccggccgttcagtgtgctggttttcttgacggccaggactgagcctaaccccgaggagcggccgcgtgaggcaccaggagcccacccggcgccgggcgggcgggtccattttgccgcacaagccgggctattggcaaactgcggatgggcaggtccaccttccttcgggggtgagcggcctgaggtatgggagggcgacgctacttcgcgacgggggcgggcgggatgtggattgttccatggaggggtgggagacgccgccgggtggtcgagggagcgagcacatggtggcctgaggcgttcccctcccccagtctgcttcgcttctaagtgttgtgcaatctccccctttgctagctcggcttgggctcattgtgcgcgaggccgccaccgcccgcggcctcccacatc

SEQ ID NO: 181601 - DNA, 492 bp, Homo Sapiens
aattagctggacatggtggcacatgtctgtagtcccagctacttgggagactgaagtgagagaaccacttgagcccaggagtttgaggctacagtgaaccatgatcatgtcactgtactgtagcctaagcaacagagcaagacgctgtctctgaaaaggaaagaaaacaaatgcaagtttttatcactttgtgagtgtagccaagttggaggagaaatagacaataataaaagagcactgaataatgacggtgagtggctggttaggctcagttgctagctaaatggcttctaaaaaattcaataaagttacagctctggggacagtcatgtagtcaaagaatgaaggcgaaattcattacaattgcccatggtctttatttacatgccttctagtgaaaaattcctaagtgcctaaacagcaagtctgcaatgatagcagctgtttattaaagactacaaaaaagaaatggaggccgggcgtggttgttca

SEQ ID NO: 181602 - DNA, 1484 bp, Homo Sapiens
  misc_feature (155)..(218): n is a, c, g, or t
ttggaaggaatccagttgccttttgaaccttccctcacagggatgagagaacaagcctgtggaggttgtggagctactggtaaacaactgtcagggccccagaaggctgatgtggaggcctggggatacatttcatctaataaaagtattactannnnnnnnnnnnnnnnnnnnnnnnnnnnnnnnnnnnnnnnnnnnnnnnnnnnnnnnnnnnnnnnagtattattaggacaggtaaactcatccatctactgtgagctgctggcttggagaacgacttttgaggagccagtttcctgaggagaaatgcttttataaagcactcattgctttgtaaaaggagacaaaactgatcctaaatgaccactccagggttgctgattttgtttctggctcatgtctgcctagtaaaccaccagcaagctgctgaaccaggctggaaacaacattgttgcaactgggagggacatagagtactgtgaaagcagcgttccaacacatcttcacttttacaaagggataggcagagacttccaacatagaggttcttaaacttcgaggggttacaatccccttgcaaatatttttatagctatggaccctctcctcagatctacagccaacattttcagtgcaccttaggaggtcattttagtccacgcctctgaaaaagctgcactccaacggctgaagagcaagccatacggccgagaatggggctccctttgccttcatgaaagctacttcccccaacactaagactcagctgtacgtttgcttagctcagtcacatttacattcttctgggtgaactgtaccttttgagtacctgccttcattttctagaatcagacctaacaaggtcagtagaagcctgggcagcagcaggcctggaaagacgaggcagccagcatgaactgctgttctctccctgaccacaaggcgtcgtcttcctccagggtcaagtaattgttcttgttccgcctcacaggaatgtggggaggaaggacgtaacactataaaatgctgcgtcctaccttaaacttgtactgtgagaaagctggaaacttccacctgtacagtgggtctggtttgcatgtttagtttcatttgtgggaactgcttgtccaagagtgagctcaggtcagggcagtttgtgcctatgagaattagctcagctatcaggcaggtttttagacacctttttaaaatgtgctcgtgtttggtttgttttgcttactgtcagtcctgggtcaatcaaaggtttgtaagggtgagaatttttatgcactgctatatcgcaagtgcttaaaacagagactggcccagatgagcattcttcaaatgtttgttgaaatgaatggacaaactcttaggataaatcctaatttgttggcaactgttatttgattttagaagcaaactgattttattttagagaggggaaagggaggggaggctcattagcctcttggtagaaagag

SEQ ID NO: 181603 - DNA, 1174 bp, Homo Sapiens
ttggctacaaattagtaaagaaaaatattaagacatccttaactaatggataaaggacagcagttcacaggatatgaactaaggaaatgtgtgatcatactaataaaattttcaattaaatattaaatctaactcttgacaattttattctaataggcaatccacctcgaagatccaagtctgcacctcctcgtgatttaggcaatttggataagggacaagtaaatctctgtttttatatattcttcaaacatacattacttaggcttgaaatcaatttgttaatagacttaacgtttctaaaccacgtgtaaaaaagagtttttacttaacattataaatgttatattttgtaaacactagtcctagaaccctatatcagaatctggctttggaagtaagagtaggttttagctgcttgaaatgtgttgtgcttacaggctgcctctcccagggagccacttgaaccactgaacttcccagatcctgaatataaagaggaggaggaagaccaagacatacagggagaaatcagtcatcctgatggaaaggttaaaaaatgtttttgaaataatgaattctataaaaaataaacatgggttaaaatagttgaaacacatagaatctaaaataagggctctttggacaagatgcctttagttgccatttctcgttcagagattcagcaaaaggcggcatacaatctctgtatgatctttgttcttactccaaagcctttgtaatccttggcacttcttaaaagcttctgttcattctaggtcttcctttcttgcagcctttcttatactgatcctgagtcagggacctctctcctcatctccagctagcacagttttattcttatgcttaggaaagtttcttagtgggaaaactgcctgggggttccagctaaagggaatgaggaagaaagggatatatacaggttagaggtgatgagggaattttttcctcaatttatggaaaatttacttttcgaatacctaatctggtccatttctattgaaattatagggttggagtgctatccttgagaatgagagaagacaaagaacaacagcaaagcagtagttagactttcctgtacaacgtctactttagggtaacaaattgttgataagggaagttttcttttttagtaaattccagctaatac

SEQ ID NO: 181604 - DNA, 913 bp, Homo Sapiens
ttggctcatgttttgtgatatttactctcgtgttttgtgattttactctcatgttttgtgatatttactctcatgttttgtgattttactctcatgttttgtgatatttactctcatgttttgtgattttactctcgtgttttgtgatatttactctcatgttttgtgattttactctcatgttttgtgattttactctcatgttttgtgatatttactctcgtgttttgtgatatttactctcatgttttgtgatatttactctcatgttttgtgattttactctcgtgttttgtgattttactctcatgttttgtgttcctctacatctctggacacttattcctagccttctttggcctccctttccaccatattcaacaattcaaggatggaattatgcagggatttgtcctgagtcatctcttcactatactttttccttagaaattctcattcaccaatacggcttcaattgccatcatcttgcagatgagctacacattttaatccccagcttagagtaaatcagtttcctaaacttcaagccctagcatcaaatcattcattcaacatctgaatctaatacttctgaatctaactcatcgttctctttgccaccaaaatacttttttttctaaagtacctagtccttccaaatttcaccaccatccatctaactgattaagctagataattcaccatttttgacatctctgtcttgttccttttccaaatcgatcaattagtaagtattgccaattaacttttaaaaacgtaaacattatacatgactatgtactttataaaaaatggcaataattgtcctttcatcatcactcctaatccttgggcatctttctttacacagaggtaatactaattatgaaatatattcattcaaatttttgtc

SEQ ID NO: 181605 - DNA, 1624 bp, Homo Sapiens
ttggcagactctgtcacctacacatacacaggaatcttttgaagaataagatctgggtaatactggagtaggatgtaggaaggttaatgttgtatagatgatgttttaaagatagagtttcagcatatatgttaataactttttctcctattttctcaaggttttatgacttacctagtggagcctttatttacagaatgggccaggttttccaatacaaggctatcccagacaatgcttggacacgtggggctgaataaagccagctggaagggactgcagagagaacagtcgagcagtgaggacactgatgctgcatttgagttgaactcacagttattacctcaggaaaatcggttatcataacccccagaaccagtgggacaaactgcctcctggaggtttttagaaatgtgaaatggggtcttgaggtgagagaacttaactcttgactgccaaggtttccaagtgagtgatgccagccagcattatttatttccaagatttcctctgttggatcatttgaacccacttgttaattgcaagacccgaacatacagcaatatgaatttggctttcatgtgaaaccttgaatatgcaaagcccagcaggagagaatccgaaaggagtaacaaaggaagttttgatatgtgccacgactttttcaaagcatctaatcttcaaaacgtgaaacttgaattgttcagcaacaatctcttggaatttaaccagtctgatgcaacaatgtgtatcttgtaccttccactaagttctctctgagaaaatggaaatgtgaagtgcccagcctctgctgcctctggcaagacaatgtttacaaatcaactctgaaaatattggttctaaattgccttggagcatgattgtgaaggaaccactcaaacaaatttaaagatcaaactttagactgcagctctttccccctggtttgcctttttcttctttggatgccaccaaagcctcccatttgctatagttttatttcatgcactggaaactgagcatttatcgtagagtaccgccaagctttcactccagtgccgtttggcaatgcaattttttttagcaattagtttttaatttggggtgggaggggaagaacaccaatgtcctagctgtattatgattctgcagtgaagacattgcatgttgttttcactactgtacacttgacctgcacatgcgagaaaaaggtggaatgtttaaaacaccataatcagctcagggtatttgccaatctgaaataaaagtgggatgggagagtgtgtccttcagatcaagggtactaaagtccctttcgctgcagtgagtgagaggtatgttgtgtgtgaatgtacggatgtgtgtttgcgtgcatgtttgtgcatgtgtgactgtgcatgttatgtttctccatgtgggcaaagatttgaaatgtaagcttttatttattattttagaatgtgacataatgagcagccacactcgggggaagggaaaggtgggtaagtaagctgtacagattgctccagttgcctaaactatgcacatagctaagtgacaaacttcttgttttgatttgaaaaagtgcatggttttcttgtcccgcctttgatgaacgttaccc

SEQ ID NO: 181606 - DNA, 1528 bp, Homo Sapiens
  misc_feature (1389)..(1422): n is a, c, g, or t
ttgggcgacttcatagatcggggtgctcgtgtaggggtccggggctcctttgaactctgggagttgtgtgcgcagtcttgggtgggagacggcaggtccctctgtcccaagaagctggtggtgccaaggccttcctctgtctccatcagtgccagcctgatcgcgttctggaagacccagtctcagactctgtgcctttaaagtccggtcctcagtgtcctttcagaatcatgttggggctgcgtttctctggggaactaagcctgtgccattccacaaggcaggcgtggacctccagccttggaagctttctttccgctcctcagcccctgacttgtaaactgtgatgccatgcagtctggagccgcgggggacgcactcggtctcattgcggaaaacacttggttccagtcgtgtggtttctcccataccctgaccaagtccacctctgccaggattgcaggagattggtgcaagacccatctcttatgcattgaccatgaccatcagcaaagcctggtggtcttgttctcatagtcactcgagaagaatatttattgtaatggaagtagattttttaaaaaaggaattggaatcatgtctttgtagaatgtgtgtgtgtgaagtcctcagctgtaaggtgctattcagtcctgtgacccttattttggaatgctcttcattactgttgctctgttttgtgacttcctgggaaaccgcctactttggtgtggtgtcaccttgagctgtgcacataggacaccagttttgacttaacctaacaggcagtttttatctctagctttttcaagccaggtattgagcagtttcttggccaatggcctgagaaaccacctgtccctgtcaaggggtgattttattggttttaagtggggaagtaatcccatgtacttatttcttaaatacctaggaagttcttcttggtggctcctcttggccctcccctctttctcccccaacccaccatcctgcaaggcaaggaatggcctctccctccacagaggcaacggctgcagagggagcactgtggctgccatcccagttcctcttcaaagccaaacagacacgcgtgactcaaaccctacagtatggagggtggcgttgcattgaaattccaggcctgagtttgatagtggattttaatgtagttgttaaaggtatgaattcatgttttataactgtagaggcaagcaagtttttattttttaaaaagttttgagagaataatttataagtttctgtgcagcaaagtggctaattactcattaaatacaggaaaagaatgtagtatctaaatccagctttttcttacctctggtacacttcagattacttacctaatacatattgagggcttttaacccttannnnnnnnnnnnnnnnnnnnnnnnnnnnnnnnnnataaataattgaaaagaacccaaaatgaattcagaagttccatagatggattttgcccttcttaattttctcccacatgaaacattttagagacattttgatcaaa

SEQ ID NO: 181607 - DNA, 909 bp, Homo Sapiens
  misc_feature (82)..(92): n is a, c, g, or t
gagcaatgctttcccttataatagccaactttgtacaaaaaagttggcagcctgggtcgacaagagcaactccgtctccccnnnnnnnnnnngaagaattgtcaacaagagggagtggcaattcagaagcatatttaagccaagtcctcaagactagaaagcatgaagcaggggaggcgttttgaaagcgtaagaacaatagaccatgggcatggatggccgagtctggggatcagcatcgtaatttgttgagaaggaggccgtgctgtgctgccagttattaattggtttaatcggttgatacacagccctactggcctaaccagtagcccagggccctggaggatttgcaggtcgtgtcagaatttgattgcagttccttccacttggcataaggagacactatcagcctgattgggagggtgatggtgggatggaacctgccgaggtggcggcgctgagctgaccacaccaccggccatagagtgggagcctttcctgcccgcttaactgcagctaatatcaaaagcactggtatgggctgtctatctgtgctggaacctgagtttatctttgtctgcaattacgattcttctgggtttattttgccagctcattatccagccccctggaatcaggcctcccaaatttagcaggtgctggggaggaccctagggagtggtttatgggggctagctggtgaaactgccctttcctttctgttctatgagtgtgatggtgtttgagaaaatgtggggctatggttcaagcgcacttcacatgtgcaaagatggagaaagcactcacctacacgtttaggctcagaatattgattgaaacattttgaatgatcaaaataaatgttatttttaaagtttctctctgagatttgcttaagttttgggtaga

SEQ ID NO: 181608 - DNA, 1043 bp, Homo Sapiens
ttgggtgcctgtgcttaggtttgagaggatatttaaaatacgactttgtgtgccattgtttgacagtggaattaagggtaaaaatatttagatatggaagtgtgaaaatgtagttgcattgttttcattatgttctattccatttcattctattttaagaatagcctcaatttatttttagattgttacataagtacaaaatccatttgctttagtgggagttttatttttattttaaaatgataaccaattaaaggagtttattatgaaattctaagtagcattgtttaaaatgtaaaattacattacagaaacatttggaaaggggagaataaaagaaaacaaaacacaaatgttgccagtgctgtaggtgctattattagcgctttggtgtaactcatggtcgttttcctactatttttattatacagtcatctcttggtatctgtgaagtggttccacaaactccctcaaataccaaaatcctcctatgctcaagttcccaatataaaatagtgtagtacttgcattacaacctttgcacatcttcccatatactttaaaatcatctttagattacttataatacctaacacaatgtaaatgctgaataagtagttgttaacattgtattgtttagggaataatggcaagaaaagtctgcatgttcaatacagatgcaacttttccactgaatatttttattccaaggttggttgaagccatggatgcagaacccatggatatagagggcctactgtacttgtaccatctagagataagatttgtatcttgcatttgttttaacatatctgttctaaggaatatctcagtcaccaggcaagtgctgcagtataactaggtactacgtcaggtgctaaggtaagagagtattttccttcactgactcctcactccgagaaatccattttacagcttcattgggttgggttattccaaattttttgatgtgagtaaataaatgacttctatttgcccaaaataaagcttatataggccttataaccatgcaaatgtgtcca

SEQ ID NO: 181609 - DNA, 1328 bp, Homo Sapiens
aattgatgagcaatgctttcttataaaagccaactttgtacaaaaaagttggcgtaaagtgacatctcctatttttctttatgggagatgtaaattaatacttttagagtcattacccataatgaaattattactaaaaaaatgttaatgttaatattctacctgtttaatttcagtaaaaatcttcttgaataatgaacagtttttcaaaatccgtaatcttagttaccttaatgatcatagccataaagtgtctagttggcttataataggaatacggggctttcagattcttttaaaccatgccaagtttctgaagtaataaactgaattcttaagtgtaacttataaaaataaacaatgtgtgaaataggttatacaatacagaaacttaaatgctgaaatccaagttatttttctactaatatttctaaatgacagtaggcagattgtcatcattttagagctgggagagacgttggaggttactattttcattcacagatttcaggaactaaattataataggtaaagtggtgttccattcacccatttactggcctagaatcatgtgtttttcagtagtgtaattttatttaagtacagattgctcgctttgatactaaaaaatggaaaacattttttgcataggctatgctatgtacatatacattagttgcataggctgtgctgtaattttatgatgctttaaaccatcagaaaaatgaatagttcatgtttacattcttgaaattgtggactgagccaccgtgcccggcctgatgtttttgaatgattatgaaaatgggtatacagcattaaaaccttagactgattttaaatatattaatttcttttaaactcaatataatgttaatattactgtagcacttactagcatttctgaaggttggtcttgagataagattgaaaatgacagttgttgattttctgaggtaatatacccaaataaaatatatgtatgtgtacatgaatctaaactgtcttcttctgttcctcattttgctttacttaaataatctttcatattttttaagtgttttgcccatgtgcttgggtagccttgaagtcaccagaataactaggactcaaattcagaccaaaccaggactagctttttgtgccatgagttagccatggtcctggacccagcaaaaagaatgattatgatggtcagagtaagatgagcaattgcaacataatattctctaatattgtatactgtaaatttattcagctgccctcgtttactcacagtttgcttatttgccaccataagaaatggtacaataaaaattcatgtaatc

SEQ ID NO: 181610 - DNA, 1257 bp, Homo Sapiens
  misc_feature (231)..(292): n is a, c, g, or t
ttggcaaaaggtatgtatgaaatatgaaatagttttctttgaaaagcatcttaaaaagtagtaaaataattatttgttgtttttgagtgtgagtaatgtataaggtaaaactattctatgactagttaattttaagaattaactagaattcttaaaatgatacttggaaataattatacggcattatacagagtagttggtttatttttcaaaatattacattgaattctnnnnnnnnnnnnnnnnnnnnnnnnnnnnnnnnnnnnnnnnnnnnnnnnnnnnnnnnnnnnnncttattctttcttggaaaatcatacctttagatatatgtattatagtgttcattaagattgtatttactaaattgttttaaaacttgagtaatctgggaagcagatgatgaagcagtgaggtaaataatatttagaaatttagagcattctaattaaacgtctttactagtgtgatatttgatataaacgtgctagcggtgatggttaaaattatgatttacttatttgataacagctatcatttctgattcttccaatttctcttttccccaagtctccattctatcaataagtttcattctttcaaaaaccgtatccccaaactccatttttctttctacaacaagttaacatttcttgatgagactactgcagttcttttatctatctcctttcaattcttatctccaaacagtggaatagccttttaaaattggatgggcaaaaatggcgtttctatgcttaaaacaaccttcaatggctgcccgtcatatttcaaataaaatccaaactgtatactgtgaccaacaaagctgtggattatctctctttaacctgcgtctcctcttttttccttacctactaagcttcagctataccagctatcttttagtttttcaaacagtgtatgtttttcttccttgtccaggaacttagaccgtgctcttccctttgactaaaactacttcttttcaacatgtgaccccttccccactcttttgttggtgctttcttacatctcagtataagtactactttctcacagaggccttccttgaagagtctataaatagatctccttgtttattttttatttcctaattgctttcatcacaagttgaaattaaatatttagtgactcttctctgtcttgttggcattactgttccaactttcctatctaagtgactttttttaaaaatttacaatagtaatatgctagttatttaaaagaaaagtaaaa

SEQ ID NO: 181611 - DNA, 970 bp, Homo Sapiens
ttgggttattttgatgctgcttaacttgcacagtaaaaacatgtttaaaacttttcttgtagacttaaatgtataagatggtagtctaatgagctggggtatgtttgcttttgttcactcttaatggattgtgctaacagtttatacaaatgctagaaacggaggtgtcatttagccgtcattagccatgaacaaacctgaccttttattccatcgtgtgtgtaacgtggtgtgacatggttccctttaggctgaagacagtgggagcagccgagttcagtccttgctctccaactaggcaaggttctctcaactaaaccaagggtataggagtcttgattactttcagtatgtttttttaataacctgatccacatggtctcttcccttcttgcagctgctactaaattttcattcagaatatcaagctatggtcctttttgtaatcttaactcaaaattctaggagtgtaacctctcttttttattaccgcaaaatccagctgtggtaaactgaccattttatcattacatttttttacttgtagcaacagcattttactccttaaaaaaatgagagagagaaaatctgctttctggacttgtaaactctggtggagaatcataggttttccccttgctgtttgcaggttcagaccctagacaagtatgaccaaatctgcatttgcagcctctcgcagaagctgctttagcactttaacgtttttctctacccagactccccaacctcgaacagccagaaaacaggttgtctcctgggccttggacacagccagccaggccattgaaggaaaagcaaagacgaagcgaaccatctctctccattgtgggggccaagtagctgcagtagccttcagtcccagttgcattgggttaaagagctcatacatactatgtgttaggggtacagaagcttttcctcatagggcatgagctctccaagagttaac

SEQ ID NO: 181612 - DNA, 1751 bp, Homo Sapiens
  misc_feature (93)..(144): n is a, c, g, or t
ttggcaggattcccggcggtgacttgaccccggaagtggggtgtgaagctccggtgctggtgcggcgggggactgcggggccagcctcaggtnnnnnnnnnnnnnnnnnnnnnnnnnnnnnnnnnnnnnnnnnnnnnnnnnnnnatgtttcacttcttcagaaagcctccggaatctaaaaagccctcagtaccagagacagaagcagatggattcgtccttttaggagatacaacagatgagcaaagaatgacagcaagaggcaaaacttcggacatagaggccaaccaacctttggagaccaacaaagaaaattcatccagtgtgactgtatcagaccctgagatggaaaataaggcaggccagactctggagaacagctcattaatggccgagctcctgagcgatgtgccgttcaccctggccccgcatgtgctggcagtacagggcaccatcactgaccttcccgaccacttactctcctatgatggcagcgaaaacttatcacggttttggtatgatttcactcttgaaaattcagtgctctgtgattcataacctttatgtctgtttgcaccttaacagctttaaaatatgttcgcctattttatctaacctgtttgatgttctttgccgtttcactgtttaaggtcctcagcaaggatcataaagcaaagaaaatagcattatgttcactactctatttttaagaaaaaggtacatttgtatacaaattgaacttaagttctacttcctttctcccatataataaatatacaaattaggctatgaaggttttaggaaaggactcgattccttcagatggtctctcaaaatataacacctcaaatttatcttagaagaactgtgaaaaagaattgtggcatttttcagtcactacagctccgaagtctgagcaagaagtgggtgtgaagtctcctctctggtttgtaggaagttgaattggtgttattcctgcatttttttcttccacagtgtttatgaatgaattcagaaaaaaagttgccagttagcttaatttcttcagatgcattgatgtggaaatttaaaacttgtcctaaacagcagtgctagtttgctgatacaaggatgctagacctgctctgcgtgctctttctggagtggcccatttcggttttctgaaacccatggcagccctttccatcgtgaataatcgttgtgttcccacctttgttctctgcctttttgctacttcagtgtgctctctgaccagctttccaaagaactttccctgcttctgcctcggttgccatttgctctccttaccacatatgttcccagtttatgaagagatccacatttcctttcaacccctctgcctcctgaagaaaaacatctcatgatgatacatattattgctgataacacccttatttagaaatttgttggccacaatacagatggaaatgttttactgctggaaaaactgaaatcaactcatttccaattagagtataggcagaacacctagatatgacttttagttcttgaatatccattacttactttaatgaaaacagaactgccattggtcaataaactgtaaagggaagaggtaaattgtgatagagaattttctatgtcatgggaaattgaaatcacatttattttgattaccagcaatatgatttgttaactctgtgccaagttttaagtatattttttcacaaagatagagtgccatagtgaaactaaacactgtgcataaa

SEQ ID NO: 181613 - DNA, 963 bp, Homo Sapiens
agttaatttgaaccatactttgctaacactttatctcagtggtatataacggtgacaaccaaagctttccttcaaagtgatccatttgactgaggaccaatcaaatcagaatagcaactgcaatcccaaatgtccatagaacatgtccagtggtattcttagacttgactagacatcatcatacttggggagaaacagtctccctcaggatctcccaaaggtttcttttactctgggaaggaaaagtatgacattctcccagaacacttaagaaatgcaccacagtggtggtccatctctctccccaattcctgagtgagctcaaacactggggttttctttcacaataaaatactgctgaattaacagtaagatagaagactgtcaaacaagccagtgtgaaacacatcaagcacctccatttcatagtgtgaatatctgaggaggtagctcccatcttgaagtaatcattctagaactgataatctagccttaaaaacagtgcgttcatttctgcttgtgtgaagcatgggccacatgggactctactgacagggagtcatttgggtcatcagttcactataaatgacagggacatttgggtcaccagttcactataaagaggagaaacttagctccactgccatgaaacaccctgtcccacatttcaaacaggagattatctatagtgttcaccaggaaaaacaagcattgatgcgaaggcatggagatgtggagaagagaaatactgtattttaaaactgtgagttcaagggttagctgcaatgcttcttttagggaagaacttaaagctgtgggtttagtacagccctttaaagtaaatgcaaaaatattagcttttagcaaacaaaggcatataacatataaagaaaatattgtattgctcaggttttggtaaagatgtattaataatgcttacagataaaaataatgaaattccaa

SEQ ID NO: 181614 - DNA, 365 bp, Homo Sapiens
ctgcctataaccattctttttttagggaggtgtggtatatggtgctaccctggatctgtagtcaggatttgaagaagggagaaggtatttgcttgtgaagaaggcaccatgcattgtgctctgtagtggtgactggagagagagctgggaggggcacaggcagcaaggtccctgcttaaagacagttatctagtttggagaaacttagctggatagtcagttcttacatgcatttggcaagcacttatcatacactgtaaagaggcaatatgtctagcttgttagagggtgggctctggagtcagacttctggctttgaaccccaacttccctgccattttcaaatgacactggagaagtcacaa

SEQ ID NO: 181615 - DNA, 1357 bp, Homo Sapiens
  misc_feature (1014)..(1043): n is a, c, g, or t
  misc_feature (1221)..(1238): n is a, c, g, or t
ttggctggtcagtgatttaatctaaattagaagtgtttgaaaaggattaattgtcctacatcaaacttgtaagcaacgtcatgtacatcatgacattgcagggtcactcacacacacatccactgttagtcagactggcaccacgtagacacatcagttaatctcatgtacagaactttgggatgtaggacaaaaagaagagtccctgaagaaaccccatacagacataacaagaacatttaaactcctcatagacagagacctcagatgagatttgtttttcatccatgttagaatgaaatggcattattcaaggacctgctatcctcacttatttgttcaataccattctgtgtgaccagtctcttgtgtccctgcccttaggcgagtactcactccctctgggacttcagcatccttcatcaggttacctctgctgctttccctctgtcttcaccccatgctttctcagatattttgtgccaagctgcccttttacacagaatatttttcctgctcaggtgctgaaaacccatgctaggctgtccttctccatctctgcatggatgcctcctgactctattcagtttttgatattttattctatttcacccaccattcaggggtgctctcacttgattgttaacattgtgcagggtggtgctcccacacttaggtctttcccattgtctccaggccccaactcctcactctggacaaccatagctttctgttttatctccatgctcatgaataaaaatgctcagaaagagaagagagggaaaatgccatatacattttataatcaatacacaaagctctgcagagcaaggattttgattggaatttcattgagttagtaatttgggcagaaaagagataatactgtattctcacactactaatatttcaattgtcttattaacttaattaatttaaaaaaatttcacatagagatcttgcctagtttaacatctatactcaagtatttggtatagttgatcctatcacaannnnnnnnnnnnnnnnnnnnnnnnnnnnnngttacttgcttacagaaataaagttgatattttgtgtattgaacttgattagttaagctgtcttgctaaactccttgttattttcttatctgaatatttgatctgtacaatatttaggattttctatatacacataccatctgtaaatagtaacagtcttctttgtagttcaagaggnnnnnnnnnnnnnnnnnnctactgcaagaataatgttgaataaatgtgggtacaattgggtatccatatcttgttgaaattgtaatgggaaaacaatatatttcaatctctatgtagataggtggggttttggtttt

SEQ ID NO: 181616 - DNA, 1181 bp, Homo Sapiens
  misc_feature (187)..(195): n is a, c, g, or t
gttacttgcttacagaaataaagttgatattttgtgtattgaacttgattagttaagctgtcttgctaaactccttgttattttcttatctgaatatttgatctgtacaatatttaggattttctatatacacataccatctgtaaatagtaacagtcttctttgtagttcaagaggtttaagttcnnnnnnnnnctactgcaagaataatgttgaataaatgtgggtacaattggtatccatatcttgttgaaattgtaatgggaaaacaatatatttcaatctctatgtagatagtgggtttttgttttcataatatatatcttttagtttactgtatgagttttgcaggactgcataatagatcaccacaatcataacatcttaggaccacagacatttatgagatcatggcttctgtgggttagaagtatgctcatgtcttaactgggtcctctgctcagtcttatctggctgcaatcaaggtgtcagctgggctgaattttcatttggaatcttgactgggaaagagtctgcttccaaggtcatgaagtttgctggcaaaatgtatgtttttatgacagtatgactgaaatcccaagctatctcctgacttttagctgggtaatctcaggccctaaatgttgcctacagttcctagaggctggtcacagttcttagccatgtggatttcctcaacatggctgcttgcttcatcaagtcagcaagaatagcctgtcatatcagtgtatatcaggctcactcaggataatttccctactgatgagccaaacactaactgattttagagcttaactacatctgcaaaattctgttcaccagaggcaagtcatattcagggaaagagaagtgtacaaagtgagaacaccaaggtgcaaaaatcactggagctaccattataattgtagtaataaaattctcttctaatactaggtctcaaagtttcattgtgaatcaaagttcaattttacaaagtaaaaattacttattttgcatctattgagatgatcatttaagaaaccatttgttacttgtgttgaattgcattacattatttactcttgttaatctaacccttgcatttggtccgataaaactgaacttgattgtgataatactttgtttttattcatttgctacttttggtatgtggatattcc

SEQ ID NO: 181617 - DNA, 1759 bp, Homo Sapiens
  misc_feature (487)..(719): n is a, c, g, or t
  misc_feature (792)..(813): n is a, c, g, or t
  misc_feature (834)..(1060): n is a, c, g, or t
ttggggctacttgagaaagcaaaaggaaaaaataatagttatcagtagtgtcactggaaagaagagaggagggacaaaactgagcagcagaattcgtatagacatttacgtttaaattctaaaagcccaattgagatgttcagggagggtttgttttgccctttggcctcatgaatgggtttcatgaatgggcttcagtggcttataaactctgtaaaattctattctaaattttgtacatttattttgttccggttaattccagaagacatttcaaacatttttcttacaccatataataaaaatacttaactaaattgacagttataaaaataaatcagtgaaatgtaccttatactttaataaaaaatgttttcagaaatagataagtgaaagctgagtgtttctttgataggttcccctgtactataggagtgataattgcagctattgcaatagtagtaattgttaaatggatactaatgannnnnnnnnnnnnnnnnnnnnnnnnnnnnnnnnnnnnnnnnnnnnnnnnnnnnnnnnnnnnnnnnnnnnnnnnnnnnnnnnnnnnnnnnnnnnnnnnnnnnnnnnnnnnnnnnnnnnnnnnnnnnnnnnnnnnnnnnnnnnnnnnnnnnnnnnnnnnnnnnnnnnnnnnnnnnnnnnnnnnnnnnnnnnnnnnnnnnnnnnnnnnnnnnnnnnnnnnnnnnnnnnnnnnnnnnaagacttgatagtagtttatatggatgctatctcatattagcatatatggaattaatagtgtatcactatacnnnnnnnnnnnnnnnnnnnnnngaatagagatcagtctatcannnnnnnnnnnnnnnnnnnnnnnnnnnnnnnnnnnnnnnnnnnnnnnnnnnnnnnnnnnnnnnnnnnnnnnnnnnnnnnnnnnnnnnnnnnnnnnnnnnnnnnnnnnnnnnnnnnnnnnnnnnnnnnnnnnnnnnnnnnnnnnnnnnnnnnnnnnnnnnnnnnnnnnnnnnnnnnnnnnnnnnnnnnnnnnnnnnnnnnnnnnnnnnnnnnnnnnnnnnnnnnnnnngtataagccactgcacacggccttactatgctatcaattccatatatggaaaggtgttttccctttcagagctctttaaagctctgcagaagatttacatgtgtttatagagctaagagaaatcagggcatggaaattgagtgtgtaataaaaattaaactcttcatgttatataatcatgcataacttctatcttcattctctgaagttgcctagagcaccatcacagctaggaagcttccatcatgaattaccttatttccaaaagcaagtactcaaataattgtctcaagagaggaaggacaaaactgttacaagctgaaatatttggggatttgtttgacttgactagggaaccacaagttttcatataatgcctgatttagccctgtgcctaacagtttaaatcttaatgctaatgttaattgcttcccagttggttgaccttataagaaaacactgtgtggtattttaatgtggtaaacatgtgaatgaaggcctgtggctcagttaatcactcccacaactttgagctgtgagttttactggtggaaggaactttaacatgtcttcgctcttgtcattagatatcaaagaactgaaattagttggaattgtaagcagtgaatgatgtgttgttagaatgattccatcacttatacattgtttaaaatgctaataaagtaacttgcctttgta

SEQ ID NO: 181618 - DNA, 857 bp, Homo Sapiens
  misc_feature (519)..(636): n is a, c, g, or t
tcacaggccgcccaaacaccacggctccaggggtgcaggtagacttccaccacgtcgctctcaggcaccacctggacgcgctgcacctcgcccttggccagcatctcgtggacaaagtcgttccaggaaatgctgcctccgctggtgctgagagcattcaggaggctcatgacaaccgcgatgaccagcaaggtgcgcagccgctctcggtacatctggtcgtcccgctcacggcgtctcctctcctctgagccggcagagaagcaaaagggagaaacaaacacatgagcaacagacacgggcgacatccagagcttcctcaggaaagctcagctggacggggaggggcagcgtcctgcacagaagatcctgcacttcctccaattcttccctgacgttatcagagacaaagactaatgctgtgctgttcgaggtcacccacacttcattcgctgaggtcacttcagtgaggagcaggagtggttcccacctgagataagaggaaaccatttctaaatnnnnnnnnnnnnnnnnnnnnnnnnnnnnnnnnnnnnnnnnnnnnnnnnnnnnnnnnnnnnnnnnnnnnnnnnnnnnnnnnnnnnnnnnnnnnnnnnnnnnnnnnnnnnnnnnnnnnnntgacagagaacgaccctgtctcagaaaagaaacgaccgtcccaggccgtccgagccgtcacagatgcagtcagctctcctgctgcaaagtgcaagctcacaatggccatgaatccagttgcttggagtttgatcaaatactaaatatcaaaacatacacaaaagttattaaaaacgattaaaacaaataccttttccaacttttttgtacaaagttggctt

SEQ ID NO: 181619 - DNA, 1428 bp, Homo Sapiens
  misc_feature (223)..(242): n is a, c, g, or t
  misc_feature (1369)..(1381): n is a, c, g, or t
gagtgcgtaggtgagtgaactccagtgtttacattgtgacatacaggctcagaatccacttgaataaggcataaagatactctgcagtattgacataaataaaaataacagcaaaaagtgttttatgtgccagtttaaaaaactaagacttcaagtctctgcaataaaaacctgccatgaaataaagtgttacatctcctattagatacagaacctgatgttnnnnnnnnnnnnnnnnnnnngtaagtagttaactttacaagaggaagtacgattaataaatattcagataactagttaaaatgccaccaaaatgtagcaaaagcatcccaaactgcattacttgttaaattcaatacacactgacttttgctttggactgtgtgtgtgtgtcgggatgggggttggtgattatttttccatttttgtttttggtttactgagaatatttccatggagtacagaaggggaaagactttaagcaaccatgatgaccttggaaactggttatgtgccttatttaacatataattataattaaagttaactaaagtctattccatcttcctttactatggttgcaagtacccccaaaaaagatggtaagctagatttgacaataccacatgcttcaaaatttaggcttgggaattgaatcttttgttatcatatgtggatatataaaaacacatttttaactcttaaatgtattactactgtaataattagataaatttggtctcatcctattacatccaaattgccacttaaatgctggttttaaagtaagaagagcaaggatctccctggcaactataatagtcaaagaaaaccagcagtgactgaagaaaaaaatgaactgctgagatgaaactatcactgtaactcccagcaaatgtcaatgctatccttatcttatacctgtgattctggaagctttcagagtttctctttgagacttgctccagtaaccagatctaaacttttccttccctctccagttagccagtcatgctctagatataaaaatgtggaatattgtttgcatgaggaaggtagacaagctggaggaagatggggctgagaaatctccagaaacactatcatttcaataggtaactctttttaataacacatgctgtctataagcttaatttctccagaaacacgatcatttcaataggcaactctttttaataacacatgctatctgtatgcatgtcacaaaatgtctccagcttttttcaatttttgccaaaatattatgtttttagaactcatttagaataagggaataaacaaaaagagaatgtgtcacatctaacaggtcacaaaacagatgcaaaactaatgtgcattgaaaatgagnnnnnnnnnnnnntatacttaaaagctagactgaatggcaaatacaaataaagtacccaa

SEQ ID NO: 181620 - DNA, 1317 bp, Homo Sapiens
  misc_feature (425)..(444): n is a, c, g, or t
  misc_feature (814)..(861): n is a, c, g, or t
  misc_feature (1011)..(1044): n is a, c, g, or t
ttggaaaagattcaattcccaagcctaaattttgaagcatgtggtattgtcaaatctagcttaccatcttttttgggggtacttgcaaccatagtaaaggaagatggaatagactttagttaactttaattataattatatgttaaataaggcacataaccagtttccaaggtcatcatggttgcttaaagtctttccccttctgtactccatggaaatattctcagtaaaccaaaaacaaaaatggaaaaataatcaccaacccccatcccgacacacacacacagtccaaagcaaaagtcagtgtgtattgaatttaacaagtaatgcagtttgggatgcttttgctacattttggtggcattttaactagttatctgaatatttattaatcgtacttcctcttgtaaagttaactacttacnnnnnnnnnnnnnnnnnnnnaacatcaggttctgtatctaataggagatgtaacactttatttcatggcaggtttttattgcagagacttgaagtcttagttttttaaactggcacataaaacactttttgctgttatttttatttatgtcaatactgcagagtatctttatgccttattcaagtggattctgagcctgtatgtcacaatgtaaacactggaggttcactcacctacgcactcacccaccacctctgaaagaaacagaaactgcagagaaagacagcatcttagctcattttgtttttaaatgaggttttagacgcttgccacttcctaagggaaatcctaaaacagagcaagtgatgctcccaggtatcactgtgaacnnnnnnnnnnnnnnnnnnnnnnnnnnnnnnnnnnnnnnnnnnnnnnnnaaagtaattgaagcttgtggctttacaacttagtgttttttgctatccagataacaagtttcattgtttagaacccagtgacacttaataggtagataaattgtcctttaaaatatcccagatgatatacacaatatggtacatttgtgnnnnnnnnnnnnnnnnnnnnnnnnnnnnnnnnnnagttagatcaagataacgatgacttgtaccctccctgattctgttacagtaggggcccgggcagatctgtgtttgttaaacaggccttgtttgtgcatgctttgctatgaatgaagttcctttaaggacaaagaaaagcacacttttcttcttttgagcatatctgcttttactttaaatctgctaatttctaaaatgtagagtcctttcaccaatcccagagactcaatttggaaatgaactgattttcaagccggttactgtgaataaagc

SEQ ID NO: 181621 - DNA, 1479 bp, Homo Sapiens
  misc_feature (362)..(381): n is a, c, g, or t
  misc_feature (948)..(981): n is a, c, g, or t
ttggcttttttgggggtacttgcaaccatagtaaaggaagatggaatagactttagttaactttaattataattatatgttaaataaggcacataaccagtttccaaggtcatcatggttgcttaaagtctttccccttctgtactccatggaaatattctcagtaaaccaaaaacaaaaatggaaaaataatcaccaacccccatcccgacacacacacacagtccaaagcaaaagtcagtgtgtattgaatttaacaagtaatgcagtttgggatgcttttgctacattttggtggcattttaactagttatctgaatatttattaatcgtacttcctcttgtaaagttaactacttacnnnnnnnnnnnnnnnnnnnnaacatcaggttctgtatctaataggagatgtaacactttatttcatggcaggtttttattgcagagacttgaagtcttagttttttaaactggcacataaaacactttttgctgttatttttatttatgtcaatactgcagagtatctttatgccttattcaagtggattctgagcctgtatgtcacaatgtaaacactggaggttcactcacctacgcactcacccaccacctctgaaagaaacagaaactgcagagaaagacagcatcttagctcattttgtttttaaatgaggttttagacgcttgccacttcctaagggaaatcctaaaacagagcaagtgatgctcccaggtatcactgtgaacttttttctttcaaagtgtgaatttttacactggctttttcatttttttaaagtaattgaagcttgtggctttacaacttagtgttttttgctatccagataacaagtttcattgtttagaacccagtgacacttaataggtagataaattgtcctttaaaatatcccagatgatatacacaatatggtacatttgtgnnnnnnnnnnnnnnnnnnnnnnnnnnnnnnnnnnagttagatcaagataacgatgacttgtaccctccctgattctgttacagtagggcccgggcagatctgtgtttgttaaacaggccttgtttgtgcatgctttgctatgaatgaagttcctttaaggacaaagaaaagcacacttttcttcttttgagcatatctgcttttactttaaatctgctaatttctaaaatgtagagtccttcaccaatcccagagactcaatttggaaatgaactgatttcaagccgttactgtcaataaagcaccccagcattttgtataagctcttaattaaacctgtacagcttctttacctgatttaagaaagggagacaagcaataggggggaataagcttcttcaaaattcattccaagcacaaaagaaattttttccctttgcatataaacttgacatcagttgattctgttggggtcggggtgggtatgcagggattgccttttattatcaagtgatttatttcaagagccttt

SEQ ID NO: 181622 - DNA, 986 bp, Homo Sapiens
  misc_feature (761)..(790): n is a, c, g, or t
gtgtgtgtcatcatgaccaatgtgaattgcttttgaagctggttcatgggcatgtaggccaccgaagcaattttagaccacagtaagtcaagcttttttccctccgatgatcactgggtggttgcagcattttttgcataaacctgcctaagacttgtctatcgtctgtgatcaatatgccatattacactaaggtgctcctggaaaattgggtgcagttcaaattttcctacagcaaatcatttggcaaggccagccattggggaaaccagacaactagagataaccctgaaatgaatccttttgtaaattgaagcaccatcttttctttttttgcataaattggaggttttaattttagggcagttacctgaagtgaaatataccaacaatttcttgtgttctttaaattcctagttaggtgaatatttttgaaggtcctcttttgaataaagaggggaatggacaccacatttcaggtcttctcgaagtgtggaagggcaagagagcatcagtgagctgatggtggattgcttacatcggattccattggtatgaatttcccaaactggaaatcaaagcgccagggtggggttggggctgactgctggtgagggggctggccgctggctcccgtgacgtgcgtcatgggcacgcaggcgccattttgaatctatcgtcggcacgtgggtgccattttgaatccttagttgggcctttctaaatggagaatggctttggagggagacacgttttctgtnnnnnnnnnnnnnnnnnnnnnnnnnnnnnnacaagctacatgctattttgtttgtagtattgtggaacagtcttgttatggagtgccagcttagaggttgttgcaaacttgtctagaagtgagagcatggttttttttagccctttgagagtctacatctaatgaacattcttgctcacccataaataacgtcaagcctcaatgtcaccgtcacgttgggatactc

SEQ ID NO: 181623 - DNA, 1527 bp, Homo Sapiens
actttgtacaaaaaagttggcacgttttctgtgggagagggtttgggggggagggaggagggaacaagctacatgctattttgtttgtagtattgtggaacagtcttgttatggagtgccagcttagaggttgttgcaaacttgtctagaagtgagagcatggttttttttagccctttgagagtctacatctaatgaacattcttgctcacccataaataacgtcaagcctcaatgtcaccgtcacgttgggatactctttctcatctggcatcctagacaggacaaggttggttacctttccttccatgaaccatgaacctgtgacggcatcattcatcctgacttcaccaagctccgcctgtgggtgaggccagagctcccactggcaatttttagaagagccagaggctccctgcttcctctagaaataacagttcagggtgaagcatggagggtttcagttcccagacaatggaaccatttagagacaacacagttggacatttccactttttccttgattcctggaagtccagtgggttctgcagctgaaaaagccctgggtcccagcagcagagagacaggacagaggggatgcttgggcggggagggacggtaacctgcagaacagattccatttttatagaacgagtacacgtttgctaaaacagtcctgctttcccagactggattcccaccacagggacagtcggaactcaggactagctccagcgacatctttcctccgaattcaagccttctatcacaatgtcaaaacagctatttataaagccattttcattgtacttgataacagcacgagtcccaaaacttttagaaataaaataggacattggcttgattgaaaagagggactttttaaaaattgttctttcgtcagaagccttttggatgacttacaatagctctgatgaagataccaccccagcgtcagtccaataggtcagtgagtttcaacaggcatccatccctcccatgaagggattctggtgatgggaagtttctgtaatgacaggaaagcattgaccctcattgattgtcaactttggtattagccatgaaagacaggatgctcattgggtgttctgtagagtgaggaatgctgcctattccctcccagaacgtctgacccaggggtgtgtgttgaggagccctgggggaaatggaccaagttttcccacagagcagtattaggctgaagagcaggtgactggtaggccccagctcccatcattccctcccaaagccattttgttcagttgctcatccacgctggattccagagagttttccaatttgggaagccatgagaaaggtttttaaatcttgggaagatggagagagggacataggatagttgactccaacatgacaggaagaggctggagattgggaattggccatcaaccaagcctgtagtagtaaagccatggtcccgcattggattacttggggaacttatacagttctgatacccaggctctcctagaccagttcaccaat

SEQ ID NO: 181624 - DNA, 1250 bp, Homo Sapiens
  misc_feature (1051)..(1104): n is a, c, g, or t
ttgggtcttataaggttacagaattactggaagaatttagtccagttgttgagagacttggatttgatgaaaattttgtggatctaacagaaatggttgagaagagactacagcagctgcaaagtgatgaactttctgcggtgactgtgtcgggtcatgtatacaataatcagtctataaacctgcttgacgtcttgcacatcagactacttgttggatctcagattgcagcagagatgcgggaagccatgtataatcagttggggctcactggctgtgctggagtggcttctaataaactgttggcaaaattagtttctggtgtctttaaaccaaatcaacaaacagtcttattacctgaaagttgtcaacatcttattcatagtttgaatcacataaaggaaatacctggtattggctataaaactgccaaatgtcttgaagcactgggtatcaatagtgtgcgtgatctccaaaccttttcacccaaaattttagaaaaagaattaggaatttcagttgctcagcgtatccaaaagctcagttttggagaggataactcccctgtgatactctcaggaccacctcaggtacatgatgatacttattttaattaagtactggttatcacattatttgagataaagatttctagttttagtaccatgttcttactattctagtttgcttagtatgtgatccctttcctattagaaggctgatttattattaatagattggattaataagtattcttaaatggaatcttaagcattgatattttgatatcttaagttagctactatgattgaagacagtgcaacttaattttaatagcctataatgcatatatgaggcaaaatattttaatctgttaaaaatcttgttttcagagtagtccagtgatttagcaaatgggaaaggtataatcacccagttaacattgactgatttttttgctatgggacaagcactttactgagtgctttaaatatgttagtccatttaatcttcacaacaaagcatcaaggtaggtagtactgttgtttgnnnnnnnnnnnnnnnnnnnnnnnnnnnnnnnnnnnnnnnnnnnnnnnnnnnnnnaagatgaggataccgtactttagaaaggttaaataacttgtccaaggataaacttagattcaagtcctaggtgattaagaactcttgccataatcatacaataaagctcggagttggtactagagctttagagttttcataacttt

SEQ ID NO: 181625 - DNA, 1622 bp, Homo Sapiens
ttgggtggcctggtggctgcctcagcttccagttcagttgaatagctactacgtctttgaggatgtgctccttgctgggggactaaactctccacgccagcccagtcccaaacctaaacctcgggtatgagaaaagcattgagatctagcaatagcagggccatgtccacactgcgtcctatccctgaaggagaaacagcgccaggtatggttgccggctccaagcgcatgctgcctcctgcaggcctgacccagcctctcggggtgttgtttctggtgccatagttgaattttcaacaaaccatttcaccaccctctcaagacagctgctgctggtttgtgggttcctgacaagatgagtgaatgcctgcccatcaacccgttactcttcttttagctgtaaagtgaattctctggttgggtgcagtatgtgaggaggtcacatgatgtttatggcatttgagaattccatggatattgatggcaggagaggcatgatgggttagaaaagcaaatccaaatccagaacaagggcccaaaagggccaagacaaattactgcccctctcagagccacaggtgtagacaggtgaaaacactggacagtgagtgagctacccacacacgacccactggtgccttcagagccttagcctggagcgacagtgtaccgttgataatggaacgcactggccatgccagactttatggctagacggtcagataacactacgaggggcagcatggccaccaagtgtgccagggccaagtgttcaggctctcccagagcccagtggtgagccagaagggcattttgtacaaggataatggttactttttggccagagcatcacttggctccaaatcctgggttcccgtatcatattttcttgtcaggacttaccgcaagctatgtatggctccgcggtatgccacccatggaaagacacctcatgcaccattgacctgccaggtcacgtggcctgatggcagcgtcggctgcacaaaagactttcccagctgcaatgccttcgcctgctctaggcccaccccaaagctggcagccttctaggtcagttggtaaatgggttagaacaagatgccccaaagtggcataaattgcatggaattaggccttagtggcgagggattcgacatacagtcatttgtcctacattgtgaaggaaacattctgacctcaaacagatccctcaaccccagaactttatagaaggggcagaccttggcattttcacatgatttatctcccactctgattcacatatgtttgaccaaggcactgggcagctgccaatttcccgtcccttctgtagtcccagatgaatggatacagacctctttggggaaggctgcaaggaaggttcacaacatgcatctaagtgttaaaataagtttttccttcaaaaatacatttgacttcctctccatttaaggtctggaaatcaagtgggagatcttgactttaccttggcacttgagacagaactgttggcccagaagtctttagttaaggtcattactaggcatatcttaggggcgtctggcctttttcattcctgggacccacagctcgaggtctggtttccatgccctatcccttac

SEQ ID NO: 181626 - DNA, 972 bp, Homo Sapiens
  misc_feature (809)..(857): n is a, c, g, or t
tgagccaccgcgcctggccttttccttgcagtttattttggaaagaaaccaggtcacctgtccttagagcttcccccttcctggctttagctggcggcctccccatggtgtcctttagcctattgctccaccactggtattttctgtaaactagagtcaaagatggaagcttgcttaggccccaatgggatgtctttcggccgcagcactcctaggtatgcatctgtgagaaggcactgcgtgcctggtctccccctgcaagtgacactaggggcaagcagaggcttcagacagcggcacctggccatcaccacatgtccccttcagtcctgtttcacagcccagcagccactgctaggccctgcctagatccatcatttcatgacggtttgcagacgagtgccatcttcattctgtcattccttcttcatatattggctggaatgcttctaaaaagagctttctttcagtaaccgtttagttaccctgaggtataatttgtacagagaagacaagataaatacagttttcagaataatgagttggtccctagcaacctccagaagtgaccaatgagagagacgcaccatgttctcagctctggaaacagtgcacagaggacagccaaggccttggcctcatggagtgaggccccaatgggtcaggggagacaaacagtaaacaagtaaatgaatgagatgattttatatcacagagtggggaggcaggagagcatagcaggagaggcaggctgtctaggtttgaatcccagctcttccccttgttacctttgaccctagggaagtggnnnnnnnnnnnnnnnnnnnnnnnnnnnnnnnnnnnnnnnnnnnnnnnnncgtcctttccacaagagcgtttgtgaagttgaaggagatccaacttgtaaagcacgtagacaaccagacccagtgaatttgtgactgtggagtgctggtggctctcagcactttt

SEQ ID NO: 181627 - DNA, 979 bp, Homo Sapiens
ggaaactactccatttttagtcatctccttacttagttctttacttacacaggttagctccaagatatatcatttaactactttatgtcaggaacccacaacatcctaaccactgtcaccacaccttctcttcaagatttcaacttagaatcaatccaatttgaaaatccatccccctgtatatcccctatagatccatttcccctcctctacaaatatttctttgcttgatctcccatcccaatgtgatcaatccttagaaatctcataccattttgcattgctggtatccaggatgcaaaataatctctttgcctgagccatggagatttatttctaccactcttatggcgattatttattttaccctattatttgtgaagaagcctagaatattttatatttacacggttaaatggtcacaacatttaaaaagccgtagaacagttatagttcatatattaagtttagaattaaaagaaaaggcaatgtttattagctatttcataaatcttctctgaaaagttctcaattcttctcactgaaacttgtaagcaactgagcagcttctgtctgtatctaaaatggaaaaatacatgttataagtaaacaggagagctaagagactaacttgtgaaatttaagtttataaagtggggtttctaagagtttccaaaaaccagataggacattataacaataaaatgtcttgacagtgaccagatgagactctcagctcttccactttagtacacatcccatgacttttatgttttagaaatgttaactcgatctgccatgtgtgtcaaacaggaataattctgcattgtagcaggcaacccgtaacatccacctggtgatagtaactaaattatttcctatatagaaatataaatgtcaatcaatttacacttgaaatgaacacacttgttttcaacaatattatgcatttagaaaattatgcttttaaagaagccaa

SEQ ID NO: 181628 - DNA, 941 bp, Homo Sapiens
tacaaaaaagttggctgaataacaatgtttaacatggtcataatcaaatttagtatgttctaacaatatatatacaagggctagttaatggatttagcactctaagctctgtcagataatattttaaaatatttaatatcttttatatatgcaaaagaagatatttatacatactacaaaatatcacactaaatactactgaaatatttaaagaaattttcttaccaaatacccataaggtgaattgaagtagcatctttagggttcagttcaattgctttctaacaagaaatgagaaaaataaatcatatttgttttctaaacaccaataagtgctttactgtgtttgctgaagaagccatgattttttaaaaaatgcaactgtgtgtttcagttctcccattataatatcaactttcttcctcctgattctttgattaaattcatttcaaaacactattaatgacttatactaatgttactattttgtatggttcagacatttatagtaagtgtctatcaagatgagaaaaaacatgaaatacataaatggattaattttgcaaattaatcttgcaaattaatctatagctcttaatgtttcttccaaattaaaggaaaaatggataaggaagtactttcttggcaaactgtagatgaatactgaataaaagtcattctttcctaaagaagaaaagtgcattttagttttttagaaaaaatgtaattttagaaagtctcttctatgcagattttagaaagtcttttctatttttagaaagtcttcttgtatgcagattttgttcaacttccccatctgtacttaccaaaggaaaaataaacagtttatagaatattaatagaataattatgtgcaatgtaaaatatgttgaatctccctaatttatatttactatgtgaatataaactactagaataaa

SEQ ID NO: 181629 - DNA, 3899 bp, Homo Sapiens
  misc_feature (647)..(671): n is a, c, g, or t
  misc_feature (705)..(738): n is a, c, g, or t
  misc_feature (2494)..(2525): n is a, c, g, or t
  misc_feature (2739)..(2781): n is a, c, g, or t
ttggccaatagtggtgaaattatacacaagaaaaggggtagaaagcccaaaaagctacagtatgcaaagccagaagatttagagcaaaataatgtgcatcccatcagagatgaagtacttccttcttcaacatgcaattttctttctgaaactaataatgtaaaggaagatttgttacagaaaaagaatcgtggaggtaggaagcccaaaaggaagatgaagacacaaaaattagatgcagatctcctagtccctgcaagtgtcaaagtgttaaggagaagtaaccgaaaaaagatagatgatcctatagatgaggaagaagagtttgaagaactcaaaggctctgaaccccacatgagaactagaaatcaaggtcgaaggacagctttctataatgaggatgactctgaagaggagcaaaggcagctgttgttcgaagacacctctttaacttttggaacttctagtagaggacgagtccgaaagttgactgaaaaagcaaaagctaatttaattggttggtaacttgtaccaaaatattttacttcaaaatctataaagcaggtacagttaaggaataagtagaactaaggcttctgcttccttgctgctgtggtggagtagggaatgttatgatttgatttgcnnnnnnnnnnnnnnnnnnnnnnnnncaaacttacgagacacttcacttctttaaatgannnnnnnnnnnnnnnnnnnnnnnnnnnnnnnnnntttaaatgtttgctatttattgcccttagataggttatgcattttcacattcatttcattcactgtttgaaacgaaagaaattgatctataatgaattcctgatttatttatagaaaagacaattctgctacactctttaggagcataatattcctagtgatagagcatttcatgttaaaatgaattatttttgaccaagtgaggtacatttctattgatacaagtcatgcccctaaaagatagatgttatacagagtagcagtgaattaagaaatgtttcctctaaaagataaatataaaatttccaccatttgataccctaaacagtttaattttaattatagaatgttcatctacaaagtatctagaggaggcttttgctttattccatttctgccaaacttaagagaaaatgtactgatgaagggaaacatatccacattggaaaacatttgactgtctaatttttcagaccttgattcttatatcactcaatctctgtttattgtgccaaagactgagaatcagtgcagtggaaagcctgtttttgacgtcaggacagcatacacttttcaatattggaaaggctatatattctaaagagcaagttattaaagagttatgctgagatatatctttttttggtactaatagaaaataatgcactggtgggtcctttgacagagatgttctagaggaaatgtttaagtggttaaaggattcaaggaaaatacaggaaaaaaggtatgggatttgatgtttacttgttgatctggattaatgtcatttctaaactttagacatatctaatagcctaaaatgacttacaaagaaacgtgtctgtgtgtgtatgtgtatatattgataaatgggtataattaaatatatatacaaacacatacttatatactattacccaggtataaattcttttttcaggattttttagatagcagtagaataaaaataattttaaaatgtcatactttatagtttaattttaagggggaaattggttattttcaattattaaaggttaaaataggccaaatcactttttatgcaatcatgttttatacagtggtctcattgcacattgtgttttttctgcactttttacggtatccttatcatgctggtatgtcaatatacaccctaaagaaaaactccatttaatgattgtgccttgtattctattattttttgcatcattagtaaaattaagttgtctattgtaaatgataactatatgacttaggagaatgtattgctatatgtactgctatggaaaaggaaagcagttatttatttgtttatggtacagttagttattttataccttaaaaaccaacatacttaccatttctattgtttaaaaattactgtccatttttttaaaaatttaaagaatgtagtattttctgaggactggtatggtacaaaaatgtaatcaaaattttcagatactacatttttaaaaagtgaggatggggaaaatatgtatcagcatgaccctgatgtagaaaaataaagtctgcaattgaaccttggcaaaatacattacataattatttctgataaggataaatattagctgtcatttaactgtcgtgaagaatgaaaaagtgatacatttgggctttttagatcatttgtaactaaatttgtacagaaattctcctgtgaaattaagtaaaccattttccagatcttgactgcattgctgagattttgcagttgaaaaataatttcaannnnnnnnnnnnnnnnnnnnnnnnnnnnnnnnctaacaaatatatttaactataaaattaaaattcagtagttaaactcttcataatgcagaaatggatggcttgattgtatagaaaaatgagtctttcagttacaccattcttgaaaataatagtgtatgtttgaaatttgtcattaattagttgcttttgaaggcaatctatttgaaatatgtaatttcctgatgttatctgcattgtgttaannnnnnnnnnnnnnnnnnnnnnnnnnnnnnnnnnnnnnnnnnngtacagttttaagttgtgtacagaaaaaggaagagcgtacacagtcttagagtggaatatacctctagtacagtgtatgtgttaattccaactcaagcaaagaaatgagtatttaccatctttcctataacatgtaaatgtattattcctgttctacagacactgtatatttatgaccttatttggacattattagacactggtttcttagtaaagcacagtaacttggatcagattctttgtaaccgaaacacttaaacatgtattagtaataccaatatatttagattttatatttttataatttagcttctatgcattacagaagttgaattaagaaatttaagtcatcaccatatttttgttttctttaccacttgggaaaataatcctctttgaggcagtaacactatgtatgtactgttaataggccagaaagaaatattggcagttgtcttaggtaagcaataaaaacatctccaatttactgaaagttcagaaatataactcttacatgcatggaaagtgtaaaccaatttaggtatttctaagtacccaaccctagtattctctccctcaactccaacattctcaagtcccagatgaaaagtttcagtggagcattagtttaaatatttagtctaatcgagactcacagccctgggcaatagatacatagctttttaaaattttatcctttgtgacctgctatagtggcattggactattttctgcatgtattataaactaaagattggccttatttcaattgtttttattgcacaacttcactacaaatttaaagactgctggcattattataaaactgtcttcctccaatccaagtaaataagtatgtggaatatttgtgagctggattaggtaacatctgagacttgggattgactaaatttagttatcacttggaaatgaattacataagatacagtaatcagagaaaatatctttatgcagcatgtatgttaacatctagaactgtccctcatctgcagtgcagtaaaggaatcagacattttaagaaatgtattcaatatttttatcttatatgttagcagcatttacttgttttcagatatgatttgtaatataattaattt

SEQ ID NO: 181630 - DNA, 1628 bp, Homo Sapiens
  misc_feature (151)..(159): n is a, c, g, or t
ttgggtctcagcctcctaaagtgctggaattacaggtgtgagccactgtgcttggcccatgactggaatttttgagtagttttctttcttggtaacagcagctgttttgtactagtccatacatcttgtgagctccatcagttccataccnnnnnnnnncttagtagtaggttgtgaggcaacctgttttgggtggagagataatcagtaccctctcttcctgtccccctgagcctgaagcctggcatcccagtatgtggtttttttaccacgtggtctacaagaacccatggacccacagggccgagcctcccttccttgtgagacagaggggcactgatatgtctaggactgacagatcttcctgtggagatggggggaaatgtcattaggtgtggccattgggcttcagcctcagctctgcctggttcaaaccgctttgctttgcactgggtattttgagttctgtgcatccccatctgttacatgcacagccaacaaaagaacactgtgcttgggcacacacttttttcccccttttaataattgtttttagagcttttagtcttggggcagattttgaagctgtgtgtgggagacagtcacagatgggacagtacagtttcctcacttaatgcttctgttccagcataaaaatatcagagggacttcagtttttgtttaactcaggatgaatttcctggctggatactatcctagaattttccgtataattaaaacattaaacagtttcatgccagtggaagaaatttgcctctgcgttggcatttcttcattgtgggtggttggaagcctgtttagaggcggggttctggaggtactggttgtcttttttagttgttcagcttgtgtgtggactggtgcccttattgctgaagagggggtggtacctggaaatggaggacaacctcacttcagctgcagggcagagacttggagtgctctcatccctttgggtgtttcccagtgcagtgatattgttttgaaaacggtgtggggaaagagatcactttttgaaaatacctcatgtttgtttgaagcagaagaatatcgtgatccattccttttcccagcaaaattcctttagtttttctcccaagttgagacatccactcctgcctgtctagcagtctggggagcgagtggggaggtacctgctggggtcagggctgaaggaggggcctggaggctgaggcaggggcctggggctcccagagacaagcaaggctgcagtgactccaggctgctcctgtcccagttcccaggactctagctaggtcctgttgcatctaatcgttctcatttttttagcttttagaattatctcttgaacacctattttgtttcagacacaaacagaggtagacataaagaaatgtgttacttttcctttgttgagctctttatctcagctggggagataggttgattggatctttgaaaagtagaagtttaatattagttgaaataattcattattgcataactttctattttgatataatttcaggcttatgtaagttgcaagattagtacaaagagctcttgtgtgtcctcctcccagattcactaagtgtttacatttgtgggaataaataatttttaat

SEQ ID NO: 181631 - DNA, 149 bp, Homo Sapiens
ttagcaaggcatggtggtgtgcctcagtactcagagactaaggctggaggatgacgtgagccaacagttggaggtcacggagagctataattgtgcggcttcgctccagcctagataacacagcaacacctggtctttaaaaaacccaa

SEQ ID NO: 181632 - DNA, 1343 bp, Homo Sapiens
tccccctccccctgccctgctctggggagttcttacctcttcagaagctggaaacaaaggaccagtgctcgtgcccctctctaagacaagcttcagcccccatctgacgctcaccgctagcttccaaccagcacagggccacccccagctgcccgcagctcttccctgcccccttcccagcccacctctgcacaggctgcccctcctcttgcctctctgagccccaggcctggtcctgtttccttggcgagactctcccaggactctgaacccacaaacgtgcctgtttcccaactcagagccagcgtcacctccaccctccgcacttccgtggggcctgcaaccgcatcccctgccacagggaatctacaaagtggagtggtgaagaggggcacacacctgggccaaacccagacagccccggcttgtatatctcttctctccccaaatccttccaaatcatcttccctccccattccagcccctcaaactgagactgaagatgcaggtgtgctcagggctgctgaagcaggtgtgctcaaagacctcctggaaactggccacagctgcaggtatctgtggcccggacaggctgggaggggcctgggcctgccctggaggggctctgtttcgtaggaaagaaaatagaaaaacactgaaaagacccccaccaccttcagcatagaaaggctgctagtgcgccacaagcaggccgccctagaaatggggtggctgagacggcctgcggagcccttttgccccagccctgcagaagaagggcagggtgcctcaaacagatctcatcctgctgcaaaacagccctgggggcctcgggcagggaggcgggctactctggggctagacgcagggctgtgcacagacaggttcaggaagtggatgcacggtcccagcaacactcagagcttgagcagatgcaggacaggctgggaaaaagggaggagctgggctgtgaggagacaggacttggggcagtctacaggggaggatgcacgaggggcaggcaggcagggggtgctgcgatgggcaggggatgcagcatgccgcacactgctcagacctgcgtgaccctcccaccccgcctacagctggcctgtgtgactggccagctctcacctgcaccagctggacctggacgccctgcgccccgcactgcaccccagctgctggagctggtcctggccgtcctccgctgggcaccacgaggctcccacacaaccaactgttctggcttgcatggaaatggggaggactcattttgccttcttttatttttctctgagtagactgtgaggctcctaaaatgaaatataaaaacgagccaa

SEQ ID NO: 181633 - DNA, 1497 bp, Homo Sapiens
  misc_feature (648)..(874): n is a, c, g, or t
ttgggtatttattgaatgctttctgtcatacactgttctagatggtagggatgcaggcgtgaacaagataggccaggtcaatatgttcgtggagtttgcattctagtataaataaatgttttatgtgatattagctatgaagaaaaaagtaaaagcagaatgatatgaggcgttacactaggccagttagtgtggaaaggcctctgtgaggaggtaacatttgagccaagactaaaatgaaggcaggaggagtcacataattatgtcaaaggcagctctctatcctagggctgagtgtgtaaagctctcctattattctgtgatcattacgggaaatcccctattttggtacataatacatatctgaaaatgaaagagccaaaaaatacaatcagccgggattagaatttgaacagaagctgcctctcttctacccgggtaacctaaaagtcggggatcggaatggtataagtcccaggaactgtggggcaggaagtgagtgtatctattgctacgtaacaagttattccaaaactctgtgacttaacaacaacaacaatcatttattatttctcgaagtttcctttggcaagaatttagacagggcacagtggagatggctttttcctattccacaatgtctaggcnnnnnnnnnnnnnnnnnnnnnnnnnnnnnnnnnnnnnnnnnnnnnnnnnnnnnnnnnnnnnnnnnnnnnnnnnnnnnnnnnnnnnnnnnnnnnnnnnnnnnnnnnnnnnnnnnnnnnnnnnnnnnnnnnnnnnnnnnnnnnnnnnnnnnnnnnnnnnnnnnnnnnnnnnnnnnnnnnnnnnnnnnnnnnnnnnnnnnnnnnnnnnnnnnnnnnnnnnnnnnnnnnnntactagtctagggcctctgctggaagactcgcagagtgtgggctggaatcatccgaagtcttgttcactcacgtgtctggcagttggtgcaggggttgtcaggaagaacacccacagtgacctcttcatgtgacgcaggcttcctcataacaggatggctgggttcccagggcggaagtcgagagaaaaaagagcatgcacacatgcgtcagggctggaagtcatactgccttttgtgacctagcccgtcactttgtattctgttggttgaagaagtcacaaagtcccaccctgatttaaggaaaggagaagtagatttcacatctttatgggaagtggcaaggttcttgaagatcacacaggacttgaaatattgccatggccatttttagaaaatacagtctaccacaccaagcaaatctcttcccatcaaagaggttaaggagccaactcccctgggtgaccctcactgtcccttgcacgtgcctgtgccagcataatggcttactgctggtgttctgtttgtcccgtgtgggaagaacggacaataagaaaagtgtgcgataagagtagagtgggaaagggatgctgggtcagttaaagtgatggtgccatcatgtcct

SEQ ID NO: 181634 - DNA, 905 bp, Homo Sapiens
ctttgtacaaaaaagttggattaaagtatgagagcctcggggccctcacttcaaggagggaagagcatccccatgcctcagcgtttggggattgtagggagatgagagtccttcaggtgggactagttcccgccatgaccccactgctggccagtggcctgaaacgcatctgaccacttacttctcaggttcatgggtgttgaggaggagccctgtggaatcaaccctgtctgcctcctcttatcctgccactcctcttgctctgtctggatgactgcccttgtttttcaagggaatgttccctgtcttcctcagccaggattttttctgaacttgacatctccgtttgttcagggggcaatcattgggcacttcactgtgctggtccttgcattctcatggagatgcagagattaaaaattagtatcttgtccacatactgcccagagttagcaaggattgcttttctgtggatttgtctcaggtcgggcacagtgggggtagggtccttctcccttttcctagcctaaaggttccagctgaatcttcccaggcagggctgaaacaggaaccattttaggctttgctgcaacccatggtcagttctccaagaaaagtgaagagggttccacctggggcagccctcaagggctcagagggccaaaacacacgtacaacatgttgagacactgagtttgtgcgatcctcacacatctcagcagtgagtatttctgcctcattttaccgatgaggaacctgagcttcaaagggaagaggtgacagctcaggaccacacagctgtaggtaggaggcaggaaatagggtctgagtgcagggaacataggctgattcacacttcagttatgatagaaataccttctccataagggcataggccaagcaaa

SEQ ID NO: 181635 - DNA, 1251 bp, Homo Sapiens
  misc_feature (860)..(878): n is a, c, g, or t
ttggggaaaaggttggaaattaccccaggaacaggttataaagagtgaagaaggcactactcctatctactggaaaaaggatttttattatttggttagctttgtgttttaaaaaaatgatgagtatgatatcattcatctgttataaaattcaggtaacttttactggtgaacttgttagttctcactttagctttagcttagccatgcctttatgatacaattgaatttataaatagcattcttatgttaacataatgtctgtggtttcaatccccgtttattctgacttgattataacgtgatctgaaatatttccataatgctgtgataccattttggagtaatttcattccacgtagaaggatgagcacttaaactctgggactttgttatgatttacataattgtattataaaatgtggctctgtcatgtacctaggccagcaaatttcccaaagagcttgatttataatactattttacctaataacatagcttcattgcacagaatcaagataggagttagactaagatacaatagaacctctacagaattttttcaacttctccttcaatggaaatttctctttaatgacaatatacgtttttgttaatgatttttttaaaactagaattaattttaaatgagccccagattttttctgctatatacatatatccattttcttgatatcgattatggtaatatgcccccattattctttacatagccattttgatgcagcattacctcttttgaacctgccccaggagttattgaatttacttttacatgttctcttgaaggtagctattatcatctatacttcttttcacttaaaattgcgccatattgnnnnnnnnnnnnnnnnnnnattctcctaataaaatgtttaacttagtaattaatatcatattagactataaatgcccttccaggtttctccaacatcacaggttatattattggttactattattttcttaccctttttctcatgtgaataatctagaaggtcttttcagacctgttcattcttttctaggggataaagtcatataataacaccaagctacctggtgcttttcaagggctatgtgaaaattgccatagatgcatcaatattgtatttaaacttgcaaagtcattttgatacatagagttctctttttgtttacatataattgtatttgtgaaatgtgttgggcatttccattgtgactttagagtagcatctattctatgtt

SEQ ID NO: 181636 - DNA, 1188 bp, Homo Sapiens
ttggctcacctccaccctgccagtctgggatcgtagcatgcggcccacccacgaggagcgggccagctgcaggaggcaggacttctgcaagttctgcagctcggcctccatctcttggagcgtgcgggtggtctgcagcagccgctcctccaggtgctccttctcctgctccgagagggcctgtggttggtggtgggggggtgtcttctgcagaaggcccccaggccagccccagcctggctccccaacaccaggaccctgcccactccctgtgcccctgcctcacccactgggctcgctccttctgttccttcaactcctggatcagcttctggacctggttctgcaggagtttctcctgactgtgggagctcctggaggaggggtgacctcagcagcccccaccctgctcaggcaggggttcctaatgtcaggtcagtggcgaaggaggggagaaggaggggctccactgccaccttggccccaagggcacacagtacagccccgctggggctggccagcctccggctggtctggacaagggtctagcacccatccacatgcgcagggttagggtggaggctatagcgtgttaacttaggatcagggtggagggtcagcgcgggcaaggatgagggtaaggatctgcctcagcggttggggttggggtcagacagaaaccaggagtccgggcgaggacagggcggggttgggttgggctggggactgtgctgcagacctcttgggcggaagccccgccacctcttccaggatgtggcagagccggtcgtcctcgccattctggatggcccaccgcaaggcctggatctccagttctcgctgtctccacagcagccgcagtgtgcgagggtccagggactcaagagccaacctgcagcggcagcagaccctgctgcttactcaggccggcccctggccacctggcccaggaggctcaccagtcctccctctcctccttactgcgggtcggcagagcagaccaccggtgtggggtggggcgtggtgtctggcaagcacgtgggagtctcgggggctgcaggtgcgcctgctggaggtcccaggtgaccactgaccgactcttgctctgtgggggacaggagagcctcttcctcggtttctttaaccctcctggccagacttgagggccattctcaatgttcttcggga

SEQ ID NO: 181637 - DNA, 1349 bp, Homo Sapiens
  misc_feature (317)..(342): n is a, c, g, or t
  misc_feature (369)..(595): n is a, c, g, or t
  misc_feature (784)..(797): n is a, c, g, or t
  misc_feature (822)..(901): n is a, c, g, or t
  misc_feature (1098)..(1143): n is a, c, g, or t
ttggctcagcacaagtcttcctgcaagcagagtgctgtttgctcagtagattgatcaagcaggagtgatcttggcaagaaaatgctcacgtaggctctgccagactgtgcctctgaaaccactccctccgtcaccctaaggagaacgagtgtgtgttgtcccagcttgttctcctgcagtttcttaagcaaactgctttatccttgcctgttgggctccaggtatgtaacagaggccaggcctgtggcccagaggaaggaaggcccagttaactgcctcagtctctctttccatcccctcaggaggacaacttctgnnnnnnnnnnnnnnnnnnnnnnnnnngagacagagtcttgctctgttgccagnnnnnnnnnnnnnnnnnnnnnnnnnnnnnnnnnnnnnnnnnnnnnnnnnnnnnnnnnnnnnnnnnnnnnnnnnnnnnnnnnnnnnnnnnnnnnnnnnnnnnnnnnnnnnnnnnnnnnnnnnnnnnnnnnnnnnnnnnnnnnnnnnnnnnnnnnnnnnnnnnnnnnnnnnnnnnnnnnnnnnnnnnnnnnnnnnnnnnnnnnnnnnnnnnnnnnnnnnnnnnnnnnnnatgagccaccgtacctggctgagcttctattttataaaaggaaaatgttgacctttttagacagcgtccgtgctgtcgccaaactgtataaattctgctcatatttctgactaaagtcatgggagagagaagagagctattttccttaacatggtttgaccttccaaaaagccaatctgaaaaaattcnnnnnnnnnnnnnnaagacagagtctcactctgttgccnnnnnnnnnnnnnnnnnnnnnnnnnnnnnnnnnnnnnnnnnnnnnnnnnnnnnnnnnnnnnnnnnnnnnnnnnnnnnnnnccccacccacagtgcaggtgagcaagggtgaccaggaggcaagcaaagtgggtgtcaacacgtccctttggaccagcctcaggtagagcctgcagccctcagaactgtgtcatactgccccatgttcaggcttatgtctctctgcccagccttccaatcttcctcttgtgagatcctctcctctcttgctcagactnnnnnnnnnnnnnnnnnnnnnnnnnnnnnnnnnnnnnnnnnnnnnnttccacactcactgccctcttgtcttctctcacacaagactgtgattcctgaggtcaagaactttgactcgttctatttttcatccagttagcccctaccggtgctggacatgcactagtcacttgaaaaatgtttgattagccaccgcatccagccccacaccctccatttataccaattacctgcccagtaactgtggactttt

SEQ ID NO: 181638 - DNA, 931 bp, Homo Sapiens
ttggcttgtggatccacattttcatcctagaatccactttcaccattcccaatcactgtcgtctatcatgagaaggtctggcatgcaagccttttgtgtctttataccagctactgctctaactttaatggaaagggctggctggggaggataaggcccagcgtccctctggctgacactgctgtcaccattggtccctgtggggtgatttcaaccagctccttgctggctgtcctggaacttagcccacatactccaccaccttgtcctcgggggtattggaagatacttttcctgggggaacctgaggaagttctgtttagttcacaaatattttctgtcccaggttccgcaccaaagctggggggccagacatactgcctggtgtgcatggtcttacgggagcacctggacagaccgatgcacttgctgaatcttggtgggttaggggagcaggagtgaaaagcggtggtggtggggcggtggccagtgaaaggcttcagagagagatctgaacagggcttgaaggaacaaggggagtttgccaggcagacagcgtgggggtgggggtgaaggagagagtgaggctgtgcacagggcagatcgggctggggtgggatgtgtgccgttccacacttaggcacatttcctccatttcctctctgtcccgatttgtaggtcatcactgaggccaactcgagctggctttggctcaagcaaaatgcttccagttaattgccgtgtattgaagtgtcctggaatgggctccaggcacacccgcggctcagtggacatgatgggaagggctctggggacgttaacgggagaatcgaggtccctcctgcaaccctctgtcctccacaggatgccctgtgtttgtcttaacagatttgagagatggggacagaccactcaacagttgagcttttgt

SEQ ID NO: 181639 - DNA, 1852 bp, Homo Sapiens
ttggaggagaatggtgacttataccttgctgtctagtttaaggaattaaaaatacacatgcatgaaccttgaacatcaaatatcgggtactactctgaaaaccattaatatattgatcacttaaattggtaattttttttgtcagtccataaaattctacatgtttaaattttttgtggacctaccaaccaggaacatgttgcttctcaggtcctagtatatcctccaaagaatataccacaagtttttccatttgactttgagctgctgttgaagtggtgagtgctgtgttttgagcttattttgaacctagatccttgtgaaaggtacaaatagaggtaatagttaagttatggcatttattagaagttttattatttggcttcctttagaattattgtgaagtttaaaaatagcctttctcctgcaaattttcctagtctttagtaactgttagtgttctatatagcacaaacttgaatctctcagccaaaaagggaacatatatactgtttaagtatggcaagttttctttggtaccaatttgtttagataattgtaaaaatgttttttagttctagctactaaaacctgtatgaactcaaatggataggcatcttgtgagggtgtgtttttcccagtgtgaattggcttgaagagccatgggctaaatgggtactagaacaacaactgcccctcatgtacgccaaggatgagctctagatcatttgagaggcacagtgtttccggagtcagggactgcagctgagcgcaactgccccatctgaccactgactcaaatacgaactgcttgagacagacttcttttatgtagttctttgcagtgtccattgagacactataaccagccttgtaacatatgttttctccttttggtgctaaaaataaaaatattagaaagtagtctacacattaaagattgaaattcttaaactactgatgaagaaagggcaacgtgacagatgttaccagactgacccttcttacagaaaacctacagatttatttgttcattatacaaatatactacaaatataccctaaagggaatctccataagttcttttactagttttagctttgacagttgcttccacaactacctacaaagactggaagagttaaggtcatctgagtagaccagtggcataatgttacaaatgaggaaactgaggcccagtgcagtaaggccttgcaattaaatctgtagtgcccagtatcaccaagcagctctaaaaacaggaactgaagactgaatgagaaaaggcttatatgactactttaaatccaaacaacattgagtcatgaaaagttctatggagaaatattaaaacttaagctacctcaattacagaagactttctcccattattcacgtgctttttcctttagaaattctgcattggcccatacatttgtaaagttgttttctgaagttgtatgacacaagggagccatagacttaactgttttacttcctagcctgttctaggctagtattttgtgatagtaatctattcaaatggagtggtagaaatcacatgaattttggaagcaaatggtaccgtaagtaccacagcaaattccttctggtcattatacaggcgtacctcagagatactacaggttaggtttcagaccacatcaaaaaagcaactattgcaaatagagtgagtcacatctagtttttggtttcccagtgcctataaaacttgtgtttatactacagtcttaaatttctaaaaaatgtacataccttaagaatactttattgctaaaaaatgctaacatcatctgagccttcagcgagtcataatctttttgctggtgga

SEQ ID NO: 181640 - DNA, 2143 bp, Homo Sapiens
  misc_feature (316)..(325): n is a, c, g, or t
  misc_feature (1242)..(1251): n is a, c, g, or t
  misc_feature (1842)..(1852): n is a, c, g, or t
ttggctcccaattcattttgtggtgctgaatcagttatataactttattatgaatatgctgtgatcttcatttgatggaactgtgcaagaaaagaacaaggaaaaatggatgtttcgctgcaggattaagttacaattatcttctcagtgaaggtcatttgtgatggggtctaattcttattacttcaacaaatattgttttgacttggggggaggggctataaccctgctatttttcattgactctattgaactctttaggatgatgactgatcatacaaaacgtattataacattttcgtagcaaaattaaccnnnnnnnnnnccagtcacagtatttgtgaaaagtaatgagccatagtacccagtcatgttaaatgaatattaaaagcatggagaggaaacatgaggaacaatgaatttcaacatatggcttcagaacatgaagatgttcttgtatggattatagtatctagtattcaaaaatgcctgcatctcttctcttatttattgtaagtttttaaatgtataaattgtcttatatttcttaacctcttttataaaaattttcctagaaggtttatactgccttcttgctttaaagcaattggtctaaaatatatgtaatcgtcttaattaaaaagttgcagtagggttgcttttagagtattatttttttgtaagggggtgggtgggacagtaaatttgtattgtctcgatgtacagtttaacggggatagagggggaataatgtccataccattgtgtgtggaggatttacagctaagctgtagttgcagagtacatgtacagtaatgaagttcactgtgtttataaattgaaaaggtaccaggtcttacagcattttatatatcacatctttacagaataacatgatggcaatatacaagtggtattgttaggtggtttaacttagaataaaatgagaattcttcagttatattttgcactatggtttagggctatgactaatatttcaggccatttccggtgaaagaaacttagttttacaagaaaaaccatttgctactgaatgcttaaactaattttagtgtttaatgttacatgcttaaatttttttcagttttaacagtggcatatttaggcatggaaatattattatgaaatttattttcaggatctgctataaggttgaaatttagcccagctctaggcattttacaaattatttttcaagcagtcattcttgattgtttgacnnnnnnnnnnaaattaaagattgggaatgtatgtgagagtatgcatatgtatgggtgtgtgtgtgtgcgcgcaatcaaactgtggtgtaaatagattctcagtgaattctggtattcagactctattccactagtgaaagaaccattttttaaacttcccttgccttttttatttatttaattttcttggtttggagatgtcagtcccaaacaccagagtctgtacttttctataacacagctcagattaaggtagggcatatgccaaggaggttctcacctccctaaagaagggacttgaattttagggactttaattcacccctccttcaatacaactttcccccttcttgtttgcacatgccaagataactgcttttatgcaggctgtacccccttgaaaaatcctttctacagtgctgctcacaaaagagcccaagttcgcctcctacctgcattgctgacttgaattcacagtcgccgagtctacctagctttcttggaagcagtctagcaaaatttctatttgtacgttcactaattatctacaaggacaaaatcagttgtatttacaaaactctacttcagtgtttgttttagnnnnnnnnnnnactgaaacttgtttttgtgaatactctgtgcttagaattaaatatcactttcttatgaacaacataacttcttcagattgtgtatatgaaaacattagcaagtcttgttttttctatgaagcaaacacaattggtgacaaaggttgtcaatcatttcttcaaaattataatgcagttctaatggtcagcatattttgatattaaatttaaagatcacctctctgcatttgtttttaaattatgctaatacaccacacattatgttggtatgttttgttctgtactttcctt

SEQ ID NO: 181641 - DNA, 1092 bp, Homo Sapiens
gagagctgagagatcactgtctcagccatctcccaccacaactttatagatgaggaaactgtatccaaggttacacagctcataatggaaagagccaaaaattttggtgttcagactctcaaatcagatatctttctagtatatacctccttacctccaagaaagcaaccaatagctgcctccaactccagaaacaactggagcaagcaggtggtggtgatcagcacaggtgggaaaggccctgatataaggagtcatgctgactccagctgagccccagcaagggagcagccaccgcgctccctagtctccctccatccgaatgttatcagcagcaggcacccaccctgccaggttctcctcctggttagcagcactgacatgcacggaaacacatcttaccacaatcccaggctccttcccaactacagcaggctctaactggtgcaggatcatggtgaggagctgcccaccagcctggtaatccagtttagccagactgcggcctggatgctgtaaaacctaatccacacccttgggctgacttagatggggtctcttagcaaacaggctaaaacctctgtgttgtctgggagagacagagggaaggactcacagatgctgtcctcccagcaggagctcataaacatggttggcatgaggagaactgagttcaggaaaaggaagggactcaggaaatagagagacagacagaggaagcaggagcagctgtgattcttcctccctacccaactcctgaaaagaagagaccacagacagccacagacatttcccccatctaggtttcaaggacagctcagcctgtgtgggctgagaggtaagaggagagaatccagagacttgtttttctggattctctgagaatccagagacttgtggtgtcataaaagctaagggaggaggttgtttcactgagggttggtgggtggtgtgaaatgctgcggagaggtcaagacagctgagcactgaaaggtattcatctatttggcaactgggcagtcactggtgacttttatgaaaaagtatagagggctgaagaacagctgaggaagaatcagtttaaaaagccaa

SEQ ID NO: 181642 - DNA, 2223 bp, Homo Sapiens
  misc_feature (2158)..(2171): n is a, c, g, or t
ttggatttttaaaaatgtattcccagctatacttctttctttcaaatgtaaagaataaaatgttttaaaaaagataaaatttggaatgatagaataattaaaataattgataaataccaacagacatttgttaaatatcttataaactatggtgcacttttataattattatcctatttcagcagaattttttgtttaagaatgattgatgatgtattgaaatttggtagactgtataagagatattaagtagataatgtgtattgttttagagtcttatttcctggatgttgactttttttaagaatgtagtttaggttataggttatatttatttattcatttaatatttattgagcactccactgttcttggcagttgggataaatcaatgaacaaagcagaaattcctgccctcaggagcttatgttcttaacatgattatagaaaaacctctacttcaggaatgatggaagaatgcattctcagaaaaattgaatgatgtttccttttattgacatatttgtttcctggtattgcagttatgtaaaggttaagtaggattttatatgccaatcatccgtggttgatgtagtgaaaaaggtctggactgttaacattctcctaggaacctggaaataaagaaaatatgataactttttaaaggttaaatttagaattaaaaccctaatggagcaacatttagatatataaatataactttaaaagtctgaatacttttccaattgcaagatttgactataattttattgaatgagagttttagtcagaaagaaggggcagagggtatcagtaatgaaaatagaaaaagaaaagacagatattaaaagtgactgtccaagttctgtgcaagagtaaagtaacatttgtccctaacacagagatggatgtagagagttgtatcagtgtgcatcgagtattctgaccatatggtgagccttcactaggtgcaatggatgcatcagattatagccagtaatatctttccaattcccagtccctctgcctagaatgcatccttattgtgaaaggaatacatcagcttagcacaattcaacattctctgactctgatttcccttgttctgattccagtcccaccaatccaacttgtactgattactttcttttccagtgtaggttagctcatgggaagagaatgcattattcatgtcctctcaaatatactggttgccctgacagttgtttcttattgtatgaactggacttgaggcaatgggctggagctgcaggtgcttatacttctgtttctgggacagatctgtttctttttgaacattgatactattttggttttataaatcagtcttgtcaacttagttactgtgactccaccccagcagtcttcagtatgctaatctagtgcctaagctaaaaggttgagggtcagctcctgaccctggtgaattgtgcattaaagccgcttagaaaccagcgtgccaaccccctgctgggctgttgagtcaactcttctacagttctcagagaaaaaagtggaggctaatgaatctgtgagatcttttttaaagattgtcactgatcagatctctaacataagcaataaaagaaaactgccaagggtgccttacaatatgataccaagtaaatgttataaaattttatttcttagggaggtcaaggggaaaactatattataaatgttatgctgtttaaaatgcttttttataagtataaagatttactacaagctgtctttggcctttgaaaatgtgaaattaaattccagaaggaatgcattatttactagtaagttatcataggaaggaaggcagagtggcagcttgccccatcaagtcacatcttcacttttccccagcaacatttctttggaataataactgggaacggggagtggctggaggaagttacgcatcaggcccctttgtcactttatgtgaaggtaaatgagagcgagttagacgacatggaaagagtgctggactgggggtcggactcacagcattgtgttagcgccactcatcttcagccacacttatgggcacattactcacctctgtggagttgaacttaataacttttcagatctgttcaaaattcacattctgtgatcctgtcactgtgtcagacaagtaagnnnnnnnnnnnnnntgaaacaatcagacttttcttggcatacattttgtatcaccctacttgccaa

SEQ ID NO: 181643 - DNA, 828 bp, Homo Sapiens
  misc_feature (162)..(207): n is a, c, g, or t
ttggctcatactggcccctgggcgcacggtgaccctgcggctgcccggcccctgcctccgcccgcgcggccccctcgctcaggtcgcgggcgcccggggcctggcttcgcgtgggtcctggctcctcccgttccgcagttggtgccgtctgacagccccttnnnnnnnnnnnnnnnnnnnnnnnnnnnnnnnnnnnnnnnnnnnnnnctccggcctgaggcccggcgaggtgctggagggagcggggcgcgaatccggcccagatgggcagctccatccgcggggtcagggccgggcttcggcttcaccgcatcctcacctgagcgagcgcctctgaaatggagggcgggccgcctgggccgcgggcctcgggaggatggtggcgccctggcgcgtctccgtcagggtttgcctgtcgcacctgaggtgcttcgagctcatacagggactcagcctcctgaggccctccgagtgccctcacgaagccaggctatgctggattctgatgggcactttgccgagggtcgactccatgtgcggggacgtgggtgagttgaataagataagtgtatttccgagtaaattactacacctgaaaaagaatctaatatacttaaagctgaattaatccaagtaacagctttggcataacaagcatttgaaatagaaaaaaacctaaaataaaccaatacttgaactgcagagtaaattggattcaagaattgagtgctcttgaaagactaaatagatgaaaaattaccccaacaagatagagaaatactgaatctagtatcccaaaccttgataaagacaaacaaaaaattggtc

SEQ ID NO: 181644 - DNA, 1216 bp, Homo Sapiens
ttggcacttctgttttgcattttgatcagctcagggagctttcctttaattggaggatggatatagcaggagggttgaagaacttagagcgtaaatgcctatttttgaaagtcatcttcaaaaataagacagttgtgttgaatgatttggggatccttttttctagcatctgaaaattaaccatgtgtttaattccacaggttgatttctttaggtccccaccacccaccatgagattggacaagtctagtgggaagtggtctagaggtgatggatcttctaggattgcaatcagagctggcttcatgagtgtgcacaggggtcccacacatgaatgagtactttccttcactgtcttaaaattcttaatagtgtttgaacaaggtatcccagattcattttcatttgcactgggccccacaaattatgtagccagattaggttacagtcaacatttggacaatgttaactctatttattgcacactatttttctaagataactagtagaaatgcttgcatgtcagaaatgttgttgttaaaatatctgatgacttaagctgtcttacatttaggctgatatctctccttacatcttttctgccattaacattagggattagatagatcaaacaaggcaaggagaactcaagaaagtctggtcacttcagtgagtgttggtgtgtgaggagaatcaagtgagaagtgcttttagaaacatccatgcaggtatgaaggagctctaacatgccaggtgagtggacaaggcttggggaaggttgacgatacctagagacatgtcagcctttgggtcagagcctgcctaatctcatggggaactgatgggtggaataggcactctaggctccccctggcatgggcagggttgcagagaattcagaaatttgtgtgtgttcacggaggggaggccaagcttctgactgttgaagttagggtcagaatggagaggcaagcatgtgtgtgagggactctgagatgggaggctgacaattaggacaatgggctttgcccatggagccagaatgttaccctgcgagggtgaatggcactggggccacatatctcagtggtcagatccaggatctcagcagtcactcctatcaaatcagagatcggaccatgggcatgcacactcagcaaagtcccccatgatccagaagacatgtgcgaattctgcatcatcttcccctccaata

SEQ ID NO: 181645 - DNA, 1557 bp, Homo Sapiens
ttggctgatctcaccttccaaagagccctattcgtgagtttagcccaggtgagaccaatttcttcaccttcactcttatcctttgcctgcttactcctccttcccttctcctcctcactacgactccatctacaacgaaccatccaacaggcacacacaatacttaatcaaaccaatcctgacctcgcacgtaactgctggttttgtgtccattcctcagaaaccacatcaaaaattgccttcctggtcccacttaaagattggacccttaccaacctgacactccatcctcactatcgaagcttcggaggggtaaatgcacttaaaagttataaaaccaacctcacccgctacacctccaggagcaaacttatcttagggacacttacatctgatgccaaattagaccaacaggcacccctttgtatacagcacgaccttccctcaggaacccctttaggcactctccccaccggctcatgtaactacaccctacaactcagcccacctgctggtatccagccgctaacagtatacaatcccactcaaatactcaaaatttctggtcccccaaaaatacaaaccactaatctcaacacaataaactcaggtttctgcatcaatccacacaaaccctgtatgataattgcaggatggactccatgccctagcccccgcccagcctccaactgtccacaactcaggtagccagagcccccactggggaaaaacttttagtggacacataatatttcctcctacactgggaaaacaaaacagtagggctagccaactaacctcaacccatcccttccaaccactcaccggggcggccctgtcttcctctctctccgcttggcgatcagaaaacaagatcctaaagcccctctttgccaaagacctccaattttgccttcctagccagggcatattctttctctgtggcacttccacctagctctgcttacccactaactggacaggaacctgcacgctagtcttccttagtccaaaaatagacatagcccctggggatagacccttacccttccaaattcaaacattatcccgcagacgctgagccatacagcttatacccctgctaatagggttaggcattatggcagctgcaagaactagagtcgcaggaattgcaacctctacctattactacaaatccctatccaaggacctctctgataacactgatgacctagcatccactgtatcaaccctccaggcccaactagactccctagccgcagtaggtcttcaaagccgcaggggcctcgatttacttaccgcagaaaaaggaggtatctgcgtcttcctagatgaagaatgctgcttctatttcagtcatgcctggttcaagatgcagttaaaaaattaaaggaccgggctcaaaaatcacggaaaacagttcttccccctggccctcctggcccctatggcccttcagctcctgggcctcctggctactcccactccttggacctgtcatatcattctccttctaatctttgggtcctgcctcttatgtctctttacccaatg

SEQ ID NO: 181646 - DNA, 1058 bp, Homo Sapiens
ttgggggaaatattatgttaaaactgatgatgtgtagtaaatgttgtcaggagctacatcattgttatcttagatataactacattattttcatttactttggtaaagttggggttgtaactggaaggtaaattagatggcccaagttgttttctcacacagaaattgtgaaaagaatttaagtgtaaaaagtaaataagtttgaaaattattactacagaacatgaatttttgaactcctccctgctgggaataagctatagaatcccatggtccttgtcagccatctctttaggcctgtttacaattgaaaaacatgactttttcttcaagtatgtctcggggaaaggaaaaaaaattattattccccttatgaatttatatttttaaatttctctaaattgattttgtttttgttttcttctgtgacttacacttattctgttaacattatttaggaaccagctatacaagttagaaactatcctttgcttctccttcgatacttaaaaccttggacatttcaatgtcttgtagctcccctgctagagaatgagcaaataaaagagaagtaaaaatagatattttaatttatgttcttagtcttcttactgttgttaagagaagacatactttttaacacagtaaaattgtcgttttttagtgtgcagttctgtgaactttatacatatgtataggttcgtgtagctaccaccgtcaggatacagaacaaacagttccctcaccaccaaaacctccctcatggtattcctttatagtcccatcttatttcaaggcaactcactaatcctgttctcaatcaccataattttgattaaaattatttttagtatacatattgattacatttccagtggacttgaattaattatatagtcttgatttgtaggttggcttaaactaaacagtttgtaaagaagaatatctgggcttatttgatttgtataacttttttatggaaatactgaactgtatctgaagttttccatttcctcagaacacaagtaaatacgttagaagttttagttacccccccc

SEQ ID NO: 181647 - DNA, 1817 bp, Homo Sapiens
  misc_feature (1073)..(1099): n is a, c, g, or t
  misc_feature (1683)..(1713): n is a, c, g, or t
ctttgtacaaaaaagttgggtaaaatcttatgaatatgcatcttcttagctttatcttccctttgataggtaggcacttatgctcttccatctgctccatgtcaaatagggctcagggaagccagtcatttccttagcgagatgattactcctttgccttgaaacatttattgggcccaccatgtatggatcagtgtgtggtagtgagtcatactcccaaatcagtgattcccaagtcttggctttgggaaccagtatgccttgtattctcttaaaaagcaacaataatttcttgaaacaaaattagttcagaattgatttaaaatatttcagtgtgccatatagctctgtcccttggtttggttggccttgttttttcctgtgaagaatgaaagggcaaaggtgataccaaaatgaaacagctttggagtgatatctttaggagcctggaagccatttttgtaattttgttgtctatataaatgctacctttgcctggaggtagtgcgcctgtggctgtgtacatccagagggcaacagtaatagccaacaaccagacaaactagtgaagttaatctgtgagtgatgattttatgatacttatatgcaaattaaaggcagaagttagtttcttctcaagatgcctttttggctgaacattaccatttttctttccccagggtttgaaagaaaagggccttttttggatttaactatattctgtctgcattctattcttcatgcgtaggtttctactagaacctgtggaggggggacaccaaatttagattgagtcagtccatgctgataagaagcgtgaggaccttgttggacacagagcttctagatctttccacctgtagcctctaccctgttcctgcactttacctgaaactgtgcctctggtctttagaccagctgttggaacatatcactcacccactcctctgttatagcaaagggccagctgggatggtacacgctgtgtaatcagacaccttctcgacaagtacagctgatgtttctcactgttgccttaccattctctgagccatctttgatgttgatttgtnnnnnnnnnnnnnnnnnnnnnnnnnnncctagtagcaaaactcctgttaaactcagagcttgtatgtggtggtcattcaacatccttatttctagatttacacaaactgtaccaactgtaatctttttctggcacgcgtatgtggtcagatgcttcataaacgtgagccaacttgggttgtaaacattggcataatatacaaattggggaattttggatgactgcataatcctgtcattagagatttcataagacagaagataactgtttatttgtaatttaacacatttttagaaaagatgatctttaatttctttccctcagttgtgtatacagctatacaccatactaacaccgtactatgtcataggaacttaaagttagatgtatctaaatcccttcacttttctagacttctctgtgctcccacccctgaagtcttcaaatcatttttcatctgtgaagtcactgaggtactgggcttgactatagtggtaacagttaaggggagttgaactattgatcttccaagaagaaagggaccagatagtgttaagatgctgcagttgtgttactgtgaagaaaagattcgcttccactttcagcaggcnnnnnnnnnnnnnnnnnnnnnnnnnnnnnnntttcactttggtaaaaaagttgaaaaatctgaggagaacataattaccttcacaaattatttatagatacactgggtgagaagcttactgtagggcagtcaccc

SEQ ID NO: 181648 - DNA, 987 bp, Homo Sapiens
ttggctaacattagccatttcatggagaggctaaaacttatactccaaaaaatgtggaagcacattttaatgggagtaaaattaaaaaattttgagaaagggtaaaatcttatgaatatgcatcttcttagctttatcttccctttgataggtaggcacttatgctcttccatctgctccatgtcaaatagggctcagggaagccagtcatttccttagcgagatgattactcctttgccttgaaacatttattgggcccaccatgtatggatcagtgtgtggtagtgagtcatactcccaaatcagtgattcccaagtcttggctttgggaaccagtatgccttgtattctcttaaaaagcaacaataatttcttgaaacaaaattagttcagaattgatttaaaatatttcagtgtgccatatagctctgtcccttggtttggttggccttgttttttcctgtgaagaatgaaagggcaaaggtgataccaaaatgaaacagctttggagtgatatctttaggagcctggaagccatttttgtaattttgttgtctatataaatgctacctttgcctggaggtagtgcgcctgtggctgtgtacatccagagggcaacagtaatagccaacaaccagacaaactagtgaagttaatctgtgagtgatgattttatgatacttatatgcaaattaaaggcagaagttagtttcttctcaagatgcctttttggctgaacattaccatttttctttccccagggtttgaaagaaaagggccttttttggatttaactatattctgtctgcattctattcttcatgcgtagtttctactagaacctgtggaggggggacaccaaatttagattgagtcagtccatgctgataagaagcgtgaggaccttgttggacacagagcttctagatctttccacctgtagcctctaccctgttcctgcactttacctgaaactgtgcctctgg

SEQ ID NO: 181649 - DNA, 1470 bp, Homo Sapiens
  misc_feature (1128)..(1174): n is a, c, g, or t
  misc_feature (1189)..(1231): n is a, c, g, or t
agcaatgcttttccttataatagccaactttgtacaaaaaagttggcattaattagtcattgttaggaaagcagtaacaatgcaaacaccactcttctcttcacaaagatcaccttgagactgtgtctccattccacctgcctgagaagtgggagcatcagcctgttccaggctcttgggtagtagcatagccctttaaaaagagagagccattttccatgtgtttttggataagcacaatttgaaaatcatttcccaaatcctctttttgtttttgattctaaggtaaaattttccctaagccctcccaccatcccctcagccagtattagatgagatttgtatagcagcagaaactgacttataagtagagagctcttcagcaagactgagccttagctgttccatctctttgttcttctgttgctggagttgcaccccatttcttaactgcctctggcgttcttccatttcctccagctgttcctgcatgagatggccaagaacatttctaatgagccaaacaataaaaactcacattgtccactcttacttataaaacacttttttgttcattgtttaatcttgatagcagtattgaggctggtatttatatgataggttatgaaacaggttcaaagaagttgtgtcttggaaaaaaagtgacaatgcttttgaaaatgatgacgaaaaaggcatcttgtctgttaaccacagcttgctttaatagaatcctgggagggtgattgggactttttagtattacaaccttagtgtcattgaggaggattttggtctagttagtgggctgagtttcatatacctctccctccatgtgcaggtttgttaagataattggtagtttttaataatataaaatacttaagttgaaatacaaaagtgtggcaacaattattaaatattggctagaattctaggagagttacacaactagtggaagtccatgtttagaaaataaatggcttgtttaaggaaaagtttttgtgtccaaagctccttaaagtcagagagatttctacctggtacttaacatcatatggaaattgatgctttagtgagggtgttggctatcctattgtcaatttcctgcatccttttttcttcttnnnnnnnnnnnnnnnnnnnnnnnnnnnnnnnnnnnnnnnnnnnnnnntgttcctgggctcannnnnnnnnnnnnnnnnnnnnnnnnnnnnnnnnnnnnnnnnnngtgtgagccactgtgcccagcttatccttttttcattacacaaaaagactgaatttggttagttctaagttggaagataaagatggtatgcacaggaggcccttgggagccctcagataactttctcattcttccaaaatcaagctgggatgcatttctgtaaattttccctgcctagatgtatacctgaggaataagtaaggaagatgtcagcaagtcagcctctggtttacctgcta

SEQ ID NO: 181650 - DNA, 1004 bp, Homo Sapiens
ttggcccaaggtgctgggattacaggcgtgagccaccccgtccggcctgtttttaaggcattaattagtattgttaggaaagcagtaacaatgcaaacaccactcttctcttcacaaagatcaccttgagactgtgtctccattccacctgcctgagaagtgggagcatcagcctgttccaggctcttgggtagtagcatagccctttaaaaagagagagccattttccatgtgtttttggataagcacaatttgaaaatcatttcccaaatcctctttttgtttttgattctaaggtaaaattttccctaagccctcccaccatcccctcagccagtattagatgagatttgtatagcagcagaaactgacttataagtagagagctcttcagcaagactgagccttagctgttccatctctttgttcttctgttgctggagttgcaccccatttcttaactgcctctggcgttcttccatttcctccagctgttcctgcatgagatggccaagaacatttctaatgagccaaacaataaaaactcacattgtccactcttacttataaaacacttttttgttcattgtttaatcttgatagcagtattgaggctggtatttatatgataggttatgaaacaggttcaaagaagttgtgtcttggaaaaaaagtgacaatgcttttgaaaatgatgacgaaaaaggcatcttgtctgttaaccacagcttgctttaatagaatcctgggaggtgattgggactttttagtattacaaccttagtgtcattgaggagattttggtctagttagtgggctgagtttcatatacctctccctccatgtgcaggtttgttaagataattggtagtttttaataatataaaatacttaagttgaaatacaaaagtgtgggcaccaattattaaatattgggctagaattctaggagagttacacaactagtggaagtcccatgttaagaaaataatggcttgtttaag

SEQ ID NO: 181651 - DNA, 1105 bp, Homo Sapiens
ctgatctggtctccgtaaaggttttaatattgcccaacataatgctgtaatagcattaaaaaaagtatttgtgaactctgtttcttaggggcttgtacatctctctgctatggacatacataaaattaattgtaattatactcagctcaactgctacagttctgtctaggcagtggcttgggtttttatcgaacaacaacttacacacgtgactgtaatatgctgcaactgtgtgtactgaaaatatgtgaaaatggttgaatgtggactgtgtatatatgtatgtaaaaatttctgtgagatgctgctgtcgccacttaacattaaatatgttctagtggattttaatcctagtggccagttctatgatactgtatgtattatacagctgatgacaggagtaagactgtttagtgaatatctgttaaattttattgttgtggccagagataatttcagaataaaattttaatgtcctaccttacttctctcccctttctaactataatttaactcctgatctatttctggtattatcctttgtcaattagcctggagagggtttagaatgcaaaatggatagctctatatcagggtcttgagaagttaaaataattcattctactagtttgttcatagcaatactttattagttcaatataagtatgcagattccaagtggaaaaacaaaggttttagtaagtagttcttgcttttcccaggatattctattccttcacctgtcagatttttatgttaacttttttatatatagcctctgctgtgttctttattatgctagagcttcatatcttcttttattttaaccttcacaatgatagttaagctgggggagcagaacctgtcaattattccccaccagtcttcattcttttctctgcacaagttctggtaaattattctaatgtgctctaaccagttccacccaatgttttttaatgcttatgagtttgcagtttttgtacttggtggtctctgtggttcacatttttttgtgttgtagtgtctcctgcctcggttggctcagaaaataagcctaggaactgcattagctcatgatttgtcaagttcagttagtaccaag

SEQ ID NO: 181652 - DNA, 1337 bp, Homo Sapiens
  misc_feature (1237)..(1246): n is a, c, g, or t
ttggccccttaagacttatttagaagtaagtatatctttaaatttccaaatatttggggttttccaagtatcttttttattgatttttgttgtaatactgttattgcacataatatgattttgtataaatttgtacaagtttgttttaagacccagaatatgttctatcttggtgaatgtttcatatgcacttgaaaagaatgtatattctgctgttgttggatgcagtgttctctgaatgtcaattaggtgaagttggttgatggtgctgttcagattatctatatccttgctggttttctgtctacttgttctatcaattattgagagaaagtgttgaagtctccaacaataattgtggatttgtctgtttctctttcagatgtatccatttttgcctcatgtattttgaagtgctgttattaggtacatacacttttaggattgttatttcttctcaaagaattgactgttttatcattttgtaatgtccctctttgtgccagaaaatccttcttgttctgaagtcattgtctgaaattaatgtaatttctccagctttcttttggttaggttttcatggtatatctccatccctttacacatctctctacagagagtttccttatacctctctctacccacccccaccctgccaatttcccctaatagtaacatcttgcattagtatggtacgtgtgttacaactggtgaatgaatacattattattaactaaagtcacatcttacattaaggttcactctttgtgttgttcagttctatgggttttgtcaaatgcataaaaatccaccattactgtttcatacagaatagtcttaccgccctaaaaatcccctgtgctttgctttttcatccctttttcactctctcctggcaagtactgatctttttactatctctatagttttgccttttctagaatgtcatatagttggaatcatatagtatgtagccttttcagactggcttctttcaaatagcaatatgcgtttaagtttcctccatgtccatggcttgatagcccatttctttttattgctgaataatattccattgtggatcactttgtttatccattcacctattgaaggacatcttggttgcttccagtttggggccattatgaatgaagctgctataaacatcacgtgcaggcttttctgtagacataagttttcaactcattgtggttcatttccttttgaagtttgtaannnnnnnnnnactgtgaactccttttcagtgagagttattttccatggaaattctgtgtaccctaagctatgaaagcatcactgcagaactatttggattg

SEQ ID NO: 181653 - DNA, 1657 bp, Homo Sapiens
  misc_feature (874)..(1161): n is a, c, g, or t
ttgggataatgccctcccttaactcaaggccagcagcagatgtgttagaggggacccttgtgcctcgcagccctcatctcctaatggctgtggggtcactgtgtcgagttgtaatgcctaatgagctcctctaaaaacatcctgaaacttgtgtaaaaaaaacagcagactcccagtggaactcgccttcagatgcagcccagaataagagttctagaatgtgtgtgccatccttttgtctcaatctgcatgattgcaagtctcttcaacatgattgggtgcgtggagtgtctcggtcatgtgtcttcccctctgagcatgccttttgattcgcacctgtgtcacaattgtgccagcctgtgagatgtgtctgcctgtcaccagtatcggcacatttagttttccctttacgtgagttttggtaaaatagtgacaaaatgtaatgcagtgctcagtcacagaaaaatgtcaggcctacagaaatggagcatttggctggcgggtagcgtgatgaccataggctttatttggctggtgtggtaaacaagcagcagcttgtgcaggtgagaataaatggccatattgcatttcattttaaggactcccttaaaatgaaaatcttcgtgtgggacatgaacacaggctttcacgaaattgatcatctacactatatgtatgactgttgaaaggctgttgttcctcagaaattcttaaaatgttatgtaatgtacatgagtcccttcaggaagtcatcagctttgttcagtttcctcagattagatagtaaaactgagattatgaactataaagatgtgtgtaatttatctgtcagtgaacttgactttaataaaagctttttgaaaaagaactctgnnnnnnnnnnnnnnnnnnnnnnnnnnnnnnnnnnnnnnnnnnnnnnnnnnnnnnnnnnnnnnnnnnnnnnnnnnnnnnnnnnnnnnnnnnnnnnnnnnnnnnnnnnnnnnnnnnnnnnnnnnnnnnnnnnnnnnnnnnnnnnnnnnnnnnnnnnnnnnnnnnnnnnnnnnnnnnnnnnnnnnnnnnnnnnnnnnnnnnnnnnnnnnnnnnnnnnnnnnnnnnnnnnnnnnnnnnnnnnnnnnnnnnnnnnnnnnnnnnnnnnnnnnnnnnnnnnnnnnnnnnnnnnnngaactctcgatgtcactggctttccatgtaagcagagcacatcatgtgagccccattcgtggatgtcagtcagcagaacagaatcttggacctggagcttgtttgtcctgtgctagaggttggaggtgtctctgtctttctgttggttcctgtcagttcaggtcacttagagattctgttacatacaccagctctgacaggttgggggagatgatcaaccttccgcctgcgcctgttcccttccctgactcatgccaaagtatccctgagatctgcaagggaccgaggacagtactggctggtggtctgggtacaggccacagaaggcatctggaccccatgtgcatctggaccagtttggttggatccattcatggacacaaaacggatgtgaactcacagagctacattttctccctgcccctgttcagcacagtgaggtgtcagggaatgtagctgccagagttgactgtcccgttctttggtgtaatgcctg

SEQ ID NO: 181654 - DNA, 1259 bp, Homo Sapiens
ctttgtacaaaaaagttggcagattgataacacaagaatgtttgctggaagtgaaatactgaatagtggaagtctataattacccgttgagccagttcccagcagtgtccttaaacagtgtccacataagtgtattctcttgtaacttgtatagctgttatggctggtaagtcctctgatcatacctcactgtgattctcgacattgaaattaaaataattttaatgattgagagtttccaacccactttcccataggaagtgattaatcagtatctcatagtagacagtattactagtgaatgaagatgaatagagctgtgcctgtataatttgtgtacataacattgtttctcttggaaaatacttccaagttccagcacaggactccaggaatacacatttcttgagaaatgtttttatccaagagcagcttggataagacccgagacccctttgaagtaggagacttcgaagagtgtagagactactttgttagaaaggagaagcagaggtggaaagaacgtggccttggagtcaaacctggcatggaattccagccagcctcttacatgctgtgtgaccatcagcaaatctaatactctctgcgcctgtgttcctgcatatttagaacaagatggtcctattacagatttagagatgtcagaatttgtgttaatatatgtaaggcctacagaaggtactctgaataatcgctgttacatggtagagaatggatttttcattccctttcattctctgcattcttaatatggaaattactctgatgggagggatgtgcagagggagtgactgccttagaaatagatgtatgaatggcgtaacttctatcattagtcaggaatgacctccatttataacctgtgcgttcccttccatttgcagatgtaagcaataatatgatacagcaagtgttcactcctgtggcatacttttaacctttctaagcttgtcagtgggaacaaatgagaggggtagagttttttgcactaattctgctctttggacaagtgcctgacatctgcttcattgggttttagtttttactggtgttggtgcttttgtctgtcataccatagtatttcaaaacttcaattgtttctactctgcacgttaatatggctccaaaagggccccctcctttcccaggagtccctctcatgagcacccccatgggaggccctgtaccaccacccattcgatatggaccaccacctcagctctgcggaccttttgggc

SEQ ID NO: 181655 - DNA, 1852 bp, Homo Sapiens
ttggcaagattattagaattaacacaaaagatggcaatgctgcaagaagaacctgtgattgtaaaaccaatgccaggaaaaccaaatacacaaaaccctccacggagaggtaagggagctaccttgtaaagggcaacaatctgttttttgatgtaaaatgtatataagtgactttttgtttctgtgtgtaatggttatggtaccctaggaataatcccaagaactgaataaagaaaaaaaggctgtcttaaaatgctaacaagatgctgtcatctttaggtcctctgagccagaatggctcttttggcccatcccctgtgagtggtggagaatgctcccctccattgacagtggagccacccgtgagacctctctctgctactctcaatcgaagagatatgcctagaagtgaatttggatcagtggacgggcctctacctcatcctcgatggtcagctgaggcatctgggaaaccctctccttctgatccaggatctggtacagctaccatgatgaacagcagctcaagaggctcttcccctaccagggtactcgatgaaggcaaggtaaatgcacccattttgaataattagttatttcaggaacatttagctcttcctacaactctctctttgcctcatctcctatttgtgtgttctatctgtactatctcatttattttttaaaaaagcaaactgttctccaagagcctgaagtcccctcagttcccagcattacatctttggctgagcgtccagtagcagtaagtacttagaagtgtggactgaactgggctataagttgcatggcaatattgatcttacttttatccttgacttgggagtgttgctgaaatctgacggattcattggccttttctcctctctcctgtttggttagacatttaacctgtgtagagcatctgctgtaactgtaattaacttaaacaaaagtgaaaagtccccactcttgtgtgtctcagtgtttaatgctcttaggcaaagtaaattcattgtaaattgtgtaattcattattatgtcttcatttggaagtgtgctatttaagaatacctacagttgtatactaggcaaaccctattttgaatgatctgaaattacagattgataacagaagaatgtttgctggaagtgaaatactgaatagtggaagtctataattacccgttgagccagttcccagcagtgtccttaaacagtgtccacataagtgtattctcttgtaacttgtatagctgttatggctggtaagtcctctgatcatacctcactgtgattctcgacattgaaattaaaataattttaatgattgagagtttccaacccactttcccataggaagtgattaatcagtatctcatagtagacagtattactagtgaatgaagatgaatagagctgtgcctgtataatttgtgtacataacattgtttctcttggaaaatacttccaagttccagcacaggactccaggaatacacatttcttgagaaatgtttttatccaagagcagcttggataagacccgagacccctttgaagtaggagacttcgaagagtgtagagactactttgttagaaaggagaagcagaggtggaaagaacgcggccttggagtcaaacctggcatggaattccagccagcctcttacatgctgtgtgaccatcagcaaatctaatactctctgcgcctgtgttcctgcatatttagaacaagatggtcctattacagatttagagatgtcagaatttgtgttaatatatgtaagcctacagacgtactctgaataatcgctgttacatggtagagaatggattttcattccctttcatt

SEQ ID NO: 181656 - DNA, 1504 bp, Homo Sapiens
  misc_feature (590)..(598): n is a, c, g, or t
tgaaggacaggtggaacagaaagtgctgagcagagtgccagcacttagtaaatactcagttgaatggtcatgacttgtgttactgaacttaatcttggtaataaatgagtatgttcttgaaaggacaccagccttggctaacattcctttgcagaaccagacgtcctgggtcctctccagcatggcagccctctactggagggtgaaaggccaaggaaagaaggcaatcgactgcctccgccaggctctgcactatgcgccacaccagatgaaggatgtgcccctgattagcctggccaacatcttgcacaatgccaagctctggaatgacgccgtcatagtagccaccatggcagtagagatcgcaccacactttgctgtgaaccacttcactctgggcaatgtctacgtggcaatggaagaatttgaaaaagcactggtgtggtatgaatccacattgaagcttcagcccgagtttgtcccagccaagaaccgaatccagaccatccagtgtcacttaatgctgaacaagggacggcgctctccttagtgcacttcttccttctctctttctctttactcatgctctnnnnnnnnngaataagaaaagaaaccaatcattgtcagtatctactattaatgatgtgtgtgaaaataactaagacttataacaggacttttacatatgtgggaattggtttgtttttgtttttacgtttctcctttcccccaaccaacctcagaagaggcaccttcagaaacacacatttcttaaaaggaaagtgcagcttcaagatattgtgtaaatactgagccaagacatttctggagctgtgctctgtctccaaaaacctcaatgcctttagggcttttctcagtggtccagctagccttctctttggaggaggatgaagccgcattgcacattctctgcttcctgtcgtagcctctgttgtcaatggaaatgcggaagcccatctggtgcccgtcagtgagaagcaacgttctgcgctctctccgttagacctccatgctgtccccagtcttgtccattccatgctgctgtgttacaaactctcagaggtagtttgcaggggaggaaggggaatatgattttaaaaacaaaatatttacaacaacaaaaattcttaggatcacctgacctttgtaatgttatttatgttggggagggaggggggctgagaaggggaaatcagcagtgtgcaacatctttataatttgtactttaattacaaatcacaaggaaaccaataagttgaaatcctatataacaggtttatatatatagaatatgtatatttgaagccctctacagactgagtctatgttttactaattctttgttcactgtgttacccatcttggaataagttgtgaatgtcagctccctctctctgaggcctcccagacttaactcctcaggagggtaatgacccaaggttgagtgtttccatacaatgcttttactttgatcccaggagaa

SEQ ID NO: 181657 - DNA, 1477 bp, Homo Sapiens
ttggctaacttgtcccttgccaaagccaactggctgccctctggctgtggggaccgcaagaagggacccacaagctgctggcgaagtcgctgcttcaggtctggcttgagccactccacagccacctgctctccacagaggtgtgactgccctgtaggaaaaatgcaaagacaagggcaggtctaaaccctgggcccaagcctccaggtggtgagccctttggagctacacagtcctgttatttgtagccttcccatttcctggtagtgtgaccatgggtaagaaaagacaatgaagccttcagcctccattatttgcaaagggagtataacacactgctaccttacaagtttccttggagaagtactggttaattgcaggctttgtctgcctcataaccatcataatggctaatctttactgggaaaacttgctgtaagtcagtcagtgtgctaagtaccgtacacccattatgttacttaattctcataacagtctgaggaaacagattctatagtagtaaaaagctcagttggattcccttgagcaaatcaatttctctaacagtttcctcatagcttgagggtcctgtgcctattttgcggtgtgggggtgggggaaggttgagaattaagtcaggaggtaatgctcgggaagtgtcacaaatttaggtaagcggtggtggtagcaccattggaagttttaaaaatctgagatcaaatagtaaaaggttgcaaattctggcatgtttgactctaagatcttgtaactttaacagctatgctcagtataaagtgccgggcagaacgcgtttggccccaaccagcacccccgccccagcctaccttccaccagggcctttttggccatggcagcggcccggtgcgagctgaatttgagcagagcgatctgcccgggcgccggtccggggctgggcagcagccgcgcctcctgcaagccgggacccagcggctgcagcgcgagcagcagcgcgctgcgggtcagattcggcggcaggccgtcaacgctcagctcacacttctcggtgctgcggcacacgagcagcgggcaggacggccgcagcggatggttgtgcagcgtggcgatggcggcctgcgcgccgcgcctcgagctgtagcgggcataggcgaagccgcggttcaggccgctgaaggtcatcatcaggcggaactcgtagaggcggcccacgcgctggaacagcgggataagctggtgctcgtacacgtcctgaggcagccgcccgatgaacacctctgacccagctggcggcgggctgcccacccagcctgtgggaagagggtatgcaaggccaccgtcaggcgacgctttcgaattctgagcccacggacccagcgcgcgggggtgggaggcgatgtgaacaaaggtctgtgaaatgggtttacaccccgtaccctggggtggttggcataattaggtgactgcgctaacagggggg

SEQ ID NO: 181658 - DNA, 962 bp, Homo Sapiens
tttgtggagtgaatgtaagttggacacagaaaatccctcataatatcctcctgtttggttgtatagtggcctatgagcagattctgtggcttagactcccagtcccatggttcctggctcctgatgtcttttcccataacattttgacattccaacaaactctaattagctgaatgatcaatcacagaaatgtaaatgtagaagcgaatttacagatcatacagctccaccctgtaaataaaccaggatgattagggtattcacgatattgcagattggccagctcatgacttgccctttgttcctagctctgtgcctggcctcagaggagagccttggtgcacgtttgactttttaatctttatttgaacctgttacacaccgtcacccccactgctctgcttgccacagacatggaaggttcactaaggccttaaggcactcatgcaagctcacaagagaaagaaatctgtaaggcatgtagaatttggactcaatcatgttggtctttaatgtgcctagagcaatggaatgggcactttgggggcggtggaattcaagacgctctggctgaagattcagaagtatctggtaactctcttttccttctgggcatcctctcctctgttctaatcctcccttacactcattcctggtccattgtattctgaccacatccttaatcatggtcaaaactattgagtcctgggcacattggtcatgaaggaacaagaaggcaatgagagactctcatgccaaccactgccctgaaagccctgctgttcagacagcaaaggggccagcactggccaagctcttatgcttgctctgaaaccctcttgggaggagtcaatagggtctccttttgaaagtgtccctggccttttgagaaagcagtgtggtggagggagatggttctggcagggccgtgaatggttgttttctacttgggatttctttcc

SEQ ID NO: 181659 - DNA, 945 bp, Homo Sapiens
aactttgtacaaaaaagttggacttgcagcaagccaggaggggcatcagctcgcatccaggatgccctgagtacagtgttgcaatatgcagaggatgtactgtctggaaaggtgtcagctgacaatactgtgggccgcttcctgatgagcctggttaaccaagtaccgaaaatagttcccgatgactttgagaccatgctcaacagcaacatcaatgaccttttgatggtgacctacctggccaacctcacacagtcacagattgcactcaatgaaaaacttgtaaacctgtgaatggaccccaagcagtacacttgctggtctaggtattaaccccaggactcagaagtgaaggagaaatgggttttttgtggtcttgagtcacactgagatagtcagttgtgtgtgactctaataaacggagcctaccttttgtaaattaatttcatcttatgtgagtttattgccgggtggaagggaggaaaatgttttagatcacacagaaactaggaagtgaatattgtaggtagagaagttggttatgtgtttggcatgttactgttttaccaaactgttcttttggttttcaatatggaaaggtgtccattggcaaaacaaccttttcttgaggattcatgtgatttctacaggaaatgaaaataagaatccatggagaaaaaatagctaagaaaattggatgcttaatctgaactaaaagagtagagtgtgtagtcactatcttaaaatacattaatagtaagatggagctctttgccactttggttcggggaggcagaattaagatctgtgggttaaagattaaagaggtttccccaaaacttcagaaaattcttaggtgctatctgtaactcgaggatagagccttgagtatactgaggtctgccagtggctcaatttaaccaaagactaaatggaattcccaaa

SEQ ID NO: 181660 - DNA, 1143 bp, Homo Sapiens
  misc_feature (189)..(216): n is a, c, g, or t
actttgtacaaaaaagttggtttagttttatttgagaaattaagaccagaagttttgctcatgtctttttcacttggaaatctgacttagtacctagttaatttgtctctctcccatcattttaaggcgttcgcttctgttaatcacagatgatctgtccttgtgttgtgctgcttgactaaaagcacnnnnnnnnnnnnnnnnnnnnnnnnnnnnaatgataggatacagggtggcttttcagtctagtaaacatgaggaggggagagattgtgggtgggtgtgggtgtgtccgcatgtcccaaatacagcacatgcccatttttttatggtacgaggttagggcttattaataaatgtatactagatcttgaagtgtaagtctaagtctgaacattttaaacaagttggactttatggctttttcaagttccatcaagtagatactagtcttaggctggtaggtgattaacaacatcatttggagtacagtgtttgtaccactagcattcttatgtctgtacttgaacgtgtagttagcatttaagttatgttcactcttgtagcattcaggtcttaccatctggtttcaaatgcgagagcttatatgaacattgttttgaaagcatgaatgatatggcaatattttatgtcttgataaggagagttttgtgacatatacaaatctgctgttgatgatgaaagtttacaggtggatcagagtatgctggaactcagtgtgcataaaatttcagtcagtgaatatcactgaacgtcatatactacttggtatgtgactttggtttgtgttaagaaagcttgtatataatattttttgccatagtaagtgagaaattgtccttaatcatgcctgtttgatggtactaggaaagaaaggggtagagattaattcttgcacagtataagcaacagtgcaacaaactatgccatttaccttttacctcttacttgaaggcagaatcgcaaaacgtttgaaatggcttttctaaactactctactctggtgagagctcatttaccacaagaagccttataaaaaagtatattttgtaataaccccgtacatactgtacctaacaaaacatgactcgtattagctctataaaatatttgtggcttcga

SEQ ID NO: 181661 - DNA, 648 bp, Homo Sapiens
ttggcgcggtctccgggagccagcggggaagaaagaaaccgagcgggcggaaggcgccctccccgccgcctgggcccgggcaccgggtgccgggcccggggtccttcccgcctcccgcggccgccggccgctttgtttcccctgcctctgcgcttcgggcgactcgagagggtctcccgccggggttgcgaaggggacgcggcggcagaagggcggccgaccccgccgggactcacagggacccaggagtccggccgccgggagggccgcgtgaggagagcgaagagggagcccgagctctgcggccccgggtggcgggccgggggcgcccgtgagcagagacctccccgtcgacggggggcgatgttcccctcacccgtgggctcttcgggcagccagggcatcccgccgctgggacctggacccgctcagtgggcacccctcaggctgctccatggagaccctgtgccctgcgccccgcctggcagtgccggcgtccccgcgagggtcgccctgctcccccacgccccggaagccgtgtcgggggacccaggaattctctccgctgtgcctgcgtgccctcgccttctgcgcccttgccaagccccgggcgtcctctctgggcccggggcctggggagctggcggc

SEQ ID NO: 181662 - DNA, 1069 bp, Homo Sapiens
ttggcccatacttaccttgagtctgagaaaacctttggtagaagctcctgtcttatcaggccccaaaaaacctgttctgcagtgagagatttaattgtgggtgagaatctatgtacatataatatgtatgagaagactgttctcatagttagttgactcatatggtagagaggactttacatgaaatcagtatgaaaatagttttttagatacccagaagcttgttctgggagaagctagggtgggtcagagtagacctgatgggtaactcaggtaaagatgcttttcttttatctgaactacttaatgattgctttacttttactttttaaaaaattcagaaatccaataaaggaaaggacggtaaccttatgatagaaggtgtggcatgtgttactgttgggggaaaggagtatattgactttgccttggttgatatttttatgcttgtctaggatgggactagagtgttgatagtaacatggcagccttttgctggcagtgaaatgaacttaagaagctagggagtagctatcctagatcaaaactctcctaatagtttttcctttgcaggaccaatcttataaagaaacagcatactcagctttttacttagtgtcagttgaggcatactctcaaaagttttttcccctaaaatatctttcaagttattactggtatttgaaatttcaagtttagaaattcatttctttttaactcaaagtgcaaatttcatataatgattatgatggttttagtgtccatatttttgtggcttcacttatcatctctttcagcagtagctacccacagtcagctcctagtaaaatggctacaggaaaactgaaagaaaagtttaagcctgagtaggcatagagtaaaaaatgcataatgatgcattattaatataagagtaaggctttttttattttgagtatcctaactccaaacctagtgttcttttcactccattatcctgctgtttatagcaaatcaagacccataatgatacgtctttcatttatttcagttctgccagggaaagagaaaaataccttttaatcccagg

SEQ ID NO: 181663 - DNA, 1157 bp, Homo Sapiens
ttggctttctcatcctttccactaaaaatattttttgtcatgttttatagaatatatattttcagctatctatctgaaaaattctagttctgatatagcttttacatatgaagtattcagtgcctccttttgaaaaataaatacaactatattttgaaagaaattctgtgagttttcacagagaaccatttatagtattatattgaaattggtttttaaaaaccttatctaattattgaattggtcatagttaactttggattcatgtgatatctctccgtgtgatagtctgtttagaagtaaagtatcaagtgacaaataattagagttttgaaaacttgaggggctatactttgatgatagatgtggaaaaatatcttttaagattaatcttaatatgtaatagtcataggaaatgacaagtagaggtgagagatcagatttgcagtgactacatttgatactattacctttggtattagggaaaagtgaatttaagattttgaaatgtttttaaaaacttgataggagatagtaacaattacttgtgaatgtttctcttataagagaatagctgccagggtcaaagtaacaagtttgggattatgcattttttgaggtaagatatattttactttaacataatgagtttgatgtgtgacagtagaatataaaagtgaaacatgtagcagctcaaatataaacatgaagaatcaggttctcttagtagttgactataagctcattaagtaaaagtttaaattagcaaacttgttttcctcataaagaaatcaggattgcctttctctttcctagatctgaactattcaattatttttctttttatgctatagttcacaaagatgtccaaaactaatggcttatcagaagatttgatatggcactgtaaaacactgatccaagaaagagatgtagttataaggcttatgaacaaatgtgaagacatttcaaataaattgaccaaacaagttaccatgcttactggaaatggaggtggatggaacatagaacaaccttccattctaaaccaaagtttgtcactcaagccctatcagaagttggtttgaattggctggcattggtacataaacatggacttaatggcattttggcagatgaaatgggcctaggaaaaa
